(19) United States
(12) Patent Application Publication
(10) Pub. No.: US 2004/0234960 A1
(43) Pub. Date: Nov. 25, 2004

(54) Method for determining the degree of methylation of defined cytosines in genomic dna in the sequence context 5'-cpg-3'

(76) Inventors: Alexander Olek, Berlin (DE); Christian Piepenbrock, Berlin (DE); Kurt Berlin, Stahnsdorf (DE); David Gutig, Berlin (DE)

Correspondence Address: KRIEGSMAN & KRIEGSMAN, 665 FRANKLIN STREET, FRAMINGHAM, MA, 01702, US

(21) Appl. No.: 10/363,345

(22) PCT Filed: Sep. 1, 2001
(86) PCT No.: PCT/EP01/10074

(30) Foreign Application Priority Data
Sep. 1, 2000 (DE) 100 43 826.1
Sep. 5, 2000 (DE) 100 44 543.8

(51) Int. Cl. C12Q 1/68; C12P 19/34

(52) U.S. Cl. 435/6; 435/91.2

(57) ABSTRACT

A method is described for the detection of the degree of methylation of a specific cytosine in the sequence context 5′-CpG-3′ of a genomic DNA sample. In the first step, the genomic DNA is chemically treated in such a way that the cytosine bases are converted to uracil, but not the 5-methylcytosine bases. Then segments of the genomic DNA which contain the said specific cytosine are amplified, whereby the amplified products are given a detectable label and in the following steps the extent of hybridization of the amplified products on two classes of oligonucleotides is determined by detection of the label of the amplified products, and a conclusion is made on the extent of methylation of said specific cytosine in the genomic DNA sample from the ratio of the labels detected on the two classes of oligonucleotides as a consequence of the hybridization.

[0001] The invention concerns a method for the detection of the degree of methylation of a specific cytosine in the sequence context 5′-CpG-3′ of a genomic DNA sample.

[0002] The levels of observation that have been well studied in molecular biology according to developments in methods in recent years include the genes themselves, the transcription of these genes into RNA and the translation to proteins therefrom. During the course of development of an individual, which gene is turned on and how the activation and inhibition of certain genes in certain cells and tissues are controlled can be correlated with the extent and nature of the methylation of the genes or of the genome. In this regard, pathogenic states are also expressed by a modified methylation pattern of individual genes or of the genome.

[0003] The present invention describes a method with which many cytosine bases in a given DNA sample can be investigated simultaneously for the presence of a methyl group at position 5 by means of hybridization. It also describes nucleic acids, oligonucleotides and PNA oligomers which are useful in order to employ the method for the diagnosis of existing diseases or of predisposition for [certain] diseases.

[0004] 5-Methylcytosine is the most frequent covalently modified base in the DNA of eukaryotic cells. For example, it plays a role in the regulation of transcription, in genetic imprinting and in tumorigenesis. The identification of 5-methylcytosine as a component of genetic information is thus of considerable interest. 5-Methylcytosine positions, however, cannot be identified by sequencing, since 5-methylcytosine has the same base-pairing behavior as cytosine. In addition, in the case of a PCR amplification, the epigenetic information which is borne by the 5-methylcytosines is completely lost.

[0005] The methylation of CpG islands is often equated with transcription inactivity. Although there is clear evidence that CpG islands are to be found in promoters of genes, not all CpG islands and methylation sites are localized in known promoters. In various tissue-specific and imprinting genes, the CpG islands are localized at considerable distance downstream of the start of transcription, and also many genes possess multiple promoters. Methylation of CpG dinucleotides has been detected as a causal factor for a number of diseases. In contrast to classical mutations, DNA methylation involves a mechanism, which describes a substitution on the base without modifying the coding function of a gene. This interplay between epigenetic modification and classical mutations plays an important role in tumorigenesis. For example, focal hypermethylation and generalized genomic demethylation are features of many different tumor types. It is assumed that tumorigenesis and tumor progression are caused, first of all, by hypermethylation of induced mutation events, and secondly, by the turning off of genes which control cellular proliferation, and/or the induced reactivation of genes, which are [normally] used only for embryological development, via demethylation.

[0006] In hereditable non-polyposis colorectal cancer, e.g., the majority of mutation-negative cases of colon cancer are based rather on the hypermethylation of the hMLH1 promoter and the associated non-expression of hMLH1, a repair gene for erroneous base pairings (Bevilacqua R A, Simpson A J, Methylation of the hMLH1 promoter but no hMLH1 mutations in sporadic gastric carcinomas with high-level microsatellite instability. Int J Cancer. 2000 Jul. 15;87(2):200-3). In the pathogenesis of lung cancer, the loss of expression is correlated with the methylation of CpG islands in the promoter sequence of an RAS effector homolog. (Dammann R, Li C, Yoon J H, Chin P L, Bates S, Pfeifer G P, Nucleotide. Epigenetic inactivation of a RAS association domain family protein from the lung tumour suppressor locus 3p21.3. Nat Genet. July 2000;25(3):315-9). An epigenetic inactivation of the LKB1 tumor supressor gene, including the hypermethylation of the promoter, is associated with the Peutz-Jeghers syndrome (Esteller M, Avizienyte E, Corn P G, Lothe R A, Baylin S B, Aaltonen L A, Herman J G, Epigenetic inactivation of LKB1 in primary tumors associated with the Peutz-Jeghers syndrome. Oncogene. 2000 Jan. 6;19(1):164-8).

[0007] A plurality of diseases, which are associated with methylation, have in their etiology a close connection with the tumor suppressor genes p16 or p15. Thus a relationship between Mycosis fungoides and hypermethylation of the p16(INK4a) gene is assumed (Navas I C, Ortiz-Romero P L, Villuendas R, Martinez P, Garcia C, Gomez E, Rodriguez J L, Garcia D, Vanaclocha F, Iglesias L, Piris M A, Algara P, p16(INK4a) gene alterations are frequent in lesions of mycosis fungoides. Am J Pathol. May 2000; 156(5):1565-72). Also, there is a strong correlation between the turning off of the transcription of the p16 gene in gastric carcinoma and the de novo methylation of a few specific CpG sites (Song S H, Jong H S, Choi H H, Kang S H, Ryu M H, Kim N K, Kim W H, Bang Y J, Methylation of specific CpG sites in the promoter region could significantly down-regulate p16(INK4a) expression in gastric adenocarcinoma. Int J Cancer. 2000 Jul. 15;87(2):236-40). The pathogenesis of cholangiocarcinoma, which is associated with primary sclerosing cholangitis, has been related to the inactivation of the p16 tumor suppressor gene, which is again dependent on the methylation of the p16 promoter (Ahrendt S A, Eisenberger C F, Yip L, Rashid A, Chow J T, Pitt H A, Sidransky D, Chromosome 9p21 loss and p16 inactivation in primary sclerosing cholangitis-associated cholangiocarcinoma. J Surg Res. 1999 Jun. 1;84(1):88-93). The inactivation of the p16 gene by hypermethylation plays a role in the genesis of leukemia and in the progression of acute lymphoblastic leukemia (Nakamura M, Sugita K, Inukai T, Goi K, Iijima K, Tezuka T, Kojika S, Shiraishi K, Miyamoto N, Karakida N, Kagami K, O-Koyama T, Mori T, Nakazawa S, p16/MTS1/INK4A gene is frequently inactivated by hypermethylation in childhood acute lymphoblastic leukemia with 11 q23 translocation. Leukemia. June 1999;13(6):884-90). In addition, it is postulated that the hypermethylation of the p16 and p15 genes plays a decisive role in the tumorigenesis of multiple myeloma (Ng M H, Wong I H, Lo K W, DNA methylation changes and multiple myeloma. Leuk Lymphoma. August 1999;34(5-6):463-72). The VHL gene, which is inactivated by methylation, appears to participate in predisposition to renal carcinoma (Glavac D, Ravnik-Glavac M, Ovcak Z, Masera A, Genetic changes in the origin and development of renal cell carcinoma (RCC). Pflugers Arch. 1996;431(6 Suppl 2):R193-4). A divergent methylation of the 5′-CpG island may participate in nasopharyngeal carcinoma, possibly by the inactivation of transcription of the p16 gene (Lo K W, Cheung S T, Leung S F, van Hasselt A, Tsang Y S, Mak K F, Chung Y F, Woo J K, Lee J C, Huang D P, Hypermethylation of the p16 gene in nasopharyngeal carcinoma. Cancer Res. 1996 Jun. 15;56(12):2721-5). An inactivation of the p16 protein was detected in liver cell carcinoma. Promoter hypermethylation and homozygous deletions are the most frequent mechanisms here (Jin M, Piao Z, Kim N G, Park C, Shin E C, Park J H, Jung H J, Kim C G, Kim H, p16 is a major inactivation target in hepatocellular carcinoma. Cancer. 2000 Jul. 1;89(1):60-8). DNA methylation as a control of gene expression was detected for the BRCA1 gene for breast cancer (Magdinier F, Billard L M, Wittmann G, Frappart L, Benchaib M, Lenoir G M, Guerin J F, Dante R, Regional methylation of the 5′ end CpG island of BRCA1 is associated with reduced gene expression in human somatic cells FASEB J. August 2000; 14(11):1585-94). A correlation between methylation and non-Hodgkin's lymphoma is also assumed (Martinez-Delgado B, Richart A, Garcia M J, Robledo M, Osorio A, Cebrian A, Rivas C, Benitez J, Hypermethylation of P16ink4a and P15ink4b genes as a marker of disease in the follow-up of non-Hodgkin's lymphomas. Br J Haematol. April 2000;109(1):97-103). CpG methylation also brings about the progression of T-cell leukemia, which is related to a decreased expression of the CDKN2A gene (Nosaka K, Maeda M, Tamiya S, Sakai T, Mitsuya H, Matsuoka M, Increasing methylation of the CDKN2A gene is associated with the progression of adult T-cell leukemia. Cancer Res. 2000 Feb. 15;60(4):1043-8). An increased methylation of the CpG islands was established in bladder cancer (Salem C, Liang G, Tsai Y C, Coulter J, Knowles M A, Feng A C, Groshen S, Nichols P W, Jones P A, Progressive increases in de novo methylation of CpG islands in bladder cancer. Cancer Res. 2000 May 1;60(9):2473-6). Transcription inactivation by esophageal squamous cell carcinomas has been related to the methylation of the FHIT gene, which is associated with the progression of the disease (Shimada Y, Sato F, Watanabe G, Yamasaki S, Kato M, Maeda M, Imamura M, Loss of fragile histidine triad gene expression is associated with progression of esophageal squamous cell carcinoma, but not with the patient's prognosis and smoking history. Cancer. 2000 Jul. 1;89(1):5-11). Neutral endopeptidase 24.11 (NEP) inactivates the increase of neuropeptides which participate in the growth of androgen-independent prostate cancer. A loss of NEP expression by hypermethylation of the NEP promotors may contribute to the development of neuropeptide-stimulated, androgen-independent prostate cancer (Usmani B A, Shen R, Janeczko M, Papandreou C N, Lee W H, Nelson W G, Nelson J B, Nanus D M, Methylation of the neutral endopeptidase gene promoter in human prostate cancers. Clin Cancer Res. May 2000;6(5):1664-70). Adrenocortical tumors in adults display structural abnormalities in the tumor DNA. Among other things, these abnormalities contain an overexpression of the IGF2 gene in correlation with a demethylation of the DNA at this locus (Wilkin F, Gagne N, Paquette J, Oligny L L, Deal C, Pediatric adrenocortical tumors: molecular events leading to insulin-like growth factor II gene overexpression. J Clin Endocrinol Metab. May 2000; 85(5):2048-56. Review). It is assumed that DNA methylations in several exons in the retinoblastoma gene contribute to the disease (Mancini D, Singh S, Ainsworth P, Rodenhiser D, Constitutively methylated CpG dinucleotides as mutation hot spots in the retinoblastoma gene (RB1). Am J Hum Genet. July 1997; 61(1):80-7). In chronic myeloid leukemia, a relationship is suspected between the deregulation of the p53 gene and a change in the methylation pattern with progression of the disease (Guinn B A, Mills K I, p53 mutations, methylation and genomic instability in the progression of chronic myeloid leukaemia. Leuk Lymphoma. July 1997;26(34):211-26). A connection with methylation has also been detected for acute myeloid leukemia (Melki J R, Vincent P C, Clark S J. Concurrent DNA hypermethylation of multiple genes in acute myeloid leukemia. Cancer Res. 1999 Aug. 1;59(15):3730-40). A tumor-specific methylation site in the Wilms tumor suppressor gene has been identified (Kleymenova E V, Yuan X, LaBate M E, Walker C L, Identification of a tumor-specific methylation site in the Wilms tumor suppressor gene. Oncogene. 1998 Feb. 12;16(6):713-20). In Burkitt's lymphoma, several promotors have a complete CpG methylation (Tao Q, Robertson K D, Manns A, Hildesheim A, Ambinder R F, Epstein-Barr virus (EBV) in endemic Burkitt's lymphoma: molecular analysis of primary tumor tissue. Blood. 1998 Feb. 15;91(4):1373-81). It is assumed that DNA methylation plays a role in thyroid carcinoma (Venkataraman G M, Yatin M, Marcinek R, Ain K B, Restoration of iodide uptake in dedifferentiated thyroid carcinoma: relationship to human Na+/I-symporter gene methylation status. J Clin Endocrinol Metab. July 1999; 84(7):2449-57).

[0008] Not only are many cancer diseases associated with methylation, but there are also many other diseases that are related to methylation. Investigations of inflammatory arthritis have indicated that this disease is associated with a hypomethylation of genomic DNA (Kim Y I, Logan J W, Mason J B, Roubenoff R, DNA hypomethylation in inflammatory arthritis: reversal with methotrexate. J Lab Clin Med. August 1996;128(2):165-72). A methylation-regulated expression has been detected for the ICF syndrome (Kondo T, Bobek M P, Kuick R, Lamb B, Zhu X, Narayan A, Bourc'his D, Viegas-Pequignot E, Ehrlich M, Hanash S M, Whole-genome methylation scan in ICF syndrome: hypomethylation of nonsatellite DNA repeats D4Z4 and NBL2). The participation of methylation is suspected in systemic lupus erythematosus (Vallin H, Perers A, Alm G V, Ronnblom L, Anti-double-stranded DNA antibodies and immunostimulatory plasmid DNA in combination mimic the endogenous IFN-alpha inducer in systemic lupus erythematosus. J Immunol. December 1999;163(11):6306-13); and there may also be a relationship between the Duchenne muscular dystrophy gene and a CpG-rich island (Banerjee S, Singh P B, Rasberry C, Cattanach B M, Embryonic inheritance of the chromatin organisation of the imprinted H19 domain in mouse spermatozoa. Mech Dev. February 2000;90(2):217-26; Burmeister M, Lehrach H, Long-range restriction map around the Duchenne muscular dystrophy gene. Nature. 1986 Dec. 11-17;324(6097):582-5). An epigenetic effect, which involves the hypomethylation of the amyloid precursor protein [gene], which is related to the development of the disease, is suspected in Alzheimer's disease (West R L, Lee J M, Maroun L E, Hypomethylation of the amyloid precursor protein gene in the brain of an Alzheimer's disease patient. J Mol Neurosci. 1995;6(2):141-6). The methylation state also plays an important role at the chromosomal level. For example, in mental retardation syndromes, which are coupled with the fragility of the X chromosome, the degree of chromosomal fragility is determined by the methylation (de Muniain A L, Cobo A M, Poza J J, Saenz A, [Diseases due to instability of DNA]. Neurologia. December 1995;10 Suppl 1:12-9).

[0009] A relatively new method that in the meantime has become the most widely used method for investigating DNA for 5-methylcytosine is based on the specific reaction of bisulfite with cytosine, which, after subsequent alkaline hydrolysis, is then converted to uracil, which corresponds in its base-pairing behavior to thymidine. In contrast, 5-methylcytosine is not modified under these conditions. Thus, the original DNA is converted so that methylcytosine, which originally cannot be distinguished from cytosine by its hybridization behavior, can now be detected by “standard” molecular biology techniques as the only remaining cytosine, for example, by amplification and hybridization or sequencing. All of these techniques are based on base pairing, which is now fully utilized. The prior art, which concerns sensitivity, is defined by a method that incorporates the DNA to be investigated in an agarose matrix, so that the diffusion and renaturation of the DNA is prevented (bisulfite reacts only on single-stranded DNA) and all precipitation and purification steps are replaced by rapid dialysis. (Olek, A. et al., Nucl. Acids Res. 1996, 24, 5064-5066). Individual cells can be investigated by this method, which illustrates the potential of the method. Of course, up until now, only individual regions of up to approximately 3000 base pairs long have been investigated; a global investigation of cells for thousands of possible methylation analyses is not possible. Of course, this method also cannot reliably analyze very small fragments of small quantities of sample. These are lost despite the protection from diffusion through the matrix.

[0010] An overview of other known possibilities for detecting 5-methylcytosines can be derived from the following review article: Rein, T., DePamphilis, M. L., Zorbas, H., Nucleic Acids Res. 1998, 26, 2255.

[0011] The bisulfite technique has been previously applied only in research, with a few exceptions (e.g., Zechnigk, M. et al., Eur. J. Hum. Gen. 1997, 5, 94-98). However, short, specific segments of a known gene have always been amplified after a bisulfite treatment, and either completely sequenced (Olek, A. and Walter, J., Nat. Genet. 1997, 17, 275-276) or individual cytosine positions have been detected by a primer extension reaction (Gonzalgo, M. L. and Jones, P. A., Nucl. Acids Res. 1997, 25, 2529-2531, WO-Patent 95-00669) or an enzyme step (Xiong, Z. and Laird, P. W., Nucl. Acids. Res. 1997, 25, 2532-2534). Detection by hybridization has also been described (Olek et al., WO-A 99/28,498).

[0012] Other publications which are concerned with the application of the bisulfite technique for the detection of methylation in the case of individual genes are: Xiong, Z. and Laird, P. W. (1997), Nucl. Acids Res. 25, 2532; Gonzalgo, M. L. and Jones, P. A. (1997), Nucl. Acids Res. 25, 2529; Grigg, S. and Clark, S. (1994), Bioassays 16, 431; Zeschnik, M. et al. (1997), Human Molecular Genetics 6, 387; Teil, R. et al. (1994), Nucl. Acids Res. 22, 695; Martin, V. et al. (1995), Gene 157, 261; WO-A 97/46,705, WO-A 95/15,373 and WO-A 95/45,560.

[0013] A review of the prior art in oligomer array production can be taken from the special edition of Nature Genetics that appeared in January 1999 (Nature Genetics Supplement, Volume 21, January 1999) and the literature cited therein.

[0014] Probes with multiple fluorescent labels have been used for scanning an immobilized DNA array. Particularly suitable for fluorescent labels is the simple introduction of Cy3 and Cy5 dyes at the 5′-OH of the respective probe. The fluorescence of the hybridized probes is detected, for example, by means of a confocal microscope. The dyes Cy3 and Cy5, among many others, are commercially available.

[0015] Matrix-assisted laser desorptions/ionization mass spectrometry (MALDI-TOF) is a very powerful development for the analysis of biomolecules (Karas, M. and Hillenkamp, F. (1988), Laser desorption ionization of proteins with molecular masses exceeding 10,000 daltons. Anal. Chem. 60: 2299-2301). An analyte is embedded in a light-absorbing matrix. The matrix is vaporized by a short laser pulse and the analyte molecule is transported unfragmented into the gaseous phase. The analyte is ionized by collisions with matrix molecules. An applied voltage accelerates the ions in a field-free flight tube. Ions are accelerated to varying degrees based on their different masses. Smaller ions reach the detector sooner than large ions.

[0016] MALDI-TOF spectrometry is excellently suitable for the analysis of peptides and proteins. The analysis of nucleic acids is somewhat more difficult (Gut, I. G. and Beck, S. (1995)), DNA and Matrix Assisted Laser Desorption Ionization Mass Spectrometry. Molecular Biology: Current Innovations and Future Trends 1: 147-157). For nucleic acids, the sensitivity is approximately 100 times poorer than for peptides and decreases overproportionally with increasing fragment size. For nucleic acids, which have a backbone with a multiple negative charge, the ionization process via the matrix is basically less efficient. In MALDI-TOF spectrometry, the choice of matrix plays an imminently important role. Several very powerful matrices, which produce a very fine crystallization, have been found for the desorption of peptides. In the meantime, several effective matrices have been developed for DNA, but the difference in sensitivity has not been reduced thereby. The difference in sensitivity can be reduced by modifying the DNA chemically in such a way that it resembles a peptide. Phosphorothioate nucleic acids, in which the usual phosphates of the backbone are substituted by thiophosphates, can be converted by simple alkylation chemistry to a charge-neutral DNA (Gut, I. G. und Beck, S. (1995), A procedure for selective DNA alkylation and detection by mass spectrometry. Nucleic Acids Res. 23: 1367-1373). The coupling of a charge tag to this modified DNA results in an increase in sensitivity of the same order of magnitude as is found for peptides. Another advantage of charge tagging is the increased stability of the analysis in the presence of impurities, which make the detection of unmodified substrates very difficult.

[0017] Genomic DNA is obtained from DNA of cells, tissue or other test samples by standard methods. This standard methodology is found in references such as Fritsch and Maniatis, eds., Molecular Cloning: A Laboratory Manual, 1989.

[0018] The present invention will present a particularly efficient and reliable method, which permits investigating many cytosine bases in a given DNA sample simultaneously for the presence of a methyl group at position 5 by means of hybridization. Oligonucleotides and PNA oligomers are also presented for this purpose, which are particularly suitable for using the method for the diagnosis of existing diseases and of predisposition for diseases by analysis of a set of genetic and/or epigenetic parameters.

[0019] Genetic parameters in the sense of this invention are mutations and polymorphisms of the claimed nucleic acids (Seq. ID 1 to Seq. ID 40712) and additional sequences necessary for their regulation. Particularly designated as mutations are insertions, deletions, point mutations, inversions and polymorphisms and particularly preferred are SNPs (single nucleotide polymorphisms). Polymorphisms, however, can also be insertions, deletions or inversions.

[0020] Epigenetic parameters in the sense of this invention are particularly cytosine methylations and other chemical modifications of DNA bases of the claimed nucleic acids (Seq. ID 1 to Seq. ID 40712) and additional sequences necessary for their regulation. Other epigenetic parameters, for example, are the acetylation of histones, although this cannot be directly analyzed with the described method; however, it is correlated in turn with DNA methylation.

[0021] The present method serves for the detection of the degree of methylation of at least one specific cytosine in the sequence context 5′-CpG-3′ of a genomic DNA sample. The method is particularly preferably used for the simultaneous detection of many different methylation positions.

[0022] The object is solved according to the invention by a method for the detection of the degree of methylation of a specific cytosine in the sequence context 5′-CpG-3′ of a genomic DNA sample, which is characterized in that

[0023] a) the genomic DNA is treated, whereby the cytosine bases are converted to uracil, but not the 5-methylcytosine bases;

[0024] b) segments of the genomic DNA, which contain said specific cytosine, are amplified, whereby the amplified products are given a detectable label;

[0025] c) the amplified products are hybridized to two classes of oligonucleotides and/or PNA oligomers, each of which [class] has at least one member;

[0026] d) the extent of hybridization of the amplified products on the two classes of oligonucleotides is determined by detection of the label of the amplified products;

[0027] e) a conclusion is made on the extent of methylation of said specific cytosine in the genomic DNA sample from the ratio of the labels detected on the two classes of oligonucleotides as a consequence of the hybridization.

[0028] A method is particularly preferred in which a hybridization of the amplified products is conducted in step c) on two classes of oligomers (oligonucleotides and/or PNA oligomers), each of which [class] has at least one member, whereby the oligomers of the first class preferably hybridize to the sequence which arises from the chemical treatment of the genomic DNA, if said specific cytosine was present in the methylated state in the genomic DNA, and whereby the oligomers of the second class preferably hybridize to the sequence which arises from the chemical treatment of the genomic DNA if said specific cytosine was present in the unmethylated state in the genomic DNA. One of these two classes of oligomers, for example, can be formed by oligonucleotides which contain a CG in the middle, and the other class can be formed by oligonucleotides which have a TG (or a CA, in the counterstrand) in the middle. The remaining segments of the oligomer sequences should preferably be the same in the two classes. In this case, oligonucleotides of the first class hybridize to the sequence (around the specific cytosine to be investigated) if it was present in the methylated state before bisulfite conversion, and vice versa, those of the second class would hybridize to the sequence if it was present in the unmethylated state before the bisulfite conversion.

[0029] A method is also particularly preferred in which a hybridization of the amplified products is conducted in step c) on two classes of oligomers (oligonucleotides and/or PNA oligomers), each of which [class] has at least one member, whereby the oligomers of the first class preferably hybridize to the sequence which arises after the chemical treatment of the genomic DNA if said specific cytosine was present in the methylated state in the genomic DNA and less preferably hybridize to the sequence which arises after the chemical treatment of the genomic DNA if said specific cytosine was present in the unmethylated state in the genomic DNA, and whereby the oligomers of the second class hybridize to the amplified product to be investigated essentially independently of the degree of methylation of said specific cytosine in the genomic DNA.

[0030] Correspondingly, a method is also particularly preferred in which a hybridization of the amplified products is conducted in step c) on two classes of oligomers (oligonucleotides and/or PNA oligomers), each of which [class] has at least one member, whereby the oligomers of the first class preferably hybridize to the sequence which arises after the chemical treatment of the genomic DNA if said specific cytosine was present in the unmethylated state in the genomic DNA and less preferably hybridize to the sequence which arises after the chemical treatment of the genomic DNA if said specific cytosine was present in the methylated state in the genomic DNA, and whereby the oligomers of the second class hybridize to the amplified product to be investigated essentially independently of the degree of methylation of said specific cytosine in the genomic DNA.

[0031] Thus, in these cases, the second class of oligomers hybridizes to the amplified product without producing an essential methylation specificity, and thus accordingly, preferably to a position of the amplified product which does not correspond to methylatable cytosine positions. Thus, only the concentration of the amplified product is determined by the intensity of hybridization. In this regard, hybridization to the first class of oligonucleotides results as a function of the degree of methylation of the specific cytosine to be investigated.

[0032] It is preferred that the method is conducted not only with the genomic DNA sample, but also logically with standard DNA in which it is known whether the cytosine at said specific position is present in methylated or unmethylated state, whereby the ratios of the labels detected on the two classes of oligonucleotides, which are measured each time with the unmethylated standard DNA, serve as a calibration value for a degree of methylation of 0, and correspondingly the ratios of the labels detected on the two classes of oligonucleotides, which are measured each time with the methylated standard DNA, serve as a calibration value for a degree of methylation of 1, and these calibration values are used for the determination of the degree of methylation of the genomic DNA samples.

[0033] It is particularly preferred that additional known standard DNA samples, each of which has any known degree of methylation of said specific cytosine, are used for calibration.

[0034] The standard DNA samples used and the samples (the amplied product prepared from a genomic DNA) are each preferably given a different label. The standard DNA samples used are each preferably labeled in turn with different labels.

[0035] A method is also particularly preferred in which amplified products originating from different genomic DNA samples are provided with different labels. In this case, it is possible to measure different samples simultaneously with one set of oligonucleotides of the two classes, for example, on an oligomer array which contains oligonucleotides of the two classes.

[0036] A method is also particularly preferred, in which amplified products originating from the same genomic DNA samples are provided with different labels in order to achieve an increase of measurement accuracy by an averaging of the values obtained from different detection methods. For example, this can be carried out by labeling with different fluorescent dyes. In this case, the measurement is conducted with a fluorescence scanner, which provides several channels for the measurement of individual emission wavelengths of the fluorescent dyes.

[0037] Accordingly, a method is also particularly preferred, in which the labels are fluorescent labels.

[0038] According to the invention, it is further preferred that said label is a fluorescent label. It is preferred that said label is detected by chemiluminescence, its UV absorption or fluorescence polarization.

[0039] It is particularly preferred according to the invention that the DNA treatment in step a) is conducted with a solution of a bisulfite (=hydrogen sulfite, disulfite). A method is also particularly preferred, in which oligonucleotides are used for the amplification, which comprise a sequence segment of a chemically pretreated DNA which is at least 18 bases long according to one of the [sequences] Seq. ID 1 to Seq. ID 40712. It is assured that primers complementary to the bisulfite-treated DNA are used, which can amplify regulatory regions (CpG islands) which can then be investigated with respect to methylation.

[0040] A method is also particularly preferred, in which, in a hybridization step, oligonucleotides and/or peptide nucleic acid (PNA) oligomers are used, which hybridize to a sequence segment that is at least 9 bases long of a chemically pretreated DNA according to one of the [sequences] Seq. ID 1 to Seq. ID 40712 or correspond to this segment, whereby the base sequence contains at least one CpG dinucleotide and the CpG dinucleotide is found in approximately the middle third of the oligomer. These oligonucleotides are suitable for investigating specific CpG positions with respect to their degree of methylation according to the method of the invention. They preferably bind to the amplified products of treated DNA, which originates from a genomic DNA sample methylated at the respective cytosine positions.

[0041] It is also preferred that the labels are radionuclides.

[0042] It is further preferred that the labels are removable mass labels, which are detected in a mass spectrometer. It is particularly preferred according to the invention that the PCR products as a whole or their characteristic fragments are detected in the mass spectrometer and thus are clearly characterized by their mass.

[0043] It is particularly preferred according to the invention that the oligomers (oligonucleotides and/or PNA oligomers) of one class contain the sequence 5′-CG-3′.

[0044] It is particularly preferred according to the invention that the oligomers (oligonucleotides and/or PNA oligomers) of one class contain the sequence 5′-TG-3′ and/or the sequence 5′-CA-3′.

[0045] It is also particularly preferred that the oligonucleotides of the first class contain the sequence 5′-CG-3′ and the oligonucleotides of the second class contain the sequence 5′-TG-3′ and/or the sequence 5′-CA-3′.

[0046] It is also preferred that the oligonucleotides of the first and of the second classes are immobilized on a common solid phase. It is also preferred that the oligonucleotides are arranged on a planar solid phase in a rectangular or hexagonal grid and the site of specific oligonucleotides on the solid phase is correlated with their respective sequence.

[0047] It is also particularly preferred that the oligomers of the first and second classes are immobilized on beads, which are coded with a set of separately detectable labels. The latter serve for identifying the bead, i.e., the sequence bound to the bead in question. The amplified products bound to the beads are then identified by means of other labels, which are bound to the amplified products. Instruments for conducting such measurements based on beads are offered, for example, by the Luminex company.

[0048] A method is most particularly preferred according to the invention, wherein step b) is conducted in two sub-steps as follows:

[0049] a) a PCR pre-amplification with at least one pair of primers of different sequence which hybridize nonspecifically to a DNA sample pretreated according to claim 1 and thus produce more than one amplified product in the PCR step;

[0050] b) a PCR amplification of the product formed in the pre-amplification, with primers of different sequence, which are each identical or inversely complementary to a segment of the DNA sample [(+) strand or (−) strand] that has undergone pretreatment according to claim 1, and hybridize specifically to the DNA to be amplified.

[0051] In connection with this invention, hybridization is understood as a hybridization of two single DNA strands that are completely inversely complementary to each other according to Watson-Crick rules without the occurrence of an erroneous base pairing. Uracil is considered in this respect as thymine.

[0052] It is also preferred according to the invention that the amplification of several DNA segments is conducted in one reaction vessel.

[0053] It is further preferred according to the invention that a heat-stable DNA polymerase is used for the amplification. It is also particularly preferred that the primer oligonucleotides used for the amplification contain either only the bases T, A and C or the bases T, A and G.

[0054] It is also preferred that at least 10 CpG positions in different sequence context are analyzed simultaneously. It is particularly preferred that at least 50 CpG positions in different sequence context are analyzed simultaneously. It is even more particularly preferred that at least 100 CpG positions in different sequence context are analyzed simultaneously. It is even more preferred that at least 500 CpG positions in different sequence context are analyzed simultaneously. It is most preferable that at least 1000 CpG positions in different sequence context are analyzed simultaneously.

[0055] The method is preferred according to the invention, whereby the genomic DNA sample has been obtained from cell lines, blood, sputum, stool, urine, cerebrospinal fluid, tissue embedded in paraffin, for example, tissue from eyes, intestine, kidney, brain, heart, prostate, lung, breast or liver, histological slides or all other possible combinations thereof.

[0056] The use of a method according to the invention is preferred for the diagnosis and/or prognosis of adverse events for patients or individuals, whereby these adverse events belong to at least one of the following categories: undesired drug interactions; cancer diseases; CNS malfunctions, damage or disease; symptoms of aggression or behavioral disturbances; clinical, psychological and social consequences of brain damage; psychotic disturbances and personality disorders; dementia and/or associated syndromes; cardiovascular disease, malfunction and damage; malfunction, damage or disease of the gastrointestinal tract; malfunction, damage or disease of the respiratory system; lesion, inflammation, infection, immunity and/or convalescence; malfunction, damage or disease of the body as an abnormality in the development process; malfunction, damage or disorder of the skin, the muscles, the connective tissue or the bones; endocrine and metabolic malfunction, damage or disease; headaches or sexual malfunctions.

[0057] The use of a method according to the invention is also preferred for distinguishing cell types or tissues or for investigating cell differentiation.

[0058] The subject of the present invention is [also] a kit comprising a reagent containing bisulfite, primer oligonucleotides for the production of the amplified products and/or preferably oligonucleotides immobilized to a solid phase as well as instructions for conducting the method according to the invention. The primer oligonucleotides and the immobilized oligonucleotides, as described above, are derived from the [sequences] Seq. IDs 1 to 40712.

[0059] This genomic DNA sample has been obtained preferably from cell lines, blood, sputum, stool, urine, cerebrospinal fluid, tissue embedded in paraffin, for example, tissue from eyes, intestine, kidney, brain, heart, prostate, lung, breast or liver, histological slides or all other possible combinations thereof.

[0060] In this method in the first step, a genomic DNA sample is treated in such a way that except for the 5-methylcytosine bases, all cytosine bases are converted to uracil. This chemical treatment is preferably conducted with the solution of a bisulfite (=hydrogen sulfite, disulfite). This step of the method can be conducted not only with the genomic DNA sample, but also preferably and logically with standard DNA in which it is known whether the cytosine at said specific position is present in methylated or unmethylated state.

[0061] In the second step of the method, the segments of the genomic DNA that contain said specific cytosine are amplified. This step can be particularly preferably conducted in two sub-steps:

[0062] 1. First, a PCR pre-amplification is conducted with at least one pair of primers of different sequence, which hybridize to a chemically pretreated DNA. This treatment was chemically conducted in such a way that the cytosine bases were converted to uracil, but not the 5-methylcytosine bases.

[0063] 2. A PCR amplification of the product formed in the pre-amplification is conducted with primers of different sequence. These primers are identical or inversely complementary to a segment of the chemically pretreated DNA [(+) strand or (−) strand] and specifically hybridize to the DNA to be amplified. The amplified products preferably contain a detectable label.

[0064] In the following third step of the method, a hybridization of the amplified products takes place on preferably two classes of oligonucleotides, each of which [class] has at least one member. In a particularly preferred variant of the method, the oligonucleotides of the first class contain the sequence 5′-CG-3′ and the oligonucleotides of the second class contain the sequence 5′-TG-3′ and/or the sequence 5′-CA-3′. The oligonucleotides of the first and the second classes are preferably immobilized on a common solid phase. The oligonucleotides are arranged on a planar solid phase in a rectangular or hexagonal grid and the site of specific oligonucleotides on the solid phase is correlated with their respective sequence.

[0065] The oligonucleotides of the first class preferably hybridize to the sequence which arises from the chemical treatment of the genomic DNA if said specific cytosine was present in the methylated state in the genomic DNA. The oligonucleotides of the second class preferably hybridize to the sequence which arises from the chemical treatment of the genomic DNA if said specific cytosine was present in the unmethylated state in the genomic DNA.

[0066] The amplification of several DNA segments is particularly preferably conducted in one reaction vessel. The amplification is preferably conducted with the polymerase chain reaction (PCR), wherein a heat-stable DNA polymerase is preferably used.

[0067] The primer oligonucleotides used for the amplification contain preferably either only the bases T, A and C or the bases T, A and G.

[0068] In the fourth step of the method, the extent of hybridization of the amplified products on the two classes of oligonucleotides is determined by detection of the labels of the amplified products. The labels are particularly preferably fluorescent labels, radionuclides, or removable mass labels, which are detected in a mass spectrometer. The labels are preferably also detected by chemiluminescence, UV absorption or fluorescence polarization. The PCR products can also preferably be detected as a whole or as their characteristic fragments in the mass spectrometer. Thus the PCR products are clearly characterized by their mass.

[0069] In the last step of the method, a conclusion is made on the extent of methylation of said specific cytosine in the genomic DNA sample from the ratio of the labels detected on the two classes of oligonucleotides as a consequence of the hybridization.

[0070] The ratios of the labels detected on the two classes of oligonucleotides, which are measured each time with the unmethylated standard DNA, preferably serve as a calibration value for a degree of methylation of 0.

[0071] Correspondingly, the ratios of the labels detected on the two classes of oligonucleotides, which are measured each time with the methylated standard DNA, preferably serve as a calibration value for a degree of methylation of 1. The calibration values are particularly preferably used for the determination of the degree of methylation of the genomic DNA samples.

[0072] Preferably, additional known standard DNA samples, each of which has any known degree of methylation of said specific cytosine, are also used for the calibration.

[0073] The method is further characterized in that preferably at least 10 CpG positions in different sequence context are analyzed simultaneously. In addition, preferably at least 50 CpG positions in different sequence context can be analyzed simultaneously. It is also preferred that at least 100 CpG positions in different sequence context are analyzed simultaneously. The simultaneous analysis of at least 500 CpG positions in different sequence context is very much preferred. The simultaneous analysis of at least 1000 CpG positions in different sequence context is finally particularly preferred.

[0074] The described method is preferably used for the diagnosis and/or prognosis of adverse events for patients or individuals, whereby these adverse events belong to at least one of the following categories: undesired drug interactions; cancer diseases; CNS malfunctions, damage or disease; symptoms of aggression or behavioral disturbances; clinical, psychological and social consequences of brain damage; psychotic disturbances and personality disorders; dementia and/or associated syndromes; cardiovascular disease, malfunction and damage; malfunction, damage or disease of the gastrointestinal tract; malfunction, damage or disease of the respiratory system; lesion, inflammation, infection, immunity and/or convalescence; malfunction, damage or disease of the body as an abnormality in the development process; malfunction, damage or disorder of the skin, the muscles, the connective tissue or the bones; endocrine and metabolic malfunction, damage or disease; headaches or sexual malfunctions.

[0075] The present method is particularly preferably used for distinguishing cell types or tissues or for investigating cell differentiation.

[0076] By determining the hybridization ratios between the two classes of oligonucleotides utilized (e.g., containing CG/TG), the method is not dependent on the intensity of the total hybridization of unknown tissue samples.

[0077] Unmethylated and methylated reference samples are utilized as standards for calibrating unknown tissue samples.

[0078] A component of this method is also a kit, which comprises a reagent containing bisulfite, primer oligonucleotides for the production of amplified products and/or preferably oligonucleotides immobilized on a solid phase. The oligonucleotides (first class) comprise the sequence 5′-CG-3′. The oligonucleotides (second class) comprise the sequence 5′-TG-3′ and/or the sequence 5′-CA-3′. Instructions for conducting the method are also included in the kit.

[0079] The subject of the present invention is also nucleic acids that are particularly suitable for conducting the method.

[0080] The subject of the invention is also a set of at least 10 oligomer probes (oligonucleotides and/or PNA oligomers), which serve for the detection of the cytosine methylation state in chemically pretreated genomic DNA (Seq. ID 1 to Seq. ID 40712). The analysis of a set of genetic and/or epigenetic parameters for the diagnosis of existing diseases or for the diagnosis of predisposition to specific diseases is possible with these probes.

[0081] The subject of the present invention is also a sequence segment of a treated DNA which is at least 18 bases long according to one of the [sequences] Seq. ID 1 to Seq. ID 40712. These segments of 18 base pairs in length comprised of Seq. ID 1 to Seq. ID 40712 are utilized for the amplification of the treated genomic DNA. Oligomers with a length of at least 9 nucleotides are used as detectors of these segments.

[0082] The oligomers preferably contain at least one CpG dinucleotide. The cytosine of the corresponding CpG dinucleotide is found in approximately the middle third of the oligomer. It is a deciding factor that at least one oligonucleotide from Seq. ID 1 to Seq. ID 40712 is present in the respective set of oligomers for at least each of the CpG dinucleotides.

[0083] The oligomers are preferably produced on a support material in a fixed arrangement, whereby at least one oligomer is coupled to a solid phase. Methods for binding oligomer probes to solid phases are known to the person of average skill in the art.

[0084] It is also important in this connection that it is not individual CpG dinucleotides, but the large number of CpG dinucleotides present in the sequences, which must be analyzed for the diagnosis of genetic and/or epigenetic parameters of the claimed nucleic acids (Seq. ID 1 to Seq. ID 40712). In a particularly preferred variant of the method, all of the CpG dinucleotides present in the sequences are to be investigated.

[0085] It is further preferred that all oligomer probes have the same length. In addition, all 18-mer [segments] which have a CpG dinucleotide in the center and which hybridize to one of the Seq. ID 1 to Seq. ID 40712 without erroneous base pairing are particularly preferred.

[0086] In another preferred variant of the method, at least ten of the oligomers are used for the detection of the cytosine methylation state and/or of single nucleotide polymorphisms (SNPS) in chemically pretreated genomic DNA.

[0087] The oligomers are preferably used for the diagnosis of undesired drug interactions; cancer diseases; CNS malfunctions, damage or diseases; symptoms of aggression or behavioral disturbances; clinical, psychological and social consequences of brain lesions; psychotic disturbances and personality disorders; dementia and/or associated syndromes; cardiovascular disease; malfunction, damage or disorder of the gastrointestinal tract; malfunction, damage or disorder of the respiratory system; lesion, inflammation, infection, immunity and/or convalescence; malfunction, damage or disorder of the body as an abnormality in the development process; malfunction, damage or disorder of the skin, the muscles, the connective tissue or the bones; endocrine and metabolic malfunction, damage or disorder; headaches and sexual malfunctions, by analysis of methylation patterns.

[0088] Also, of the nucleic acids or considerable segments thereof listed in the sequence protocol (Seq. ID 1 to Seq. ID 40712), preferably at least one will be used for the analysis of a set of genetic and/or epigenetic parameters for the diagnosis of existing disorders or for the diagnosis of predisposition for specific disorders.

[0089] The person of average skill in the art understands that the oligomers fulfill the same objective when thymine is exchanged for uracil.

[0090] The genomic DNA to be analyzed is obtained preferably from the usual sources for DNA, such as, e.g., cell lines, blood, sputum, stool, urine, cerebrospinal fluid, tissue embedded in paraffin, for example, tissue from eyes, intestine, kidney, brain, heart, prostate, lung, breast or liver, histological slides and all other possible combinations thereof.

[0091] The subject of the present invention is also nucleic acids containing a sequence segment which is at least 18 bases long of a chemically pretreated DNA, according to one of the [sequences] Seq. ID 1 to Seq. ID 40712.

[0092] The subject of the present invention is also an oligomer (oligonucleotide or peptide nucleic acid (PNA) oligomer) for the detection of the cytosine methylation state in chemically pretreated DNA, each containing at least one base sequence with a length of at least 9 nucleotides, which hybridizes to a chemically pretreated DNA (Seq. ID 1 to Seq. ID 40712). It is also preferred according to the invention that the base sequence contains at least one dinucleotide. It is also preferred that the cytosine of the CpG dinucleotide is found in approximately the middle third of the oligomer.

[0093] The subject of the invention is also a set of oligomers according to the invention, containing at least one oligomer for at least one of the CpG dinucleotides of one of the sequences of Seq. ID 1 to Seq. ID 40712. A set of oligomers containing at least one oligomer for each of the CpG dinucleotides of one of the sequences of Seq. ID 1 to Seq. ID 40712 is preferred.

[0094] The subject of the present invention is also a set of at least two nucleic acids, which are utilized as primer oligonucleotides for the amplification according to the invention of at least one of the [sequences] Seq. ID 1 to Seq. ID 40712 or segments thereof. It is preferred that at least one oligonucleotide is bound to a solid phase.

[0095] The subject of the present invention is also a set of oligomer probes for the detection of the cytosine methylation state and/or of single nucleotide polymorphisms (SNPs) in chemically pretreated genomic DNA according to one of the [sequences] Seq. ID 1 to Seq. ID 40712, containing at least ten of the above-named oligomers according to the invention.

[0096] The subject of the present invention is also a method for the production of an arrangement of different oligomers (an array) fixed on a support material for the analysis of disorders related to the methylation state of the CpG dinucleotides of one of the [sequences] Seq. ID 1 to Seq. ID 40712, in which at least one oligomer according to the invention is coupled to a solid phase.

[0097] The subject of the invention is also arrangements of different oligomers (array) bound to a solid phase.

[0098] The subject of the present invention is also an array of different oligonucleotide and/or PNA oligomer sequences whereby these are arranged on a planar solid phase in the form of a rectangular or hexagonal grid. It is preferred that the solid phase surface is comprised of silicon, glass, polystyrene, aluminum, steel, iron, copper, nickel, silver, or gold.

[0099] According to the invention, a DNA and/or PNA array is also [included] for the analysis of disorders related to the methylation state of genes, which contains at least one nucleic acid as described above according to the invention.

[0100] The following examples explain the invention.

### EXAMPLE 1

### Production of Unmethylated and Methylated DNA and Bisulfite Treatment

[0101] For the production of methylated DNA, human genomic DNA was treated with S-adenosylmethionine und CpG methylase (Sssl, New England Biolabs,) according to the information of the manufacturer. For the production of unmethylated DNA, the gene fragment ELK-1 (Accession number ep59011) was amplified by means of PCR with the primers GCTCTATGGTCTTGTCTAACCGTA and AGGTGGTGGTGGCGGTGG, starting from human genomic DNA. The unmethylated and methylated DNA, which was prepared in this way, as well as also the human genomic DNA was treated with the use of bisulfite (hydrogen sulfite, disulfite), such that all cytosines unmethylated at the 5-position of the base are changed so that a base that is different with respect to base pairing behavior is formed, whereas the cytosines that are methylated in the 5-position remain unchanged. If bisulfite in the concentration range between 0.1 M and 6 M is used for the reaction, then an addition occurs at the unmethylated cytosine bases. Also, a denaturing reagent or solvent as well as a radical trap must be present. A subsequent alkaline hydrolysis then leads to the conversion of unmethylated cytosine nucleobases to uracil. This converted DNA serves for the detection of methylated cytosines.

### EXAMPLE 2

### Production of Cy5-labeled Gene Probes

[0102] Starting with DNA samples treated with bisulfite, a defined fragment of 529 bp in length from the promoter region of the ELK-1 gene (Accession number ep59011) was amplified. The amplification is conducted with the primer oligonucleotides ATGGTTTTGTTTAATYGTAGAGTTGTTT and TAAACCCRAAAAAAAAAAACCCAATAT. By using primer oligonucleotides that are labeled with the fluorescent dye Cy5, the fragment is directly labeled in the PCR. (1) Unmethylated DNA, (2) methylated DNA and (3) human genomic DNA treated with bisulfite (hydrogen sulfite, disulfite) are used as the matrix DNA. Then these three different DNA fragments are investigated in separate hybridizations for their degree of methylation at a specific CpG position.

### EXAMPLE 3

### Conducting the Hybridization and Evaluating a Hybridized DNA Chip

[0103] The gene probes prepared in Example 2 are hybridized to a DNA chip. First, oligonucleotides are immobilized on the chip. The oligonucleotide sequences are derived from the amplified fragment of the ELK-1 gene named in Example 2, and represent the CG dinucleotide, including the immediate surroundings. The length of the oligonucleotides amounts to 14-22 nucleotides; the position of the CG dinucleotide within the oligonucleotide is variable. After the hybridization, the DNA chip is scanned (see FIG. 1) and the hybridization signals are numerically evaluated (data not shown). The result of the hybridization for the oligonucleotides CTACTCAACGAAAACAAA and CTACTCAACAAAAACAAA is shown in FIG. 1 and FIG. 2. CTACTCAACGAAAACAAA preferably hybridizes if the cytosine of the ELK-1 fragment, which is found at position 103 of the amplified product, is methylated; CTACTCAACAAAAACAAA hybridizes if this cytosine is unmethylated.

[0104] A DNA chip is shown in FIG. 1 after hybridization with the ELK-1 fragment. The pseudo-color image as it is produced after scanning is shown. Unlike the black-and-white illustration shown here, a color image is produced by the scanner. The intensity of the different colors represent the degree of hybridization, whereby the degree of hybridization decreases from red (this can be recognized as light spots in FIG. 1) to blue (recognized as dark spots in FIG. 1).

[0105] FIG. 2A shows an excerpted image from FIG. 1. The spotted pairs of oligonucleotides are circled in white to clarify the hybridization diagram: ctactcaacaaaaacaaa (left) and ctactcaacgaaaacaaa (right).

[0106] The excerpted image of FIG. 2B shows the spotting pattern for an unknown methylation state of the tissue sample and the excerpted image of FIG. 2C shows the methylation state for the methylated reference sample.

TABLE 1

| | Sample A | | Sample B | | Sample C | |
|---|---|---|---|---|---|---|
| | (unmethylated) | | (unknown) | | (methylated) | |
| Sequence of the | Fluorescence | | Fluorescence | | Fluorescence | |
| detection oligomer | (counts) | Mean | (counts) | Mean | (counts) | Mean |
| ctactcaacgaaaacaaa | 3352 | | 6102 | | 6002 | |
| ctactcaacgaaaacaaa | 2950 | | 6775 | | 7898 | |
| ctactcaacgaaaacaaa | 4196 | | 6360 | | 7485 | |
| ctactcaacgaaaacaaa | 5181 | | 5521 | | 11401 | |
| | | 3920 | | 6190 | | 8197 |
| ctactcaacaaaaacaaa | 20577 | | 7074 | | 7290 | |
| ctactcaacaaaaacaaa | 19709 | | 9171 | | 9985 | |
| ctactcaacaaaaacaaa | 24130 | | 7603 | | 9286 | |
| ctactcaacaaaaacaaa | 21601 | | 9434 | | 12435 | |
| | | 21504 | | 8321 | | 9749 |
| CG/CA | | 0.28 | | 0.74 | | 0.84 |

[0107] The mean is indicated each time for a wavelength of 635 nm. Column A gives the values for the unmethylated [reference] sample and column B for an unknown methylation state of a tissue sample and column C gives the values for the methylated reference sample. The CG/CA ratios represent the methylation state of the respective sample. The value of 0.74 shows that the sample is basically present in methylated form.

### EXAMPLE 4

[0108] The following example relates to a fragment of the hMLH1 gene associated with hereditable non-polyposis colorectal cancer, in which a specific CG position is investigated for methylation.

[0109] In the first step, a genomic sequence is treated with the use of bisulfite (hydrogen sulfite, disulfite) in such a way that all of the unmethylated cytosines at the 5-position of the base are modified such that a base that is different in its base pairing behavior is formed, while the cytosines that are methylated in the 5-position remain unchanged. If bisulfite in the concentration range between 0.1 M and 6 M is used for the reaction, then an addition occurs at the unmethylated cytosine bases. Also, a denaturing reagent or solvent as well as a radical trap must be present. A subsequent alkaline hydrolysis then leads to the conversion of unmethylated cytosine nucleobases to uracil. This converted DNA serves for the detection of methylated cytosines. In the second step of the method, the treated DNA sample is diluted with water or an aqueous solution. A desulfonation of the DNA (10-30 min, 90-100° C.) at alkaline pH is then preferably conducted. In the third step of the method, the DNA sample is amplified in a polymerase chain reaction, preferably with a heat-stable DNA polymerase. In the present Example, cytosines of the hMLH1 gene, here from a 1551-bp-long 5′-flanking region, are investigated. A defined fragment of 719-bp length is amplified for this purpose with the specific primer oligonucleotides AGCAACACCTCCATGCACTG and TTGATTGGACAGCTTGAATGC. This amplified product serves as a sample, which hybridizes to an oligonucleotide that has been previously bound to a solid phase, with the formation of a duplex structure, for example, GAAGAGCGGACAG, whereby the cytosine to be detected is found at position 588 of the amplified product. The detection of the hybridization product is based on primer oligonucleotides fluorescently labeled with Cy3 and Cy5, which were used for the amplification. A hybridization reaction of the amplified DNA with the oligonucleotide occurs only if a methylated cytosine was present at this site in the bisulfite-treated DNA. Thus the methylation state of the respective cytosine to be investigated decides the hybridization product.

### EXAMPLE 5

### Production of Bisulfite-Modified DNA with Agarose Beads

[0110] In the present experiment, starting with DNA treated with bisulfite, a defined fragment of 529 bp in length from the promoter region of the ELK-1 gene (Accession number ep59011) is amplified. By using primer oligonucleotides ATGGTTTTGTTTAATYGTAGAGTTGTTT and TAAACCCRAAAAAAAAAAACCCAATAT, which are labeled with the fluorescent dye ALEXA 488, the fragment is directly labeled in the PCR. Oligonucleotides of the first class (here, for example, ATTAATAGCGTTTTGGTT) and of the second class (here: for example, ATTAATAGTGTTTTGGTT) are immobilized at the surface of beads, which are distinguished by an individual color coding. In a following step, the amplified products of the ELK-1 gene, which were prepared with the above-named primer oligonukleotides, are combined with a mixture of both classes of beads, whereby the amplified products hybridize to the immobilized oligonucleotides, here, for example, ATTAATAGCGTTTTGGTT and ATTAATAGTGTTTTGGTT, whereby the C or T to be detected is found each time at position 476 of the amplified product. Then the beads are separated, identified by fluorescence measurement based on their color coding and the degree of hybridization is determined by measurement of the fluorescent intensities, which are specific to the fluorescent dye ALEXA 488.

### EXAMPLE 6

### Use of Multiple Dyes for Internal Calibration

[0111] Starting with bisulfite-treated DNA, a defined fragment of 529-bp length from the promoter region of the ELK-1 gene is amplified. The fragment is labeled directly in the PCR by use of the fluorescently labeled primer oligonucleotides ATGGTTTTGTTTAATYGTAGAGTTGTTT and TAAACCCRAAAAAAAAAAACCCAATAT. For the PCR reaction, which is conducted on a thermocycler (Eppendorf GmbH), 10 ng of bisulfite-treated DNA, 6 pmol of each primer, 200 μM of each dNTP, 1.5 mM MgC12 and 1 U of HotstartTaq (Qiagen AG) are used. The other conditions are selected following the manufacturer's information. For the amplification, a denaturing is conducted for 14 min at 96° C., followed by 39 cycles with the conditions: 60 sec at 96° C, 45 sec at 55° C. and 75 sec at 72° C. In conclusion, an elongation is conducted for 10 min at 72° C. In the present case, the samples to be investigated, here the tissue of healthy and sick persons, are labeled with the Cy2 dye. For the internal calibration of the methylation state, primer oligonucleotides are used for the amplification of samples for the calibration, which are labeled with the fluorescent dyes Cy3 and Cy5. The amplified products from the samples for the calibration represent a known methylation state, on the one hand, a state of one-hundred percent methylation, and, on the other hand, an unmethylated state. Since in this method, the ratios of the color intensities of the fluoresent dyes, which are measured with the use of the ScanArray 4000XL, Packard BioScience-BioChip Technologies, are calculated for two classes of oligonucleotides, here, for example, ATTAATAGCGTTTTGGTT and ATTAATAGTGTTTTGGTT, wherein the C or T to be detected is found each time at position 476 of the amplified product, the ratio of methylated to unmethylated state of the unknown sample can be determined.

### EXAMPLE 7

### Use of Multiple Dyes for Increasing the Sample Throughput Volume and for Increasing the Complexity of the Analysis

[0112] The present experiment serves for the purpose of analyzing different samples in a single hybridization step and in this way increasing the sample throughput volume. For this purpose, a defined fragment of 529-bp length from the promoter region of the ELK-1 gene taken from each of four individuals and, starting with the bisulfite-treated DNA, is amplified with the primer oligonucleotides ATGGTTTTGTTTAATYGTAGAGTTGTTT and TAAACCCRAAAAACCCAATAT. These fragments originating from four individuals are labeled with the four different fluorescent dyes Cy3, Cy5, Cy2 und Cy7 and hybridized to immobilized oligonucleotides, here, for example, ATTAATAGCGTTTTGGTT and ATTAATAGTGTTTTGGTT, whereby the C or T to be detected is found each time at position 476 of the amplified product. The samples with different fluorescent labels are then analyzed at different wavelengths without a mutual interference based on the fluorescent dye.

[0113] On the other hand, it is also possible to produce different sets of fragments from one DNA sample, which [fragments] are labeled with different dyes, here Cy2, Cy3 and Cy5. If a set of oligonucleotide probes for 64 genes (set 1) is immobilized on a chip, then the specificity is sufficient in order to analyze 64 fragments, e.g., labeled with Cy3, independent of one another. Due to the fact that samples of set 1 are labeled here with the fluorescent dye Cy3 and samples of set 2 are labeled with the fluorescent dye Cy5 (and set 3 with Cy2), the detection of the methylation state via measuring the fluoresent intensities of the fragments of set 1 is not influenced by the fluorescently labeled amplified products of sets 2 and 3 (and vice versa). Therefore, despite the increased complexity of the amplified products, it is possible to produce data that are equally reliable to those for a [lesser] complexity of 64 amplified products.

### EXAMPLE 8

### Use of Multiple Dyes for Verifying Experimental Reproducibility

[0114] In the present experiment, the same PCR amplified products are labeled with four different fluorescent dyes and these are verified [for reliability] by a 4× redundancy. For this purpose, starting from bisulfite-treated DNA, a a defined fragment of 529-bp length from the promoter region of the ELK-1 gene is amplified with the primer oligonucleotides ATGGTTTTGTTTAATYGTAGAGTTGTTT and TAAACCCRAAAAAAAAAAACCCAATAT, and hybridized to immobilized oligonucleotides, here, for example, ATTAATAGTGTTTTGGTT und ATTAATAGTGTTTTGGTT, whereby the C or T to be detected is found each time at position 476 of the amplified product. The ratios of samples with different fluorescent labels are compared by employing primer oligonucleotides fluorescently labeled with Cy3, Cy5, Cy2 and Cy7, and in this way a higher experimental reliability is achieved.

The application's sequence listing, which the Patent Office published only in electronic form, follows.

SEQUENCE LISTING (40712 sequences)

SEQ ID NO: 1 - DNA, 510 bp, Artificial Sequence
  chemically treated genomic DNA (Homo sapiens) CpG-island No: 1
gcggcgaattcgagatgtggtaattatttttacgttagggtgttaggcggaggttaagttttttattcgggggcggagcgtggcgcggcgtgggcgggattttcggtttaagaagggcggtgattggggcggtagggatgtggtttttttcgggttaattaggtagttcggttgggttcgagagttagcgggcgggcgggttgcggattttagcggggtttgtcgggaaaggggcgggtcgagcgtattgggtcgaggcggggcgaagtgggggtgtttagttcgttgcggggggcggggtcgcgtttgtcgtagtaacggggtgcggtagggtggggaacgcgggagcggggttagtttttaggaaagttggtttgcgagcggtttttgttcggtttttaggtttttgcgcgatttcgtttttttcgagattttagtcgggttgtcgttcgcgtttcggaaggtgagtgggggaggggagatggagtttggggttgtcgagaagtaggg

SEQ ID NO: 2 - DNA, 510 bp, Artificial Sequence
  chemically treated genomic DNA (Homo sapiens) CpG-island No: 2
ccctacttctcgacaaccccaaactccatctcccctcccccactcaccttccgaaacgcgaacgacaacccgactaaaatctcgaaaaaaacgaaatcgcgcaaaaacctaaaaaccgaacaaaaaccgctcgcaaaccaactttcctaaaaactaaccccgctcccgcgttccccaccctaccgcaccccgttactacgacaaacgcgaccccgccccccgcaacgaactaaacacccccacttcgccccgcctcgacccaatacgctcgacccgcccctttcccgacaaaccccgctaaaatccgcaacccgcccgcccgctaactctcgaacccaaccgaactacctaattaacccgaaaaaaaccacatccctaccgccccaatcaccgcccttcttaaaccgaaaatcccgcccacgccgcgccacgctccgcccccgaataaaaaacttaacctccgcctaacaccctaacgtaaaaataattaccacatctcgaattcgccgc

SEQ ID NO: 3 - DNA, 510 bp, Artificial Sequence
  chemically treated genomic DNA (Homo sapiens) CpG-island No: 3
ttttgtttttcggtagttttaggttttatttttttttttttatttatttttcgggacgcgggcggtagttcggttggggtttcgggaagggcggggtcgcgtagggatttgggagtcgggtaggggtcgttcgtagattagtttttttgggagttggtttcgttttcgcgttttttattttgtcgtatttcgttgttgcggtagacgcgatttcgtttttcgtaacggattaagtatttttatttcgtttcgtttcggtttagtgcgttcggttcgtttttttttcggtaggtttcgttagagttcgtagttcgttcgttcgttggttttcgggtttagtcgggttgtttggttagttcggggagggttatatttttgtcgttttagttatcgttttttttgagtcgggaatttcgtttacgtcgcgttacgtttcgttttcgggtgagggatttgattttcgtttggtattttggcgtaagggtgattgttatatttcggattcgtcgt

SEQ ID NO: 4 - DNA, 510 bp, Artificial Sequence
  chemically treated genomic DNA (Homo sapiens) CpG-island No: 4
acgacgaatccgaaatataacaatcacccttacgccaaaataccaaacgaaaatcaaatccctcacccgaaaacgaaacgtaacgcgacgtaaacgaaattcccgactcaaaaaaaacgataactaaaacgacaaaaatataaccctccccgaactaaccaaacaacccgactaaacccgaaaaccaacgaacgaacgaactacgaactctaacgaaacctaccgaaaaaaaaacgaaccgaacgcactaaaccgaaacgaaacgaaataaaaatacttaatccgttacgaaaaacgaaatcgcgtctaccgcaacaacgaaatacgacaaaataaaaaacgcgaaaacgaaaccaactcccaaaaaaactaatctacgaacgacccctacccgactcccaaatccctacgcgaccccgcccttcccgaaaccccaaccgaactaccgcccgcgtcccgaaaaataaataaaaaaaaaaaaataaaacctaaaactaccgaaaaacaaaa

SEQ ID NO: 5 - DNA, 564 bp, Artificial Sequence
  chemically treated genomic DNA (Homo sapiens) CpG-island No: 5
ttttttcggtaaatttttttcgggtttacggtacgtatgcgtagtaattttcgtacgggttcggttagtttcgtgttttatgatttttttttaaaatacgcgtagtttttttttttttttttttttgttcgttttttttttgtttattagttttatttgatgggttcgtgtttttttcgttttcgatttattcgggtttcggcggttgttgtttgggcgttttcggtatcgcggtggtagttatagttattgtggcggcgttcggtgttattttcgttttcggcggcggggaatttcgatggggttggttttttaagttggcgcggttaatttcgttttcgggttgcgtacgtgcgagtttcgtcgttatttcgggggcgtggttttggtttagtggaggcgtggtttgtaatgacggagcggggtcggcgttcgtttgttttagtcgcgtaaatatatggcgtttacgattgtttgggaagtttgacgtcgtgatttttcgacgtcgcgagatttaaggaatgaatataataattttttattagtatgaaggagttgaggtat

SEQ ID NO: 6 - DNA, 564 bp, Artificial Sequence
  chemically treated genomic DNA (Homo sapiens) CpG-island No: 6
atacctcaactccttcatactaataaaaaattattatattcattccttaaatctcgcgacgtcgaaaaatcacgacgtcaaacttcccaaacaatcgtaaacgccatatatttacgcgactaaaacaaacgaacgccgaccccgctccgtcattacaaaccacgcctccactaaaccaaaaccacgcccccgaaataacgacgaaactcgcacgtacgcaacccgaaaacgaaattaaccgcgccaacttaaaaaaccaaccccatcgaaattccccgccgccgaaaacgaaaataacaccgaacgccgccacaataactataactaccaccgcgataccgaaaacgcccaaacaacaaccgccgaaacccgaataaatcgaaaacgaaaaaaacacgaacccatcaaataaaactaataaacaaaaaaaaaacgaacaaaaaaaaaaaaaaaaaaaaactacgcgtattttaaaaaaaaatcataaaacacgaaactaaccgaacccgtacgaaaattactacgcatacgtaccgtaaacccgaaaaaaatttaccgaaaaaa

SEQ ID NO: 7 - DNA, 564 bp, Artificial Sequence
  chemically treated genomic DNA (Homo sapiens) CpG-island No: 7
atgttttaatttttttatattagtaggaaattattatgtttattttttgagtttcgcggcgtcgggaggttacggcgttaggttttttagatagtcgtaaacgttatgtgtttacgcgattggagtaagcggacgtcggtttcgtttcgttattgtaggttacgtttttattgaattagggttacgttttcgagatggcggcgaagttcgtacgtgcgtagttcgggggcggggttggtcgcgttagtttggagagttagttttatcggggtttttcgtcgtcggaagcggaaatagtatcgggcgtcgttatagtagttgtaattgttatcgcgatgtcgaaggcgtttaagtagtagtcgtcggagttcgagtggatcggggacggagagagtacgagtttattaggtgaggttggtaggtaaggaagaaacgagtagagggggaagagagaggagattgcgcgtgttttaagagagggttatggggtacgagattgatcgggttcgtgcgggagttattgcgtatgcgtgtcgtgggttcgggaggagtttgtcggggagg

SEQ ID NO: 8 - DNA, 564 bp, Artificial Sequence
  chemically treated genomic DNA (Homo sapiens) CpG-island No: 8
cctccccgacaaactcctcccgaacccacgacacgcatacgcaataactcccgcacgaacccgatcaatctcgtaccccataaccctctcttaaaacacgcgcaatctcctctctcttccccctctactcgtttcttccttacctaccaacctcacctaataaactcgtactctctccgtccccgatccactcgaactccgacgactactacttaaacgccttcgacatcgcgataacaattacaactactataacgacgcccgatactatttccgcttccgacgacgaaaaaccccgataaaactaactctccaaactaacgcgaccaaccccgcccccgaactacgcacgtacgaacttcgccgccatctcgaaaacgtaaccctaattcaataaaaacgtaacctacaataacgaaacgaaaccgacgtccgcttactccaatcgcgtaaacacataacgtttacgactatctaaaaaacctaacgccgtaacctcccgacgccgcgaaactcaaaaaataaacataataatttcctactaatataaaaaaattaaaacat

SEQ ID NO: 9 - DNA, 1007 bp, Artificial Sequence
  chemically treated genomic DNA (Homo sapiens) CpG-island No: 9
cgggtgggcggcgtaaggagtttatagttaagtttttcggttatttttaaggtgatagcgacgagattcgtattcgtttttttcgtaggttttgcgttggtttacgtgagattcgttttcgtttcgtcggcgttgtcgttttttttagtttttagtttcggtttttaggtttttggaacgttttttttttttttcgaggatcggtttcgttattttgggcggcgcgttcgtttgttttttttttatttcggtcgtcgggtagcgggaatagattttagcgcgtatttattcgtagtttttttaagcgtttcgggagtaaagacgtagaggcggggagggttggcgttttttgtattattggcggggtcgtcgagaattcgtttcggaggtttcgggggcggcgtttgtatttgggggcgcgcggcgcggtattattttacgtttgcggcggttattaggcgggattcggagtttcggttttttcgttttttcgttttcggggtcgttagggggtggagtagggcggggagttcgggaaatttgtaaatagtcgaattcgggtttttcgttttaattcggggcggtttttttcgaaggttttattttagcggttcgttgcgggagattaaggttagtcgtcgttttaggggacggttttcggggaatttgaatgacgtgcgaggtcgtatttcggggcgttggatttcgttcgggcgttttcgtttttcgttttcgttttcgggttttaatttcgacgtttcgcgcgttttcggattaagtgcggacgcgttttacgtttttcggcgttagttcgggatagcgttgtatttgttgttacgtgcgacgcggcgtttagcggttgttattgtcgtcggcgtatttggttgtatcgcgcgtttcgggattacgttcgttttcgtaggagttcggggtttcgtcgtatttagcgttagggtttaggtcgggtcgcggtaggtgggggatttgatttttgtttgtttttggtt

SEQ ID NO: 10 - DNA, 1007 bp, Artificial Sequence
  chemically treated genomic DNA (Homo sapiens) CpG-island No: 10
aaccaaaaacaaacaaaaatcaaatcccccacctaccgcgacccgacctaaaccctaacgctaaatacgacgaaaccccgaactcctacgaaaacgaacgtaatcccgaaacgcgcgatacaaccaaatacgccgacgacaataacaaccgctaaacgccgcgtcgcacgtaacaacaaatacaacgctatcccgaactaacgccgaaaaacgtaaaacgcgtccgcacttaatccgaaaacgcgcgaaacgtcgaaattaaaacccgaaaacgaaaacgaaaaacgaaaacgcccgaacgaaatccaacgccccgaaatacgacctcgcacgtcattcaaattccccgaaaaccgtcccctaaaacgacgactaaccttaatctcccgcaacgaaccgctaaaataaaaccttcgaaaaaaaccgccccgaattaaaacgaaaaacccgaattcgactatttacaaatttcccgaactccccgccctactccaccccctaacgaccccgaaaacgaaaaaacgaaaaaaccgaaactccgaatcccgcctaataaccgccgcaaacgtaaaataataccgcgccgcgcgcccccaaatacaaacgccgcccccgaaacctccgaaacgaattctcgacgaccccgccaataatacaaaaaacgccaaccctccccgcctctacgtctttactcccgaaacgcttaaaaaaactacgaataaatacgcgctaaaatctattcccgctacccgacgaccgaaataaaaaaaaaacaaacgaacgcgccgcccaaaataacgaaaccgatcctcgaaaaaaaaaaaaaacgttccaaaaacctaaaaaccgaaactaaaaactaaaaaaaacgacaacgccgacgaaacgaaaacgaatctcacgtaaaccaacgcaaaacctacgaaaaaaacgaatacgaatctcgtcgctatcaccttaaaaataaccgaaaaacttaactataaactccttacgccgcccacccg

SEQ ID NO: 11 - DNA, 1007 bp, Artificial Sequence
  chemically treated genomic DNA (Homo sapiens) CpG-island No: 11
ggttagaggtaagtaggagttagattttttatttatcgcggttcggtttgggttttagcgttgggtgcggcggagtttcgggtttttgcggggacgagcgtggtttcgggacgcgcggtgtagttaggtgcgtcggcggtagtggtagtcgttgagcgtcgcgtcgtacgtggtaataggtgtagcgttgtttcgggttggcgtcggggggcgtggggcgcgttcgtatttagttcgggagcgcgcggagcgtcgggattgggattcgagagcgggagcggagagcgggagcgttcgagcggagtttagcgtttcgaggtacggtttcgtacgttatttaggtttttcgagggtcgttttttgggacggcggttggttttggtttttcgtagcgagtcgttggagtggagttttcggaaggagtcgtttcgggttggggcgggaggttcgagttcggttatttataagtttttcgaatttttcgttttgttttattttttggcggtttcggaggcggggaggcggggaggtcggggtttcgggtttcgtttggtagtcgtcgtaggcgtggggtggtgtcgcgtcgcgcgtttttaggtgtagacgtcgttttcgagattttcggggcgggttttcggcgatttcgttagtggtgtaaagggcgttagtttttttcgtttttgcgtttttgttttcggagcgtttgaaggagttgcgggtaagtgcgcgttggaatttgttttcgttgttcggcggtcggggtggggaggggataggcgagcgcgtcgtttagggtgacgggatcggttttcggggaggggagggggcgttttaggggtttgggggtcgaagttgagggttaaagggggcggtagcgtcggcggagcggaggcgggttttacgtggattagcgtagagtttgcggaagggacggatgcggatttcgtcgttgttattttgaaagtgatcgaggggtttgattgtggattttttacgtcgtttattcg

SEQ ID NO: 12 - DNA, 1007 bp, Artificial Sequence
  chemically treated genomic DNA (Homo sapiens) CpG-island No: 12
cgaataaacgacgtaaaaaatccacaatcaaacccctcgatcactttcaaaataacaacgacgaaatccgcatccgtcccttccgcaaactctacgctaatccacgtaaaacccgcctccgctccgccgacgctaccgccccctttaaccctcaacttcgacccccaaacccctaaaacgccccctcccctccccgaaaaccgatcccgtcaccctaaacgacgcgctcgcctatcccctccccaccccgaccgccgaacaacgaaaacaaattccaacgcgcacttacccgcaactccttcaaacgctccgaaaacaaaaacgcaaaaacgaaaaaaactaacgccctttacaccactaacgaaatcgccgaaaacccgccccgaaaatctcgaaaacgacgtctacacctaaaaacgcgcgacgcgacaccaccccacgcctacgacgactaccaaacgaaacccgaaaccccgacctccccgcctccccgcctccgaaaccgccaaaaaataaaacaaaacgaaaaattcgaaaaacttataaataaccgaactcgaacctcccgccccaacccgaaacgactccttccgaaaactccactccaacgactcgctacgaaaaaccaaaaccaaccgccgtcccaaaaaacgaccctcgaaaaacctaaataacgtacgaaaccgtacctcgaaacgctaaactccgctcgaacgctcccgctctccgctcccgctctcgaatcccaatcccgacgctccgcgcgctcccgaactaaatacgaacgcgccccacgccccccgacgccaacccgaaacaacgctacacctattaccacgtacgacgcgacgctcaacgactaccactaccgccgacgcacctaactacaccgcgcgtcccgaaaccacgctcgtccccgcaaaaacccgaaactccgccgcacccaacgctaaaacccaaaccgaaccgcgataaataaaaaatctaactcctacttacctctaacc

SEQ ID NO: 13 - DNA, 692 bp, Artificial Sequence
  chemically treated genomic DNA (Homo sapiens) CpG-island No: 13
tttttttcggtacgggtcggagttgatatttttacggaaaatcgtatagcgttttcgttttttttttacgggttgagggattaatgtattttcgtataggtttagggttttacgtttcgcgattagcgtcggaagcgtacggtatgttgggatttgtagttttttatttgtgttcggtaggcgtttagaacgcgaggtttagttggtattttgggatatatagtttttgggcggatgggggcggattcgttggtgtaattttttttcggtttaaagagttagaagcgatattatagatttcggcgggttatatgattttagtttagttcgtattgcggttttcgttcgggcgagttttcgttttcgcgcggtcgttgtcgaggagacggcgtatgtttcgtcgcgcgttgttttttttgtagtattttcgtttttttttttttattataatgagattttaagatggcggtggttgcggcggttggcgttgcgtagttgaggtcgaaaaggcggttattggggtcgaggtagttaggaaacgtgtgggtttttttgttgcggttttcgagggtcgatcgttgtcggcggcgggtcgtgggggttgattgtcgttttgtttttgataggagaggttgttttttgtagaggtaatgtttgcgcgtttttagtttttggtaatttagggcggcgcg

SEQ ID NO: 14 - DNA, 692 bp, Artificial Sequence
  chemically treated genomic DNA (Homo sapiens) CpG-island No: 14
cgcgccgccctaaattaccaaaaactaaaaacgcgcaaacattacctctacaaaaaacaacctctcctatcaaaaacaaaacgacaatcaacccccacgacccgccgccgacaacgatcgaccctcgaaaaccgcaacaaaaaaacccacacgtttcctaactacctcgaccccaataaccgccttttcgacctcaactacgcaacgccaaccgccgcaaccaccgccatcttaaaatctcattataataaaaaaaaaaaaacgaaaatactacaaaaaaaacaacgcgcgacgaaacatacgccgtctcctcgacaacgaccgcgcgaaaacgaaaactcgcccgaacgaaaaccgcaatacgaactaaactaaaatcatataacccgccgaaatctataatatcgcttctaactctttaaaccgaaaaaaaattacaccaacgaatccgcccccatccgcccaaaaactatatatcccaaaataccaactaaacctcgcgttctaaacgcctaccgaacacaaataaaaaactacaaatcccaacataccgtacgcttccgacgctaatcgcgaaacgtaaaaccctaaacctatacgaaaatacattaatccctcaacccgtaaaaaaaaaacgaaaacgctatacgattttccgtaaaaatatcaactccgacccgtaccgaaaaaaa

SEQ ID NO: 15 - DNA, 692 bp, Artificial Sequence
  chemically treated genomic DNA (Homo sapiens) CpG-island No: 15
cgcgtcgttttaggttgttaagggttggggacgcgtaggtattatttttataagaagtagttttttttgttaaaggtagagcgatagttagtttttacgattcgtcgtcggtagcggtcggttttcggagatcgtagtagagaggtttatacgttttttggttgtttcggttttagtggtcgttttttcgattttagttacgtagcgttaatcgtcgtagttatcgttattttaggattttattgtggtgggagaagaggggcgggggtattgtagagggggtaacgcgcggcgggatatgcgtcgttttttcggtaacggtcgcgcgggggcgagaattcgttcgggcgggagtcgtaatgcgagttagattggagttatgtgattcgtcggagtttgtggtgtcgtttttggttttttaagtcgaaaagagattatattaacgaattcgtttttattcgtttaggaattatgtattttagaatgttaattagatttcgcgttttaaacgtttgtcgggtataagtggaggattataaattttagtatgtcgtgcgttttcggcgttgatcgcggagcgtggggttttaggtttatgcggaagtgtattgattttttagttcgtggagaaagagcggaggcgttgtgcggtttttcgtgggggtgttagtttcggttcgtgtcggaagaag

SEQ ID NO: 16 - DNA, 692 bp, Artificial Sequence
  chemically treated genomic DNA (Homo sapiens) CpG-island No: 16
cttcttccgacacgaaccgaaactaacacccccacgaaaaaccgcacaacgcctccgctctttctccacgaactaaaaaatcaatacacttccgcataaacctaaaaccccacgctccgcgatcaacgccgaaaacgcacgacatactaaaatttataatcctccacttatacccgacaaacgtttaaaacgcgaaatctaattaacattctaaaatacataattcctaaacgaataaaaacgaattcgttaatataatctcttttcgacttaaaaaaccaaaaacgacaccacaaactccgacgaatcacataactccaatctaactcgcattacgactcccgcccgaacgaattctcgcccccgcgcgaccgttaccgaaaaaacgacgcatatcccgccgcgcgttaccccctctacaatacccccgcccctcttctcccaccacaataaaatcctaaaataacgataactacgacgattaacgctacgtaactaaaatcgaaaaaacgaccactaaaaccgaaacaaccaaaaaacgtataaacctctctactacgatctccgaaaaccgaccgctaccgacgacgaatcgtaaaaactaactatcgctctacctttaacaaaaaaaactacttcttataaaaataatacctacgcgtccccaacccttaacaacctaaaacgacgcg

SEQ ID NO: 17 - DNA, 758 bp, Artificial Sequence
  chemically treated genomic DNA (Homo sapiens) CpG-island No: 17
ttcgttagttcgttttgtatttatatttttgtgtacgaaattatagattttcgtaaagaagttgtttagtacgaggtgttttttgtattcgttcgcgtcgttatatttgcgtttttattcgcgttcgtatttgtacgtttttttttgcgtttcggtttaagtttatttatcggcggcgcgtgttgcgcgacggtatagttgacggcggtagttaggaggattaaggcgacgtaatttcggttcggtatcgttttagtagttaacgttatttttcggattttagtagaggtaaagaagagtcggttgggtcgggggtaggttacgtttttttcgtcgcgtgattcgcgatttgggatcgtattattttaggtagtagggggaacgttcggaggaggcgggattgggaggagaggacggggttttttagtgttacgaaaagggtggcgtagagaaagagagagagttttataggttatttgtagaaggagagtcgcgatcgtttttggcgcgtggcgtgatttattttttttttttatcgcgggtaatagtcggatcgagtcggagtttcgtttcgtaggtggggtcgggagttttattcgtggcgtttcgatggggcgtttttagtaggcgggtgtagtttgtttcgcgtatttaggcgttttcggtatttacgaaacggatttaaagagttttaatattaatgtaatattttattttgatttatttttgttttttgagaaaagcggttcgaaatgagt

SEQ ID NO: 18 - DNA, 758 bp, Artificial Sequence
  chemically treated genomic DNA (Homo sapiens) CpG-island No: 18
actcatttcgaaccgcttttctcaaaaaacaaaaataaatcaaaataaaatattacattaatattaaaactctttaaatccgtttcgtaaataccgaaaacgcctaaatacgcgaaacaaactacacccgcctactaaaaacgccccatcgaaacgccacgaataaaactcccgaccccacctacgaaacgaaactccgactcgatccgactattacccgcgataaaaaaaaaaaataaatcacgccacgcgccaaaaacgatcgcgactctccttctacaaataacctataaaactctctctctttctctacgccacccttttcgtaacactaaaaaaccccgtcctctcctcccaatcccgcctcctccgaacgttccccctactacctaaaataatacgatcccaaatcgcgaatcacgcgacgaaaaaaacgtaacctacccccgacccaaccgactcttctttacctctactaaaatccgaaaaataacgttaactactaaaacgataccgaaccgaaattacgtcgccttaatcctcctaactaccgccgtcaactataccgtcgcgcaacacgcgccgccgataaataaacttaaaccgaaacgcaaaaaaaaacgtacaaatacgaacgcgaataaaaacgcaaatataacgacgcgaacgaatacaaaaaacacctcgtactaaacaacttctttacgaaaatctataatttcgtacacaaaaatataaatacaaaacgaactaacgaa

SEQ ID NO: 19 - DNA, 758 bp, Artificial Sequence
  chemically treated genomic DNA (Homo sapiens) CpG-island No: 19
atttatttcgggtcgttttttttagagggtaaagatgggttagggtgggatgttatattagtgttgagattttttggattcgtttcgtgggtatcgaggacgtttgggtacgcgggataggttgtattcgtttgttagaggcgttttatcgaggcgttacgggtgaagttttcggttttatttacggggcggggtttcggttcggttcgattattgttcgcggtgggggagggggatggattacgttacgcgttaaaggcgatcgcgattttttttttgtaggtagtttgtaaggttttttttttttttttacgttatttttttcgtggtattgaaaagtttcgttttttttttttagtttcgtttttttcgagcgttttttttattgtttggaatggtgcggttttaggtcgcgggttacgcggcggagggggcgtggtttgttttcggtttagtcggtttttttttgtttttgttggagttcggggagtggcgttggttgttagagcgatgtcgggtcggagttgcgtcgttttagtttttttggttgtcgtcgttagttgtgtcgtcgcgtagtacgcgtcgtcggtgagtgagtttgagtcgaggcgtagagaggggcgtgtaggtgcgggcgcggatggaggcgtaggtgtggcggcgcgagcgggtataaggaatatttcgtgttgggtagtttttttacgggggtttgtggtttcgtgtataggggtgtgggtgtagagcgggttggcgaa

SEQ ID NO: 20 - DNA, 758 bp, Artificial Sequence
  chemically treated genomic DNA (Homo sapiens) CpG-island No: 20
ttcgccaacccgctctacacccacacccctatacacgaaaccacaaacccccgtaaaaaaactacccaacacgaaatattccttatacccgctcgcgccgccacacctacgcctccatccgcgcccgcacctacacgcccctctctacgcctcgactcaaactcactcaccgacgacgcgtactacgcgacgacacaactaacgacgacaaccaaaaaaactaaaacgacgcaactccgacccgacatcgctctaacaaccaacgccactccccgaactccaacaaaaacaaaaaaaaaccgactaaaccgaaaacaaaccacgccccctccgccgcgtaacccgcgacctaaaaccgcaccattccaaacaataaaaaaaacgctcgaaaaaaacgaaactaaaaaaaaaaaacgaaacttttcaataccacgaaaaaaataacgtaaaaaaaaaaaaaaaaccttacaaactacctacaaaaaaaaaatcgcgatcgcctttaacgcgtaacgtaatccatccccctcccccaccgcgaacaataatcgaaccgaaccgaaaccccgccccgtaaataaaaccgaaaacttcacccgtaacgcctcgataaaacgcctctaacaaacgaatacaacctatcccgcgtacccaaacgtcctcgatacccacgaaacgaatccaaaaaatctcaacactaatataacatcccaccctaacccatctttaccctctaaaaaaaacgacccgaaataaat

SEQ ID NO: 21 - DNA, 728 bp, Artificial Sequence
  chemically treated genomic DNA (Homo sapiens) CpG-island No: 21
aagaaagtcgaggcgtcgaggtttttaaagttggtagtttcgggtggcggtgtagggcgaaggggggcggggggaatcgtcggatatgcggttttggattttggtgttgtatttggggttgttgagcgtcgcgttgggttgcgggttggtcgagcgttttcgtcgggttcggagagattcgcgggtcggtcgattttcgcgtttcgtcgtcgggttcggttatttgttttattcgggcgtgttcgacggcggtcgcgtttcgtcgtcgtcgtcgtcgtcgtcgggcggtgtttgggaagtcgtgcgcgtttttcggcggcggcgtagtagcgggaggcgaggggcgttatcgaggagtcgagttcgtcgagtcggatatattttagcgggcgaggcgagtagttgcgttttcgggtcgatttcgagttgtttcgggacgcgtttacgttgtaagtgtggttgcgagcggaggggggttagaggttttcggtagtgattataggtaggtgagggcgtttcggcgggcgttgtatcgtttttgcggttttagaggttcgcgggtgtttgggcgcgggtggcgggcgggtcgggggtttgcgggcgtgtttgtgcgagaggtgtttcgcgagcggcgtagagatatcgggcgagttgagagttttattttgttttatcggtggaatgggtatattcggaaggcgtagttgttttatttttgggaggaattt

SEQ ID NO: 22 - DNA, 728 bp, Artificial Sequence
  chemically treated genomic DNA (Homo sapiens) CpG-island No: 22
aaattcctcccaaaaataaaacaactacgccttccgaatatacccattccaccgataaaacaaaataaaactctcaactcgcccgatatctctacgccgctcgcgaaacacctctcgcacaaacacgcccgcaaacccccgacccgcccgccacccgcgcccaaacacccgcgaacctctaaaaccgcaaaaacgatacaacgcccgccgaaacgccctcacctacctataatcactaccgaaaacctctaacccccctccgctcgcaaccacacttacaacgtaaacgcgtcccgaaacaactcgaaatcgacccgaaaacgcaactactcgcctcgcccgctaaaatatatccgactcgacgaactcgactcctcgataacgcccctcgcctcccgctactacgccgccgccgaaaaacgcgcacgacttcccaaacaccgcccgacgacgacgacgacgacgacgaaacgcgaccgccgtcgaacacgcccgaataaaacaaataaccgaacccgacgacgaaacgcgaaaatcgaccgacccgcgaatctctccgaacccgacgaaaacgctcgaccaacccgcaacccaacgcgacgctcaacaaccccaaatacaacaccaaaatccaaaaccgcatatccgacgattccccccgccccccttcgccctacaccgccacccgaaactaccaactttaaaaacctcgacgcctcgactttctt

SEQ ID NO: 23 - DNA, 728 bp, Artificial Sequence
  chemically treated genomic DNA (Homo sapiens) CpG-island No: 23
aggttttttttagggatggagtagttacgtttttcgagtgtgtttattttatcgatggagtaaagtgaggtttttagttcgttcgatgtttttgcgtcgttcgcggggtatttttcgtatagatacgttcgtaagttttcgattcgttcgttattcgcgtttagatattcgcgagtttttggggtcgtagggacggtgtagcgttcgtcgaggcgtttttatttatttgtgattattgtcggagatttttggttttttttcgttcgtagttatatttgtagcgtgaacgcgtttcggggtagttcgaggtcggttcggaggcgtagttgttcgtttcgttcgttgaaatatattcggttcggcgggttcggtttttcggtggcgtttttcgtttttcgttgttgcgtcgtcgtcgggggacgcgtacggttttttaggtatcgttcggcggcggcggcggcggcggcgaagcgcggtcgtcgtcgggtacgttcgggtggggtaggtggtcgggttcggcggcggggcgcgggggtcggtcggttcgcgggttttttcgggttcggcggggacgttcggttagttcgtagtttagcgcggcgtttagtagttttaggtgtagtattaaaatttagagtcgtatgttcgacggtttttttcgttttttttcgttttgtatcgttattcggagttgttagttttgggagtttcggcgtttcgattttttt

SEQ ID NO: 24 - DNA, 728 bp, Artificial Sequence
  chemically treated genomic DNA (Homo sapiens) CpG-island No: 24
aaaaaaatcgaaacgccgaaactcccaaaactaacaactccgaataacgatacaaaacgaaaaaaaacgaaaaaaaccgtcgaacatacgactctaaattttaatactacacctaaaactactaaacgccgcgctaaactacgaactaaccgaacgtccccgccgaacccgaaaaaacccgcgaaccgaccgacccccgcgccccgccgccgaacccgaccacctaccccacccgaacgtacccgacgacgaccgcgcttcgccgccgccgccgccgccgccgaacgatacctaaaaaaccgtacgcgtcccccgacgacgacgcaacaacgaaaaacgaaaaacgccaccgaaaaaccgaacccgccgaaccgaatatatttcaacgaacgaaacgaacaactacgcctccgaaccgacctcgaactaccccgaaacgcgttcacgctacaaatataactacgaacgaaaaaaaaccaaaaatctccgacaataatcacaaataaataaaaacgcctcgacgaacgctacaccgtccctacgaccccaaaaactcgcgaatatctaaacgcgaataacgaacgaatcgaaaacttacgaacgtatctatacgaaaaataccccgcgaacgacgcaaaaacatcgaacgaactaaaaacctcactttactccatcgataaaataaacacactcgaaaaacgtaactactccatccctaaaaaaaacct

SEQ ID NO: 25 - DNA, 579 bp, Artificial Sequence
  chemically treated genomic DNA (Homo sapiens) CpG-island No: 25
cgggtatttcggttttcgatggtgttttagaggcgtcgtttttgttgggggcgtggttattttgttagttcgggcgtaggggttcgaatcgggtgtatattggtcggtttttttgttaggatcgtttttcgagtgtaagacgggcgggttgttgagggcgtttcgcgggtttggtttgggtcggggaatttcgggacggcgtcgtagtagggttacgaatttttcggtttttgttttttaaattatttttaggtataggtaatcgcggagagtcgggcgtaacgtagacgcgtttcgttgtttggttttgatttcgtttgatcgtttttaaatttgggaggatcgacgtttttgcgcgataggttcggtaacgtttttttttcgttttcgcgatttttagtttgtttacgcgttgtagggtataggtgggaaggggcggcgggtgtttttgcgtttgcgcggaatttagcgcgcgtttcgttttacgtatcggttttgaggagggttttttttcgttttttttttttttttttttttttttttcgtttatttggggtcgagtttggtaggcgcgtaggt

SEQ ID NO: 26 - DNA, 579 bp, Artificial Sequence
  chemically treated genomic DNA (Homo sapiens) CpG-island No: 26
acctacgcgcctaccaaactcgaccccaaataaacgaaaaaaaaaaaaaaaaaaaaaaaaaaaacgaaaaaaaaccctcctcaaaaccgatacgtaaaacgaaacgcgcgctaaattccgcgcaaacgcaaaaacacccgccgccccttcccacctataccctacaacgcgtaaacaaactaaaaatcgcgaaaacgaaaaaaaaacgttaccgaacctatcgcgcaaaaacgtcgatcctcccaaatttaaaaacgatcaaacgaaatcaaaaccaaacaacgaaacgcgtctacgttacgcccgactctccgcgattacctatacctaaaaataatttaaaaaacaaaaaccgaaaaattcgtaaccctactacgacgccgtcccgaaattccccgacccaaaccaaacccgcgaaacgccctcaacaacccgcccgtcttacactcgaaaaacgatcctaacaaaaaaaccgaccaatatacacccgattcgaacccctacgcccgaactaacaaaataaccacgcccccaacaaaaacgacgcctctaaaacaccatcgaaaaccgaaatacccg

SEQ ID NO: 27 - DNA, 579 bp, Artificial Sequence
  chemically treated genomic DNA (Homo sapiens) CpG-island No: 27
gtttgcgcgtttattaggttcgattttaggtgagcggaggagaagagggagggaggagagggggcggggagagattttttttaaagtcggtgcgtggggcggagcgcgcgttgggtttcgcgtaggcgtagagatattcgtcgtttttttttatttgtgttttgtagcgcgtggataggttaggggtcgcgggagcgggagggaggcgttgtcgggtttgtcgcgtaaggacgtcggtttttttaggtttgagggcggttaggcggggttaaggttaggtagcggggcgcgtttgcgttgcgttcgatttttcgcggttatttgtgtttagaggtgatttgaagggtaggggtcgagagattcgtagttttgttgcggcgtcgtttcggagtttttcggtttagattagattcgcggggcgtttttagtagttcgttcgttttgtattcggagagcggttttggtaggaaggtcggttagtgtgtattcggttcgggtttttgcgttcgggttggtaagatggttacgtttttagtagagacggcgtttttaggatattatcggggatcgaggtattcg

SEQ ID NO: 28 - DNA, 579 bp, Artificial Sequence
  chemically treated genomic DNA (Homo sapiens) CpG-island No: 28
cgaatacctcgatccccgataatatcctaaaaacgccgtctctactaaaaacgtaaccatcttaccaacccgaacgcaaaaacccgaaccgaatacacactaaccgaccttcctaccaaaaccgctctccgaatacaaaacgaacgaactactaaaaacgccccgcgaatctaatctaaaccgaaaaactccgaaacgacgccgcaacaaaactacgaatctctcgacccctacccttcaaatcacctctaaacacaaataaccgcgaaaaatcgaacgcaacgcaaacgcgccccgctacctaaccttaaccccgcctaaccgccctcaaacctaaaaaaaccgacgtccttacgcgacaaacccgacaacgcctccctcccgctcccgcgacccctaacctatccacgcgctacaaaacacaaataaaaaaaaacgacgaatatctctacgcctacgcgaaacccaacgcgcgctccgccccacgcaccgactttaaaaaaaatctctccccgccccctctcctccctccctcttctcctccgctcacctaaaatcgaacctaataaacgcgcaaac

SEQ ID NO: 29 - DNA, 519 bp, Artificial Sequence
  chemically treated genomic DNA (Homo sapiens) CpG-island No: 29
gcgttaaatttaggttgcggtttttggcgtagtttcggtttcgtttgattttagtttttatttcgttgtttttggtgttttatcgttcgcggttgtttggggatttgttcggtgattagtgacgtaaaagagattaaggtttttattggacggcgaagttcggtaggagttaatttcggggttggttcgggagaaatttcggcgaagggtttcgaatagtcgggagattacggggcggggacgagttgtcgcgttggttgttcgtgtaggagcgggattcggaatagatcgtcgtgagagaggaggggcgtcggtcgggattcgcggttcggagttcgggatcggtgagtagggggtgtatatgagatatatagcgaagtaatagtttcgtacgtttatcgggtttggggcgatttaacgtagtcgtcgggttcgggtttaaaacggggttaggttttcgggcgggtttaggagggggttaagttcgttgcgttttttttgttagttagattttttttg

SEQ ID NO: 30 - DNA, 519 bp, Artificial Sequence
  chemically treated genomic DNA (Homo sapiens) CpG-island No: 30
caaaaaaaatctaactaacaaaaaaaacgcaacgaacttaaccccctcctaaacccgcccgaaaacctaaccccgttttaaacccgaacccgacgactacgttaaatcgccccaaacccgataaacgtacgaaactattacttcgctatatatctcatatacaccccctactcaccgatcccgaactccgaaccgcgaatcccgaccgacgcccctcctctctcacgacgatctattccgaatcccgctcctacacgaacaaccaacgcgacaactcgtccccgccccgtaatctcccgactattcgaaacccttcgccgaaatttctcccgaaccaaccccgaaattaactcctaccgaacttcgccgtccaataaaaaccttaatctcttttacgtcactaatcaccgaacaaatccccaaacaaccgcgaacgataaaacaccaaaaacaacgaaataaaaactaaaatcaaacgaaaccgaaactacgccaaaaaccgcaacctaaatttaacgc

SEQ ID NO: 31 - DNA, 519 bp, Artificial Sequence
  chemically treated genomic DNA (Homo sapiens) CpG-island No: 31
taggagggatttggttggtagggaggacgtagcgaatttgatttttttttgagttcgttcgggggtttggtttcgttttgaattcgggttcggcggttgcgttgggtcgttttaaattcggtgagcgtacgagattgttgtttcgttgtatgttttatgtgtattttttatttatcggtttcgagtttcgggtcgcgaatttcggtcggcgtttttttttttttacggcggtttgtttcgggtttcgtttttgtacgagtaattagcgcgatagttcgttttcgtttcgtaatttttcggttattcggggtttttcgtcgagatttttttcggattagtttcgggattggtttttgtcgaatttcgtcgtttaatgggaattttagttttttttacgttattgattatcgggtaaatttttagatagtcgcgggcggtggggtattaggggtagcgaaatggaaattgaaattaggcgggatcgaggttgcgttaagagtcgtagtttgagtttggcgt

SEQ ID NO: 32 - DNA, 519 bp, Artificial Sequence
  chemically treated genomic DNA (Homo sapiens) CpG-island No: 32
acgccaaactcaaactacgactcttaacgcaacctcgatcccgcctaatttcaatttccatttcgctacccctaataccccaccgcccgcgactatctaaaaatttacccgataatcaataacgtaaaaaaaactaaaattcccattaaacgacgaaattcgacaaaaaccaatcccgaaactaatccgaaaaaaatctcgacgaaaaaccccgaataaccgaaaaattacgaaacgaaaacgaactatcgcgctaattactcgtacaaaaacgaaacccgaaacaaaccgccgtaaaaaaaaaaaaacgccgaccgaaattcgcgacccgaaactcgaaaccgataaataaaaaatacacataaaacatacaacgaaacaacaatctcgtacgctcaccgaatttaaaacgacccaacgcaaccgccgaacccgaattcaaaacgaaaccaaacccccgaacgaactcaaaaaaaaatcaaattcgctacgtcctccctaccaaccaaatccctccta

SEQ ID NO: 33 - DNA, 534 bp, Artificial Sequence
  chemically treated genomic DNA (Homo sapiens) CpG-island No: 33
tatacgttatcgcgttcgtttggggtaggttagggaagggacgcgaggtagtcgtgttttcgtattttgtgagcggtagcgttttgggtttcgttgattttgtgttattttagtgattttcgttttagtttttgacggggttatattcggggtgtaaattaggatttttattgaaggcgcgcgattttgagaggtttttttttggttttttagttgtgagtttttttgcgggcggcggagttcgtttttattagaatcgtttagaggtcggcgttgtttttttggggtgacggagtagttggaagcgttttcggattttggaattagtgggcggttcgtgggaggggttgaggcgtagttttttgtttattcggtttcgaatttatcgcggtgttgttttaagcgagttagattttagatcgcgttttagttcggattcggaatttttgtttcgcgggtttgtatttttatagcggtaggtgtgagtgtcgcgtagttggagattagaagtttgaaggtagttcggtttttttt

SEQ ID NO: 34 - DNA, 534 bp, Artificial Sequence
  chemically treated genomic DNA (Homo sapiens) CpG-island No: 34
aaaaaaaaccgaactaccttcaaacttctaatctccaactacgcgacactcacacctaccgctataaaaatacaaacccgcgaaacaaaaattccgaatccgaactaaaacgcgatctaaaatctaactcgcttaaaacaacaccgcgataaattcgaaaccgaataaacaaaaaactacgcctcaacccctcccacgaaccgcccactaattccaaaatccgaaaacgcttccaactactccgtcaccccaaaaaaacaacgccgacctctaaacgattctaataaaaacgaactccgccgcccgcaaaaaaactcacaactaaaaaaccaaaaaaaaacctctcaaaatcgcgcgccttcaataaaaatcctaatttacaccccgaatataaccccgtcaaaaactaaaacgaaaatcactaaaataacacaaaatcaacgaaacccaaaacgctaccgctcacaaaatacgaaaacacgactacctcgcgtcccttccctaacctaccccaaacgaacgcgataacgtata

SEQ ID NO: 35 - DNA, 534 bp, Artificial Sequence
  chemically treated genomic DNA (Homo sapiens) CpG-island No: 35
ggggagggtcgagttgtttttaggtttttggtttttagttgcgcggtatttatatttgtcgttgtgaaaatgtagattcgcggggtaggaatttcgagttcgggttggagcgcgatttggaatttgattcgtttgaaatagtatcgcggtggattcggagtcgggtgagtagggaattgcgttttagttttttttacgggtcgtttattgattttaggattcgaaaacgtttttagttgtttcgttattttaggaaggtagcgtcggtttttgggcggttttggtggaaacgggtttcgtcgttcgtaggaaaatttataattaagggattaggaaaaagttttttagggtcgcgcgtttttagtgaggattttaatttatatttcgagtgtggtttcgttaaagattagagcgaaggttattgaaatgatataagattagcgaggtttagggcgttgtcgtttatagaatgcggagatacggttgtttcgcgttttttttttgatttgttttaggcggacgcggtgacgtgtg

SEQ ID NO: 36 - DNA, 534 bp, Artificial Sequence
  chemically treated genomic DNA (Homo sapiens) CpG-island No: 36
cacacgtcaccgcgtccgcctaaaacaaatcaaaaaaaaaacgcgaaacaaccgtatctccgcattctataaacgacaacgccctaaacctcgctaatcttatatcatttcaataaccttcgctctaatctttaacgaaaccacactcgaaatataaattaaaatcctcactaaaaacgcgcgaccctaaaaaactttttcctaatcccttaattataaattttcctacgaacgacgaaacccgtttccaccaaaaccgcccaaaaaccgacgctaccttcctaaaataacgaaacaactaaaaacgttttcgaatcctaaaatcaataaacgacccgtaaaaaaaactaaaacgcaattccctactcacccgactccgaatccaccgcgatactatttcaaacgaatcaaattccaaatcgcgctccaacccgaactcgaaattcctaccccgcgaatctacattttcacaacgacaaatataaataccgcgcaactaaaaaccaaaaacctaaaaacaactcgaccctcccc

SEQ ID NO: 37 - DNA, 602 bp, Artificial Sequence
  chemically treated genomic DNA (Homo sapiens) CpG-island No: 37
ttttttttcgttttttaggtatttgcggagttattttacgtacgtgttatttaggtaggtttttaattgtttcgttttatgggtcgttttttatttgcgtttggtgatttgagtcgttatgttcgtcgcggtttaagagcgtaggttttcgtttagggcgatgtaatttttgtcgtcgtaggcgttttgtcggtattcgcggaggaagcgttcgttcgattttacgtcgtagttatatattatttggatggtgtgagaatttggtttcgatttcgcggttagtttagtttttcgagtttcgtttagtttcgattaattcggggggatttttggtttaaattgaaaatgaaatcgggtaaaggcgtttgggtttttttcggggtaagggtttcggggtttcgcggtttcggggtggatttcggattcggagattgtgggcgatttggttcgttcgtgggggatgaggggttttgatttgcgttttcggtcggggttatttatcggtttcgttttggttgtagtagtcgcgtagggtttttaggtttattcggttagtttgtgattgggtttttatatttcgtgttttttggttttaatatttt

SEQ ID NO: 38 - DNA, 602 bp, Artificial Sequence
  chemically treated genomic DNA (Homo sapiens) CpG-island No: 38
aaaatattaaaaccaaaaaacacgaaatataaaaacccaatcacaaactaaccgaataaacctaaaaaccctacgcgactactacaaccaaaacgaaaccgataaataaccccgaccgaaaacgcaaatcaaaacccctcatcccccacgaacgaaccaaatcgcccacaatctccgaatccgaaatccaccccgaaaccgcgaaaccccgaaacccttaccccgaaaaaaacccaaacgcctttacccgatttcattttcaatttaaaccaaaaatccccccgaattaatcgaaactaaacgaaactcgaaaaactaaactaaccgcgaaatcgaaaccaaattctcacaccatccaaataatatataactacgacgtaaaatcgaacgaacgcttcctccgcgaataccgacaaaacgcctacgacgacaaaaattacatcgccctaaacgaaaacctacgctcttaaaccgcgacgaacataacgactcaaatcaccaaacgcaaataaaaaacgacccataaaacgaaacaattaaaaacctacctaaataacacgtacgtaaaataactccgcaaatacctaaaaaacgaaaaaaaa

SEQ ID NO: 39 - DNA, 602 bp, Artificial Sequence
  chemically treated genomic DNA (Homo sapiens) CpG-island No: 39
ggagtattgggattaggagatacggaatgtgaaggtttagttatagattgatcgagtggatttggggattttgcgcggttattataattagagcgaggtcggtgagtgatttcggtcgggggcgtaggttaggattttttattttttacggacgggttaggtcgtttatagttttcgggttcgagatttatttcgaagtcgcgggatttcgagatttttgtttcgggagaggtttaggcgtttttattcggttttatttttagtttaggttaaaaattttttcgggttggtcggggttgggcggggttcgggggattgggttgatcgcggggtcggggttaggtttttatattatttagataatgtatggttgcgacgtggggtcggacgggcgtttttttcgcgggtatcggtaggacgtttacgacggtaaggattatatcgttttgaacgaggatttgcgtttttggatcgcggcggatatggcggtttagattattaagcgtaagtgggaggcggtttatgaggcggagtagttgagagtttatttggatggtacgtgcgtggagtggtttcgtagatatttggagaacgggaaggag

SEQ ID NO: 40 - DNA, 602 bp, Artificial Sequence
  chemically treated genomic DNA (Homo sapiens) CpG-island No: 40
ctccttcccgttctccaaatatctacgaaaccactccacgcacgtaccatccaaataaactctcaactactccgcctcataaaccgcctcccacttacgcttaataatctaaaccgccatatccgccgcgatccaaaaacgcaaatcctcgttcaaaacgatataatccttaccgtcgtaaacgtcctaccgatacccgcgaaaaaaacgcccgtccgaccccacgtcgcaaccatacattatctaaataatataaaaacctaaccccgaccccgcgatcaacccaatcccccgaaccccgcccaaccccgaccaacccgaaaaaatttttaacctaaactaaaaataaaaccgaataaaaacgcctaaacctctcccgaaacaaaaatctcgaaatcccgcgacttcgaaataaatctcgaacccgaaaactataaacgacctaacccgtccgtaaaaaataaaaaatcctaacctacgcccccgaccgaaatcactcaccgacctcgctctaattataataaccgcgcaaaatccccaaatccactcgatcaatctataactaaaccttcacattccgtatctcctaatcccaatactcc

SEQ ID NO: 41 - DNA, 726 bp, Artificial Sequence
  chemically treated genomic DNA (Homo sapiens) CpG-island No: 41
atgttcgtcgcggtttaggagcgtaggttttagtttcgggttatgtaatttttgttatcgttggcgtgttgtttatattcgcggaggaggcgtttttttagttttaagtcgtagttatatattatttggagggtgttagattttggtttcgttttcgcggttagtttcgtttatcgagtttcgttttcgtttcgattaattcgcggggattttggtttaaacggaaaatgaaatttggtaaaggcgtttgggtttttttcgggtcgaggatttggcgggtttcgtagtttcggggtggattttggagtcggagattcgcgggggggattcgggacgttcgtgggggatgaggaggggtcgtgattttcgttttaggtcggggttatttatcggtttagttttggtggtagtagcggcgcggtatgggtaggtttatttttgttagtttgtgcgcgggtttgatgtttcgtgtgtttcggttttaatatttcggttttttttgttttaattacggcgattgcggttatattttcggagtcgtcgcgtcgttgtcgaatcgtacgaattgcgtgtcgtttacgtagtttattgcgatgtatcggggtttttcgcgattcggtcgggatacggcggtgttgaaatattttatggagtgggtatttgggggcgaggaggggttgagattcgttcgatttttttttttgcgttgtttttcgggttttgcgt

SEQ ID NO: 42 - DNA, 726 bp, Artificial Sequence
  chemically treated genomic DNA (Homo sapiens) CpG-island No: 42
acgcaaaacccgaaaaacaacgcaaaaaaaaaaatcgaacgaatctcaacccctcctcgcccccaaatacccactccataaaatatttcaacaccgccgtatcccgaccgaatcgcgaaaaaccccgatacatcgcaataaactacgtaaacgacacgcaattcgtacgattcgacaacgacgcgacgactccgaaaatataaccgcaatcgccgtaattaaaacaaaaaaaaccgaaatattaaaaccgaaacacacgaaacatcaaacccgcgcacaaactaacaaaaataaacctacccataccgcgccgctactaccaccaaaactaaaccgataaataaccccgacctaaaacgaaaatcacgacccctcctcatcccccacgaacgtcccgaatcccccccgcgaatctccgactccaaaatccaccccgaaactacgaaacccgccaaatcctcgacccgaaaaaaacccaaacgcctttaccaaatttcattttccgtttaaaccaaaatccccgcgaattaatcgaaacgaaaacgaaactcgataaacgaaactaaccgcgaaaacgaaaccaaaatctaacaccctccaaataatatataactacgacttaaaactaaaaaaacgcctcctccgcgaatataaacaacacgccaacgataacaaaaattacataacccgaaactaaaacctacgctcctaaaccgcgacgaacat

SEQ ID NO: 43 - DNA, 726 bp, Artificial Sequence
  chemically treated genomic DNA (Homo sapiens) CpG-island No: 43
gcgtaggattcggggagtagcgtaaggaggagggtcggacgggttttagttttttttcgtttttaggtatttattttataaggtattttagtatcgtcgtgtttcggtcgggtcgcggggagtttcggtatatcgtagtgggttacgtggacgatacgtagttcgtgcggttcgatagcgacgcggcgatttcgaggatgtagtcgtagtcgtcgtggttggagtaggagggatcggagtattgggatcggagtatacggaatattaggttcgcgtatagattgataagagtgaatttgtttatgtcgcgtcgttattattattagagttaggtcggtgaatgatttcggtttggggcgaaggttacgatttttttttattttttacggacgtttcgggtttttttcgcgagttttcggttttaagatttatttcgaggttgcgggattcgttagattttcgattcgggagaggtttaggcgtttttattaggttttatttttcgtttaggttaaaattttcgcgggttggtcggggcgggggcggggttcggtgggcggggttgatcgcgggggcggggttagggtttaatattttttagataatgtatggttgcgatttggggttggaagggcgtttttttcgcgggtatgaatagtacgttaacgatggtaaggattatatagttcggaattaggatttgcgtttttggatcgcggcggatat

SEQ ID NO: 44 - DNA, 726 bp, Artificial Sequence
  chemically treated genomic DNA (Homo sapiens) CpG-island No: 44
atatccgccgcgatccaaaaacgcaaatcctaattccgaactatataatccttaccatcgttaacgtactattcatacccgcgaaaaaaacgcccttccaaccccaaatcgcaaccatacattatctaaaaaatattaaaccctaaccccgcccccgcgatcaaccccgcccaccgaaccccgcccccgccccgaccaacccgcgaaaattttaacctaaacgaaaaataaaacctaataaaaacgcctaaacctctcccgaatcgaaaatctaacgaatcccgcaacctcgaaataaatcttaaaaccgaaaactcgcgaaaaaaacccgaaacgtccgtaaaaaataaaaaaaaatcgtaaccttcgccccaaaccgaaatcattcaccgacctaactctaataataataacgacgcgacataaacaaattcactcttatcaatctatacgcgaacctaatattccgtatactccgatcccaatactccgatccctcctactccaaccacgacgactacgactacatcctcgaaatcgccgcgtcgctatcgaaccgcacgaactacgtatcgtccacgtaacccactacgatataccgaaactccccgcgacccgaccgaaacacgacgatactaaaataccttataaaataaatacctaaaaacgaaaaaaaactaaaacccgtccgaccctcctccttacgctactccccgaatcctacgc

SEQ ID NO: 45 - DNA, 677 bp, Artificial Sequence
  chemically treated genomic DNA (Homo sapiens) CpG-island No: 45
agttcggtcgtttgttcgtttgtcgtttgtcgcgttcgttcggtttcgttcgttcggttcgatcgtcgcgtcgcgcgtatggggcgcgttttcgggggggcggtcgagggtcgttgagcgtcgggttcgttttcgtcgatgcgtttagtcgttcgcgtcgggggttttaggtcgcgtcgggttcggggttgagtcgtttttcgcgttcggtatgttcggttcggttcgtcgttcgtcgtcgtttagggttcgagttcgcgcggcgtatatttagttcggcggcgtcgcgtagtcgagggagttcgtttgttgcgagttaggcgcggggcgttaaggttatcggttcgacggggcgtacgcgcggttatggaggttaaggttcgttcgagtcggcgttcgcgcgcgtagcgggatcgtggtcggcgtcgggaggtcgttcgcgacgttcgcgtttagagttcgtcgtcgggcgacgagttcgagtttagtttcggtaaggagaacgcgggttttcgcggcgcgttttttcgaggcgtcgttttcgcgtttcgtatcgcgcgtttttcgcgtcgtcgtcgtcgcgagtttagttcgtaggaggaggaggttatcgacggtttcgttatcgttagttttagtattttggaggttttggagaaggatatggttttgaagtt

SEQ ID NO: 46 - DNA, 677 bp, Artificial Sequence
  chemically treated genomic DNA (Homo sapiens) CpG-island No: 46
aacttcaaaaccatatccttctccaaaacctccaaaatactaaaactaacgataacgaaaccgtcgataacctcctcctcctacgaactaaactcgcgacgacgacgacgcgaaaaacgcgcgatacgaaacgcgaaaacgacgcctcgaaaaaacgcgccgcgaaaacccgcgttctccttaccgaaactaaactcgaactcgtcgcccgacgacgaactctaaacgcgaacgtcgcgaacgacctcccgacgccgaccacgatcccgctacgcgcgcgaacgccgactcgaacgaaccttaacctccataaccgcgcgtacgccccgtcgaaccgataaccttaacgccccgcgcctaactcgcaacaaacgaactccctcgactacgcgacgccgccgaactaaatatacgccgcgcgaactcgaaccctaaacgacgacgaacgacgaaccgaaccgaacataccgaacgcgaaaaacgactcaaccccgaacccgacgcgacctaaaacccccgacgcgaacgactaaacgcatcgacgaaaacgaacccgacgctcaacgaccctcgaccgcccccccgaaaacgcgccccatacgcgcgacgcgacgatcgaaccgaacgaacgaaaccgaacgaacgcgacaaacgacaaacgaacaaacgaccgaact

SEQ ID NO: 47 - DNA, 677 bp, Artificial Sequence
  chemically treated genomic DNA (Homo sapiens) CpG-island No: 47
ggttttagggttatatttttttttagggtttttagggtgttgaagttggcgatggcgaagtcgtcgatgattttttttttttgcgagttggattcgcggcggcggcggcgcgggggacgcgcggtgcggggcgcgggggcggcgtttcgggggggcgcgtcgcggaggttcgcgttttttttgtcggggttgggttcgggttcgtcgttcgacgacggattttgggcgcgggcgtcgcgggcggtttttcggcgtcggttacggtttcgttgcgcgcgcgagcgtcggttcgggcggattttggtttttatggtcgcgcgtgcgtttcgtcgggtcggtgattttgacgtttcgcgtttggttcgtagtaggcgggttttttcggttacgcggcgtcgtcgggttgagtgtgcgtcgcgcgggttcgggttttgggcggcggcgggcggcgggtcgggtcgggtatgtcgggcgcggggggcggtttagtttcgggttcggcgcggtttgggattttcggcgcgggcggttgggcgtatcggcgggggcgggttcggcgtttagcggttttcggtcgttttttcgggggcgcgttttatgcgcgcggcgcggcgatcgggtcgagcgggcggggtcgggcgggcgcggtaggcggtaggcgggtaggcggtcgggtt

SEQ ID NO: 48 - DNA, 677 bp, Artificial Sequence
  chemically treated genomic DNA (Homo sapiens) CpG-island No: 48
aacccgaccgcctacccgcctaccgcctaccgcgcccgcccgaccccgcccgctcgacccgatcgccgcgccgcgcgcataaaacgcgcccccgaaaaaacgaccgaaaaccgctaaacgccgaacccgcccccgccgatacgcccaaccgcccgcgccgaaaatcccaaaccgcgccgaacccgaaactaaaccgccccccgcgcccgacatacccgacccgacccgccgcccgccgccgcccaaaacccgaacccgcgcgacgcacactcaacccgacgacgccgcgtaaccgaaaaaacccgcctactacgaaccaaacgcgaaacgtcaaaatcaccgacccgacgaaacgcacgcgcgaccataaaaaccaaaatccgcccgaaccgacgctcgcgcgcgcaacgaaaccgtaaccgacgccgaaaaaccgcccgcgacgcccgcgcccaaaatccgtcgtcgaacgacgaacccgaacccaaccccgacaaaaaaaacgcgaacctccgcgacgcgcccccccgaaacgccgcccccgcgccccgcaccgcgcgtcccccgcgccgccgccgccgcgaatccaactcgcaaaaaaaaaaaatcatcgacgacttcgccatcgccaacttcaacaccctaaaaaccctaaaaaaaaatataaccctaaaacc

SEQ ID NO: 49 - DNA, 693 bp, Artificial Sequence
  chemically treated genomic DNA (Homo sapiens) CpG-island No: 49
ttttatttcgttttagtttcgtttcggatttattcgcgcggcgtagttttcgagtagttttttttttaagtagtgttagtttgtgcggcggatttcgggattttttgggtttttcggtaggagtcgacgttgttgtatttgtttgatagttaagaagtcggggttaggaggggcgcggtttttgcgcgcgggtagcgtttatttttttttcggaattttcgggttcgaatttcgcgtcgagcgagttcgttttcgtgtcgttttcgattggttagtttatttgttttttttcgcgttattggatagcgttttaagatttttcgttttttattttttttgattagtttataagttttttcgggttgtcgtagtgaggaggagtcgtttgggcgcggagatgtttcgacgtatttagtgggtttaaatttagacgttattgcgtttgcgtatatttttttttttttttttaatagagtgaaataggattttagggcgttcgttttgcgtaggcgcggttaggggtagaggcggggtcgggagcgaggcgtagggggtgtggttaaagcgtagtagggggttttcgcggttggtaagggacgttcgggaagagtcggttgggggcgggaaggggttgagcgggggttttgggagggtttaaggggtttaaaggggaagggggtataggggttaggt

SEQ ID NO: 50 - DNA, 693 bp, Artificial Sequence
  chemically treated genomic DNA (Homo sapiens) CpG-island No: 50
acctaacccctatacccccttcccctttaaaccccttaaaccctcccaaaacccccgctcaaccccttcccgcccccaaccgactcttcccgaacgtcccttaccaaccgcgaaaaccccctactacgctttaaccacaccccctacgcctcgctcccgaccccgcctctacccctaaccgcgcctacgcaaaacgaacgccctaaaatcctatttcactctattaaaaaaaaaaaaaaaaatatacgcaaacgcaataacgtctaaatttaaacccactaaatacgtcgaaacatctccgcgcccaaacgactcctcctcactacgacaacccgaaaaaacttataaactaatcaaaaaaaataaaaaacgaaaaatcttaaaacgctatccaataacgcgaaaaaaaacaaataaactaaccaatcgaaaacgacacgaaaacgaactcgctcgacgcgaaattcgaacccgaaaattccgaaaaaaaaataaacgctacccgcgcgcaaaaaccgcgcccctcctaaccccgacttcttaactatcaaacaaatacaacaacgtcgactcctaccgaaaaacccaaaaaatcccgaaatccgccgcacaaactaacactacttaaaaaaaaaactactcgaaaactacgccgcgcgaataaatccgaaacgaaactaaaacgaaataaaa

SEQ ID NO: 51 - DNA, 693 bp, Artificial Sequence
  chemically treated genomic DNA (Homo sapiens) CpG-island No: 51
atttggtttttgtattttttttttttttggattttttgaatttttttaggattttcgtttagttttttttcgtttttaatcgatttttttcgaacgttttttattaatcgcgagagttttttattgcgttttggttatattttttacgtttcgttttcggtttcgtttttgtttttgatcgcgtttgcgtaaggcgggcgttttaaagttttattttattttgttgggaggagggggaaaggtgtacgtaggcgtagtggcgtttaaatttgggtttattaaatgcgtcggagtattttcgcgtttaggcggtttttttttattgcggtaattcgggaaaatttgtgaattaattagaaaaagtggaaggcgggagattttggggcgttgtttaatggcgcggaagagaataaatgagttggttaatcgggaacggtacgggggcgggttcgttcggcgcgaagttcgggttcgggaatttcgaaggaggggtaggcgttgttcgcgcgtagaggtcgcgttttttttggtttcggttttttggttgttaaatagatgtagtaacgtcggtttttgtcgaggagtttaaggggtttcgggattcgtcgtataggttggtattgtttgaagaggaggttattcggagattgcgtcgcgcgggtagattcgaaacggggttggggcggagtggga

SEQ ID NO: 52 - DNA, 693 bp, Artificial Sequence
  chemically treated genomic DNA (Homo sapiens) CpG-island No: 52
tcccactccgccccaaccccgtttcgaatctacccgcgcgacgcaatctccgaataacctcctcttcaaacaataccaacctatacgacgaatcccgaaaccccttaaactcctcgacaaaaaccgacgttactacatctatttaacaaccaaaaaaccgaaaccaaaaaaaacgcgacctctacgcgcgaacaacgcctacccctccttcgaaattcccgaacccgaacttcgcgccgaacgaacccgcccccgtaccgttcccgattaaccaactcatttattctcttccgcgccattaaacaacgccccaaaatctcccgccttccactttttctaattaattcacaaattttcccgaattaccgcaataaaaaaaaaccgcctaaacgcgaaaatactccgacgcatttaataaacccaaatttaaacgccactacgcctacgtacacctttccccctcctcccaacaaaataaaataaaactttaaaacgcccgccttacgcaaacgcgatcaaaaacaaaaacgaaaccgaaaacgaaacgtaaaaaatataaccaaaacgcaataaaaaactctcgcgattaataaaaaacgttcgaaaaaaatcgattaaaaacgaaaaaaaactaaacgaaaatcctaaaaaaattcaaaaaatccaaaaaaaaaaaaaatacaaaaaccaaat

SEQ ID NO: 53 - DNA, 575 bp, Artificial Sequence
  unsure (347, 363..364, 436): chemically treated genomic DNA (Homo sapiens) CpG-island No: 53
cggattcggaggagtaggaggcgaggttcgtcggagttttgaattttcgttgttttgtcgcgcggtgatttcgcgtttcggcgtcgttcgattcgtggttgtttcgagacgattggtgggggcgcggcggcggcggcggcggttgttgggggtggggagacgcgcggcgaggagacgagcgaggttagcgagtttgagggaggatcgcgagtcgttgtcgtcgttatgttcgaagattcgagcgttttgttttggtttattaatagggacgattacgagttgtaggaggtgatcggtgagagtaggcgttgcggaggggggagrcgcggcgttgggaggcggggranacgggaacgtgggganncgcgggagttcggggagcgtagtttttataggaattcgtggggcgtttgtggggttgggggtttgtaggatntttgtgtcgaggagcgcgtgtgagacgggaagggggttttgaggcgcgcgtttgtgaggtggcgtggggtggggtgaggtttgagggggtttaggagagatttgtgtataggatttttaaatgtgtggataggagcggt

SEQ ID NO: 54 - DNA, 575 bp, Artificial Sequence
  unsure (140, 212..213, 229): chemically treated genomic DNA (Homo sapiens) CpG-island No: 54
accgctcctatccacacatttaaaaatcctatacacaaatctctcctaaaccccctcaaacctcaccccaccccacgccacctcacaaacgcgcgcctcaaaacccccttcccgtctcacacgcgctcctcgacacaaanatcctacaaacccccaaccccacaaacgccccacgaattcctataaaaactacgctccccgaactcccgcgnntccccacgttcccgtntyccccgcctcccaacgccgcgyctcccccctccgcaacgcctactctcaccgatcacctcctacaactcgtaatcgtccctattaataaaccaaaacaaaacgctcgaatcttcgaacataacgacgacaacgactcgcgatcctccctcaaactcgctaacctcgctcgtctcctcgccgcgcgtctccccacccccaacaaccgccgccgccgccgccgcgcccccaccaatcgtctcgaaacaaccacgaatcgaacgacgccgaaacgcgaaatcaccgcgcgacaaaacaacgaaaattcaaaactccgacgaacctcgcctcctactcctccgaatccg

SEQ ID NO: 55 - DNA, 575 bp, Artificial Sequence
  unsure (140, 212..213, 229): chemically treated genomic DNA (Homo sapiens) CpG-island No: 55
gtcgtttttgtttatatatttgagaattttgtatataaattttttttgagtttttttaagttttattttattttacgttattttataggcgcgcgttttaaaatttttttttcgttttatacgcgtttttcgatataagngttttataagtttttagttttataagcgttttacgaatttttatgagggttgcgtttttcgagttttcgcgnntttttacgttttcgtntytttcgttttttagcgtcgcgyttttttttttcgtagcgtttgtttttatcgattattttttgtagttcgtaatcgtttttgttgatggattagggtagggcgttcgagttttcggatatgacggcggtagcggttcgcggtttttttttaaattcgttgatttcgttcgttttttcgtcgcgcgtttttttatttttaatagtcgtcgtcgtcgtcgtcgcgtttttattaatcgtttcggaatagttacgggtcggacggcgtcggggcgcggggttatcgcgcggtagagtagcgggggtttagagtttcggcggatttcgttttttgttttttcgagttcg

SEQ ID NO: 56 - DNA, 575 bp, Artificial Sequence
  unsure (347, 363..364, 436): chemically treated genomic DNA (Homo sapiens) CpG-island No: 56
cgaactcgaaaaaacaaaaaacgaaatccgccgaaactctaaacccccgctactctaccgcgcgataaccccgcgccccgacgccgtccgacccgtaactattccgaaacgattaataaaaacgcgacgacgacgacgacgactattaaaaataaaaaaacgcgcgacgaaaaaacgaacgaaatcaacgaatttaaaaaaaaaccgcgaaccgctaccgccgtcatatccgaaaactcgaacgccctaccctaatccatcaacaaaaacgattacgaactacaaaaaataatcgataaaaacaaacgctacgaaaaaaaaaarcgcgacgctaaaaaacgaaaranacgaaaacgtaaaaanncgcgaaaactcgaaaaacgcaaccctcataaaaattcgtaaaacgcttataaaactaaaaacttataaaacncttatatcgaaaaacgcgtataaaacgaaaaaaaaattttaaaacgcgcgcctataaaataacgtaaaataaaataaaacttaaaaaaactcaaaaaaaatttatatacaaaattctcaaatatataaacaaaaacgac

SEQ ID NO: 57 - DNA, 1127 bp, Artificial Sequence
  chemically treated genomic DNA (Homo sapiens) CpG-island No: 57
ggtgttgtcgtagtgtttttcgtttcgtttcggtttcgcgtatttgtttaggttatgatgagtttcggcggcgcggacgcgttgttgggcgtttcgttcgcgtcgttgtatggcggcggtagtttttattacgcgttagttcgaaagggtggcgtaggcgggacgcgtttcgtcgttggtttttttagcggtttttattcgtggatacggacgttcgtgagtttcgtgttcgtttcgtttagtcgttttcgtggcgtaggcgtcgttttaagtatcgattcgttggatacgttgagtaacgggtcggagggttgtatggtggcggtggttattttacgtagtgagaaggagtagttgtaggcgttgaacgatcgtttcgtcgggtatatcgataaggtgcggtagttggaggcgtataatcgtagtttggagggcgaggttgcggcgttgcggtagtagtaggcgggtcgtttcgttatgggcgagttgtacgagcgcgaggttcgcgagatgcgcggcgcggtgttgcgtttgggcgcggcgcgcggttagttacgtttggagtaggagtatttgttcgaggatatcgcgtacgtgcgttagcgtttagacgacgaggttcggtagcgagaggaggtcgaggcggcggttcgcgcgttggcgcgtttcgcgtaggaggtcgaggcggcgcgcgtggatttgtagaagaaggcgtaggcgttgtaggaggagtgcggttatttgcggcgttattattaggaagaggtgggcgagttgttcggttagatttagggtttcggcgtcgcgtaggcgtagatgtaggtcgagacgcgcgacgttttgaagtgcgacgtgacgtcggcgttgcgcgagattcgcgcgtagtttgaaggttacgcggtgtagagtacgttgtagttcgaggagtggtttcgaggtacgtaggcgcgcgggtggggggaggggcgtttttgttgatttcgtagcgaatttttgggttgcgtgatttaagggggcgttgtcggattgcgcgtggagtggcgcgttgtttattttttttttgtaaagtgtatgtttttagttaaatcgtagttttattttgggttttttgtgggacgttttaattt

SEQ ID NO: 58 - DNA, 1127 bp, Artificial Sequence
  chemically treated genomic DNA (Homo sapiens) CpG-island No: 58
aaattaaaacgtcccacaaaaaacccaaaataaaactacgatttaactaaaaacatacactttacaaaaaaaaaataaacaacgcgccactccacgcgcaatccgacaacgcccccttaaatcacgcaacccaaaaattcgctacgaaatcaacaaaaacgcccctccccccacccgcgcgcctacgtacctcgaaaccactcctcgaactacaacgtactctacaccgcgtaaccttcaaactacgcgcgaatctcgcgcaacgccgacgtcacgtcgcacttcaaaacgtcgcgcgtctcgacctacatctacgcctacgcgacgccgaaaccctaaatctaaccgaacaactcgcccacctcttcctaataataacgccgcaaataaccgcactcctcctacaacgcctacgccttcttctacaaatccacgcgcgccgcctcgacctcctacgcgaaacgcgccaacgcgcgaaccgccgcctcgacctcctctcgctaccgaacctcgtcgtctaaacgctaacgcacgtacgcgatatcctcgaacaaatactcctactccaaacgtaactaaccgcgcgccgcgcccaaacgcaacaccgcgccgcgcatctcgcgaacctcgcgctcgtacaactcgcccataacgaaacgacccgcctactactaccgcaacgccgcaacctcgccctccaaactacgattatacgcctccaactaccgcaccttatcgatatacccgacgaaacgatcgttcaacgcctacaactactccttctcactacgtaaaataaccaccgccaccatacaaccctccgacccgttactcaacgtatccaacgaatcgatacttaaaacgacgcctacgccacgaaaacgactaaacgaaacgaacacgaaactcacgaacgtccgtatccacgaataaaaaccgctaaaaaaaccaacgacgaaacgcgtcccgcctacgccaccctttcgaactaacgcgtaataaaaactaccgccgccatacaacgacgcgaacgaaacgcccaacaacgcgtccgcgccgccgaaactcatcataacctaaacaaatacgcgaaaccgaaacgaaacgaaaaacactacgacaacacc

SEQ ID NO: 59 - DNA, 1127 bp, Artificial Sequence
  chemically treated genomic DNA (Homo sapiens) CpG-island No: 59
gagttggggcgttttataagagatttagagtaaaattgcgatttaattaggggtatgtattttgtagagggaaggtgagtagcgcgttattttacgcgtagttcggtagcgtttttttgggttacgtagtttaaaagttcgttgcggggttagtaggggcgtttttttttttattcgcgcgtttgcgtatttcggaattatttttcggattgtagcgtgttttgtatcgcgtggtttttaagttgcgcgcgaatttcgcgtagcgtcgacgttacgtcgtattttagggcgtcgcgcgtttcggtttgtatttgcgtttgcgcggcgtcggagttttggatttggtcgagtagttcgtttatttttttttggtggtggcgtcgtaggtagtcgtattttttttgtagcgtttgcgtttttttttgtaggtttacgcgcgtcgtttcggttttttgcgcgaagcgcgttagcgcgcgggtcgtcgtttcggttttttttcgttgtcgggtttcgtcgtttaggcgttggcgtacgtgcgcgatgttttcgagtaggtgtttttgttttaggcgtagttgatcgcgcgtcgcgtttaggcgtagtatcgcgtcgcgtatttcgcggatttcgcgttcgtatagttcgtttatagcggagcggttcgtttgttgttgtcgtagcgtcgtagtttcgttttttaggttgcggttgtgcgtttttagttgtcgtattttgtcgatgtattcggcgaagcggtcgtttagcgtttgtagttgtttttttttattgcgtgaggtggttatcgttattatgtagtttttcggttcgttgtttagcgtgtttagcgagtcggtgtttgaggcggcgtttgcgttacggaagcggttgggcgaggcggatacggagtttacggacgttcgtgtttacgagtggaagtcgttggaggagttagcggcggagcgcgtttcgtttgcgttattttttcgggttagcgcgtagtggaggttgtcgtcgttatgtagcggcgcgaacggggcgtttagtagcgcgttcgcgtcgtcgaagtttattatggtttgagtaggtgcgcgaggtcgggacggggcgggaggtattgcggtagtatt

SEQ ID NO: 60 - DNA, 1127 bp, Artificial Sequence
  chemically treated genomic DNA (Homo sapiens) CpG-island No: 60
aatactaccgcaatacctcccgccccgtcccgacctcgcgcacctactcaaaccataataaacttcgacgacgcgaacgcgctactaaacgccccgttcgcgccgctacataacgacgacaacctccactacgcgctaacccgaaaaaataacgcaaacgaaacgcgctccgccgctaactcctccaacgacttccactcgtaaacacgaacgtccgtaaactccgtatccgcctcgcccaaccgcttccgtaacgcaaacgccgcctcaaacaccgactcgctaaacacgctaaacaacgaaccgaaaaactacataataacgataaccacctcacgcaataaaaaaaaacaactacaaacgctaaacgaccgcttcgccgaatacatcgacaaaatacgacaactaaaaacgcacaaccgcaacctaaaaaacgaaactacgacgctacgacaacaacaaacgaaccgctccgctataaacgaactatacgaacgcgaaatccgcgaaatacgcgacgcgatactacgcctaaacgcgacgcgcgatcaactacgcctaaaacaaaaacacctactcgaaaacatcgcgcacgtacgccaacgcctaaacgacgaaacccgacaacgaaaaaaaaccgaaacgacgacccgcgcgctaacgcgcttcgcgcaaaaaaccgaaacgacgcgcgtaaacctacaaaaaaaaacgcaaacgctacaaaaaaaatacgactacctacgacgccaccaccaaaaaaaaataaacgaactactcgaccaaatccaaaactccgacgccgcgcaaacgcaaatacaaaccgaaacgcgcgacgccctaaaatacgacgtaacgtcgacgctacgcgaaattcgcgcgcaacttaaaaaccacgcgatacaaaacacgctacaatccgaaaaataattccgaaatacgcaaacgcgcgaataaaaaaaaaaacgcccctactaaccccgcaacgaacttttaaactacgtaacccaaaaaaacgctaccgaactacgcgtaaaataacgcgctactcaccttccctctacaaaatacatacccctaattaaatcgcaattttactctaaatctcttataaaacgccccaactc

SEQ ID NO: 61 - DNA, 954 bp, Artificial Sequence
  chemically treated genomic DNA (Homo sapiens) CpG-island No: 61
agggttgaaacgtaagtattttaggacgtatatatatttttttatttcggagtatagttaggcgttcgaggtttttacgcggatacgtacgtgtgtatcgagtacgtatattttttatattgttatacgtttttgttcgtttttcgagtcgttattttcggattttcggggttcgagtcggggttagcgacgtcgtcgtcgcggatgtttaagtcgtagacggcgtcgtcgagtagtatcgcgggtcggtagaggcgcggttcgttcgtgggtcggtggcgttcggggtagttatcgaataggaattggcggatgatggtcgttttgtttacgttcggggcgtttagaacggttattcgtaggttattttttatggtcggtcggcgttgtcgtttttcgcgttggaaagttttatgggtcggcgtcgtatcgtgcgtttttaggtcgtgcgtttcgcgcgttttgttcggtgcgttacggtttcgtcgcgtttttcgtcgtttttcggagtatcgagatcggagagggtaggttcgaggtaggagttggcggcgggagggtagatagatagtcgagtgggtagataggtggcgggcgcgcgagcggttcgggcgggtgtcgaagttcgagagagagtagagtcggagcggcgtttagatatcgttttcgtttcgtagcgttaatttaggcgtcggcggacgcgcgaggcgtcgaagttcgtttttttcgcggcgcgggtttcgtagcggtgcggggcgcggggggtagcgttgtttttcggagtttttgtgtttttatttttttttcgttttcgcgtttggagtcgtcgttttagtcgtcggcgcgagcgagcggggtttttcggaggcggcgatgaggtaatcgttcgttttttttatttttttttatcgtttaggacgttttttttaggaagggtcgtaggaaggtgattgg

SEQ ID NO: 62 - DNA, 954 bp, Artificial Sequence
  chemically treated genomic DNA (Homo sapiens) CpG-island No: 62
ccaatcaccttcctacgacccttcctaaaaaaaacgtcctaaacgataaaaaaaaataaaaaaaacgaacgattacctcatcgccgcctccgaaaaaccccgctcgctcgcgccgacgactaaaacgacgactccaaacgcgaaaacgaaaaaaaaataaaaacacaaaaactccgaaaaacaacgctaccccccgcgccccgcaccgctacgaaacccgcgccgcgaaaaaaacgaacttcgacgcctcgcgcgtccgccgacgcctaaattaacgctacgaaacgaaaacgatatctaaacgccgctccgactctactctctctcgaacttcgacacccgcccgaaccgctcgcgcgcccgccacctatctacccactcgactatctatctaccctcccgccgccaactcctacctcgaacctaccctctccgatctcgatactccgaaaaacgacgaaaaacgcgacgaaaccgtaacgcaccgaacaaaacgcgcgaaacgcacgacctaaaaacgcacgatacgacgccgacccataaaactttccaacgcgaaaaacgacaacgccgaccgaccataaaaaataacctacgaataaccgttctaaacgccccgaacgtaaacaaaacgaccatcatccgccaattcctattcgataactaccccgaacgccaccgacccacgaacgaaccgcgcctctaccgacccgcgatactactcgacgacgccgtctacgacttaaacatccgcgacgacgacgtcgctaaccccgactcgaaccccgaaaatccgaaaataacgactcgaaaaacgaacaaaaacgtataacaatataaaaaatatacgtactcgatacacacgtacgtatccgcgtaaaaacctcgaacgcctaactatactccgaaataaaaaaatatatatacgtcctaaaatacttacgtttcaaccct

SEQ ID NO: 63 - DNA, 954 bp, Artificial Sequence
  chemically treated genomic DNA (Homo sapiens) CpG-island No: 63
ttagttatttttttgcgattttttttgggaggggcgttttgggcggtgggggaaggtgggaggggcgggcggttattttatcgtcgttttcgggaggtttcgttcgttcgcgtcggcggttggggcggcgattttaggcgcggaagcgagagaaggatagaggtatagaggtttcgggaggtagcgttgtttttcgcgtttcgtatcgttgcgggattcgcgtcgcgagaggggcggatttcggcgtttcgcgcgttcgtcggcgtttgggttggcgttgcggggcggaggcggtgtttgagcgtcgtttcggttttgttttttttcgagtttcggtattcgttcgagtcgttcgcgcgttcgttatttgtttgtttattcggttgtttgtttgttttttcgtcgttagtttttgtttcgggtttgtttttttcggtttcggtgtttcgaggggcgacgagaagcgcgacggggtcgtggcgtatcgggtagggcgcgcggggcgtacggtttgggggcgtacggtgcggcgtcggtttatgaggttttttagcgcggggagcgatagcgtcggtcggttatggggggtagtttgcgggtggtcgttttaggcgtttcgggcgtgggtaagacggttattattcgttagtttttgttcggtgattatttcgagcgttatcggtttacggacgggtcgcgtttttatcgattcgcggtgttgttcgacggcgtcgtttacgatttgagtattcgcgacggcgacgtcgttggtttcggttcgagtttcgggggttcggaggtagcggttcgaggagcgggtaggggcgtgtgatagtgtgaggggtgtgcgtgttcggtgtatacgtgcgtgttcgcgtggaggtttcgggcgtttggttgtgtttcgggatggagggatgtgtgtgcgttttgggatatttgcgttttagtttt

SEQ ID NO: 64 - DNA, 954 bp, Artificial Sequence
  chemically treated genomic DNA (Homo sapiens) CpG-island No: 64
aaaactaaaacgcaaatatcccaaaacgcacacacatccctccatcccgaaacacaaccaaacgcccgaaacctccacgcgaacacgcacgtatacaccgaacacgcacacccctcacactatcacacgcccctacccgctcctcgaaccgctacctccgaacccccgaaactcgaaccgaaaccaacgacgtcgccgtcgcgaatactcaaatcgtaaacgacgccgtcgaacaacaccgcgaatcgataaaaacgcgacccgtccgtaaaccgataacgctcgaaataatcaccgaacaaaaactaacgaataataaccgtcttacccacgcccgaaacgcctaaaacgaccacccgcaaactaccccccataaccgaccgacgctatcgctccccgcgctaaaaaacctcataaaccgacgccgcaccgtacgcccccaaaccgtacgccccgcgcgccctacccgatacgccacgaccccgtcgcgcttctcgtcgcccctcgaaacaccgaaaccgaaaaaaacaaacccgaaacaaaaactaacgacgaaaaaacaaacaaacaaccgaataaacaaacaaataacgaacgcgcgaacgactcgaacgaataccgaaactcgaaaaaaaacaaaaccgaaacgacgctcaaacaccgcctccgccccgcaacgccaacccaaacgccgacgaacgcgcgaaacgccgaaatccgcccctctcgcgacgcgaatcccgcaacgatacgaaacgcgaaaaacaacgctacctcccgaaacctctatacctctatccttctctcgcttccgcgcctaaaatcgccgccccaaccgccgacgcgaacgaacgaaacctcccgaaaacgacgataaaataaccgcccgcccctcccaccttcccccaccgcccaaaacgcccctcccaaaaaaaatcgcaaaaaaataactaa

SEQ ID NO: 65 - DNA, 574 bp, Artificial Sequence
  chemically treated genomic DNA (Homo sapiens) CpG-island No: 65
gtcggcggttaagtgggcgcgaatgaatgaacgaatttttagttttttttttttttttggttggggacgtcgttcgcgtttttgtagcgtcgcgttttttttatgatttttgatttcgtaaattttttatttaggatttttgatttttcgttttatttttttttttggttcgttcgggttttcgtttttttattcgtaggttttaatagttttcggcgtttcggttcggttcggtttggtattaaaatgttcgcggtttttatttttcgttttttcggtgcgttcgggttgtcggcggttcggagtttcgcggttgttatttgtcgggcggaagtgagttgttcgcgcgcgggtattttcggtggacgtaaggtttgaaggcggggttaagggtataattttggcgggggtggtgttcgtggggcggggtaagaaaaggggaagagtttaacggtattaatttttcggtagtcgcggcgttgttatgttgtagtttttcgtagagtttttgggaaattatttcgttagttaatttagcgtgagggggtcgggtaaggtcgtagggagtttgaag

SEQ ID NO: 66 - DNA, 574 bp, Artificial Sequence
  chemically treated genomic DNA (Homo sapiens) CpG-island No: 66
cttcaaactccctacgaccttacccgaccccctcacgctaaattaactaacgaaataatttcccaaaaactctacgaaaaactacaacataacaacgccgcgactaccgaaaaattaataccgttaaactcttccccttttcttaccccgccccacgaacaccacccccgccaaaattatacccttaaccccgccttcaaaccttacgtccaccgaaaatacccgcgcgcgaacaactcacttccgcccgacaaataacaaccgcgaaactccgaaccgccgacaacccgaacgcaccgaaaaaacgaaaaataaaaaccgcgaacattttaataccaaaccgaaccgaaccgaaacgccgaaaactattaaaacctacgaataaaaaaacgaaaacccgaacgaaccaaaaaaaaaaataaaacgaaaaatcaaaaatcctaaataaaaaatttacgaaatcaaaaatcataaaaaaaacgcgacgctacaaaaacgcgaacgacgtccccaaccaaaaaaaaaaaaaaaactaaaaattcgttcattcattcgcgcccacttaaccgccgac

SEQ ID NO: 67 - DNA, 574 bp, Artificial Sequence
  chemically treated genomic DNA (Homo sapiens) CpG-island No: 67
ttttaaattttttacgattttgttcggtttttttacgttgaattggttagcgggatggttttttaagggttttgcgggagattgtagtatagtagcgtcgcggttgtcgaggggttaatatcgttgggttttttttttttttttgtttcgttttacgggtattattttcgttagggttgtatttttgatttcgtttttaggttttgcgtttatcggaagtattcgcgcgcgggtagtttattttcgttcggtaggtgatagtcgcggggtttcgagtcgtcggtagttcggacgtatcgggagagcgagaggtggaggtcgcggatattttggtgttaagtcgaatcgagtcggggcgtcgggagttattgggatttgcgggtgaggaagcggggattcgggcgagttaggagaagaagtggggcgaggggttaggggttttaggtgaggggtttgcggggttagaggttatgaagaggacgcggcgttgtaggggcgcgagcgacgtttttagttagaggaggaggaagggttgagggttcgtttatttattcgcgtttatttggtcgtcggt

SEQ ID NO: 68 - DNA, 574 bp, Artificial Sequence
  chemically treated genomic DNA (Homo sapiens) CpG-island No: 68
accgacgaccaaataaacgcgaataaataaacgaaccctcaacccttcctcctcctctaactaaaaacgtcgctcgcgcccctacaacgccgcgtcctcttcataacctctaaccccgcaaacccctcacctaaaacccctaacccctcgccccacttcttctcctaactcgcccgaatccccgcttcctcacccgcaaatcccaataactcccgacgccccgactcgattcgacttaacaccaaaatatccgcgacctccacctctcgctctcccgatacgtccgaactaccgacgactcgaaaccccgcgactatcacctaccgaacgaaaataaactacccgcgcgcgaatacttccgataaacgcaaaacctaaaaacgaaatcaaaaatacaaccctaacgaaaataatacccgtaaaacgaaacaaaaaaaaaaaaaaaacccaacgatattaacccctcgacaaccgcgacgctactatactacaatctcccgcaaaacccttaaaaaaccatcccgctaaccaattcaacgtaaaaaaaccgaacaaaatcgtaaaaaatttaaaa

SEQ ID NO: 69 - DNA, 864 bp, Artificial Sequence
  chemically treated genomic DNA (Homo sapiens) CpG-island No: 69
gggtgcggatcggagaggtgagtgggtgcgtttgtttagcggttcgttcggtgtggtcgtgttcggttcgcgtggggatgggggtgtttttttcgttgggtaattatattagcgtaatcggggcgtcggcgcggtttacgttagcggcgttgtttcggcggcgggggttgggcgtggcggtgatgttgggcgtggtggtcgcgttgggcgtggtggtcgcgttgtcgtttttattcgggtaggcgtgttggagaaggatgtcggcgtatagatggtttttagtttggcgggcgtagaatagcgtcgtgcggatttgggcgttacgggtcgttacgttcgcgtcgtattagagggcggaaacggtcgcgtgatcgagcgtttttagggcgtttatattcggcgtcgttttttttatatggttaagtttattttcggggtttttttgggaatttcgggttttttcgcgttaggcgtttttcgagatgaagttttaaagatttttttttttttttttagtttacgtatttatagtagtagttgcgtgatgacgacgtgggcgagttcggtcgttaggtggagtggggagcgtagttgtgggttttttacgttggtgtcgagcggttcgtgtcgcgtatgggttaaaagtaggagaacggtagttacgttttgggtttgtacggcggtttatagttggcggtttagcggttttttcgaggtgtttagcggcgttaggaatagtagttgttcgtatttggcgcgaatttacgattcgcgtttttttttgtaagattagggattaacggaaaaggttttagggatttttagttaggatttttgtttttatttacgggatcgttttaggtt

SEQ ID NO: 70 - DNA, 864 bp, Artificial Sequence
  chemically treated genomic DNA (Homo sapiens) CpG-island No: 70
aacctaaaacgatcccgtaaataaaaacaaaaatcctaactaaaaatccctaaaaccttttccgttaatccctaatcttacaaaaaaaaacgcgaatcgtaaattcgcgccaaatacgaacaactactattcctaacgccgctaaacacctcgaaaaaaccgctaaaccgccaactataaaccgccgtacaaacccaaaacgtaactaccgttctcctacttttaacccatacgcgacacgaaccgctcgacaccaacgtaaaaaacccacaactacgctccccactccacctaacgaccgaactcgcccacgtcgtcatcacgcaactactactataaatacgtaaactaaaaaaaaaaaaaaaaatctttaaaacttcatctcgaaaaacgcctaacgcgaaaaaacccgaaattcccaaaaaaaccccgaaaataaacttaaccatataaaaaaaacgacgccgaatataaacgccctaaaaacgctcgatcacgcgaccgtttccgccctctaatacgacgcgaacgtaacgacccgtaacgcccaaatccgcacgacgctattctacgcccgccaaactaaaaaccatctatacgccgacatccttctccaacacgcctacccgaataaaaacgacaacgcgaccaccacgcccaacgcgaccaccacgcccaacatcaccgccacgcccaacccccgccgccgaaacaacgccgctaacgtaaaccgcgccgacgccccgattacgctaatataattacccaacgaaaaaaacacccccatccccacgcgaaccgaacacgaccacaccgaacgaaccgctaaacaaacgcacccactcacctctccgatccgcaccc

SEQ ID NO: 71 - DNA, 864 bp, Artificial Sequence
  chemically treated genomic DNA (Homo sapiens) CpG-island No: 71
aatttgagacggtttcgtgggtaggggtagaagttttggttgggggtttttagagtttttttcgttgatttttggttttgtagggaggagcgcgagtcgtggattcgcgttaagtacgagtagttattgtttttggcgtcgttgagtatttcggaggagtcgttgggtcgttagttgtgggtcgtcgtgtaggtttaggacgtggttatcgtttttttgtttttggtttatgcgcgatacgggtcgttcgatattagcgtagaggatttatagttgcgttttttattttatttggcggtcgagttcgtttacgtcgttattacgtaattgttgttgtgggtacgtgagttggggggaggaaagggggtttttgaggttttatttcggaaaacgtttggcgcgggaaagttcgaaatttttagagggatttcggaagtaggtttggttatgtgggggaggcggcgtcgggtgtgggcgttttggggacgttcggttacgcggtcgttttcgttttttagtacggcgcggacgtggcggttcgtgacgtttaggttcgtacggcgttgttttacgttcgttaggttggaagttatttgtgcgtcgatatttttttttagtacgtttgttcgggtgagggcggtagcgcggttattacgtttagcgcggttattacgtttagtattatcgttacgtttagttttcgtcgtcggagtagcgtcgttagcgtgggtcgcgtcgacgtttcggttgcgttggtatagttgtttagcgggagagatatttttatttttacgcgggtcgggtacgattatatcgggcggatcgttggatagacgtatttatttattttttcgattcgtattt

SEQ ID NO: 72 - DNA, 864 bp, Artificial Sequence
  chemically treated genomic DNA (Homo sapiens) CpG-island No: 72
aaatacgaatcgaaaaaataaataaatacgtctatccaacgatccgcccgatataatcgtacccgacccgcgtaaaaataaaaatatctctcccgctaaacaactataccaacgcaaccgaaacgtcgacgcgacccacgctaacgacgctactccgacgacgaaaactaaacgtaacgataatactaaacgtaataaccgcgctaaacgtaataaccgcgctaccgccctcacccgaacaaacgtactaaaaaaaaatatcgacgcacaaataacttccaacctaacgaacgtaaaacaacgccgtacgaacctaaacgtcacgaaccgccacgtccgcgccgtactaaaaaacgaaaacgaccgcgtaaccgaacgtccccaaaacgcccacacccgacgccgcctcccccacataaccaaacctacttccgaaatccctctaaaaatttcgaactttcccgcgccaaacgttttccgaaataaaacctcaaaaaccccctttcctccccccaactcacgtacccacaacaacaattacgtaataacgacgtaaacgaactcgaccgccaaataaaataaaaaacgcaactataaatcctctacgctaatatcgaacgacccgtatcgcgcataaaccaaaaacaaaaaaacgataaccacgtcctaaacctacacgacgacccacaactaacgacccaacgactcctccgaaatactcaacgacgccaaaaacaataactactcgtacttaacgcgaatccacgactcgcgctcctccctacaaaaccaaaaatcaacgaaaaaaactctaaaaacccccaaccaaaacttctacccctacccacgaaaccgtctcaaatt

SEQ ID NO: 73 - DNA, 896 bp, Artificial Sequence
  chemically treated genomic DNA (Homo sapiens) CpG-island No: 73
tttttttcgtttcgtttttttttttattttttattcgtttttcggcgttcgtttcgttcgttcgttatttcgggggggttttcgtcgtcgtcgtcgtcggaaggagtcgttatttgttatcgtcgagcgtacgggtcgagttaagtttgatttcggagtcggagggggattgggatcgagagaacggcgatggggggcggtttcgtcgtaggaggattcgggcgcgtaatttcgggggttcggttcgttttagatttagattcgcggggtgcggtattttgagttttttttttcgttttttgttttggttatggtcgtttatttcgtcgttttcgggtcgttagttcgttcggtttcgtaagtatcggagtttcggcggtggtagtagtgaacggttgtcgtaggtttcgaagatttcggttcggttcggttttttagcgcgcgtttttttttcggttttgttttttttttttttttcgtcgttagcgagttttttttgtacgttgtttttcgttttcggtgttcggacgatgtttaagtttcggtttcgtatgtttttgaacgagttgaagttgttggtgttgataggcggggggcggtttcgggtcgagtcgtaatttcgggggggtcggggaggcggttgcggttgggcgtttttcgttggttgttttattcgggacggcgacggcgacgaggaggagtattacgggtcggagtcgcgggttcggggtttggtcggcgataaggagtcgcgggtcggatttttgtcgtcgttcgcgtcgtcgttgtcgttttcgggcgcgttggacgttttgtcgtttagtagtagtttggatagcggatttcgaattttttagtgtcggatttgtttttagggttcggagtaggttaggttt

SEQ ID NO: 74 - DNA, 896 bp, Artificial Sequence
  chemically treated genomic DNA (Homo sapiens) CpG-island No: 74
aaacctaacctactccgaaccctaaaaacaaatccgacactaaaaaattcgaaatccgctatccaaactactactaaacgacaaaacgtccaacgcgcccgaaaacgacaacgacgacgcgaacgacgacaaaaatccgacccgcgactccttatcgccgaccaaaccccgaacccgcgactccgacccgtaatactcctcctcgtcgccgtcgccgtcccgaataaaacaaccaacgaaaaacgcccaaccgcaaccgcctccccgacccccccgaaattacgactcgacccgaaaccgccccccgcctatcaacaccaacaacttcaactcgttcaaaaacatacgaaaccgaaacttaaacatcgtccgaacaccgaaaacgaaaaacaacgtacaaaaaaaactcgctaacgacgaaaaaaaaaaaaaaaacaaaaccgaaaaaaaaacgcgcgctaaaaaaccgaaccgaaccgaaatcttcgaaacctacgacaaccgttcactactaccaccgccgaaactccgatacttacgaaaccgaacgaactaacgacccgaaaacgacgaaataaacgaccataaccaaaacaaaaaacgaaaaaaaaaactcaaaataccgcaccccgcgaatctaaatctaaaacgaaccgaacccccgaaattacgcgcccgaatcctcctacgacgaaaccgccccccatcgccgttctctcgatcccaatccccctccgactccgaaatcaaacttaactcgacccgtacgctcgacgataacaaataacgactccttccgacgacgacgacgacgaaaacccccccgaaataacgaacgaacgaaacgaacgccgaaaaacgaataaaaaataaaaaaaaaaacgaaacgaaaaaaa

SEQ ID NO: 75 - DNA, 896 bp, Artificial Sequence
  chemically treated genomic DNA (Homo sapiens) CpG-island No: 75
aggtttgatttgtttcgggttttggaagtagattcggtattgaggggttcggagttcgttgtttaggttattgttgagcgatagggcgtttagcgcgttcgggggcggtagcggcggcgcgggcggcggtaggggttcggttcgcggttttttgtcgtcggttaggtttcgggttcgcggtttcgattcgtagtattttttttcgtcgtcgtcgtcgtttcgggtggagtaattagcgaagggcgtttagtcgtagtcgttttttcggttttttcggggttgcggttcggttcggggtcgtttttcgtttgttagtattagtagttttagttcgtttagaaatatgcggagtcgagatttgagtatcgttcggatatcgggggcggggggtagcgtgtaaggggggttcgttagcggcggggggaggggagaggataaggtcgggaagggggcgcgcgttagagagtcgagtcgggtcggggttttcggggtttgcgatagtcgtttattgttgttatcgtcggggtttcggtgtttgcggggtcgagcgggttggcggttcgggggcggcggggtgggcggttatggttagggtagggggcggggaggggggtttagggtgtcgtatttcgcgggtttgggtttggagcgggtcgggttttcggggttacgcgttcgggtttttttgcggcggggtcgttttttatcgtcgttttttcggttttagttttttttcggtttcgggattaggtttggttcggttcgtgcgttcggcggtggtaaatggcggtttttttcggcggcggcggcggcggagattttttcggagtggcgggcgggcggggcgggcgtcggggagcgggtgaaggatggagggaggggcggggcggggaggg

SEQ ID NO: 76 - DNA, 896 bp, Artificial Sequence
  chemically treated genomic DNA (Homo sapiens) CpG-island No: 76
ccctccccgccccgcccctccctccatccttcacccgctccccgacgcccgccccgcccgcccgccactccgaaaaaatctccgccgccgccgccgccgaaaaaaaccgccatttaccaccgccgaacgcacgaaccgaaccaaacctaatcccgaaaccgaaaaaaaactaaaaccgaaaaaacgacgataaaaaacgaccccgccgcaaaaaaacccgaacgcgtaaccccgaaaacccgacccgctccaaacccaaacccgcgaaatacgacaccctaaacccccctccccgccccctaccctaaccataaccgcccaccccgccgcccccgaaccgccaacccgctcgaccccgcaaacaccgaaaccccgacgataacaacaataaacgactatcgcaaaccccgaaaaccccgacccgactcgactctctaacgcgcgcccccttcccgaccttatcctctcccctccccccgccgctaacgaaccccccttacacgctaccccccgcccccgatatccgaacgatactcaaatctcgactccgcatatttctaaacgaactaaaactactaatactaacaaacgaaaaacgaccccgaaccgaaccgcaaccccgaaaaaaccgaaaaaacgactacgactaaacgcccttcgctaattactccacccgaaacgacgacgacgacgaaaaaaaatactacgaatcgaaaccgcgaacccgaaacctaaccgacgacaaaaaaccgcgaaccgaacccctaccgccgcccgcgccgccgctaccgcccccgaacgcgctaaacgccctatcgctcaacaataacctaaacaacgaactccgaacccctcaataccgaatctacttccaaaacccgaaacaaatcaaacct

SEQ ID NO: 77 - DNA, 598 bp, Artificial Sequence
  chemically treated genomic DNA (Homo sapiens) CpG-island No: 77
ttattttgaagtatgggaatcgcgttgtttcggtcgcgaggatttgggcgtacgtgacggggcgggcgggcgttcgattcgggtagggcgtagttagcggcggtcgtttatgtttaggttacggcggtggcgtttggtgtggttgggcgggcgaggcgggcgttgagaagttcgggaggttttcggggaggcgattgcgtgtttaggcgggtatttttgttagtttcgcgttgcggtcgcgatttcggacgtttcggttggttttttgcgagttgtacgcgcggttttagtttggtttcgagcgtagggcgcgcgttggcggggagggcgcgcgttcgagtttggcggggagcgcgcgttatcggttcgcgcgcgtagtcgtcgggggatgtcgggagcggtttggggagttgtttttggtgttgacggttcgttcgttttcgttcgggacgcgcgattttttggaggtttgggggtgtttttattttggtcggcgttttgcggtgtttttttcgtttttcgtttgttttcggggcgtttcggtttttataacgttgggatttggagttaggtcgaagttgttgtttattcgtagtag

SEQ ID NO: 78 - DNA, 598 bp, Artificial Sequence
  chemically treated genomic DNA (Homo sapiens) CpG-island No: 78
ctactacgaataaacaacaacttcgacctaactccaaatcccaacgttataaaaaccgaaacgccccgaaaacaaacgaaaaacgaaaaaaacaccgcaaaacgccgaccaaaataaaaacacccccaaacctccaaaaaatcgcgcgtcccgaacgaaaacgaacgaaccgtcaacaccaaaaacaactccccaaaccgctcccgacatcccccgacgactacgcgcgcgaaccgataacgcgcgctccccgccaaactcgaacgcgcgccctccccgccaacgcgcgccctacgctcgaaaccaaactaaaaccgcgcgtacaactcgcaaaaaaccaaccgaaacgtccgaaatcgcgaccgcaacgcgaaactaacaaaaatacccgcctaaacacgcaatcgcctccccgaaaacctcccgaacttctcaacgcccgcctcgcccgcccaaccacaccaaacgccaccgccgtaacctaaacataaacgaccgccgctaactacgccctacccgaatcgaacgcccgcccgccccgtcacgtacgcccaaatcctcgcgaccgaaacaacgcgattcccatacttcaaaataa

SEQ ID NO: 79 - DNA, 598 bp, Artificial Sequence
  chemically treated genomic DNA (Homo sapiens) CpG-island No: 79
ttattgcggataagtagtagtttcggtttgattttagattttaacgttgtggaagtcggaacgtttcgagaataggcggagagcggagggagtatcgtagggcgtcggttagggtgggggtatttttaggtttttaggaggtcgcgcgtttcgggcgagagcggacgagtcgttagtattagggatagttttttaggtcgttttcggtatttttcgacgattgcgcgcgcgggtcggtgacgcgcgtttttcgttaggttcgggcgcgcgtttttttcgttagcgcgcgttttgcgttcgggattaggttggagtcgcgcgtgtagttcgtagggagttagtcggggcgttcggagtcgcggtcgtagcgcggagttggtaggggtgttcgtttgggtacgtagtcgttttttcgggggtttttcgggttttttagcgttcgtttcgttcgtttagttatattaggcgttatcgtcgtggtttgggtatgagcggtcgtcgttagttgcgttttgttcgggtcggacgttcgttcgtttcgttacgtgcgtttaagttttcgcggtcggggtagcgcggtttttatgttttaaggtaa

SEQ ID NO: 80 - DNA, 598 bp, Artificial Sequence
  chemically treated genomic DNA (Homo sapiens) CpG-island No: 80
ttaccttaaaacataaaaaccgcgctaccccgaccgcgaaaacttaaacgcacgtaacgaaacgaacgaacgtccgacccgaacaaaacgcaactaacgacgaccgctcatacccaaaccacgacgataacgcctaatataactaaacgaacgaaacgaacgctaaaaaacccgaaaaacccccgaaaaaacgactacgtacccaaacgaacacccctaccaactccgcgctacgaccgcgactccgaacgccccgactaactccctacgaactacacgcgcgactccaacctaatcccgaacgcaaaacgcgcgctaacgaaaaaaacgcgcgcccgaacctaacgaaaaacgcgcgtcaccgacccgcgcgcgcaatcgtcgaaaaataccgaaaacgacctaaaaaactatccctaatactaacgactcgtccgctctcgcccgaaacgcgcgacctcctaaaaacctaaaaatacccccaccctaaccgacgccctacgatactccctccgctctccgcctattctcgaaacgttccgacttccacaacgttaaaatctaaaatcaaaccgaaactactacttatccgcaataa

SEQ ID NO: 81 - DNA, 931 bp, Artificial Sequence
  chemically treated genomic DNA (Homo sapiens) CpG-island No: 81
gaagttggcgtttttgttggaagggcgtttttcgcggagtatttcgatgtaagattcggtgcgcgagggtcgcggtatttcgttttcgtcgtagatcgcgtcgtttttttcgttcgcgttttattatttcgattcggggtcgttttcggttttttcgtcgtcgttttcgtcgggtcgcgtttacgatacggtgcgttttagttttaagttcggtttggaggcgcgtttgggcgcgggcgttgtcggtttgtacgagtcgggcgcggttttcggttcgttgtcgtatttcgagcggtagaagcgcgcgcgttttatgattattttgtaggattcggcgttcgagtcgggcgacgtttttcgattttcgttcgcggttatttcgttcgagcgatttaagcgtcggtcgcggtcgttcggtttcgatagtttttacgttaatttgggcgtttttagcgttagttttttcgtttcgtttaagtcgtagcgtcgtaagagttttttggtgaagtagttgtaggtggaggacgcgtaggagcgcgcggttttggtcgtgggtagtttcggtttcggcggcggtagtttcgttcgcgagtttttttcgatttatcgcggttcgcgttcgggtggtttcgattacggcgcgggcgatggttcggggttcgcgttcggcggttcgggttcggttaaggatcggcggttggaggagcggcgtcgttttattgtgtttttgttcgtgggggttatcgagggtagcgttttcggcgcggatttgttatttttatagttttttcgttttatcgacgagcgttttttggggatcggttttatcgtcggtcgcgatttgttgttgtttttttcggtgtttgttttgaagtcgttggttagcggttcgagtttggggttttcgggttttatttttatttatttattt

SEQ ID NO: 82 - DNA, 931 bp, Artificial Sequence
  chemically treated genomic DNA (Homo sapiens) CpG-island No: 82
aaataaataaataaaaataaaacccgaaaaccccaaactcgaaccgctaaccaacgacttcaaaacaaacaccgaaaaaaacaacaacaaatcgcgaccgacgataaaaccgatccccaaaaaacgctcgtcgataaaacgaaaaaactataaaaataacaaatccgcgccgaaaacgctaccctcgataacccccacgaacaaaaacacaataaaacgacgccgctcctccaaccgccgatccttaaccgaacccgaaccgccgaacgcgaaccccgaaccatcgcccgcgccgtaatcgaaaccacccgaacgcgaaccgcgataaatcgaaaaaaactcgcgaacgaaactaccgccgccgaaaccgaaactacccacgaccaaaaccgcgcgctcctacgcgtcctccacctacaactacttcaccaaaaaactcttacgacgctacgacttaaacgaaacgaaaaaactaacgctaaaaacgcccaaattaacgtaaaaactatcgaaaccgaacgaccgcgaccgacgcttaaatcgctcgaacgaaataaccgcgaacgaaaatcgaaaaacgtcgcccgactcgaacgccgaatcctacaaaataatcataaaacgcgcgcgcttctaccgctcgaaatacgacaacgaaccgaaaaccgcgcccgactcgtacaaaccgacaacgcccgcgcccaaacgcgcctccaaaccgaacttaaaactaaaacgcaccgtatcgtaaacgcgacccgacgaaaacgacgacgaaaaaaccgaaaacgaccccgaatcgaaataataaaacgcgaacgaaaaaaacgacgcgatctacgacgaaaacgaaataccgcgaccctcgcgcaccgaatcttacatcgaaatactccgcgaaaaacgcccttccaacaaaaacgccaacttc

SEQ ID NO: 83 - DNA, 931 bp, Artificial Sequence
  chemically treated genomic DNA (Homo sapiens) CpG-island No: 83
gagtgggtggatgaaggtggaattcgagggttttaggttcgggtcgttgattaacggttttagggtagatatcggggagggtagtagtaggtcgcggtcggcggtggggtcggtttttaggaggcgttcgtcgatggagcgggagggttgtagggatggtagattcgcgtcgggggcgttgttttcgatggtttttacggataggaatatagtggagcggcgtcgtttttttagtcgtcggtttttggtcgggttcgggtcgtcgaacgcgagtttcgggttatcgttcgcgtcgtagtcgaggttattcgggcgcggatcgcggtgggtcggggagggttcgcgggcgaagttgtcgtcgtcgggatcggggttgtttacggttagggtcgcgcgtttttgcgcgttttttatttgtagttgttttattagggggtttttgcggcgttgcggtttggacggagcgaagaggttggcgttgaaggcgtttaggttggcgtaggggttgtcggggtcgggcggtcgcggtcggcgtttgggtcgttcgggcggggtggtcgcgggcgggggtcgaggggcgtcgttcgattcgggcgtcgagttttgtaggatgattatggagcgcgcgcgtttttgtcgttcgggatacggtagcgggtcgagggtcgcgttcggttcgtataggtcggtagcgttcgcgtttaggcgcgtttttaggtcgggtttgaagttggagcgtatcgtgtcgtaggcgcggttcggcgggggcggcggcgagaaggtcgggggcggtttcgagtcgaagtagtagggcgcgggcgggggaggcggcgcggtttgcggcgggggcgggatgtcgcgattttcgcgtatcgggttttgtatcgaggtgtttcgcgggaagcgtttttttagtagggacgttagtttt

SEQ ID NO: 84 - DNA, 931 bp, Artificial Sequence
  chemically treated genomic DNA (Homo sapiens) CpG-island No: 84
aaaactaacgtccctactaaaaaaacgcttcccgcgaaacacctcgatacaaaacccgatacgcgaaaatcgcgacatcccgcccccgccgcaaaccgcgccgcctcccccgcccgcgccctactacttcgactcgaaaccgcccccgaccttctcgccgccgcccccgccgaaccgcgcctacgacacgatacgctccaacttcaaacccgacctaaaaacgcgcctaaacgcgaacgctaccgacctatacgaaccgaacgcgaccctcgacccgctaccgtatcccgaacgacaaaaacgcgcgcgctccataatcatcctacaaaactcgacgcccgaatcgaacgacgcccctcgacccccgcccgcgaccaccccgcccgaacgacccaaacgccgaccgcgaccgcccgaccccgacaacccctacgccaacctaaacgccttcaacgccaacctcttcgctccgtccaaaccgcaacgccgcaaaaaccccctaataaaacaactacaaataaaaaacgcgcaaaaacgcgcgaccctaaccgtaaacaaccccgatcccgacgacgacaacttcgcccgcgaaccctccccgacccaccgcgatccgcgcccgaataacctcgactacgacgcgaacgataacccgaaactcgcgttcgacgacccgaacccgaccaaaaaccgacgactaaaaaaacgacgccgctccactatattcctatccgtaaaaaccatcgaaaacaacgcccccgacgcgaatctaccatccctacaaccctcccgctccatcgacgaacgcctcctaaaaaccgaccccaccgccgaccgcgacctactactaccctccccgatatctaccctaaaaccgttaatcaacgacccgaacctaaaaccctcgaattccaccttcatccacccactc

SEQ ID NO: 85 - DNA, 759 bp, Artificial Sequence
  chemically treated genomic DNA (Homo sapiens) CpG-island No: 85
gggggttcgggcggcggggtttcgtattcggtgaggtttagtggtcgttatttcgtggcgagacgcgtttcgagttcggtgaagttcgcgtcgttggagcgggtggaggggttgggggcgggcgcggggggcgtagggcggtttttcggttttacgttttttattatttttaagtcgtttagtttttttatttcgtacgagtttaaggaggtgcgtttcgtggtgcgtagcgtgagcgcgcgtagtcgttttttttcgtcgtcgtcgttgttttcgttcgcgttcggtttcggtttcggcgttttcggtttacgtcgatttttttagtagaagtcgttgtagttttggagtaagttcgacgtgggcgattggttggagagtatttatttaggcgagtatcgcgatcgtttcgaggattatgagatagaaggcgcgtatttattcgcgtttattaaggacgatttcgtggagttgggcgttacgcgcgtgggttatcgtatgaatatcgagcgcgcgtttaggtagttggacggtagttgacgttttatttttattttcgtttcggtcgtgttttgtcggtagggttttttatttttatttcgggtcgcgggttcggtttgttttttacgacggcgttcgggttaggaatgttgtatgaatcgttttgtttgttgttgttcggagattcgttttgtatattgtttagtgtttttatcggtcgtttagtttatttagcgtatagttaggaagggcgtggat

SEQ ID NO: 86 - DNA, 759 bp, Artificial Sequence
  chemically treated genomic DNA (Homo sapiens) CpG-island No: 86
atccacgcccttcctaactatacgctaaataaactaaacgaccgataaaaacactaaacaatatacaaaacgaatctccgaacaacaacaaacaaaacgattcatacaacattcctaacccgaacgccgtcgtaaaaaacaaaccgaacccgcgacccgaaataaaaataaaaaaccctaccgacaaaacacgaccgaaacgaaaataaaaataaaacgtcaactaccgtccaactacctaaacgcgcgctcgatattcatacgataacccacgcgcgtaacgcccaactccacgaaatcgtccttaataaacgcgaataaatacgcgccttctatctcataatcctcgaaacgatcgcgatactcgcctaaataaatactctccaaccaatcgcccacgtcgaacttactccaaaactacaacgacttctactaaaaaaatcgacgtaaaccgaaaacgccgaaaccgaaaccgaacgcgaacgaaaacaacgacgacgacgaaaaaaaacgactacgcgcgctcacgctacgcaccacgaaacgcacctccttaaactcgtacgaaataaaaaaactaaacgacttaaaaataataaaaaacgtaaaaccgaaaaaccgccctacgccccccgcgcccgcccccaacccctccacccgctccaacgacgcgaacttcaccgaactcgaaacgcgtctcgccacgaaataacgaccactaaacctcaccgaatacgaaaccccgccgcccgaaccccc

SEQ ID NO: 87 - DNA, 759 bp, Artificial Sequence
  chemically treated genomic DNA (Homo sapiens) CpG-island No: 87
gtttacgttttttttgattgtgcgttgggtgggttgggcggtcggtgagggtattaagtaatgtatagggcgagttttcgagtaatagtaaataggacgatttatgtaatatttttggttcgggcgtcgtcgtaaggggtaggtcgagttcgcggttcggggtgggggtggggggttttgtcggtagggtacggtcggggcgggagtgggggtggggcgttagttgtcgtttagttgtttgagcgcgcgttcgatgtttatgcggtggtttacgcgcgtgacgtttagttttacgaagtcgtttttggtaagcgcgggtaggtgcgcgttttttattttatggttttcgaagcggtcgcggtgttcgtttaggtggatgttttttagttagtcgtttacgtcgaatttgttttagagttgtagcggtttttgttggaagggtcggcgtgggtcgggggcgtcggggtcggggtcggacgcgggcgagggtagcggcgacggcgagggggagcgattgcgcgcgtttacgttgcgtattacgaagcgtatttttttgggttcgtgcgggatggagaggttggacgatttgaggatggtggggggcgtgaggtcgaagggtcgttttgcgtttttcgcgttcgtttttagtttttttattcgttttagcgacgcgggttttatcgggttcggggcgcgtttcgttacggggtagcggttattgggttttatcgagtacgaggtttcgtcgttcgggttttt

SEQ ID NO: 88 - DNA, 759 bp, Artificial Sequence
  chemically treated genomic DNA (Homo sapiens) CpG-island No: 88
aaaaacccgaacgacgaaacctcgtactcgataaaacccaataaccgctaccccgtaacgaaacgcgccccgaacccgataaaacccgcgtcgctaaaacgaataaaaaaactaaaaacgaacgcgaaaaacgcaaaacgacccttcgacctcacgccccccaccatcctcaaatcgtccaacctctccatcccgcacgaacccaaaaaaatacgcttcgtaatacgcaacgtaaacgcgcgcaatcgctccccctcgccgtcgccgctaccctcgcccgcgtccgaccccgaccccgacgcccccgacccacgccgacccttccaacaaaaaccgctacaactctaaaacaaattcgacgtaaacgactaactaaaaaacatccacctaaacgaacaccgcgaccgcttcgaaaaccataaaataaaaaacgcgcacctacccgcgcttaccaaaaacgacttcgtaaaactaaacgtcacgcgcgtaaaccaccgcataaacatcgaacgcgcgctcaaacaactaaacgacaactaacgccccacccccactcccgccccgaccgtaccctaccgacaaaaccccccacccccaccccgaaccgcgaactcgacctaccccttacgacgacgcccgaaccaaaaatattacataaatcgtcctatttactattactcgaaaactcgccctatacattacttaataccctcaccgaccgcccaacccacccaacgcacaatcaaaaaaaacgtaaac

SEQ ID NO: 89 - DNA, 644 bp, Artificial Sequence
  chemically treated genomic DNA (Homo sapiens) CpG-island No: 89
tttcgcgacgcgttcgtattttgcggttagagcggttttgagttcggttgcgttcgcgttaggcgtttttttttagaagtaatttaggcgcgttcgttggtttttgagcgttaggaaaagttcggagttaacgatcggtcgttcggttattgtacggggttttaagtcgtagaaggacgacgggagggtaatgaagttgagtttaggttttttaggaaggagagagtgcgtcggagtagcgtgggaaagaagggaagagtgtcgttaagtttacggttaacggtggattattcgggtcgttgcgcgtttgggggttgcggaatgcgcgaggagaataagggtatgtttagtgggggcggtagcgatgagggtttggttagcgtcgcggcgcggggattagtggagaaggtgcgatagtttttggaagtcggcgcggattttaacggagttaatcgtttcgggaggcgcgcgatttaggtagttggggttttagggtttcgtcggtagggggcgcgcgaacgcggggcgcggtttcggcggatcggggttggaatttagatcgtcgatgtagatttgtataggagttttcgttggtcggaggtgtgtattttacgcgtaaaataggtttttatttagtaaaaatt

SEQ ID NO: 90 - DNA, 644 bp, Artificial Sequence
  chemically treated genomic DNA (Homo sapiens) CpG-island No: 90
aatttttactaaataaaaacctattttacgcgtaaaatacacacctccgaccaacgaaaactcctatacaaatctacatcgacgatctaaattccaaccccgatccgccgaaaccgcgccccgcgttcgcgcgccccctaccgacgaaaccctaaaaccccaactacctaaatcgcgcgcctcccgaaacgattaactccgttaaaatccgcgccgacttccaaaaactatcgcaccttctccactaatccccgcgccgcgacgctaaccaaaccctcatcgctaccgcccccactaaacatacccttattctcctcgcgcattccgcaacccccaaacgcgcaacgacccgaataatccaccgttaaccgtaaacttaacgacactcttcccttctttcccacgctactccgacgcactctctccttcctaaaaaacctaaactcaacttcattaccctcccgtcgtccttctacgacttaaaaccccgtacaataaccgaacgaccgatcgttaactccgaacttttcctaacgctcaaaaaccaacgaacgcgcctaaattacttctaaaaaaaaacgcctaacgcgaacgcaaccgaactcaaaaccgctctaaccgcaaaatacgaacgcgtcgcgaaa

SEQ ID NO: 91 - DNA, 644 bp, Artificial Sequence
  chemically treated genomic DNA (Homo sapiens) CpG-island No: 91
gatttttgttgggtaaaagtttgttttacgcgtggaatgtatattttcggttaacggagatttttgtataaatttatatcggcgatttaggttttagtttcgattcgtcgaggtcgcgtttcgcgttcgcgcgttttttgtcggcgaggttttggggttttagttatttggatcgcgcgtttttcgaaacggttgatttcgttgggattcgcgtcggtttttaggagttgtcgtattttttttattagttttcgcgtcgcggcgttggttagatttttatcgttgtcgtttttattgggtatgtttttgtttttttcgcgtatttcgtagtttttagacgcgtagcggttcggataatttatcgttggtcgtaaatttaacgatatttttttttttttttttacgttgtttcggcgtatttttttttttttaggagatttgggtttagttttattattttttcgtcgtttttttgcggtttggggtttcgtgtagtggtcgagcggtcggtcgttagtttcgggttttttttggcgtttaagaattagcgggcgcgtttggattgtttttgggaaaaagcgtttagcgcggacgtagtcgagtttaaagtcgttttggtcgtagggtgcggacgcgtcgcggag

SEQ ID NO: 92 - DNA, 644 bp, Artificial Sequence
  chemically treated genomic DNA (Homo sapiens) CpG-island No: 92
ctccgcgacgcgtccgcaccctacgaccaaaacgactttaaactcgactacgtccgcgctaaacgctttttcccaaaaacaatccaaacgcgcccgctaattcttaaacgccaaaaaaaacccgaaactaacgaccgaccgctcgaccactacacgaaaccccaaaccgcaaaaaaacgacgaaaaaataataaaactaaacccaaatctcctaaaaaaaaaaaaatacgccgaaacaacgtaaaaaaaaaaaaaaaaatatcgttaaatttacgaccaacgataaattatccgaaccgctacgcgtctaaaaactacgaaatacgcgaaaaaaacaaaaacatacccaataaaaacgacaacgataaaaatctaaccaacgccgcgacgcgaaaactaataaaaaaaatacgacaactcctaaaaaccgacgcgaatcccaacgaaatcaaccgtttcgaaaaacgcgcgatccaaataactaaaaccccaaaacctcgccgacaaaaaacgcgcgaacgcgaaacgcgacctcgacgaatcgaaactaaaacctaaatcgccgatataaatttatacaaaaatctccgttaaccgaaaatatacattccacgcgtaaaacaaacttttacccaacaaaaatc

SEQ ID NO: 93 - DNA, 704 bp, Artificial Sequence
  chemically treated genomic DNA (Homo sapiens) CpG-island No: 93
tcgcgggagcgcggttgtttttggtagggtcgtgttaggtgacggatgtagttagggggcgagttgtttggagttgcgttttaggcgttcggtttttgggtcgttatcgcggggcgttcgcgttgagggtgggaagatggtggtgggggtgggggcgtatatagggcgggaaagtggcggtaggcgggagggagaggaacgcgggttttgagtcgttcgcgcgcgcgtttttttacgggcgttttcggtagtttttttcgcgtgcgtagggtttagagtcgtttcgagattttggaggttcgggtgggagtgggggtggggtgggggtgggggtgaaggtggggggcgggcgcgtttagggaaggcgggtgcgcgtttgcggggcggagatgggtagggggcggtgcgtgggttttagtttgtagttaagggggtaggagtggcgttgtttatttttggtgttaaagggcggcgtagcggttgtcgagttcggttttggaggcggcgagaatatggtgcgtaggtttttggtgatttttcggattcggcgcgcgtgcggttcgtcgcgagtgagggttttcgtggtttatatttcgcggtttacgggggagtgggtagcgttaggggcgttcgtcgttgtggttttcgtgttgatgttattgaggagttagcgtttagggtagtagtcgttttttagaagatta

SEQ ID NO: 94 - DNA, 704 bp, Artificial Sequence
  chemically treated genomic DNA (Homo sapiens) CpG-island No: 94
taatcttctaaaaaacgactactaccctaaacgctaactcctcaataacatcaacacgaaaaccacaacgacgaacgcccctaacgctacccactcccccgtaaaccgcgaaatataaaccacgaaaaccctcactcgcgacgaaccgcacgcgcgccgaatccgaaaaatcaccaaaaacctacgcaccatattctcgccgcctccaaaaccgaactcgacaaccgctacgccgccctttaacaccaaaaataaacaacgccactcctacccccttaactacaaactaaaacccacgcaccgccccctacccatctccgccccgcaaacgcgcacccgccttccctaaacgcgcccgccccccaccttcacccccacccccaccccacccccactcccacccgaacctccaaaatctcgaaacgactctaaaccctacgcacgcgaaaaaaactaccgaaaacgcccgtaaaaaaacgcgcgcgcgaacgactcaaaacccgcgttcctctccctcccgcctaccgccactttcccgccctatatacgcccccacccccaccaccatcttcccaccctcaacgcgaacgccccgcgataacgacccaaaaaccgaacgcctaaaacgcaactccaaacaactcgccccctaactacatccgtcacctaacacgaccctaccaaaaacaaccgcgctcccgcga

SEQ ID NO: 95 - DNA, 704 bp, Artificial Sequence
  chemically treated genomic DNA (Homo sapiens) CpG-island No: 95
tggttttttaggaagcggttgttgttttagacgttggttttttagtagtattagtacgagggttatagcggcgggcgtttttggcgttgtttattttttcgtgagtcgcgggatgtgaattacgaaaatttttattcgcggcgggtcgtacgcgcgtcgaattcggagggttattaagaatttgcgtattatgttttcgtcgtttttagggtcgagttcggtagtcgttgcgtcgttttttggtattagaggtgagtagcgttatttttgtttttttaattgtagattgggatttacgtatcgttttttgtttattttcgtttcgtaggcgcgtattcgttttttttgagcgcgttcgttttttatttttatttttatttttattttatttttatttttattcggatttttaagatttcggaacggttttgagttttgcgtacgcgggaagggttgtcggaggcgttcgtagggaggcgcgcgcgcgggcggtttagggttcgcgtttttttttttttcgtttatcgttattttttcgttttgtgtgcgtttttatttttattattatttttttatttttagcgcgggcgtttcgcggtgacggtttaggggtcggacgtttggaacgtaattttaggtagttcgttttttagttatattcgttatttgatacggttttattaggaatagtcgcgttttcgcgg

SEQ ID NO: 96 - DNA, 704 bp, Artificial Sequence
  chemically treated genomic DNA (Homo sapiens) CpG-island No: 96
ccgcgaaaacgcgactattcctaataaaaccgtatcaaataacgaatataactaaaaaacgaactacctaaaattacgttccaaacgtccgacccctaaaccgtcaccgcgaaacgcccgcgctaaaaataaaaaaataataataaaaataaaaacgcacacaaaacgaaaaaataacgataaacgaaaaaaaaaaaaacgcgaaccctaaaccgcccgcgcgcgcgcctccctacgaacgcctccgacaacccttcccgcgtacgcaaaactcaaaaccgttccgaaatcttaaaaatccgaataaaaataaaaataaaataaaaataaaaataaaaataaaaaacgaacgcgctcaaaaaaaacgaatacgcgcctacgaaacgaaaataaacaaaaaacgatacgtaaatcccaatctacaattaaaaaaacaaaaataacgctactcacctctaataccaaaaaacgacgcaacgactaccgaactcgaccctaaaaacgacgaaaacataatacgcaaattcttaataaccctccgaattcgacgcgcgtacgacccgccgcgaataaaaattttcgtaattcacatcccgcgactcacgaaaaaataaacaacgccaaaaacgcccgccgctataaccctcgtactaatactactaaaaaaccaacgtctaaaacaacaaccgcttcctaaaaaacca

SEQ ID NO: 97 - DNA, 674 bp, Artificial Sequence
  chemically treated genomic DNA (Homo sapiens) CpG-island No: 97
gtcggcgcggtttcgggagggcggttggaaaagtttatagttgagcgcgttttggaggttgtggttgagggcgtagagtacgcgttgtttggcggtttatacgggcgcggtcgggtttaggcgtaggtatttttgtagcggagcgggttcgtgagtttaggtttcgggagcgcggattcgtttcgtcggttttatgcggggtgtcgagtttcgggttttcgtcgaaggagttcggggttcgggtgtcggcgttcgggatttcgcgttttcgcgaatcgcggtcgaagtttcgttttaggggtcgggtttttcggggtttcgttttggcgatggggagggtttcggcggaggcggcgggggaggggtgagtattcgtgggtcgggggtttcgggcgtcgggcgcgttcggcgggggtgggggaaggtttggggggttgtgacggggttgggggggggagttttaggtttcggtgcggggggagtggttgagcggtaagggcgggtattcgcggattatcggggcgggtgcggcggaggaaggggtttcggagttggggtgggggtcgcgtcggggtacgaagattaaggtagggcgagaaggggaaagaaaaataattaattttcggaggtggcggttttttttttttattttatcgatttttagtttcgggttt

SEQ ID NO: 98 - DNA, 674 bp, Artificial Sequence
  chemically treated genomic DNA (Homo sapiens) CpG-island No: 98
aaacccgaaactaaaaatcgataaaataaaaaaaaaaaaccgccacctccgaaaattaattatttttctttccccttctcgccctaccttaatcttcgtaccccgacgcgacccccaccccaactccgaaaccccttcctccgccgcacccgccccgataatccgcgaatacccgcccttaccgctcaaccactccccccgcaccgaaacctaaaactcccccccccaaccccgtcacaaccccccaaaccttcccccacccccgccgaacgcgcccgacgcccgaaacccccgacccacgaatactcacccctcccccgccgcctccgccgaaaccctccccatcgccaaaacgaaaccccgaaaaacccgacccctaaaacgaaacttcgaccgcgattcgcgaaaacgcgaaatcccgaacgccgacacccgaaccccgaactccttcgacgaaaacccgaaactcgacaccccgcataaaaccgacgaaacgaatccgcgctcccgaaacctaaactcacgaacccgctccgctacaaaaatacctacgcctaaacccgaccgcgcccgtataaaccgccaaacaacgcgtactctacgccctcaaccacaacctccaaaacgcgctcaactataaacttttccaaccgccctcccgaaaccgcgccgac

SEQ ID NO: 99 - DNA, 674 bp, Artificial Sequence
  chemically treated genomic DNA (Homo sapiens) CpG-island No: 99
aggttcgaagttgggggtcggtggagtgggggggagaagtcgttattttcggaaattaattgtttttttttttttttttcgttttattttggttttcgtgtttcgacgcggtttttattttagtttcgggattttttttttcgtcgtattcgtttcggtggttcgcggatgttcgtttttgtcgtttagttatttttttcgtatcgaggtttaggatttttttttttaatttcgttatagttttttagatttttttttattttcgtcgggcgcgttcggcgttcgggattttcggtttacggatatttatttttttttcgtcgttttcgtcgggattttttttatcgttagggcggggtttcgggaagttcggtttttggggcggggtttcggtcgcggttcgcggaggcgcggggtttcgggcgtcggtattcgagtttcggattttttcggcgggggttcggggttcggtatttcgtatggggtcggcggggcgggttcgcgttttcgggatttgagtttacgagttcgtttcgttgtagaagtgtttgcgtttggattcggtcgcgttcgtgtgggtcgttaagtagcgcgtgttttgcgtttttaattatagtttttaggacgcgtttaattatgggtttttttagtcgttttttcggggtcgcgtcggt

SEQ ID NO: 100 - DNA, 674 bp, Artificial Sequence
  chemically treated genomic DNA (Homo sapiens) CpG-island No: 100
accgacgcgaccccgaaaaaacgactaaaaaaacccataattaaacgcgtcctaaaaactataattaaaaacgcaaaacacgcgctacttaacgacccacacgaacgcgaccgaatccaaacgcaaacacttctacaacgaaacgaactcgtaaactcaaatcccgaaaacgcgaacccgccccgccgaccccatacgaaataccgaaccccgaacccccgccgaaaaaatccgaaactcgaataccgacgcccgaaaccccgcgcctccgcgaaccgcgaccgaaaccccgccccaaaaaccgaacttcccgaaaccccgccctaacgataaaaaaaatcccgacgaaaacgacgaaaaaaaaataaatatccgtaaaccgaaaatcccgaacgccgaacgcgcccgacgaaaataaaaaaaaatctaaaaaactataacgaaattaaaaaaaaaaatcctaaacctcgatacgaaaaaaataactaaacgacaaaaacgaacatccgcgaaccaccgaaacgaatacgacgaaaaaaaaaatcccgaaactaaaataaaaaccgcgtcgaaacacgaaaaccaaaataaaacgaaaaaaaaaaaaaaaaacaattaatttccgaaaataacgacttctcccccccactccaccgacccccaacttcgaacct

SEQ ID NO: 101 - DNA, 1489 bp, Artificial Sequence
  chemically treated genomic DNA (Homo sapiens) CpG-island No: 101
tttcgcgttgaggataaagttcgttttcgtcggttttttggtttgggtatcgggtatcgggcgttaggggcgagataggtaggatttgcgcgcgtttcgattcgattttagatttcgattcgatttcgggttcggtttttcgcgatttttgcgcgtatttattattgtggttgatttaggtcggttttaggagttttattgttcggtcgtcgtcgtcgtcgggttgaggcgagcgtcgggttttttagcgcgttcgggttatggagttatcgtcgtcgttttttttcgcgttattcgtttttcggtcgtcgttcgtttcgcgtttttagggtcgtcgcgttatcgtcggttcgcgttttttttcgtcgttatagtcgttattcgcgttcggtcgtcgtcgtcgttattatagtcgtattttttgcgtcgtttttttttaggcggttttcgggtaacgtcggaagttacggcgcgtatttgttaaatcgtttcggcgggaaatcgttttttacgcggattgggtcgtttcggttttttcgttggtaggggtttcgggtcgggttcgggcgcgggcgttttagaaagggcggttcgtttggacggcggatagcgagcggggtttgtagttgtaattcgggtcgttcgtagaggtaggcggggtttaggtggcgtggatcgttcgttattagttttgtttcgttagtttgagttcgatttattaattagttttcgttatttattaatacgcgttattgggtattttgcgagcgtcgggtttcgcgtcggcgtcggaatgcgattcgggtttcggattcgaacgaatgcgggggacgagttaattttggtgggggaggttggggcggacgcgtttattagaagatcggggtcgtttgtttagatatgaatatttggattcggaggagtagagggacgttttttcggtcgtttcggttgtattgcggagtcgaggttcgcgcgagggcgtagatcgattaatcggttagggtttgattggttagattgtgttcgttgtagaggcgcgtttttagtatagggcggggacggaagggaggatttcgagtcgcgtgaaacgtaaggttttcgtgtgtgcgtagttgatattttaggcggggttgcgtcgggggcggggataggcgcgttttagtttacgtagtcggaacgtttgagcgttgggcgtttggtttgtcggattttagtagggggtatcgcgggtcggattgtggaggggcgtacgttcggaagcggcgagggtagttatgacggttttcgtgttgcgaagtatttcgttagttttgcgttcgattagcgggtgagtgcggacgttggtcggatagcggagtgtttagggcgcgtgcggggttttcgcgattgttcgttaggattcgtttgtgttttttgttcgttttttagtttacgaatattttagggatgagttatttggtcgtgatttttatgtatgaaaatttga

SEQ ID NO: 102 - DNA, 1489 bp, Artificial Sequence
  chemically treated genomic DNA (Homo sapiens) CpG-island No: 102
tcaaattttcatacataaaaatcacgaccaaataactcatccctaaaatattcgtaaactaaaaaacgaacaaaaaacacaaacgaatcctaacgaacaatcgcgaaaaccccgcacgcgccctaaacactccgctatccgaccaacgtccgcactcacccgctaatcgaacgcaaaactaacgaaatacttcgcaacacgaaaaccgtcataactaccctcgccgcttccgaacgtacgcccctccacaatccgacccgcgataccccctactaaaatccgacaaaccaaacgcccaacgctcaaacgttccgactacgtaaactaaaacgcgcctatccccgcccccgacgcaaccccgcctaaaatatcaactacgcacacacgaaaaccttacgtttcacgcgactcgaaatcctcccttccgtccccgccctatactaaaaacgcgcctctacaacgaacacaatctaaccaatcaaaccctaaccgattaatcgatctacgccctcgcgcgaacctcgactccgcaatacaaccgaaacgaccgaaaaaacgtccctctactcctccgaatccaaatattcatatctaaacaaacgaccccgatcttctaataaacgcgtccgccccaacctcccccaccaaaattaactcgtcccccgcattcgttcgaatccgaaacccgaatcgcattccgacgccgacgcgaaacccgacgctcgcaaaatacccaataacgcgtattaataaataacgaaaactaattaataaatcgaactcaaactaacgaaacaaaactaataacgaacgatccacgccacctaaaccccgcctacctctacgaacgacccgaattacaactacaaaccccgctcgctatccgccgtccaaacgaaccgccctttctaaaacgcccgcgcccgaacccgacccgaaacccctaccaacgaaaaaaccgaaacgacccaatccgcgtaaaaaacgatttcccgccgaaacgatttaacaaatacgcgccgtaacttccgacgttacccgaaaaccgcctaaaaaaaaacgacgcaaaaaatacgactataataacgacgacgacgaccgaacgcgaataacgactataacgacgaaaaaaaacgcgaaccgacgataacgcgacgaccctaaaaacgcgaaacgaacgacgaccgaaaaacgaataacgcgaaaaaaaacgacgacgataactccataacccgaacgcgctaaaaaacccgacgctcgcctcaacccgacgacgacgacgaccgaacaataaaactcctaaaaccgacctaaatcaaccacaataataaatacgcgcaaaaatcgcgaaaaaccgaacccgaaatcgaatcgaaatctaaaatcgaatcgaaacgcgcgcaaatcctacctatctcgcccctaacgcccgatacccgatacccaaaccaaaaaaccgacgaaaacgaactttatcctcaacgcgaaa

SEQ ID NO: 103 - DNA, 1489 bp, Artificial Sequence
  chemically treated genomic DNA (Homo sapiens) CpG-island No: 103
ttagatttttatgtataagagttacgattagatggtttatttttgagatattcgtggattgggaggcgagtagggagtataggcgagttttggcggatagtcgcgaagatttcgtacgcgttttgggtatttcgttattcggttagcgttcgtatttattcgttagtcgggcgtagggttagcgagatatttcgtagtacggaggtcgttatggttattttcgtcgttttcgggcgtgcgtttttttatagttcggttcgcggtgttttttgttgaggttcggtagattaggcgtttagcgtttaggcgtttcggttgcgtgggttgggacgcgtttgttttcgttttcgacgtagtttcgtttagggtgttagttgcgtatatacgagggttttgcgttttacgcggttcggggttttttttttcgttttcgttttgtgttgggagcgcgtttttgtagcgggtatagtttagttagttaggttttagtcggttggtcggtttgcgttttcgcgcgggtttcggtttcgtagtgtagtcggagcggtcgagggggcgtttttttgttttttcgagtttaaatgtttatgtttaggtaaacggtttcgattttttaataaacgcgttcgttttagttttttttattagggttggttcgtttttcgtattcgttcgagttcgaagttcggatcgtatttcggcgtcggcgcggagttcggcgttcgtaagatgtttaatagcgcgtgttgatgaatgacggaagttagttaataagtcggatttagattggcgaggtagagttggtgacgggcggtttacgttatttgggtttcgtttgtttttgcgggcggttcgggttgtaattgtaggtttcgttcgttgttcgtcgtttaggcgaatcgttttttttggggcgttcgcgttcgggttcgattcgaagtttttgttagcggaggagtcggggcggtttagttcgcgtggggagcggtttttcgtcggggcgatttggtaggtgcgcgtcgtgattttcggcgttgttcgggagtcgtttgaggaggagcggcgtaggggatgcggttgtggtggcggcggcggcggtcgagcgcgggtggcggttgtggcggcggaggggggcgcgggtcggcgatggcgcggcggttttgagggcgcggggcgggcggcggtcggagggcgggtggcgcgggaggaagcggcggcggtggttttatggttcgggcgcgttgagggattcggcgttcgttttagttcggcggcggcggcggtcgaataatgaagtttttgaagtcgatttgggttaattataatggtgagtgcgcgtaggggtcgcgggaggtcgagttcggagtcgggtcggggtttggagtcgagtcggggcgcgcgtaagttttgtttgtttcgtttttgacgttcggtattcggtgtttaagttaagaagtcggcgggagcggattttgtttttagcgcggag

SEQ ID NO: 104 - DNA, 1489 bp, Artificial Sequence
  chemically treated genomic DNA (Homo sapiens) CpG-island No: 104
ctccgcgctaaaaacaaaatccgctcccgccgacttcttaacttaaacaccgaataccgaacgtcaaaaacgaaacaaacaaaacttacgcgcgccccgactcgactccaaaccccgacccgactccgaactcgacctcccgcgacccctacgcgcactcaccattataattaacccaaatcgacttcaaaaacttcattattcgaccgccgccgccgccgaactaaaacgaacgccgaatccctcaacgcgcccgaaccataaaaccaccgccgccgcttcctcccgcgccacccgccctccgaccgccgcccgccccgcgccctcaaaaccgccgcgccatcgccgacccgcgcccccctccgccgccacaaccgccacccgcgctcgaccgccgccgccgccaccacaaccgcatcccctacgccgctcctcctcaaacgactcccgaacaacgccgaaaatcacgacgcgcacctaccaaatcgccccgacgaaaaaccgctccccacgcgaactaaaccgccccgactcctccgctaacaaaaacttcgaatcgaacccgaacgcgaacgccccaaaaaaaacgattcgcctaaacgacgaacaacgaacgaaacctacaattacaacccgaaccgcccgcaaaaacaaacgaaacccaaataacgtaaaccgcccgtcaccaactctacctcgccaatctaaatccgacttattaactaacttccgtcattcatcaacacgcgctattaaacatcttacgaacgccgaactccgcgccgacgccgaaatacgatccgaacttcgaactcgaacgaatacgaaaaacgaaccaaccctaataaaaaaaactaaaacgaacgcgtttattaaaaaatcgaaaccgtttacctaaacataaacatttaaactcgaaaaaacaaaaaaacgccccctcgaccgctccgactacactacgaaaccgaaacccgcgcgaaaacgcaaaccgaccaaccgactaaaacctaactaactaaactatacccgctacaaaaacgcgctcccaacacaaaacgaaaacgaaaaaaaaaaccccgaaccgcgtaaaacgcaaaaccctcgtatatacgcaactaacaccctaaacgaaactacgtcgaaaacgaaaacaaacgcgtcccaacccacgcaaccgaaacgcctaaacgctaaacgcctaatctaccgaacctcaacaaaaaacaccgcgaaccgaactataaaaaaacgcacgcccgaaaacgacgaaaataaccataacgacctccgtactacgaaatatctcgctaaccctacgcccgactaacgaataaatacgaacgctaaccgaataacgaaatacccaaaacgcgtacgaaatcttcgcgactatccgccaaaactcgcctatactccctactcgcctcccaatccacgaatatctcaaaaataaaccatctaatcgtaactcttatacataaaaatctaa

SEQ ID NO: 105 - DNA, 524 bp, Artificial Sequence
  chemically treated genomic DNA (Homo sapiens) CpG-island No: 105
taggtcgcggggtatggggcgtggaggggtggggaaagttgggtttcgtaaggcgtttcgaagcgtcgtttcgttttttttcggcgtatttgggtttcggcgtttcggcgttttttttagtcgcggtagttggttaggtcgcgttgttattgttcgtaggtcggtcgttcgtcgtggacgtagtagtggtgtaggaagtgtttggcgttgcggtagagtttttattcggcgcggtaggtttcgtaggggcgcggcggttgcggcgagaggcggcgtttgagcggggttcggcggtcgcgttttacgtttcgagttagtttcgtttttttttttcggaagatttcggtggttttcggtttcgatttagtatatttatttgttagtcgttgtcgttcgttatgtttgggcgatcggcgcgttaagttcgttttttagttcgttagttaatgaaaaatgaagaaaacggtatttcgtgatcgattgatagaagaattaatgagtatcgatatatttaattacgtttt

SEQ ID NO: 106 - DNA, 524 bp, Artificial Sequence
  chemically treated genomic DNA (Homo sapiens) CpG-island No: 106
aaaacgtaattaaatatatcgatactcattaattcttctatcaatcgatcacgaaataccgttttcttcatttttcattaactaacgaactaaaaaacgaacttaacgcgccgatcgcccaaacataacgaacgacaacgactaacaaataaatatactaaatcgaaaccgaaaaccaccgaaatcttccgaaaaaaaaaaacgaaactaactcgaaacgtaaaacgcgaccgccgaaccccgctcaaacgccgcctctcgccgcaaccgccgcgcccctacgaaacctaccgcgccgaataaaaactctaccgcaacgccaaacacttcctacaccactactacgtccacgacgaacgaccgacctacgaacaataacaacgcgacctaaccaactaccgcgactaaaaaaaacgccgaaacgccgaaacccaaatacgccgaaaaaaaacgaaacgacgcttcgaaacgccttacgaaacccaactttccccacccctccacgccccataccccgcgaccta

SEQ ID NO: 107 - DNA, 524 bp, Artificial Sequence
  chemically treated genomic DNA (Homo sapiens) CpG-island No: 107
aagacgtgattgaatgtgtcggtgtttattagtttttttgttagtcgattacgaggtgtcgttttttttattttttattggttggcggattgaggggcgggtttggcgcgtcggtcgtttagatatggcggacggtagcggttggtaggtgagtgtgttgggtcggagtcgggaattatcggggtttttcggagggagggaacgggattggttcggggcgtagggcgcggtcgtcgggtttcgtttaggcgtcgtttttcgtcgtagtcgtcgcgtttttgcgaggtttatcgcgtcgagtggaagttttgtcgtagcgttaggtattttttatattattattacgtttacggcgagcggtcggtttgcgaatagtggtagcgcgatttggttagttgtcgcgattgggaggagcgtcggaacgtcgaggtttaggtgcgtcgggagggagcggggcggcgtttcggagcgttttgcggggtttagttttttttatttttttacgttttatgtttcgcgattta

SEQ ID NO: 108 - DNA, 524 bp, Artificial Sequence
  chemically treated genomic DNA (Homo sapiens) CpG-island No: 108
taaatcgcgaaacataaaacgtaaaaaaataaaaaaaactaaaccccgcaaaacgctccgaaacgccgccccgctccctcccgacgcacctaaacctcgacgttccgacgctcctcccaatcgcgacaactaaccaaatcgcgctaccactattcgcaaaccgaccgctcgccgtaaacgtaataataatataaaaaatacctaacgctacgacaaaacttccactcgacgcgataaacctcgcaaaaacgcgacgactacgacgaaaaacgacgcctaaacgaaacccgacgaccgcgccctacgccccgaaccaatcccgttccctccctccgaaaaaccccgataattcccgactccgacccaacacactcacctaccaaccgctaccgtccgccatatctaaacgaccgacgcgccaaacccgcccctcaatccgccaaccaataaaaaataaaaaaaacgacacctcgtaatcgactaacaaaaaaactaataaacaccgacacattcaatcacgtctt

SEQ ID NO: 109 - DNA, 945 bp, Artificial Sequence
  chemically treated genomic DNA (Homo sapiens) CpG-island No: 109
ggtcgtcgtttttttaggaatgcgcggttttgtttagggttcggtgggttgagtattttttgttgttcggtttacgtttttcggttagtcgcgtcgtttacgttttaatttgggttcgcgttttttagttttcgtttaggttcgcgttttttagttttcgtttaggtaggcgtttgcgtttaggtgagggtttcgttcgtcgtcgtttttcgcgttttgcgcgttcgcggttcgagtttcgttcgagtcgggcggagcggagcgcgcggagtttagattcgttgtcgggtcggggttgggtcggagcggcggcgtttggatgtcggttcggggttgggtcggagattggcgttcgtttcgaagcgattttcggttttcgattcgtttcgtttgatttttatgatgaagagggcgtttattggaggtgagtgtttacgcggcgttagagtttagtaggcggcggggcgtagagcggggtggttcgttttttttcggagtcgtagggttcgtttagggtttttaaggttggggaagcgtagtcgggcggtcgggagggttatcgtagtgtcgcgttaggttggggttaagggcgtttcggtttcgggagggcggagtcggaggtagtaggaaaagttgtcgtttttcgggtaagttgacggcgatggcggggtcgggggtggcggttcgggggttttcgaggttgggttaggttcggggtgggggtcgcgggttggaaggacggggttcggtttcggcgtcgcggttacgaaggggttaatgagcgggtttttttgtagaaacgcgggtatcgagagtaggtggaggtatcgggtcgttttcgttttcgtttcgcggattgggtttagaatttttcgtttttttgaggttaggttttagggggattaatgggggcgttggcggtagtagagggcgtgggggataagg

SEQ ID NO: 110 - DNA, 945 bp, Artificial Sequence
  chemically treated genomic DNA (Homo sapiens) CpG-island No: 110
ccttatcccccacgccctctactaccgccaacgcccccattaatccccctaaaacctaacctcaaaaaaacgaaaaattctaaacccaatccgcgaaacgaaaacgaaaacgacccgatacctccacctactctcgatacccgcgtttctacaaaaaaacccgctcattaaccccttcgtaaccgcgacgccgaaaccgaaccccgtccttccaacccgcgacccccaccccgaacctaacccaacctcgaaaacccccgaaccgccacccccgaccccgccatcgccgtcaacttacccgaaaaacgacaacttttcctactacctccgactccgccctcccgaaaccgaaacgcccttaaccccaacctaacgcgacactacgataaccctcccgaccgcccgactacgcttccccaaccttaaaaaccctaaacgaaccctacgactccgaaaaaaaacgaaccaccccgctctacgccccgccgcctactaaactctaacgccgcgtaaacactcacctccaataaacgccctcttcatcataaaaatcaaacgaaacgaatcgaaaaccgaaaatcgcttcgaaacgaacgccaatctccgacccaaccccgaaccgacatccaaacgccgccgctccgacccaaccccgacccgacaacgaatctaaactccgcgcgctccgctccgcccgactcgaacgaaactcgaaccgcgaacgcgcaaaacgcgaaaaacgacgacgaacgaaaccctcacctaaacgcaaacgcctacctaaacgaaaactaaaaaacgcgaacctaaacgaaaactaaaaaacgcgaacccaaattaaaacgtaaacgacgcgactaaccgaaaaacgtaaaccgaacaacaaaaaatactcaacccaccgaaccctaaacaaaaccgcgcattcctaaaaaaacgacgacc

SEQ ID NO: 111 - DNA, 945 bp, Artificial Sequence
  chemically treated genomic DNA (Homo sapiens) CpG-island No: 111
ttttgttttttacgttttttattgtcgttaacgtttttattgatttttttgaggtttgattttagaaaaacgggaggttttgagtttagttcgcgaggcgggggcggaggcggttcgatatttttatttattttcggtattcgcgtttttgtaaaaaaattcgtttattaattttttcgtggtcgcggcgtcgaggtcggatttcgtttttttagttcgcggtttttatttcggatttggtttagtttcggggattttcgggtcgttattttcggtttcgttatcgtcgttaatttattcgggaagcggtaattttttttgttgttttcggtttcgttttttcggggtcggggcgtttttggttttagtttggcgcggtattgcggtggttttttcggtcgttcggttacgtttttttagttttggaagttttggacgggttttgcggtttcgaggaggggcgaattatttcgttttgcgtttcgtcgtttgttgggttttggcgtcgcgtggatatttatttttagtggacgttttttttattataggggttaggcggagcgggtcggggatcgaaagtcgtttcggggcgggcgttagttttcggtttagtttcgggtcggtatttaggcgtcgtcgtttcggtttagtttcggttcggtagcgggtttaggtttcgcgcgtttcgtttcgttcggttcgggcggggttcgggtcgcgggcgcgtagggcgcgggaggcggcggcgggcggggtttttatttgggcgtaggcgtttgtttgggcgggggttggggggcgcgagtttgggcgggggttggggggcgcgggtttaagttggggcgtgagcggcgcggttggtcggggagcgtaggtcgggtagtaggaggtgtttagtttatcgggttttagataaagtcgcgtatttttgaagaggcggcggtt

SEQ ID NO: 112 - DNA, 945 bp, Artificial Sequence
  chemically treated genomic DNA (Homo sapiens) CpG-island No: 112
aaccgccgcctcttcaaaaatacgcgactttatctaaaacccgataaactaaacacctcctactacccgacctacgctccccgaccaaccgcgccgctcacgccccaacttaaacccgcgccccccaacccccgcccaaactcgcgccccccaacccccgcccaaacaaacgcctacgcccaaataaaaaccccgcccgccgccgcctcccgcgccctacgcgcccgcgacccgaaccccgcccgaaccgaacgaaacgaaacgcgcgaaacctaaacccgctaccgaaccgaaactaaaccgaaacgacgacgcctaaataccgacccgaaactaaaccgaaaactaacgcccgccccgaaacgactttcgatccccgacccgctccgcctaacccctataataaaaaaaacgtccactaaaaataaatatccacgcgacgccaaaacccaacaaacgacgaaacgcaaaacgaaataattcgcccctcctcgaaaccgcaaaacccgtccaaaacttccaaaactaaaaaaacgtaaccgaacgaccgaaaaaaccaccgcaataccgcgccaaactaaaaccaaaaacgccccgaccccgaaaaaacgaaaccgaaaacaacaaaaaaaattaccgcttcccgaataaattaacgacgataacgaaaccgaaaataacgacccgaaaatccccgaaactaaaccaaatccgaaataaaaaccgcgaactaaaaaaacgaaatccgacctcgacgccgcgaccacgaaaaaattaataaacgaatttttttacaaaaacgcgaataccgaaaataaataaaaatatcgaaccgcctccgcccccgcctcgcgaactaaactcaaaacctcccgtttttctaaaatcaaacctcaaaaaaatcaataaaaacgttaacgacaataaaaaacgtaaaaaacaaaa

SEQ ID NO: 113 - DNA, 842 bp, Artificial Sequence
  chemically treated genomic DNA (Homo sapiens) CpG-island No: 113
cgcgtatagaaaaggaaattttatttcgtttgttaagggtagggtcgggttagtggtaggagaaggttagttgcgggcgtaggtaggagcggatttaggagtcgcgtcggggcgtagagtcggacgtttcgaggagtttgcgcgtcgcgttattcggcggaagtcgcggtttatgcggggttttttaggtttatttaacgtttcgtaggcgtggttggtaggaggggttcggtcgtgtttagcgtttttagacgtagttttttttgtcgtagtcgtcggtggtcgtgggtcgtcgcggcgttgagtattttacggggaagttgaggtcgggacggtcggtgtagatttaggcgtcgtagtataagaggtagtcgtttattatgagtagcgcggtggtcgtttagtcgatgtatagcgttgcgtttagttcgtatttttgcgatacgggtatagacgggtcgtaaaattcgcggacgataatgttggcgaattagtagagtggtacgagcgttagtagttcgtaaaataggtagagtacgtttttcgtgagggttatacgcgttttggtcgggttcggggttacgtaggtggtgtattgcgcgttcgttagggttacgaagagcgtaacgaacgttagtagtacggcgtttacggtgagcgttcgcgtcgtttgtatttcggtgtttagagttagtatcgagtcgtatattttgtattgtatgtgttcggtgttttgtattacgtacgatatttatagttttttttaggtggtttgcgtcgttacgatgttgtggtttaggaaggcggttatttgttatatgggtagttcgtacgttaggatt

SEQ ID NO: 114 - DNA, 842 bp, Artificial Sequence
  chemically treated genomic DNA (Homo sapiens) CpG-island No: 114
aatcctaacgtacgaactacccatataacaaataaccgccttcctaaaccacaacatcgtaacgacgcaaaccacctaaaaaaaactataaatatcgtacgtaatacaaaacaccgaacacatacaatacaaaatatacgactcgatactaactctaaacaccgaaatacaaacgacgcgaacgctcaccgtaaacgccgtactactaacgttcgttacgctcttcgtaaccctaacgaacgcgcaatacaccacctacgtaaccccgaacccgaccaaaacgcgtataaccctcacgaaaaacgtactctacctattttacgaactactaacgctcgtaccactctactaattcgccaacattatcgtccgcgaattttacgacccgtctatacccgtatcgcaaaaatacgaactaaacgcaacgctatacatcgactaaacgaccaccgcgctactcataataaacgactacctcttatactacgacgcctaaatctacaccgaccgtcccgacctcaacttccccgtaaaatactcaacgccgcgacgacccacgaccaccgacgactacgacaaaaaaaactacgtctaaaaacgctaaacacgaccgaacccctcctaccaaccacgcctacgaaacgttaaataaacctaaaaaaccccgcataaaccgcgacttccgccgaataacgcgacgcgcaaactcctcgaaacgtccgactctacgccccgacgcgactcctaaatccgctcctacctacgcccgcaactaaccttctcctaccactaacccgaccctacccttaacaaacgaaataaaatttccttttctatacgcg

SEQ ID NO: 115 - DNA, 842 bp, Artificial Sequence
  chemically treated genomic DNA (Homo sapiens) CpG-island No: 115
gattttggcgtgcgggttgtttatgtggtaggtgatcgtttttttggattataatatcgtgacggcgtagattatttggaaggggttgtggatgtcgtgcgtggtgtagagtatcgggtatatgtagtgtaaagtgtacgattcggtgttggttttgagtatcgaggtgtaggcggcgcgggcgtttatcgtgagcgtcgtgttgttggcgttcgttgcgtttttcgtgattttggcgggcgcgtagtgtattatttgcgtggtttcgggttcggttaaggcgcgtgtggtttttacgggaggcgtgttttatttgttttgcgggttgttggcgttcgtgttattttgttggttcgttaatattgtcgttcgcgagttttacgattcgtttgtgttcgtgtcgtagaagtacgagttgggcgtagcgttgtatatcggttgggcggttatcgcgttgtttatggtaggcggttgttttttgtgttgcggcgtttgggtttgtatcggtcgtttcgattttagttttttcgtgaagtatttagcgtcgcggcggtttacggttatcggcgattacgataagaagaattacgtttgagggcgttgggtacggtcgggttttttttgttagttacgtttgcgaggcgttggataagtttggggagtttcgtatggatcgcggttttcgtcgggtagcgcggcgcgtaggtttttcggaacgttcggttttgcgtttcgacgcggtttttggattcgtttttgtttgcgttcgtagttgatttttttttgttattagttcggttttgtttttaatagacggaatgaagtttttttttttgtgcgcg

SEQ ID NO: 116 - DNA, 842 bp, Artificial Sequence
  chemically treated genomic DNA (Homo sapiens) CpG-island No: 116
cgcgcacaaaaaaaaaaacttcattccgtctattaaaaacaaaaccgaactaataacaaaaaaaaatcaactacgaacgcaaacaaaaacgaatccaaaaaccgcgtcgaaacgcaaaaccgaacgttccgaaaaacctacgcgccgcgctacccgacgaaaaccgcgatccatacgaaactccccaaacttatccaacgcctcgcaaacgtaactaacaaaaaaaacccgaccgtacccaacgccctcaaacgtaattcttcttatcgtaatcgccgataaccgtaaaccgccgcgacgctaaatacttcacgaaaaaactaaaatcgaaacgaccgatacaaacccaaacgccgcaacacaaaaaacaaccgcctaccataaacaacgcgataaccgcccaaccgatatacaacgctacgcccaactcgtacttctacgacacgaacacaaacgaatcgtaaaactcgcgaacgacaatattaacgaaccaacaaaataacacgaacgccaacaacccgcaaaacaaataaaacacgcctcccgtaaaaaccacacgcgccttaaccgaacccgaaaccacgcaaataatacactacgcgcccgccaaaatcacgaaaaacgcaacgaacgccaacaacacgacgctcacgataaacgcccgcgccgcctacacctcgatactcaaaaccaacaccgaatcgtacactttacactacatatacccgatactctacaccacgcacgacatccacaaccccttccaaataatctacgccgtcacgatattataatccaaaaaaacgatcacctaccacataaacaacccgcacgccaaaatc

SEQ ID NO: 117 - DNA, 649 bp, Artificial Sequence
  chemically treated genomic DNA (Homo sapiens) CpG-island No: 117
cgagtttataaggtttacggtaataagaagtttatttatttgaggttacgcgaatcgttcgcgaagagggttttgggattcgtagttatagatcgtgggacgggtttttttttgagggcgagagtttaggcgttatttagaaagtggagaacgagatcggtcgtcgtgaggttaggtaaggagcgggcgcggtttttcgagattgcgagaacggtttaaatgtttttaggtgtttttataaattttcggcgcggatcgagaaattgaggttcgtagatcgaaggtattgcgatttaggttggggtttcgagtgtttttttgcggattagaagtcgggaaaagacgtaggggcgtagttttaggttcgcgtgtacggagtttaagtcggtcgttcgggttttcgtttttatattgatttttttgtcggagtcgggaacgtttgtttttaggagcgtcgcgtagcgtttagagatcgattatatcgcgtagttacgtttttagcgtgcgcgcggtcgtcgtgtacgattcggcgtatgttttcggtacgttttacgcgttttttttatttaggtcgcgtttgcgttgtatgtcgtgtggtcgttatttcgtaggttttttcggtttttgttggcgcggtagtgtcgcgcgg

SEQ ID NO: 118 - DNA, 649 bp, Artificial Sequence
  chemically treated genomic DNA (Homo sapiens) CpG-island No: 118
ccgcgcgacactaccgcgccaacaaaaaccgaaaaaacctacgaaataacgaccacacgacatacaacgcaaacgcgacctaaataaaaaaaacgcgtaaaacgtaccgaaaacatacgccgaatcgtacacgacgaccgcgcgcacgctaaaaacgtaactacgcgatataatcgatctctaaacgctacgcgacgctcctaaaaacaaacgttcccgactccgacaaaaaaatcaatataaaaacgaaaacccgaacgaccgacttaaactccgtacacgcgaacctaaaactacgcccctacgtcttttcccgacttctaatccgcaaaaaaacactcgaaaccccaacctaaatcgcaataccttcgatctacgaacctcaatttctcgatccgcgccgaaaatttataaaaacacctaaaaacatttaaaccgttctcgcaatctcgaaaaaccgcgcccgctccttacctaacctcacgacgaccgatctcgttctccactttctaaataacgcctaaactctcgccctcaaaaaaaaacccgtcccacgatctataactacgaatcccaaaaccctcttcgcgaacgattcgcgtaacctcaaataaataaacttcttattaccgtaaaccttataaactcg

SEQ ID NO: 119 - DNA, 649 bp, Artificial Sequence
  chemically treated genomic DNA (Homo sapiens) CpG-island No: 119
tcgcgcggtattgtcgcgttagtagggatcgggagagtttgcgaggtagcggttatacggtatatagcgtaggcgcggtttggatgggaggagcgcgtggagcgtgtcgggagtatgcgtcgggtcgtatacggcggtcgcgcgtacgttgggggcgtggttgcgcgatgtaatcggtttttggacgttgcgcggcgtttttaggagtaggcgttttcgatttcggtaagagggttagtgtggaggcgggagttcgggcggtcggtttgaatttcgtgtacgcgggtttggagttgcgtttttgcgttttttttcgatttttgattcgtagaggggtattcggagttttagtttgggtcgtagtgttttcggtttgcgggttttagtttttcggttcgcgtcgggggtttgtgggggtatttggagatatttgggtcgttttcgtagtttcgggaagtcgcgttcgttttttgtttggttttacggcggtcgatttcgttttttattttttaggtggcgtttggattttcgtttttagagggaggttcgttttacggtttgtggttacggattttaggatttttttcgcgggcgattcgcgtagttttaggtgggtgggttttttgttgtcgtgggttttgtgagttcg

SEQ ID NO: 120 - DNA, 649 bp, Artificial Sequence
  chemically treated genomic DNA (Homo sapiens) CpG-island No: 120
cgaactcacaaaacccacgacaacaaaaaacccacccacctaaaactacgcgaatcgcccgcgaaaaaaatcctaaaatccgtaaccacaaaccgtaaaacgaacctccctctaaaaacgaaaatccaaacgccacctaaaaaataaaaaacgaaatcgaccgccgtaaaaccaaacaaaaaacgaacgcgacttcccgaaactacgaaaacgacccaaatatctccaaatacccccacaaacccccgacgcgaaccgaaaaactaaaacccgcaaaccgaaaacactacgacccaaactaaaactccgaatacccctctacgaatcaaaaatcgaaaaaaaacgcaaaaacgcaactccaaacccgcgtacacgaaattcaaaccgaccgcccgaactcccgcctccacactaaccctcttaccgaaatcgaaaacgcctactcctaaaaacgccgcgcaacgtccaaaaaccgattacatcgcgcaaccacgcccccaacgtacgcgcgaccgccgtatacgacccgacgcatactcccgacacgctccacgcgctcctcccatccaaaccgcgcctacgctatataccgtataaccgctacctcgcaaactctcccgatccctactaacgcgacaataccgcgcga

SEQ ID NO: 121 - DNA, 746 bp, Artificial Sequence
  chemically treated genomic DNA (Homo sapiens) CpG-island No: 121
agcgggcgcggtttttcgagattgcgagaacggtttaaatgtttttaggtgtttttataaattttcggcgcggatcgagaaattgaggttcgtagatcgaaggtattgcgatttaggttggggtttcgagtgtttttttgcggattagaagtcgggaaaagacgtaggggcgtagttttaggttcgcgtgtacggagtttaagtcggtcgttcgggttttcgtttttatattgatttttttgtcggagtcgggaacgtttgtttttaggagcgtcgcgtagcgtttagagatcgattatatcgcgtagttacgtttttagcgtgcgcgcggtcgtcgtgtacgattcggcgtatgttttcggtacgttttacgcgttttttttatttaggtcgcgtttgcgttgtatgtcgtgtggtcgttatttcgtaggttttttcggtttttgttggcgcggtagtgtcgcgcggtgggtgatgggagagcgcgtttatttttacgtcgcgttaagtgttacgggattaggtggggtcgcgtgtataggcgcgagacggtcgggttaaagttgttttttatgatttttagcggacggtgttcggcggttttttagattcgggaaatttgtattcggttgtggcgtagatcgaggggtcgatgttgttttagttcgtcgttattgttttggcgttagttagatattggggtgttgttgggcgtcgagagggttgttgcggggtcgggttaagtt

SEQ ID NO: 122 - DNA, 746 bp, Artificial Sequence
  chemically treated genomic DNA (Homo sapiens) CpG-island No: 122
aacttaacccgaccccgcaacaaccctctcgacgcccaacaacaccccaatatctaactaacgccaaaacaataacgacgaactaaaacaacatcgacccctcgatctacgccacaaccgaatacaaatttcccgaatctaaaaaaccgccgaacaccgtccgctaaaaatcataaaaaacaactttaacccgaccgtctcgcgcctatacacgcgaccccacctaatcccgtaacacttaacgcgacgtaaaaataaacgcgctctcccatcacccaccgcgcgacactaccgcgccaacaaaaaccgaaaaaacctacgaaataacgaccacacgacatacaacgcaaacgcgacctaaataaaaaaaacgcgtaaaacgtaccgaaaacatacgccgaatcgtacacgacgaccgcgcgcacgctaaaaacgtaactacgcgatataatcgatctctaaacgctacgcgacgctcctaaaaacaaacgttcccgactccgacaaaaaaatcaatataaaaacgaaaacccgaacgaccgacttaaactccgtacacgcgaacctaaaactacgcccctacgtcttttcccgacttctaatccgcaaaaaaacactcgaaaccccaacctaaatcgcaataccttcgatctacgaacctcaatttctcgatccgcgccgaaaatttataaaaacacctaaaaacatttaaaccgttctcgcaatctcgaaaaaccgcgcccgct

SEQ ID NO: 123 - DNA, 746 bp, Artificial Sequence
  chemically treated genomic DNA (Homo sapiens) CpG-island No: 123
ggtttagttcggtttcgtagtagttttttcgacgtttagtagtattttagtgtttggttgacgttagggtagtaacggcgggttgaagtagtatcggtttttcggtttacgttatagtcgggtgtagatttttcggatttgagggatcgtcgggtatcgttcgttggggattatgaggggtagttttggttcgatcgtttcgcgtttgtatacgcggttttatttgatttcgtggtatttggcgcggcgtgggaatgggcgcgtttttttattatttatcgcgcggtattgtcgcgttagtagggatcgggagagtttgcgaggtagcggttatacggtatatagcgtaggcgcggtttggatgggaggagcgcgtggagcgtgtcgggagtatgcgtcgggtcgtatacggcggtcgcgcgtacgttgggggcgtggttgcgcgatgtaatcggtttttggacgttgcgcggcgtttttaggagtaggcgttttcgatttcggtaagagggttagtgtggaggcgggagttcgggcggtcggtttgaatttcgtgtacgcgggtttggagttgcgtttttgcgttttttttcgatttttgattcgtagaggggtattcggagttttagtttgggtcgtagtgttttcggtttgcgggttttagtttttcggttcgcgtcgggggtttgtgggggtatttggagatatttgggtcgttttcgtagtttcgggaagtcgcgttcgtt

SEQ ID NO: 124 - DNA, 746 bp, Artificial Sequence
  chemically treated genomic DNA (Homo sapiens) CpG-island No: 124
aacgaacgcgacttcccgaaactacgaaaacgacccaaatatctccaaatacccccacaaacccccgacgcgaaccgaaaaactaaaacccgcaaaccgaaaacactacgacccaaactaaaactccgaatacccctctacgaatcaaaaatcgaaaaaaaacgcaaaaacgcaactccaaacccgcgtacacgaaattcaaaccgaccgcccgaactcccgcctccacactaaccctcttaccgaaatcgaaaacgcctactcctaaaaacgccgcgcaacgtccaaaaaccgattacatcgcgcaaccacgcccccaacgtacgcgcgaccgccgtatacgacccgacgcatactcccgacacgctccacgcgctcctcccatccaaaccgcgcctacgctatataccgtataaccgctacctcgcaaactctcccgatccctactaacgcgacaataccgcgcgataaataataaaaaaacgcgcccattcccacgccgcgccaaataccacgaaatcaaataaaaccgcgtatacaaacgcgaaacgatcgaaccaaaactacccctcataatccccaacgaacgatacccgacgatccctcaaatccgaaaaatctacacccgactataacgtaaaccgaaaaaccgatactacttcaacccgccgttactaccctaacgtcaaccaaacactaaaatactactaaacgtcgaaaaaactactacgaaaccgaactaaacc

SEQ ID NO: 125 - DNA, 539 bp, Artificial Sequence
  chemically treated genomic DNA (Homo sapiens) CpG-island No: 125
ttatcgcgcgggtgtggaggtgcggtcggtagggggagcgaggaggaagggaatcgcggtcgggttaggtgagggagggaggaatatttgtcgcgggtcgtgttgaggcgttgcgttcgcgtgcggaattcgcgtgtgtcgggttagggttattcgacgggcgcgtttttttcgggttgcgggagggtacgacgggtggggtggcggtaggtgaagaggagtgtgggcgggtggcggggtggcggggcggcggagcgcggcggggcggtgttttaggcgggagggagggtcggaggagttttattttgttgcgcgatggaggcggtggaggcggcggtttcggttggaggttgggacggtttcgcgtttcgagggttttcgggtttttttagtcgagggtttttggagggttttagcgttgagtaacggggttcgggggttcgaaattaagcgagtgagtataggtagtcggtggggtagggtcggttaatagagtcggttgggtggggttttttattttttttcgtcgtttttttggt

SEQ ID NO: 126 - DNA, 539 bp, Artificial Sequence
  chemically treated genomic DNA (Homo sapiens) CpG-island No: 126
accaaaaaaacgacgaaaaaaaataaaaaaccccacccaaccgactctattaaccgaccctaccccaccgactacctatactcactcgcttaatttcgaacccccgaaccccgttactcaacgctaaaaccctccaaaaaccctcgactaaaaaaacccgaaaaccctcgaaacgcgaaaccgtcccaacctccaaccgaaaccgccgcctccaccgcctccatcgcgcaacaaaataaaactcctccgaccctccctcccgcctaaaacaccgccccgccgcgctccgccgccccgccaccccgccacccgcccacactcctcttcacctaccgccaccccacccgtcgtaccctcccgcaacccgaaaaaaacgcgcccgtcgaataaccctaacccgacacacgcgaattccgcacgcgaacgcaacgcctcaacacgacccgcgacaaatattcctccctccctcacctaacccgaccgcgattcccttcctcctcgctccccctaccgaccgcacctccacacccgcgcgataa

SEQ ID NO: 127 - DNA, 539 bp, Artificial Sequence
  chemically treated genomic DNA (Homo sapiens) CpG-island No: 127
attagaagggcgacgggaagaggtgaggggttttatttagtcggttttgttggtcgattttattttatcggttgtttatatttattcgtttgatttcggattttcggatttcgttgtttaacgttgggattttttaggagttttcggttaaaggggttcggaagttttcgaagcgcgaggtcgttttagtttttagtcggagtcgtcgtttttatcgtttttatcgcgtagtaggatagggttttttcgattttttttttcgtttagggtatcgtttcgtcgcgtttcgtcgtttcgttatttcgttattcgtttatatttttttttatttgtcgttattttattcgtcgtgttttttcgtagttcggagggagcgcgttcgtcggatggttttagttcggtatacgcgggtttcgtacgcgaacgtagcgttttagtacggttcgcggtaagtgttttttttttttttatttggttcggtcgcggtttttttttttttcgttttttttgtcggtcgtatttttatattcgcgcgatag

SEQ ID NO: 128 - DNA, 539 bp, Artificial Sequence
  chemically treated genomic DNA (Homo sapiens) CpG-island No: 128
ctatcgcgcgaatataaaaatacgaccgacaaaaaaaacgaaaaaaaaaaaaaccgcgaccgaaccaaataaaaaaaaaaaaaacacttaccgcgaaccgtactaaaacgctacgttcgcgtacgaaacccgcgtataccgaactaaaaccatccgacgaacgcgctccctccgaactacgaaaaaacacgacgaataaaataacgacaaataaaaaaaaatataaacgaataacgaaataacgaaacgacgaaacgcgacgaaacgataccctaaacgaaaaaaaaaatcgaaaaaaccctatcctactacgcgataaaaacgataaaaacgacgactccgactaaaaactaaaacgacctcgcgcttcgaaaacttccgaacccctttaaccgaaaactcctaaaaaatcccaacgttaaacaacgaaatccgaaaatccgaaatcaaacgaataaatataaacaaccgataaaataaaatcgaccaacaaaaccgactaaataaaacccctcacctcttcccgtcgcccttctaat

SEQ ID NO: 129 - DNA, 1171 bp, Artificial Sequence
  chemically treated genomic DNA (Homo sapiens) CpG-island No: 129
tcggtgagtcggttcgggcggtcggggggtttcgggtcgagcgagtcgcggcgggcgggttgggggtcggggagggggaaggggcgggggaggggcgagggtcgggggagggatttagtttattgttttcgcgcgggggtgggggggtttcgggcggggcggggcggggcgttttttcggggtcggtttgcggtgtggggttgtacggttcggggcgtacgtagcgcggcgttcgttattcggttcgcggcgcggggtagcgtttagtttggtggcgggggcggcggcggcggttcgcgggttatgattttcgtcgtgtttagttcgtggtttacgtagttttcgtatttttgcgacgttgtagtttttacggttagtagtttgagtagtttgggggtcgcggggggtttttcgggcgtcgcgtcgttcggcgtcgattcgtacggttcgcgcgagttttcgtcgtcgtcgtcgcgttacgattcgtgcgtcgtcgtcgttttcggcgtttcgggttcgtcgtcgtcgtcgtacgtttattcgtttgcgtcggtcgtcggggtcgttattagcgtcgtcgtcgagttcgagggtttcggggttagttgcgcggtcgtagttaaggcgtcggtgaagaagaacgcgaaggtggtcggtgtgagcgtgtagttagagatgaaggcgttgtgggacgagtttaattagttgggtatcgagatgatcgttattaaggtcggtaggttagggcgtttttttttacgtcgcgattttttttacgtgttgtcgttagggttgcgggttttcgtttgattcgcgcgagcggggtcgaaagtcgggtcgggggcgcggtttggttatttgcgggtttttttgggtttcgttgtttttttcgttgttcgtcgtttcggtttcggcgatagtcgttcggcgttttttttttaatatttatttttcgtcggggcgggaggagacggcgcgggtcgtacgggaacggcgaggagtttcgcgggattcgttcgttcgtttcgtagttttaggacgtcgcgcggtttagaaatcggttcggtttggggcgtattcggttgggggtaggtagcggcgtttagggggttttatcgttcggtcgatttttagtaaattttattttaagaaaattttggtttagttttgg

SEQ ID NO: 130 - DNA, 1171 bp, Artificial Sequence
  chemically treated genomic DNA (Homo sapiens) CpG-island No: 130
ccaaaactaaaccaaaattttcttaaaataaaatttactaaaaatcgaccgaacgataaaaccccctaaacgccgctacctacccccaaccgaatacgccccaaaccgaaccgatttctaaaccgcgcgacgtcctaaaactacgaaacgaacgaacgaatcccgcgaaactcctcgccgttcccgtacgacccgcgccgtctcctcccgccccgacgaaaaataaatattaaaaaaaaaacgccgaacgactatcgccgaaaccgaaacgacgaacaacgaaaaaaacaacgaaacccaaaaaaacccgcaaataaccaaaccgcgcccccgacccgactttcgaccccgctcgcgcgaatcaaacgaaaacccgcaaccctaacgacaacacgtaaaaaaaatcgcgacgtaaaaaaaaacgccctaacctaccgaccttaataacgatcatctcgatacccaactaattaaactcgtcccacaacgccttcatctctaactacacgctcacaccgaccaccttcgcgttcttcttcaccgacgccttaactacgaccgcgcaactaaccccgaaaccctcgaactcgacgacgacgctaataacgaccccgacgaccgacgcaaacgaataaacgtacgacgacgacgacgaacccgaaacgccgaaaacgacgacgacgcacgaatcgtaacgcgacgacgacgacgaaaactcgcgcgaaccgtacgaatcgacgccgaacgacgcgacgcccgaaaaaccccccgcgacccccaaactactcaaactactaaccgtaaaaactacaacgtcgcaaaaatacgaaaactacgtaaaccacgaactaaacacgacgaaaatcataacccgcgaaccgccgccgccgcccccgccaccaaactaaacgctaccccgcgccgcgaaccgaataacgaacgccgcgctacgtacgccccgaaccgtacaaccccacaccgcaaaccgaccccgaaaaaacgccccgccccgccccgcccgaaacccccccacccccgcgcgaaaacaataaactaaatccctcccccgaccctcgcccctcccccgccccttccccctccccgacccccaacccgcccgccgcgactcgctcgacccgaaaccccccgaccgcccgaaccgactcaccga

SEQ ID NO: 131 - DNA, 1171 bp, Artificial Sequence
  chemically treated genomic DNA (Homo sapiens) CpG-island No: 131
ttagaattgaattagagtttttttgaggtgggatttattaggagtcggtcgggcggtgaggttttttggacgtcgttgtttgtttttagtcgggtgcgttttaagtcgggtcggtttttgggtcgcgcggcgttttggggttgcggggcgggcgggcgagtttcgcggggtttttcgtcgttttcgtgcggttcgcgtcgttttttttcgtttcggcggaggataggtgttaggaggggagcgtcgggcggttgtcgtcggagtcgggacggcgaatagcgaaggaggtagcggggtttagaggggttcgtaggtggttaggtcgcgttttcgattcggttttcggtttcgttcgcgcggattaggcggaggttcgtagttttggcggtagtacgtggggagggtcgcggcgtggggaggggcgttttgatttgtcggttttggtgacgattatttcggtgtttagttggttgaattcgttttatagcgtttttatttttagttgtacgtttatatcggttattttcgcgtttttttttatcggcgttttggttgcggtcgcgtagttggtttcggggttttcgggttcggcggcggcgttggtggcggtttcggcggtcggcgtaaacgggtaggcgtgcggcggcggcggcgggttcggggcgtcgggggcggcggcggcgtacgggtcgtagcgcggcggcggcggcgggggttcgcgcgggtcgtacgggtcggcgtcgggcgacgcggcgttcgggaagtttttcgcggtttttaggttgtttaggttgttggtcgtgaaggttgtaacgtcgtagaaatgcgagagttgcgtgagttacgggttggatacggcggagattatgattcgcgggtcgtcgtcgtcgttttcgttattaagttgagcgttgtttcgcgtcgcgggtcgagtggcgggcgtcgcgttgcgtgcgtttcgggtcgtgtagttttatatcgtaggtcggtttcgaggaggcgtttcgtttcgtttcgttcggggtttttttattttcgcgcggagataatggattagatttttttttcggttttcgtttttttttcgtttttttttttttttcggtttttagttcgttcgtcgcggttcgttcggttcggggtttttcgatcgttcggatcggtttatcgg

SEQ ID NO: 132 - DNA, 1171 bp, Artificial Sequence
  chemically treated genomic DNA (Homo sapiens) CpG-island No: 132
ccgataaaccgatccgaacgatcgaaaaaccccgaaccgaacgaaccgcgacgaacgaactaaaaaccgaaaaaaaaaaaaaaacgaaaaaaaaacgaaaaccgaaaaaaaaatctaatccattatctccgcgcgaaaataaaaaaaccccgaacgaaacgaaacgaaacgcctcctcgaaaccgacctacgatataaaactacacgacccgaaacgcacgcaacgcgacgcccgccactcgacccgcgacgcgaaacaacgctcaacttaataacgaaaacgacgacgacgacccgcgaatcataatctccgccgtatccaacccgtaactcacgcaactctcgcatttctacgacgttacaaccttcacgaccaacaacctaaacaacctaaaaaccgcgaaaaacttcccgaacgccgcgtcgcccgacgccgacccgtacgacccgcgcgaacccccgccgccgccgccgcgctacgacccgtacgccgccgccgcccccgacgccccgaacccgccgccgccgccgcacgcctacccgtttacgccgaccgccgaaaccgccaccaacgccgccgccgaacccgaaaaccccgaaaccaactacgcgaccgcaaccaaaacgccgataaaaaaaaacgcgaaaataaccgatataaacgtacaactaaaaataaaaacgctataaaacgaattcaaccaactaaacaccgaaataatcgtcaccaaaaccgacaaatcaaaacgcccctccccacgccgcgaccctccccacgtactaccgccaaaactacgaacctccgcctaatccgcgcgaacgaaaccgaaaaccgaatcgaaaacgcgacctaaccacctacgaacccctctaaaccccgctacctccttcgctattcgccgtcccgactccgacgacaaccgcccgacgctcccctcctaacacctatcctccgccgaaacgaaaaaaaacgacgcgaaccgcacgaaaacgacgaaaaaccccgcgaaactcgcccgcccgccccgcaaccccaaaacgccgcgcgacccaaaaaccgacccgacttaaaacgcacccgactaaaaacaaacaacgacgtccaaaaaacctcaccgcccgaccgactcctaataaatcccacctcaaaaaaactctaattcaattctaa

SEQ ID NO: 133 - DNA, 567 bp, Artificial Sequence
  chemically treated genomic DNA (Homo sapiens) CpG-island No: 133
gtgagcgtcgggcgtttggcgtaggcgtcgttttgattcgtttttcgttcgtaggtttcggaattatcggttcggcgtattgtcgtttatgagcgttttcgcgcgttcgcggaatttcgtggttttttcgacgtagtttagcggtacggagaaaggtagggtcggggtcgtgggattcgggtttcggttttgtgcgcgttttatttcgggtcggcggtttcgttcgatttcgtttgcgttttcggggcgttttaggttttcgcgtcggttgtataacggtcgcggcggcgggtaagcgcgtattcgttcgttcggttcgacggttgcgtttcgttcgtcgtcgtcgtcgttcgtagaggggcgcgggtttcggggagggttcggggcgtcggcgatttggggtttcgggtacgttggtatcgattggtcggggaatatcgagggcggttaagagtttttttttcgttagggtttcgtatggggcgtcggagtttttcggcggtttcggtcggtcgcgtttatttttcggtttttttcgtagacgcggttgaggttcggcgagaattt

SEQ ID NO: 134 - DNA, 567 bp, Artificial Sequence
  chemically treated genomic DNA (Homo sapiens) CpG-island No: 134
aaattctcgccgaacctcaaccgcgtctacgaaaaaaaccgaaaaataaacgcgaccgaccgaaaccgccgaaaaactccgacgccccatacgaaaccctaacgaaaaaaaaactcttaaccgccctcgatattccccgaccaatcgataccaacgtacccgaaaccccaaatcgccgacgccccgaaccctccccgaaacccgcgcccctctacgaacgacgacgacgacgaacgaaacgcaaccgtcgaaccgaacgaacgaatacgcgcttacccgccgccgcgaccgttatacaaccgacgcgaaaacctaaaacgccccgaaaacgcaaacgaaatcgaacgaaaccgccgacccgaaataaaacgcgcacaaaaccgaaacccgaatcccacgaccccgaccctacctttctccgtaccgctaaactacgtcgaaaaaaccacgaaattccgcgaacgcgcgaaaacgctcataaacgacaatacgccgaaccgataattccgaaacctacgaacgaaaaacgaatcaaaacgacgcctacgccaaacgcccgacgctcac

SEQ ID NO: 135 - DNA, 567 bp, Artificial Sequence
  chemically treated genomic DNA (Homo sapiens) CpG-island No: 135
gaattttcgtcgggttttagtcgcgtttgcggagagggtcgaggagtgagcgcggtcggtcggggtcgtcgaggagtttcgacgttttatgcgaggttttggcggagagaaggtttttggtcgttttcggtgtttttcgattagtcggtgttagcgtgttcgagattttaagtcgtcggcgtttcgagtttttttcggggttcgcgtttttttgcgggcggcggcggcggcgggcggggcgtagtcgtcgggtcgggcgggcgagtgcgcgtttgttcgtcgtcgcggtcgttgtgtaatcggcgcgaaagtttggagcgtttcgggggcgtaggcgaggtcgggcgaggtcgtcggttcggggtagagcgcgtatagggtcggaattcggattttacgatttcggttttattttttttcgtgtcgttgggttgcgtcggggaagttacggggtttcgcgagcgcgcgaaggcgtttatgagcggtagtgcgtcgggtcggtggtttcggggtttgcgggcgggaggcggattagggcggcgtttgcgttaggcgttcggcgtttat

SEQ ID NO: 136 - DNA, 567 bp, Artificial Sequence
  chemically treated genomic DNA (Homo sapiens) CpG-island No: 136
ataaacgccgaacgcctaacgcaaacgccgccctaatccgcctcccgcccgcaaaccccgaaaccaccgacccgacgcactaccgctcataaacgccttcgcgcgctcgcgaaaccccgtaacttccccgacgcaacccaacgacacgaaaaaaaataaaaccgaaatcgtaaaatccgaattccgaccctatacgcgctctaccccgaaccgacgacctcgcccgacctcgcctacgcccccgaaacgctccaaactttcgcgccgattacacaacgaccgcgacgacgaacaaacgcgcactcgcccgcccgacccgacgactacgccccgcccgccgccgccgccgcccgcaaaaaaacgcgaaccccgaaaaaaactcgaaacgccgacgacttaaaatctcgaacacgctaacaccgactaatcgaaaaacaccgaaaacgaccaaaaaccttctctccgccaaaacctcgcataaaacgtcgaaactcctcgacgaccccgaccgaccgcgctcactcctcgaccctctccgcaaacgcgactaaaacccgacgaaaattc

SEQ ID NO: 137 - DNA, 860 bp, Artificial Sequence
  chemically treated genomic DNA (Homo sapiens) CpG-island No: 137
ttatcggacggatggttcgaggatcggtatggattcgggttttagcgagggcggggggagcgtaaggttgggtttgggttgcggtatcggggaggtggcggggaggaggtcggtaggaatagtcgtgtagggcgggggcggcgcgggtttggtcgggtgatttcgggcgcggttagggttgtaggaggcgagggcgtcgtttcgaggtcgtggtttcgggtttatggtgggggatttgggttttcgttttttcgggtcgttttgggtcgcgcgtgggcgcggcgggcgtcgattggttgtcgggcgcgcgggcggagcgggcggcggcggcggcggcgcggaggggtcgtttatttcgtagttcggtttcggttttcgtcgtttgtcgtcgcgtttcgttcgcgagttcgtttcgtacgtttttcgtcggcggttattatgagtataggtttgcggtataagagtaagttggcgattttaggtgagtttagcgtttgttcgcgtgttcgcgcgcgtttttgttttcgtcgttcgcgcgttttttatcgtgttttttcgtttttttttcgttcgtcggttcggattcgttcggaatcggattcggattcgatttcgatttcgatttcgtagaggataagtaggtacgtgcgtagcgtcgttttttcgtcgggagattcggtcggttgttatttattgtgatattagcgttttgggcgtttaggcgcgatttcgttttcgtcggtttttatttagttttgtcgcgattatcgattgttagtcgggtagtgtcgtcgcgtttggggttttagaggagaggagtgggggttttggttttcggattcgtatagtagggattttgt

SEQ ID NO: 138 - DNA, 860 bp, Artificial Sequence
  chemically treated genomic DNA (Homo sapiens) CpG-island No: 138
acaaaatccctactatacgaatccgaaaaccaaaacccccactcctctcctctaaaaccccaaacgcgacgacactacccgactaacaatcgataatcgcgacaaaactaaataaaaaccgacgaaaacgaaatcgcgcctaaacgcccaaaacgctaatatcacaataaataacaaccgaccgaatctcccgacgaaaaaacgacgctacgcacgtacctacttatcctctacgaaatcgaaatcgaaatcgaatccgaatccgattccgaacgaatccgaaccgacgaacgaaaaaaaaacgaaaaaacacgataaaaaacgcgcgaacgacgaaaacaaaaacgcgcgcgaacacgcgaacaaacgctaaactcacctaaaatcgccaacttactcttataccgcaaacctatactcataataaccgccgacgaaaaacgtacgaaacgaactcgcgaacgaaacgcgacgacaaacgacgaaaaccgaaaccgaactacgaaataaacgacccctccgcgccgccgccgccgccgcccgctccgcccgcgcgcccgacaaccaatcgacgcccgccgcgcccacgcgcgacccaaaacgacccgaaaaaacgaaaacccaaatcccccaccataaacccgaaaccacgacctcgaaacgacgccctcgcctcctacaaccctaaccgcgcccgaaatcacccgaccaaacccgcgccgcccccgccctacacgactattcctaccgacctcctccccgccacctccccgataccgcaacccaaacccaaccttacgctccccccgccctcgctaaaacccgaatccataccgatcctcgaaccatccgtccgataa

SEQ ID NO: 139 - DNA, 860 bp, Artificial Sequence
  chemically treated genomic DNA (Homo sapiens) CpG-island No: 139
gtagggtttttgttgtgcgggttcggggattagggtttttattttttttttttgaagttttaggcgcggcggtattgttcggttgataatcggtgatcgcgatagggttgggtgagggtcggcgggggcggggtcgcgtttgggcgtttaaggcgttagtgttataatgggtgatagtcggtcgggtttttcggcgggggagcggcgttgcgtacgtatttgtttgttttttgcggggtcggggtcggggtcgagttcgggttcggtttcgagcgggttcgggtcggcgggcgggggagagacggagagatacggtgagaggcgcgcgggcggcggggataaaggcgcgcgcgggtacgcgggtaggcgttgggtttatttggggtcgttagtttgtttttgtatcgtaggtttgtgtttatggtggtcgtcggcgggggacgtgcggggcgggttcgcgggcggggcgcgacgataagcggcggaggtcgaggtcgggttgcggggtgagcggttttttcgcgtcgtcgtcgtcgtcgttcgtttcgttcgcgcgttcggtagttaatcggcgttcgtcgcgtttacgcgcgatttagggcggttcgggggggcggggatttaggttttttattatggattcgagattacggtttcggggcgacgttttcgttttttatagttttggtcgcgttcggggttattcgattagattcgcgtcgttttcgttttgtacggttgtttttgtcggtttttttttcgttattttttcggtgtcgtagtttaggtttagttttacgtttttttcgttttcgttgggattcgggtttatgtcggttttcggattattcgttcggtgg

SEQ ID NO: 140 - DNA, 860 bp, Artificial Sequence
  chemically treated genomic DNA (Homo sapiens) CpG-island No: 140
ccaccgaacgaataatccgaaaaccgacataaacccgaatcccaacgaaaacgaaaaaaacgtaaaactaaacctaaactacgacaccgaaaaaataacgaaaaaaaaaccgacaaaaacaaccgtacaaaacgaaaacgacgcgaatctaatcgaataaccccgaacgcgaccaaaactataaaaaacgaaaacgtcgccccgaaaccgtaatctcgaatccataataaaaaacctaaatccccgcccccccgaaccgccctaaatcgcgcgtaaacgcgacgaacgccgattaactaccgaacgcgcgaacgaaacgaacgacgacgacgacgacgcgaaaaaaccgctcaccccgcaacccgacctcgacctccgccgcttatcgtcgcgccccgcccgcgaacccgccccgcacgtcccccgccgacgaccaccataaacacaaacctacgatacaaaaacaaactaacgaccccaaataaacccaacgcctacccgcgtacccgcgcgcgcctttatccccgccgcccgcgcgcctctcaccgtatctctccgtctctcccccgcccgccgacccgaacccgctcgaaaccgaacccgaactcgaccccgaccccgaccccgcaaaaaacaaacaaatacgtacgcaacgccgctcccccgccgaaaaacccgaccgactatcacccattataacactaacgccttaaacgcccaaacgcgaccccgcccccgccgaccctcacccaaccctatcgcgatcaccgattatcaaccgaacaataccgccgcgcctaaaacttcaaaaaaaaaaaataaaaaccctaatccccgaacccgcacaacaaaaaccctac

SEQ ID NO: 141 - DNA, 1449 bp, Artificial Sequence
  chemically treated genomic DNA (Homo sapiens) CpG-island No: 141
gtatatatttaatgtatgtatatacgtatatatatacgtatatacgtatgtatatacgcgtatatacgtaggtattatatatatatatattatatatatatattcgtacggacgcgtatatataaacgcgcgtacgtacgtacgtacgtacgggggaggttagttttaagtagggttggggaggggtgtagggcgcggcgtgtttgtgggtatttggggcgtcgagacgtcgtcgggaggttttcgggtaagtttgcgagaagacggcgggttttgaattgggcgggtattcgcgttgttgcgcgtgggtttcgggagcggttttcggcgttttttggcgggcggaagtcgcgtagtattttttgggggcgggacgcgcggtggttatcgattttcggttcgtttcggttcgcgtgtaggattcggtcgtttttttttgttgttttggagttcggattgaggtttcgggggcgcggtagggttttcggtttacgcgagttatggttcgatcgcgtttcggtttagttttgtttttcgtagtcgttttcgggtggtttcgttcgcggtttaatttttaggcgatcgtttttcggcgacggcgggcggggtcgtttttgtcgtttttcgtcgcgcgtttcgcgggcgtttgcgacgtttcgtttttggttcgggtgcgggagcggggtttgttcggattgcgacgtcgttatagtttggggttagttcgtttagttagggggatggttcggtcggtttcgggggtcgacgatttttcgggtaggcgacgtgttttgtttaggttttatttttcgcgttcgtaaaacggggtggataacgtagtttaaggtagagtcgcgttaaggtttttcgttgtcgtcgggttttggcggtttgatcgggtttggggttcgagcgtgttttcgggtttgggggggtcgtcgcgatggattcgttggtagcgttttaggatcgtttggtggagtagttgttgtcgtcgcggatttaggtttagaggcggtttaaggtgcgtgtgtggagagggcggaacgtgggtttgtgatttcgcgggtttcgggattcggtatggggttttcgttttcgcgcgttacggttcgttagcgtttaggtttagttttttttttcgtagcggtttcgtaggttcgcggttttacggtggggcgacgtgttttgtttaggttttattttacgcgattttaaaacgcggcggagaatgcggtcgtgggatttttttaggggttttaagggtttgcgggggttgggcgtttgggcgcgcgggcgggggaggttcggcgtcgcggtttataaataggcgttgtttcgttatcgtcgttgtcgtcgttttcgcggttggattcgggttaggtggggtttttcgttttttggtatttttcggaggggtgagtgtcgaggtttttagttttttcggtt

SEQ ID NO: 142 - DNA, 1449 bp, Artificial Sequence
  chemically treated genomic DNA (Homo sapiens) CpG-island No: 142
aaccgaaaaaactaaaaacctcgacactcacccctccgaaaaataccaaaaaacgaaaaaccccacctaacccgaatccaaccgcgaaaacgacgacaacgacgataacgaaacaacgcctatttataaaccgcgacgccgaacctcccccgcccgcgcgcccaaacgcccaacccccgcaaacccttaaaacccctaaaaaaatcccacgaccgcattctccgccgcgttttaaaatcgcgtaaaataaaacctaaacaaaacacgtcgccccaccgtaaaaccgcgaacctacgaaaccgctacgaaaaaaaaaactaaacctaaacgctaacgaaccgtaacgcgcgaaaacgaaaaccccataccgaatcccgaaacccgcgaaatcacaaacccacgttccgccctctccacacacgcaccttaaaccgcctctaaacctaaatccgcgacgacaacaactactccaccaaacgatcctaaaacgctaccaacgaatccatcgcgacgacccccccaaacccgaaaacacgctcgaaccccaaacccgatcaaaccgccaaaacccgacgacaacgaaaaaccttaacgcgactctaccttaaactacgttatccaccccgttttacgaacgcgaaaaataaaacctaaacaaaacacgtcgcctacccgaaaaatcgtcgacccccgaaaccgaccgaaccatccccctaactaaacgaactaaccccaaactataacgacgtcgcaatccgaacaaaccccgctcccgcacccgaaccaaaaacgaaacgtcgcaaacgcccgcgaaacgcgcgacgaaaaacgacaaaaacgaccccgcccgccgtcgccgaaaaacgatcgcctaaaaattaaaccgcgaacgaaaccacccgaaaacgactacgaaaaacaaaactaaaccgaaacgcgatcgaaccataactcgcgtaaaccgaaaaccctaccgcgcccccgaaacctcaatccgaactccaaaacaacaaaaaaaaacgaccgaatcctacacgcgaaccgaaacgaaccgaaaatcgataaccaccgcgcgtcccgcccccaaaaaatactacgcgacttccgcccgccaaaaaacgccgaaaaccgctcccgaaacccacgcgcaacaacgcgaatacccgcccaattcaaaacccgccgtcttctcgcaaacttacccgaaaacctcccgacgacgtctcgacgccccaaatacccacaaacacgccgcgccctacacccctccccaaccctacttaaaactaacctcccccgtacgtacgtacgtacgtacgcgcgtttatatatacgcgtccgtacgaatatatatatataatatatatatatataatacctacgtatatacgcgtatatacatacgtatatacgtatatatatacgtatatacatacattaaatatatac

SEQ ID NO: 143 - DNA, 1449 bp, Artificial Sequence
  chemically treated genomic DNA (Homo sapiens) CpG-island No: 143
agtcggagaagttgggggtttcgatatttattttttcggagagtgttagggggcgggaggttttatttggttcggatttagtcgcgggggcggcggtagcggcggtggcggagtagcgtttatttatagatcgcggcgtcgagtttttttcgttcgcgcgtttaggcgtttagttttcgtagatttttggggtttttggaggggttttacggtcgtatttttcgtcgcgttttggagtcgcgtgaggtgaggtttggatagggtacgtcgttttatcgtggggtcgcggatttgcgaggtcgttgcggagggaagggttgagtttaggcgttggcgggtcgtggcgcgcggggacggggattttatgtcgagtttcggagttcgcggggttatagatttacgtttcgttttttttatatacgtattttgagtcgtttttgggtttgggttcgcggcgatagtagttgttttattaggcggttttggggcgttgttagcgagtttatcgcggcgatttttttaggttcgggggtacgttcggattttaggttcggttaggtcgttagagttcggcgatagcgagggattttggcgcggttttgttttaggttgcgttgtttatttcgttttgcggacgcgggaagtgaggtttggatagggtacgtcgtttattcgggggatcgtcgattttcgaggtcgatcgagttatttttttgattgggcgaattggttttaagttgtggcggcgtcgtagttcgggtaggtttcgttttcgtattcgagttagaggcggggcgtcgtaggcgttcgcggagcgcgcggcggggggcggtagagacggtttcgttcgtcgtcgtcgggaaacggtcgtttggaaattgggtcgcgggcggagttattcgaaagcggttgcggagggtagggttgagtcgaggcgcggtcgggttatggttcgcgtggatcgggagttttgtcgcgttttcggggttttagttcgggttttaggatagtaggaggggacgatcgggttttgtacgcgggtcggggcgggtcgggagtcggtagttatcgcgcgtttcgtttttaagaggtgttgcgcggttttcgttcgttagagggcgtcggaggtcgttttcgggatttacgcgtaatagcgcgggtattcgtttagtttagggttcgtcgttttttcgtagatttgttcgaaaatttttcggcggcgtttcgacgttttaagtgtttatagatacgtcgcgttttgtatttttttttagttttgtttggggttgatttttttcgtgcgtgcgtgcgtgcgtgcgcgcgtttgtgtgtgcgcgttcgtgcgggtgtgtgtgtgtaatgtgtgtgtgtgtaatgtttgcgtgtgtgcgcgtgtatatatgcgtgtatgcgtgtgtgtgtacgtgtgtgtatgtattgggtatgtgt

SEQ ID NO: 144 - DNA, 1449 bp, Artificial Sequence
  chemically treated genomic DNA (Homo sapiens) CpG-island No: 144
acacatacccaatacatacacacacgtacacacacacgcatacacgcatatatacacgcgcacacacgcaaacattacacacacacacattacacacacacacccgcacgaacgcgcacacacaaacgcgcgcacgcacgcacgcacgcacgaaaaaaatcaaccccaaacaaaactaaaaaaaaatacaaaacgcgacgtatctataaacacttaaaacgtcgaaacgccgccgaaaaattttcgaacaaatctacgaaaaaacgacgaaccctaaactaaacgaatacccgcgctattacgcgtaaatcccgaaaacgacctccgacgccctctaacgaacgaaaaccgcgcaacacctcttaaaaacgaaacgcgcgataactaccgactcccgacccgccccgacccgcgtacaaaacccgatcgtcccctcctactatcctaaaacccgaactaaaaccccgaaaacgcgacaaaactcccgatccacgcgaaccataacccgaccgcgcctcgactcaaccctaccctccgcaaccgctttcgaataactccgcccgcgacccaatttccaaacgaccgtttcccgacgacgacgaacgaaaccgtctctaccgccccccgccgcgcgctccgcgaacgcctacgacgccccgcctctaactcgaatacgaaaacgaaacctacccgaactacgacgccgccacaacttaaaaccaattcgcccaatcaaaaaaataactcgatcgacctcgaaaatcgacgatcccccgaataaacgacgtaccctatccaaacctcacttcccgcgtccgcaaaacgaaataaacaacgcaacctaaaacaaaaccgcgccaaaatccctcgctatcgccgaactctaacgacctaaccgaacctaaaatccgaacgtacccccgaacctaaaaaaatcgccgcgataaactcgctaacaacgccccaaaaccgcctaataaaacaactactatcgccgcgaacccaaacccaaaaacgactcaaaatacgtatataaaaaaaacgaaacgtaaatctataaccccgcgaactccgaaactcgacataaaatccccgtccccgcgcgccacgacccgccaacgcctaaactcaacccttccctccgcaacgacctcgcaaatccgcgaccccacgataaaacgacgtaccctatccaaacctcacctcacgcgactccaaaacgcgacgaaaaatacgaccgtaaaacccctccaaaaaccccaaaaatctacgaaaactaaacgcctaaacgcgcgaacgaaaaaaactcgacgccgcgatctataaataaacgctactccgccaccgccgctaccgccgcccccgcgactaaatccgaaccaaataaaacctcccgccccctaacactctccgaaaaaataaatatcgaaacccccaacttctccgact

SEQ ID NO: 145 - DNA, 883 bp, Artificial Sequence
  chemically treated genomic DNA (Homo sapiens) CpG-island No: 145
tatcgggacgtcgggtattaggggttggatggagtcgggtcggtagtttgggtatttagagatgtcgtttaggtgttcgtcgatcgttcggtttattgcggcgttttttttgtagggtcgcgcggggcgttgagtttattgtttttgttgttggtttcgtcgagtcgttcggtcgtaggttgttcggcgttttgtagttgcgcggggacgttcgtggattgcgggcgtcgcgggttgatttgggtttcgttgtcgatcgttttttttgtcgatataatcgagttggtgttgatcggtaataatttgacggcgttgtcgtcggggttgttggacgcgttgttcgcgttgcgtatcgtatatttgggcgttaatttttggcgttgcgattgtcgttttgtgtcgttgcgcgtttggttggtcggtcgtttcgagcgtgcgttttatcgcgatttgcgttgcgtggcgtttttagcgttgcgcggtcgtttgttgttttatttggtcgaggacgagttgcgcgtcgtttgcgttttcggttcgttttgttggggggcgttggcggcgtagtttgcgttgttgggttttgggttgttgtacgcgttgttgttggtgttgttgttgtgtcgtttgcggaggttgcgggttcgggttcgcgttcgcgtcgtagttcggttgtcgttgatcgattcgttggtggtcgagcgagtcggaatcgacgagttttgaggagagaatcggtgcgttttgaggagagaatcggcgttgggtaatacgggtttgtaaattcgataggattttgttcgaggggttttcgcgttaatttggatcggttttcgtttttttcgttgtttaattttttagatttattttatttgtaggttta

SEQ ID NO: 146 - DNA, 883 bp, Artificial Sequence
  chemically treated genomic DNA (Homo sapiens) CpG-island No: 146
taaacctacaaataaaataaatctaaaaaattaaacaacgaaaaaaacgaaaaccgatccaaattaacgcgaaaacccctcgaacaaaatcctatcgaatttacaaacccgtattacccaacgccgattctctcctcaaaacgcaccgattctctcctcaaaactcgtcgattccgactcgctcgaccaccaacgaatcgatcaacgacaaccgaactacgacgcgaacgcgaacccgaacccgcaacctccgcaaacgacacaacaacaacaccaacaacaacgcgtacaacaacccaaaacccaacaacgcaaactacgccgccaacgccccccaacaaaacgaaccgaaaacgcaaacgacgcgcaactcgtcctcgaccaaataaaacaacaaacgaccgcgcaacgctaaaaacgccacgcaacgcaaatcgcgataaaacgcacgctcgaaacgaccgaccaaccaaacgcgcaacgacacaaaacgacaatcgcaacgccaaaaattaacgcccaaatatacgatacgcaacgcgaacaacgcgtccaacaaccccgacgacaacgccgtcaaattattaccgatcaacaccaactcgattatatcgacaaaaaaaacgatcgacaacgaaacccaaatcaacccgcgacgcccgcaatccacgaacgtccccgcgcaactacaaaacgccgaacaacctacgaccgaacgactcgacgaaaccaacaacaaaaacaataaactcaacgccccgcgcgaccctacaaaaaaaacgccgcaataaaccgaacgatcgacgaacacctaaacgacatctctaaatacccaaactaccgacccgactccatccaacccctaatacccgacgtcccgata

SEQ ID NO: 147 - DNA, 883 bp, Artificial Sequence
  chemically treated genomic DNA (Homo sapiens) CpG-island No: 147
tgggtttgtaggtggggtgggtttgagagattgggtagcggaggaggcggggatcggtttaggttggcgcgagggtttttcgggtagggttttgtcgagtttgtaggttcgtgttgtttagcgtcggttttttttttaggacgtatcggttttttttttaggattcgtcggtttcggttcgttcggttattagcgggtcggttagcgatagtcgggttgcggcgcgagcgcgggttcgggttcgtagttttcgtaggcggtatagtagtagtattagtagtaacgcgtgtagtagtttaaggtttagtagcgtaagttgcgtcgttagcgttttttagtagagcgggtcgggagcgtaagcggcgcgtagttcgttttcggttagatagggtagtaggcggtcgcgtagcgttgggggcgttacgtaacgtaggtcgcggtagggcgtacgttcggggcggtcggttagttaggcgcgtagcggtataaggcggtagtcgtagcgttaggggttggcgtttaggtgtgcggtgcgtagcgcgggtagcgcgtttagtagtttcggcggtagcgtcgttaggttgttgtcggttagtattagttcggttgtgtcgatagggaaggcggtcggtagcgaggtttaagttagttcgcggcgttcgtagtttacgagcgttttcgcgtagttatagggcgtcgggtaatttgcggtcgggcggttcggcggggttagtagtaggagtagtaagtttagcgtttcgcgcggttttgtaagggaagcgtcgtagtaagtcgagcggtcggcgggtatttgggcgatatttttgagtatttagattgtcggttcggttttatttagtttttgatgttcggcgtttcggta

SEQ ID NO: 148 - DNA, 883 bp, Artificial Sequence
  chemically treated genomic DNA (Homo sapiens) CpG-island No: 148
taccgaaacgccgaacatcaaaaactaaataaaaccgaaccgacaatctaaatactcaaaaatatcgcccaaatacccgccgaccgctcgacttactacgacgcttcccttacaaaaccgcgcgaaacgctaaacttactactcctactactaaccccgccgaaccgcccgaccgcaaattacccgacgccctataactacgcgaaaacgctcgtaaactacgaacgccgcgaactaacttaaacctcgctaccgaccgccttccctatcgacacaaccgaactaatactaaccgacaacaacctaacgacgctaccgccgaaactactaaacgcgctacccgcgctacgcaccgcacacctaaacgccaacccctaacgctacgactaccgccttataccgctacgcgcctaactaaccgaccgccccgaacgtacgccctaccgcgacctacgttacgtaacgcccccaacgctacgcgaccgcctactaccctatctaaccgaaaacgaactacgcgccgcttacgctcccgacccgctctactaaaaaacgctaacgacgcaacttacgctactaaaccttaaactactacacgcgttactactaatactactactataccgcctacgaaaactacgaacccgaacccgcgctcgcgccgcaacccgactatcgctaaccgacccgctaataaccgaacgaaccgaaaccgacgaatcctaaaaaaaaaaccgatacgtcctaaaaaaaaaaccgacgctaaacaacacgaacctacaaactcgacaaaaccctacccgaaaaaccctcgcgccaacctaaaccgatccccgcctcctccgctacccaatctctcaaacccaccccacctacaaaccca

SEQ ID NO: 149 - DNA, 2671 bp, Artificial Sequence
  chemically treated genomic DNA (Homo sapiens) CpG-island No: 149
gggcgttgtgggggcggtgaggacgttgtaggggcggtgaggacgttgtgggggcggtgaaggcgttgtggggatggtgaggacgttattcggggcggtgaggacgttgtggacggtgagaacgttgtggggatattgaggatgttgtgaggacgttgtgggggtagtgaggacgttgtggatcgtgaggacgttgtggggatggcgaagattttgtgggggcggtgaggattttgtggacggtgaggacgttgttggggtagtgaggacgttgtggatcgtgaggattttgtgggggcggtgaggattttgtggacgcggtgaggacgttgtgggggcggtgaggacgttgtggatagtgaggaggttgtggagataatggggacgttgtagataggacgttgtggaggcggtgagggcgttgtgggggcggtgaggacgttgtggatattgacgacgttggaggtaataatgaggatattggggataatgagtatattgtgggggcggtgagaacgttgtggatattgaggacgttgtgggggcggtgagggcgttgtggacgcggtgaggacgttgtgggggcggtgaggacgttgtggggatcgtgaggacgttgtcggggcggtgaggacgttgtggacgcggtgaggacgttgtggggacggtgaggacgttgtggggatcgtgaggacgttgtcggggtcgtgaggacgttgtggacgcggcgagggagttgttagggcggtgaggacgttgtggacgcggtgaggacgttgtggacgcggcgagggagttgtcggggcggtgaggacgttgtggacgcggtgagggcgttgtggggacggtgaggacgttgtggacgttgtcggggtagtgaggacgttgcggacgttgaggacgttgtgggggcgatgaggacgttgtcggggcggtgaggacgttgtcggggcggtgaggacgttgtggacgcggtgaggacgttgtggggacggtgaggacgttgtggggatcgtgaggacgttgtcggggtcgtgaggacgttgtcggggcggtgaggacgttgtcgggacggtgagggcgttgtggacgcggtgagggcgttgtgggggcggtgaggacgttgtggacgcgatgaggacgttgtggacgttgtgaggacgttgtgggggcggtgaggacgttgtggacgcggtgaggacgttgtggacgtcgtgaggacgttgtggggacggtgaggacgttgtggacgcggtgaggacgttgtggacgcggcgagggagttgttagggcggtgaggacgttgtggacgcggtgaggacgttgtggacgcggcgagggagttgtcggggcggtgaggacgttgtggacgcggtgaggatattgtggggacggtgaggacgttgtggacgcggtgaggacgttgtggacgtcgtgaggacgttgtgggggcggtgaggacgttgtcggggcggtgaggacgttgtgggggcggtgagggcgttgtggacgcggcgagggcgttgtcggggcggtgaggacgttgtggacgtcgtgaggacgttgtgggggcggtgaggacgttgtcggggcggtgaggacgttgtcggggcggtgagggcgttgtgggggcggtgaggacgttgtcggggcggtgagggcgttgcggacgttgaggacgttgtggacgtagtgaggatattgtggggatagtgaggacgttgtggacgtcgtgaggacgttgtcggggtggtgaggacgttgtgggggcggtgaggacgttgtcggggttgtgagggcgttgtggacgcggtgagggcgttgtggacgcggtgaggacgttgtgggggcggtgaggacgttgcggatattaaggacgttgtggacgcggtgacgatattgtggggacggtgaggacgttgtggacgtcgtgaggacgttgtcggggcggtgaggacgttgtcggggaggtgaggacgttgtgggggcggtgaggacgttgtgggggcggtgagggcgttgcggacgttgaggacgttgtggacgcggtgaggatattgtggggatagtgaggacgttgtggacgtcgtgaggatattgtcggggtggtgaggacgttgtggacgcggtgaggacgttgtcggggttgtgaggacgttgtgggggcggtgaggacgttgtgggggcggtgaggacgttgtcggggcggtgaggacgttttcggggcggtgagggcgttgtggattcgatgagggcgttgtgggggcggtgaggacgttgtggacgcggtgagggcgttgtaggggcgatgaggaggttgtggacgtcgtgaggacgttgtggacgcggtgaggacgttgtgggggcggtgaggacgttgtgggggcggtgaagatgttgtggacgcggtgagggcgttgtgggggcggtgaggacgttgtagatgttgacgttgtggatgttgtgggggtggcgagggttttttggacgcggtgaggacgttgtgggggcggtgaggacgttgtagatgttgacgttgtggatgttgtgggggtggcgagggtttcgtggacgcggtgagtacgttgtggatagtgagggtgttgtggggatagtgaggatgttttggggggtagtgagggcgttgcgcggatagtgagggtgttgtggg

SEQ ID NO: 150 - DNA, 2671 bp, Artificial Sequence
  chemically treated genomic DNA (Homo sapiens) CpG-island No: 150
cccacaacaccctcactatccgcgcaacgccctcactaccccccaaaacatcctcactatccccacaacaccctcactatccacaacgtactcaccgcgtccacgaaaccctcgccacccccacaacatccacaacgtcaacatctacaacgtcctcaccgcccccacaacgtcctcaccgcgtccaaaaaaccctcgccacccccacaacatccacaacgtcaacatctacaacgtcctcaccgcccccacaacgccctcaccgcgtccacaacatcttcaccgcccccacaacgtcctcaccgcccccacaacgtcctcaccgcgtccacaacgtcctcacgacgtccacaacctcctcatcgcccctacaacgccctcaccgcgtccacaacgtcctcaccgcccccacaacgccctcatcgaatccacaacgccctcaccgccccgaaaacgtcctcaccgccccgacaacgtcctcaccgcccccacaacgtcctcaccgcccccacaacgtcctcacaaccccgacaacgtcctcaccgcgtccacaacgtcctcaccaccccgacaatatcctcacgacgtccacaacgtcctcactatccccacaatatcctcaccgcgtccacaacgtcctcaacgtccgcaacgccctcaccgcccccacaacgtcctcaccgcccccacaacgtcctcacctccccgacaacgtcctcaccgccccgacaacgtcctcacgacgtccacaacgtcctcaccgtccccacaatatcgtcaccgcgtccacaacgtccttaatatccgcaacgtcctcaccgcccccacaacgtcctcaccgcgtccacaacgccctcaccgcgtccacaacgccctcacaaccccgacaacgtcctcaccgcccccacaacgtcctcaccaccccgacaacgtcctcacgacgtccacaacgtcctcactatccccacaatatcctcactacgtccacaacgtcctcaacgtccgcaacgccctcaccgccccgacaacgtcctcaccgcccccacaacgccctcaccgccccgacaacgtcctcaccgccccgacaacgtcctcaccgcccccacaacgtcctcacgacgtccacaacgtcctcaccgccccgacaacgccctcgccgcgtccacaacgccctcaccgcccccacaacgtcctcaccgccccgacaacgtcctcaccgcccccacaacgtcctcacgacgtccacaacgtcctcaccgcgtccacaacgtcctcaccgtccccacaatatcctcaccgcgtccacaacgtcctcaccgccccgacaactccctcgccgcgtccacaacgtcctcaccgcgtccacaacgtcctcaccgccctaacaactccctcgccgcgtccacaacgtcctcaccgcgtccacaacgtcctcaccgtccccacaacgtcctcacgacgtccacaacgtcctcaccgcgtccacaacgtcctcaccgcccccacaacgtcctcacaacgtccacaacgtcctcatcgcgtccacaacgtcctcaccgcccccacaacgccctcaccgcgtccacaacgccctcaccgtcccgacaacgtcctcaccgccccgacaacgtcctcacgaccccgacaacgtcctcacgatccccacaacgtcctcaccgtccccacaacgtcctcaccgcgtccacaacgtcctcaccgccccgacaacgtcctcaccgccccgacaacgtcctcatcgcccccacaacgtcctcaacgtccgcaacgtcctcactaccccgacaacgtccacaacgtcctcaccgtccccacaacgccctcaccgcgtccacaacgtcctcaccgccccgacaactccctcgccgcgtccacaacgtcctcaccgcgtccacaacgtcctcaccgccctaacaactccctcgccgcgtccacaacgtcctcacgaccccgacaacgtcctcacgatccccacaacgtcctcaccgtccccacaacgtcctcaccgcgtccacaacgtcctcaccgccccgacaacgtcctcacgatccccacaacgtcctcaccgcccccacaacgtcctcaccgcgtccacaacgccctcaccgcccccacaacgtcctcaatatccacaacgttctcaccgcccccacaatatactcattatccccaatatcctcattattacctccaacgtcgtcaatatccacaacgtcctcaccgcccccacaacgccctcaccgcctccacaacgtcctatctacaacgtccccattatctccacaacctcctcactatccacaacgtcctcaccgcccccacaacgtcctcaccgcgtccacaaaatcctcaccgcccccacaaaatcctcacgatccacaacgtcctcactaccccaacaacgtcctcaccgtccacaaaatcctcaccgcccccacaaaatcttcgccatccccacaacgtcctcacgatccacaacgtcctcactacccccacaacgtcctcacaacatcctcaatatccccacaacgttctcaccgtccacaacgtcctcaccgccccgaataacgtcctcaccatccccacaacgccttcaccgcccccacaacgtcctcaccgcccctacaacgtcctcaccgcccccacaacgccc

SEQ ID NO: 151 - DNA, 2671 bp, Artificial Sequence
  chemically treated genomic DNA (Homo sapiens) CpG-island No: 151
tttatagtatttttattgttcgcgtagcgtttttattgttttttagagtatttttattgtttttatagtatttttattgtttatagcgtatttatcgcgtttacggagttttcgttatttttatagtatttatagcgttaatatttgtagcgtttttatcgtttttatagcgtttttatcgcgtttaaagagttttcgttatttttatagtatttatagcgttaatatttgtagcgtttttatcgtttttatagcgtttttatcgcgtttatagtatttttatcgtttttatagcgtttttatcgtttttatagcgtttttatcgcgtttatagcgtttttacggcgtttatagtttttttatcgtttttatagcgtttttatcgcgtttatagcgtttttatcgtttttatagcgtttttatcgggtttatagcgtttttatcgtttcgagagcgtttttatcgtttcgatagcgtttttatcgtttttatagcgtttttatcgtttttatagcgtttttatagtttcgatagcgtttttatcgcgtttatagcgtttttattatttcgatagtgtttttacggcgtttatagcgtttttattgtttttatagtgtttttatcgcgtttatagcgtttttaacgttcgtagcgtttttatcgtttttatagcgtttttatcgtttttatagcgtttttattttttcgatagcgtttttatcgtttcgatagcgtttttacggcgtttatagcgtttttatcgtttttatagtgtcgttatcgcgtttatagcgtttttaatgttcgtagcgtttttatcgtttttatagcgtttttatcgcgtttatagcgtttttatcgcgtttatagcgtttttatagtttcgatagcgtttttatcgtttttatagcgtttttattatttcgatagcgtttttacggcgtttatagcgtttttattgtttttatagtgtttttattgcgtttatagcgtttttaacgttcgtagcgtttttatcgtttcgatagcgtttttatcgtttttatagcgtttttatcgtttcgatagcgtttttatcgtttcgatagcgtttttatcgtttttatagcgtttttacggcgtttatagcgtttttatcgtttcgatagcgttttcgtcgcgtttatagcgtttttatcgtttttatagcgtttttatcgtttcgatagcgtttttatcgtttttatagcgtttttacggcgtttatagcgtttttatcgcgtttatagcgtttttatcgtttttatagtgtttttatcgcgtttatagcgtttttatcgtttcgatagttttttcgtcgcgtttatagcgtttttatcgcgtttatagcgtttttatcgttttgatagttttttcgtcgcgtttatagcgtttttatcgcgtttatagcgtttttatcgtttttatagcgtttttacggcgtttatagcgtttttatcgcgtttatagcgtttttatcgtttttatagcgtttttatagcgtttatagcgtttttatcgcgtttatagcgtttttatcgtttttatagcgtttttatcgcgtttatagcgtttttatcgtttcgatagcgtttttatcgtttcgatagcgtttttacggtttcgatagcgtttttacggtttttatagcgtttttatcgtttttatagcgtttttatcgcgtttatagcgtttttatcgtttcgatagcgtttttatcgtttcgatagcgtttttatcgtttttatagcgtttttaacgttcgtagcgtttttattgtttcgatagcgtttatagcgtttttatcgtttttatagcgtttttatcgcgtttatagcgtttttatcgtttcgatagttttttcgtcgcgtttatagcgtttttatcgcgtttatagcgtttttatcgttttgatagttttttcgtcgcgtttatagcgtttttacggtttcgatagcgtttttacggtttttatagcgtttttatcgtttttatagcgtttttatcgcgtttatagcgtttttatcgtttcgatagcgtttttacggtttttatagcgtttttatcgtttttatagcgtttttatcgcgtttatagcgtttttatcgtttttatagcgtttttagtgtttatagcgtttttatcgtttttatagtgtatttattgtttttaatgtttttattgttatttttagcgtcgttagtgtttatagcgtttttatcgtttttatagcgtttttatcgtttttatagcgttttgtttatagcgtttttattgtttttatagtttttttattgtttatagcgtttttatcgtttttatagcgtttttatcgcgtttatagagtttttatcgtttttatagagtttttacggtttatagcgtttttattgttttaatagcgtttttatcgtttatagagtttttatcgtttttatagagttttcgttatttttatagcgtttttacggtttatagcgtttttattgtttttatagcgtttttatagtatttttagtgtttttatagcgtttttatcgtttatagcgtttttatcgtttcggatagcgtttttattatttttatagcgtttttatcgtttttatagcgtttttatcgtttttatagcgtttttatcgtttttatagcgttt

SEQ ID NO: 152 - DNA, 2671 bp, Artificial Sequence
  chemically treated genomic DNA (Homo sapiens) CpG-island No: 152
aaacgctataaaaacgataaaaacgctataaaaacgataaaaacgctataaaaacgataaaaacgctataaaaataataaaaacgctatccgaaacgataaaaacgctataaacgataaaaacgctataaaaacactaaaaatactataaaaacgctataaaaacaataaaaacgctataaaccgtaaaaacgctataaaaataacgaaaactctataaaaacgataaaaactctataaacgataaaaacgctattaaaacaataaaaacgctataaaccgtaaaaactctataaaaacgataaaaactctataaacgcgataaaaacgctataaaaacgataaaaacgctataaacaataaaaaaactataaaaacaataaaaacgctataaacaaaacgctataaaaacgataaaaacgctataaaaacgataaaaacgctataaacactaacgacgctaaaaataacaataaaaacattaaaaacaataaatacactataaaaacgataaaaacgctataaacactaaaaacgctataaaaacgataaaaacgctataaacgcgataaaaacgctataaaaacgataaaaacgctataaaaaccgtaaaaacgctatcgaaacgataaaaacgctataaacgcgataaaaacgctataaaaacgataaaaacgctataaaaaccgtaaaaacgctatcgaaaccgtaaaaacgctataaacgcgacgaaaaaactatcaaaacgataaaaacgctataaacgcgataaaaacgctataaacgcgacgaaaaaactatcgaaacgataaaaacgctataaacgcgataaaaacgctataaaaacgataaaaacgctataaacgctatcgaaacaataaaaacgctacgaacgttaaaaacgctataaaaacgataaaaacgctatcgaaacgataaaaacgctatcgaaacgataaaaacgctataaacgcgataaaaacgctataaaaacgataaaaacgctataaaaaccgtaaaaacgctatcgaaaccgtaaaaacgctatcgaaacgataaaaacgctatcgaaacgataaaaacgctataaacgcgataaaaacgctataaaaacgataaaaacgctataaacgcgataaaaacgctataaacgctataaaaacgctataaaaacgataaaaacgctataaacgcgataaaaacgctataaacgccgtaaaaacgctataaaaacgataaaaacgctataaacgcgataaaaacgctataaacgcgacgaaaaaactatcaaaacgataaaaacgctataaacgcgataaaaacgctataaacgcgacgaaaaaactatcgaaacgataaaaacgctataaacgcgataaaaacactataaaaacgataaaaacgctataaacgcgataaaaacgctataaacgccgtaaaaacgctataaaaacgataaaaacgctatcgaaacgataaaaacgctataaaaacgataaaaacgctataaacgcgacgaaaacgctatcgaaacgataaaaacgctataaacgccgtaaaaacgctataaaaacgataaaaacgctatcgaaacgataaaaacgctatcgaaacgataaaaacgctataaaaacgataaaaacgctatcgaaacgataaaaacgctacgaacgttaaaaacgctataaacgcaataaaaacactataaaaacaataaaaacgctataaacgccgtaaaaacgctatcgaaataataaaaacgctataaaaacgataaaaacgctatcgaaactataaaaacgctataaacgcgataaaaacgctataaacgcgataaaaacgctataaaaacgataaaaacgctacgaacattaaaaacgctataaacgcgataacgacactataaaaacgataaaaacgctataaacgccgtaaaaacgctatcgaaacgataaaaacgctatcgaaaaaataaaaacgctataaaaacgataaaaacgctataaaaacgataaaaacgctacgaacgttaaaaacgctataaacgcgataaaaacactataaaaacaataaaaacgctataaacgccgtaaaaacactatcgaaataataaaaacgctataaacgcgataaaaacgctatcgaaactataaaaacgctataaaaacgataaaaacgctataaaaacgataaaaacgctatcgaaacgataaaaacgctctcgaaacgataaaaacgctataaacccgataaaaacgctataaaaacgataaaaacgctataaacgcgataaaaacgctataaaaacgataaaaaaactataaacgccgtaaaaacgctataaacgcgataaaaacgctataaaaacgataaaaacgctataaaaacgataaaaatactataaacgcgataaaaacgctataaaaacgataaaaacgctacaaatattaacgctataaatactataaaaataacgaaaactctttaaacgcgataaaaacgctataaaaacgataaaaacgctacaaatattaacgctataaatactataaaaataacgaaaactccgtaaacgcgataaatacgctataaacaataaaaatactataaaaacaataaaaatactctaaaaaacaataaaaacgctacgcgaacaataaaaatactataaa

SEQ ID NO: 153 - DNA, 833 bp, Artificial Sequence
  chemically treated genomic DNA (Homo sapiens) CpG-island No: 153
agtcgtttcgcgggttttttttacggtgcgtcgtttgggttttagcggtcgttaggttgtagtttggggttttcggttatttcgggcgttggcggcggtggaggtagtagggcggatggcggagttcggtcgttcgtgggtttaggcgcgtagtgcgtatagagttagcgaggtgttgcggcgcggtacgggtcgtcggcgggattcggggtcgtaatttaatgggtcgggttaggaagacgttcgagtttcgggtcggatggttcgtttgcgcggttagtttcgggtcgaagcggtttcgcggttcgaggtgtcgcggttgttgaagttggtggagcgtgcgggggtcggggcggtcgggcgcgggcgagaggatcggcgcgtatagtcgcgggtttcgtgtgttcggtatgcggggagtttcgcggcggggttatttattcggcgggggttttggaggtgagcgagcggcggttgtaggagggtttggcggtagtgcgcgaggagttgggcgtcgggattgaggcgttgcgcgcggagtttcgagcggagttggatgttttgcgcgcgttgttgtcgtcgtcgtcgttttcgtttgttcgtcgcgagtttcgcgtcgtttttcgcgtcgcgtttcgcggttcgattttgtcgcggacgttcggtatcgtgagcgttttggtcgtcgtttttaggttcgtagacgacgtttcggacggtttagtagaatgcggagcgtatcgagtttcggttaggaagaattataagaagatgttagtgtcgtttggggtttcgtaaggtggcggggattgagggcggtcgtataagggtag

SEQ ID NO: 154 - DNA, 833 bp, Artificial Sequence
  chemically treated genomic DNA (Homo sapiens) CpG-island No: 154
ctacccttatacgaccgccctcaatccccgccaccttacgaaaccccaaacgacactaacatcttcttataattcttcctaaccgaaactcgatacgctccgcattctactaaaccgtccgaaacgtcgtctacgaacctaaaaacgacgaccaaaacgctcacgataccgaacgtccgcgacaaaatcgaaccgcgaaacgcgacgcgaaaaacgacgcgaaactcgcgacgaacaaacgaaaacgacgacgacgacaacaacgcgcgcaaaacatccaactccgctcgaaactccgcgcgcaacgcctcaatcccgacgcccaactcctcgcgcactaccgccaaaccctcctacaaccgccgctcgctcacctccaaaacccccgccgaataaataaccccgccgcgaaactccccgcataccgaacacacgaaacccgcgactatacgcgccgatcctctcgcccgcgcccgaccgccccgacccccgcacgctccaccaacttcaacaaccgcgacacctcgaaccgcgaaaccgcttcgacccgaaactaaccgcgcaaacgaaccatccgacccgaaactcgaacgtcttcctaacccgacccattaaattacgaccccgaatcccgccgacgacccgtaccgcgccgcaacacctcgctaactctatacgcactacgcgcctaaacccacgaacgaccgaactccgccatccgccctactacctccaccgccgccaacgcccgaaataaccgaaaaccccaaactacaacctaacgaccgctaaaacccaaacgacgcaccgtaaaaaaaacccgcgaaacgact

SEQ ID NO: 155 - DNA, 833 bp, Artificial Sequence
  chemically treated genomic DNA (Homo sapiens) CpG-island No: 155
ttgtttttgtgcggtcgtttttagttttcgttattttgcggggttttaggcggtattggtatttttttgtggttttttttggtcggggttcggtgcgtttcgtattttgttgggtcgttcggggcgtcgtttgcgggtttggaggcggcgattagggcgtttacggtgtcgagcgttcgcggtagggtcgggtcgcggggcgcggcgcgggggacggcgcggggttcgcggcgggtaggcggggacggcggcggcggtagtagcgcgcgtagggtatttagtttcgttcgaagtttcgcgcgtagcgttttaatttcggcgtttagtttttcgcgtattgtcgttaggtttttttgtagtcgtcgttcgtttatttttaggattttcgtcgggtaggtggtttcgtcgcggggtttttcgtatatcgagtatacggagttcgcggttgtgcgcgtcggttttttcgttcgcgttcggtcgtttcggttttcgtacgttttattagttttagtagtcgcggtatttcggatcgcgaagtcgtttcggttcggagttggtcgcgtaggcgagttattcggttcggggttcgggcgtttttttggttcggtttattggattgcggtttcggatttcgtcggcggttcgtgtcgcgtcgtagtatttcgttggttttgtacgtattacgcgtttgggtttacgggcggtcgggtttcgttattcgttttgttgtttttatcgtcgttagcgttcgggatggtcgggagttttaggttgtagtttagcgatcgttggggtttaggcgacgtatcgtggagggggttcgcgggacggtt

SEQ ID NO: 156 - DNA, 833 bp, Artificial Sequence
  chemically treated genomic DNA (Homo sapiens) CpG-island No: 156
aaccgtcccgcgaaccccctccacgatacgtcgcctaaaccccaacgatcgctaaactacaacctaaaactcccgaccatcccgaacgctaacgacgataaaaacaacaaaacgaataacgaaacccgaccgcccgtaaacccaaacgcgtaatacgtacaaaaccaacgaaatactacgacgcgacacgaaccgccgacgaaatccgaaaccgcaatccaataaaccgaaccaaaaaaacgcccgaaccccgaaccgaataactcgcctacgcgaccaactccgaaccgaaacgacttcgcgatccgaaataccgcgactactaaaactaataaaacgtacgaaaaccgaaacgaccgaacgcgaacgaaaaaaccgacgcgcacaaccgcgaactccgtatactcgatatacgaaaaaccccgcgacgaaaccacctacccgacgaaaatcctaaaaataaacgaacgacgactacaaaaaaacctaacgacaatacgcgaaaaactaaacgccgaaattaaaacgctacgcgcgaaacttcgaacgaaactaaataccctacgcgcgctactaccgccgccgccgtccccgcctacccgccgcgaaccccgcgccgtcccccgcgccgcgccccgcgacccgaccctaccgcgaacgctcgacaccgtaaacgccctaatcgccgcctccaaacccgcaaacgacgccccgaacgacccaacaaaatacgaaacgcaccgaaccccgaccaaaaaaaaccacaaaaaaataccaataccgcctaaaaccccgcaaaataacgaaaactaaaaacgaccgcacaaaaacaa

SEQ ID NO: 157 - DNA, 818 bp, Artificial Sequence
  chemically treated genomic DNA (Homo sapiens) CpG-island No: 157
tttgcgtgttcgttttcggcgtatttcgcgttttttgttttcggtatttttcgcgtttttcgagtttttcgcgtttttttgttttcggtattttcggtgtttttcgttttcggcgtttttcgcggtcgtcgtttttagtttagcgagtttcgtttgggtagcgattgttagcgcgatcgcggtttgggcgtttggtttttttcgcgcggtcgcgttattgggtcgcgcgcggcggatatacgcgttacgcgtcgtcgattggcggttttcgtagcgcgttttgcggtttttttaatgcggggcggtcgcgcgcggggattggtcgtacgtcgcgaaggttcgtttttcgttcgttcggcgcggtaggcgggtgtcggcgatcggagagtttggataggttttttagatggttgcggcggtcggtcggtgaggttttttcggttgtggtttggttgcgggcggtttgggtagttcgcgggcgttttaggtaggtgcggggcgcgaggggcgttcgcgggcggttgggcgggcgtcgcggtttgcgcgagggcgcgtttttttttttcgttttttttcgggatcgaggtcgcgggcggggcgggggcgcggagttcggtttttgtgaggtaatatggtcgcgggcggtggagagcgcggggtggggacgttttcggggttggggggcgggtttcgggtttaggcgttgtcgattttcgtcgttgttcgttcgggtaaagaggtttttttttcggagggttcgaagtttagtatcgtttttaggcgggaaaggtgtggatagggttagtgttcgtttggga

SEQ ID NO: 158 - DNA, 818 bp, Artificial Sequence
  chemically treated genomic DNA (Homo sapiens) CpG-island No: 158
tcccaaacgaacactaaccctatccacacctttcccgcctaaaaacgatactaaacttcgaaccctccgaaaaaaaaacctctttacccgaacgaacaacgacgaaaatcgacaacgcctaaacccgaaacccgccccccaaccccgaaaacgtccccaccccgcgctctccaccgcccgcgaccatattacctcacaaaaaccgaactccgcgcccccgccccgcccgcgacctcgatcccgaaaaaaaacgaaaaaaaaaaacgcgccctcgcgcaaaccgcgacgcccgcccaaccgcccgcgaacgcccctcgcgccccgcacctacctaaaacgcccgcgaactacccaaaccgcccgcaaccaaaccacaaccgaaaaaacctcaccgaccgaccgccgcaaccatctaaaaaacctatccaaactctccgatcgccgacacccgcctaccgcgccgaacgaacgaaaaacgaaccttcgcgacgtacgaccaatccccgcgcgcgaccgccccgcattaaaaaaaccgcaaaacgcgctacgaaaaccgccaatcgacgacgcgtaacgcgtatatccgccgcgcgcgacccaataacgcgaccgcgcgaaaaaaaccaaacgcccaaaccgcgatcgcgctaacaatcgctacccaaacgaaactcgctaaactaaaaacgacgaccgcgaaaaacgccgaaaacgaaaaacaccgaaaataccgaaaacaaaaaaacgcgaaaaactcgaaaaacgcgaaaaataccgaaaacaaaaaacgcgaaatacgccgaaaacgaacacgcaaa

SEQ ID NO: 159 - DNA, 818 bp, Artificial Sequence
  chemically treated genomic DNA (Homo sapiens) CpG-island No: 159
ttttaggcgagtattggttttgtttatatttttttcgtttgaaggcgatgttaggtttcgggtttttcgggagaggagtttttttattcgggcggatagcgacgagagtcggtaacgtttgggttcggggttcgttttttagtttcggaggcgtttttatttcgcgttttttatcgttcgcggttatgttgttttataaaggtcgggtttcgcgttttcgtttcgttcgcggtttcggtttcggagggaggcgggagggaagggcgcgttttcgcgtaggtcgcggcgttcgtttaatcgttcgcgggcgtttttcgcgtttcgtatttatttgaggcgttcgcgggttgtttaagtcgttcgtagttaaattatagtcgggaaagttttatcgatcgatcgtcgtagttatttggaaagtttgtttaggtttttcggtcgtcggtattcgtttgtcgcgtcgggcgagcggagggcgggttttcgcggcgtgcggttaattttcgcgcgcggtcgtttcgtattgggggagtcgtagagcgcgttgcggaggtcgttaatcggcggcgcgtagcgcgtgtgttcgtcgcgcgcggtttaatagcgcggtcgcgcgggagggattaggcgtttaggtcgcggtcgcgttaatagtcgttgtttaggcggggttcgttggattgagggcggcggtcgcgaggagcgtcgggaacgggaagtatcgggaatgtcgggagtaggggagcgcgggaagttcggggagcgcggggaatgtcgggaatagggagcgcggagtacgtcgggagcggatacgtaga

SEQ ID NO: 160 - DNA, 818 bp, Artificial Sequence
  chemically treated genomic DNA (Homo sapiens) CpG-island No: 160
tctacgtatccgctcccgacgtactccgcgctccctattcccgacattccccgcgctccccgaacttcccgcgctcccctactcccgacattcccgatacttcccgttcccgacgctcctcgcgaccgccgccctcaatccaacgaaccccgcctaaacaacgactattaacgcgaccgcgacctaaacgcctaatccctcccgcgcgaccgcgctattaaaccgcgcgcgacgaacacacgcgctacgcgccgccgattaacgacctccgcaacgcgctctacgactcccccaatacgaaacgaccgcgcgcgaaaattaaccgcacgccgcgaaaacccgccctccgctcgcccgacgcgacaaacgaataccgacgaccgaaaaacctaaacaaactttccaaataactacgacgatcgatcgataaaactttcccgactataatttaactacgaacgacttaaacaacccgcgaacgcctcaaataaatacgaaacgcgaaaaacgcccgcgaacgattaaacgaacgccgcgacctacgcgaaaacgcgcccttccctcccgcctccctccgaaaccgaaaccgcgaacgaaacgaaaacgcgaaacccgacctttataaaacaacataaccgcgaacgataaaaaacgcgaaataaaaacgcctccgaaactaaaaaacgaaccccgaacccaaacgttaccgactctcgtcgctatccgcccgaataaaaaaactcctctcccgaaaaacccgaaacctaacatcgccttcaaacgaaaaaaatataaacaaaaccaatactcgcctaaaa

SEQ ID NO: 161 - DNA, 852 bp, Artificial Sequence
  chemically treated genomic DNA (Homo sapiens) CpG-island No: 161
cgtcgttattttcggtttcgtttaggcggggcgggattcgaatttgcgatgtttaggttcgggttttaggtttggggttgtatcgttcgttcgttaggggttcgcgtcggtcgttcgtttcgttagttatttttagttcgttagcgcgtgcggcggaggtcgagcgtttttatgattttggtttttggtaacgttatcgttacgcgtcggatttaatttttaattattttagttagttttagaggcgcgcgtggtcgggacggaagtgcgcgcgggtgtcgtcgggagtgcgcgtttttttggttgacgggcgggtcgggtatgcgtcgcgggcgttttggcgggaagcgcggggcgggtcggataatgagagtgttcgttttttgagttaataaagttgtattggttttgaatcgcggcgcgtttttcgtcgttggggttaggggtcgaggttcgggtcgtggggcggagggaagagcgggcgggcgggaggcgtcggcgttagacgcggagggaaggagttacgagtagtcgtcgagaggtcgcggagttagcgacgatcgatttagtcgagtcgtcgtcgtcgtcgcgtttttatggcggtcgttaaggtgtcgtcgggtttaagcggggatagggtgggcgggcggggtcggggtcgttattagcggttacgtgggcggttcgcgtcgtcgttattaattttcgtcggtttgtaggttcggtcgtttgttgggtttcggtggcgcggagtcggggcgcgtggggtttgggggttcgaggtttgcggagttggggcgtttgggggtgtaggttttgtagaggtttgggggttgtagggttttcgcgtga

SEQ ID NO: 162 - DNA, 852 bp, Artificial Sequence
  chemically treated genomic DNA (Homo sapiens) CpG-island No: 162
tcacgcgaaaaccctacaacccccaaacctctacaaaacctacacccccaaacgccccaactccgcaaacctcgaacccccaaaccccacgcgccccgactccgcgccaccgaaacccaacaaacgaccgaacctacaaaccgacgaaaattaataacgacgacgcgaaccgcccacgtaaccgctaataacgaccccgaccccgcccgcccaccctatccccgcttaaacccgacgacaccttaacgaccgccataaaaacgcgacgacgacgacgactcgactaaatcgatcgtcgctaactccgcgacctctcgacgactactcgtaactccttccctccgcgtctaacgccgacgcctcccgcccgcccgctcttccctccgccccacgacccgaacctcgacccctaaccccaacgacgaaaaacgcgccgcgattcaaaaccaatacaactttattaactcaaaaaacgaacactctcattatccgacccgccccgcgcttcccgccaaaacgcccgcgacgcatacccgacccgcccgtcaaccaaaaaaacgcgcactcccgacgacacccgcgcgcacttccgtcccgaccacgcgcgcctctaaaactaactaaaataattaaaaattaaatccgacgcgtaacgataacgttaccaaaaaccaaaatcataaaaacgctcgacctccgccgcacgcgctaacgaactaaaaataactaacgaaacgaacgaccgacgcgaacccctaacgaacgaacgatacaaccccaaacctaaaacccgaacctaaacatcgcaaattcgaatcccgccccgcctaaacgaaaccgaaaataacgacg

SEQ ID NO: 163 - DNA, 852 bp, Artificial Sequence
  chemically treated genomic DNA (Homo sapiens) CpG-island No: 163
ttacgcgggggttttgtagtttttaggtttttgtagagtttgtatttttaaacgttttaatttcgtaggtttcgagtttttaaattttacgcgtttcgatttcgcgttatcgaggtttagtagacggtcgagtttgtaggtcggcggaggttggtggcggcggcgcgggtcgtttacgtggtcgttgataacggtttcggtttcgttcgtttattttgttttcgtttgggttcggcggtattttggcggtcgttatgggggcgcggcggcggcggcggttcggttgggtcggtcgtcgttggtttcgcggtttttcggcggttattcgtagtttttttttttcgcgtttggcgtcggcgtttttcgttcgttcgttttttttttcgttttacgattcgaatttcgatttttgattttagcggcgggaaacgcgtcgcgatttaaaattagtatagttttattggtttaggaggcggatatttttattgttcggttcgtttcgcgtttttcgttaaaacgttcgcggcgtatgttcggttcgttcgttagttagaggagcgcgtattttcggcgatattcgcgcgtattttcgtttcggttacgcgcgtttttagagttggttaaagtggttgggggttggattcggcgcgtgacgatgacgttgttagaagttaggattatagagacgttcggttttcgtcgtacgcgttggcggattaagagtggttggcgaagcgagcggtcggcgcgggtttttggcgggcgggcggtatagttttaagtttgagattcggatttgagtatcgtaggttcgagtttcgtttcgtttgggcgaagtcgggggtggcggcg

SEQ ID NO: 164 - DNA, 852 bp, Artificial Sequence
  chemically treated genomic DNA (Homo sapiens) CpG-island No: 164
cgccgccacccccgacttcgcccaaacgaaacgaaactcgaacctacgatactcaaatccgaatctcaaacttaaaactataccgcccgcccgccaaaaacccgcgccgaccgctcgcttcgccaaccactcttaatccgccaacgcgtacgacgaaaaccgaacgtctctataatcctaacttctaacaacgtcatcgtcacgcgccgaatccaacccccaaccactttaaccaactctaaaaacgcgcgtaaccgaaacgaaaatacgcgcgaatatcgccgaaaatacgcgctcctctaactaacgaacgaaccgaacatacgccgcgaacgttttaacgaaaaacgcgaaacgaaccgaacaataaaaatatccgcctcctaaaccaataaaactatactaattttaaatcgcgacgcgtttcccgccgctaaaatcaaaaatcgaaattcgaatcgtaaaacgaaaaaaaaaacgaacgaacgaaaaacgccgacgccaaacgcgaaaaaaaaaaactacgaataaccgccgaaaaaccgcgaaaccaacgacgaccgacccaaccgaaccgccgccgccgccgcgcccccataacgaccgccaaaataccgccgaacccaaacgaaaacaaaataaacgaacgaaaccgaaaccgttatcaacgaccacgtaaacgacccgcgccgccgccaccaacctccgccgacctacaaactcgaccgtctactaaacctcgataacgcgaaatcgaaacgcgtaaaatttaaaaactcgaaacctacgaaattaaaacgtttaaaaatacaaactctacaaaaacctaaaaactacaaaacccccgcgtaa

SEQ ID NO: 165 - DNA, 718 bp, Artificial Sequence
  chemically treated genomic DNA (Homo sapiens) CpG-island No: 165
tggttttcgtcgtggtgtttattattcgggtcgtaggggtgcgtgggtgttcggttttcgagagtcgcgggcgttcgtcgggttggggttttcgaggtcgcggggttttgtttttttcgaaggtttcgcgaatcggtggcggttttcgggttttattaattcgtttcgttcggtttcgtttcgtcgcggtttttagcgttcggtttattttaaggggcgcgttgatataagagcgtagtagtcgtcgtcgttcgtggggtgggatttttttcgtcgtcgtcgtcgtcgtcgtcgcgggttttgcgtcgcgtttagttcgttcgttcgatttcggttcgatttcggtcggttttgttcgttcggtttcggggagggatgcggcggcgcggcgtttaggatgtttcgtagtttcgggacgcgttttaaattcgttaagtatatttcggtggttacggtcgtcgcgttgttggtcggttttagtattttttttttcgtgtttacgtgagtcggcgtcgcgtttgggggtacgcgggtagcgatgggtagggttcgtatagttcgggtacgggggtagcggtcgcgggggttggcggggtttcgggtagtgggcgggcggggcgtcggttgtaggcgatggtagtttttttttattcgttggggttgggggagttgaagcggtgtgtcggcgtttcgggtatcggggtgagttttttgtgtg

SEQ ID NO: 166 - DNA, 718 bp, Artificial Sequence
  chemically treated genomic DNA (Homo sapiens) CpG-island No: 166
cacacaaaaaactcaccccgatacccgaaacgccgacacaccgcttcaactcccccaaccccaacgaataaaaaaaaactaccatcgcctacaaccgacgccccgcccgcccactacccgaaaccccgccaacccccgcgaccgctacccccgtacccgaactatacgaaccctacccatcgctacccgcgtacccccaaacgcgacgccgactcacgtaaacacgaaaaaaaaaatactaaaaccgaccaacaacgcgacgaccgtaaccaccgaaatatacttaacgaatttaaaacgcgtcccgaaactacgaaacatcctaaacgccgcgccgccgcatccctccccgaaaccgaacgaacaaaaccgaccgaaatcgaaccgaaatcgaacgaacgaactaaacgcgacgcaaaacccgcgacgacgacgacgacgacgacgaaaaaaatcccaccccacgaacgacgacgactactacgctcttatatcaacgcgccccttaaaataaaccgaacgctaaaaaccgcgacgaaacgaaaccgaacgaaacgaattaataaaacccgaaaaccgccaccgattcgcgaaaccttcgaaaaaaacaaaaccccgcgacctcgaaaaccccaacccgacgaacgcccgcgactctcgaaaaccgaacacccacgcacccctacgacccgaataataaacaccacgacgaaaacca

SEQ ID NO: 167 - DNA, 718 bp, Artificial Sequence
  chemically treated genomic DNA (Homo sapiens) CpG-island No: 167
tatataagggatttatttcggtgttcgggacgtcggtatatcgttttaatttttttagttttagcgggtggagagggattgttatcgtttgtagtcggcgtttcgttcgtttattgttcggggtttcgttagttttcgcgatcgttgttttcgtgttcgggttgtgcgggttttgtttatcgttgttcgcgtgtttttagacgcggcgtcgatttacgtgaatacgaagaagagggtgttggagtcgattagtagcgcggcggtcgtggttatcgggatgtatttggcgggtttgaggcgcgtttcggggttgcggggtattttgggcgtcgcgtcgtcgtattttttttcggggtcgggcgggtagggtcggtcggggtcgggtcggggtcgggcgggcgggttggacgcggcgtaggattcgcggcggcggcggcggcggcggcggaggaaattttattttacgggcggcggcggttgttgcgtttttatgttagcgcgttttttaaggtggatcgggcgttgggggtcgcggcggggcgggatcgggcggggcgagttgatggggttcggggatcgttatcggttcgcgggattttcggagggggtaggatttcgcggtttcggggattttagttcggcgggcgttcgcggttttcgggggtcgggtatttacgtatttttgcggttcgggtggtgggtattacggcgaaggtta

SEQ ID NO: 168 - DNA, 718 bp, Artificial Sequence
  chemically treated genomic DNA (Homo sapiens) CpG-island No: 168
taaccttcgccgtaatacccaccacccgaaccgcaaaaatacgtaaatacccgacccccgaaaaccgcgaacgcccgccgaactaaaatccccgaaaccgcgaaatcctaccccctccgaaaatcccgcgaaccgataacgatccccgaaccccatcaactcgccccgcccgatcccgccccgccgcgacccccaacgcccgatccaccttaaaaaacgcgctaacataaaaacgcaacaaccgccgccgcccgtaaaataaaatttcctccgccgccgccgccgccgccgccgcgaatcctacgccgcgtccaacccgcccgcccgaccccgacccgaccccgaccgaccctacccgcccgaccccgaaaaaaaatacgacgacgcgacgcccaaaataccccgcaaccccgaaacgcgcctcaaacccgccaaatacatcccgataaccacgaccgccgcgctactaatcgactccaacaccctcttcttcgtattcacgtaaatcgacgccgcgtctaaaaacacgcgaacaacgataaacaaaacccgcacaacccgaacacgaaaacaacgatcgcgaaaactaacgaaaccccgaacaataaacgaacgaaacgccgactacaaacgataacaatccctctccacccgctaaaactaaaaaaattaaaacgatataccgacgtcccgaacaccgaaataaatcccttatata

SEQ ID NO: 169 - DNA, 647 bp, Artificial Sequence
  chemically treated genomic DNA (Homo sapiens) CpG-island No: 169
tcgcgtttcgttttttttggttcgttcgggtttagggcgtcgtttgtagttgcgcgcggtcgtttttagatggaatttttttattaacgtaaggttcggtcggagtagttattcgggagttgggcggcgaggggttatttttttttatttcggcgggtgtaggatcggggggtttgggtagtaattagtggggaggagcgttggattgtgtacgtcgagttcggtaggttttcgtatgcggtatgcgaagggaatttcgaggtttttttgtagaattcgagtacggttttttcggagttttttgtttcgcgtttgcggttttttgaattattttaataaaatgatcgtttcggtagttatttatgtttttttttgcgtagtgttcgtagcggatcgcgttgtgtggtatttcgagttttggggattttgttgtacgcgttttttagattttcgggggcggggagtggggagataatcgttagagtcgcggggcgggataaatggcggaatcgtcgcgcggcgttaggtaaattttgtaagggaatcgcgcggtttgtcggttttattttaagtattttcgaaaagaaagtatgtggcgggatatttgttatttattatgtgttattttcggtgacgttttttggagt

SEQ ID NO: 170 - DNA, 647 bp, Artificial Sequence
  chemically treated genomic DNA (Homo sapiens) CpG-island No: 170
actccaaaaaacgtcaccgaaaataacacataataaataacaaatatcccgccacatactttcttttcgaaaatacttaaaataaaaccgacaaaccgcgcgattcccttacaaaatttacctaacgccgcgcgacgattccgccatttatcccgccccgcgactctaacgattatctccccactccccgcccccgaaaatctaaaaaacgcgtacaacaaaatccccaaaactcgaaataccacacaacgcgatccgctacgaacactacgcaaaaaaaaacataaataactaccgaaacgatcattttattaaaataattcaaaaaaccgcaaacgcgaaacaaaaaactccgaaaaaaccgtactcgaattctacaaaaaaacctcgaaattcccttcgcataccgcatacgaaaacctaccgaactcgacgtacacaatccaacgctcctccccactaattactacccaaaccccccgatcctacacccgccgaaataaaaaaaaataacccctcgccgcccaactcccgaataactactccgaccgaaccttacgttaataaaaaaattccatctaaaaacgaccgcgcgcaactacaaacgacgccctaaacccgaacgaaccaaaaaaaacgaaacgcga

SEQ ID NO: 171 - DNA, 647 bp, Artificial Sequence
  chemically treated genomic DNA (Homo sapiens) CpG-island No: 171
gttttagaaagcgttatcgagaataatatatggtagatgataagtgtttcgttatatgtttttttttcgggaatgtttaaagtagagtcggtaagtcgcgcggtttttttgtaaagtttgtttggcgtcgcgcggcggtttcgttatttgtttcgtttcgcggttttggcgattgtttttttatttttcgttttcgagggtttgagggacgcgtgtaatagagtttttagggttcgaggtattatatagcgcggttcgttgcgggtattgcgtaggaaggggtatgggtggttatcgggacggttattttattgagatgatttaaggagtcgtagacgcggggtaggaaatttcgggggagtcgtgttcgggttttgtagggaaatttcgggatttttttcgtatgtcgtatgcggaaatttgtcgggttcgacgtgtatagtttagcgtttttttttattagttattgtttaggtttttcgattttgtattcgtcggaatgagagaaagtagtttttcgtcgtttagttttcgggtagttgtttcggtcgggttttgcgttggtgagaaagttttatttagaggcggtcgcgcgtaattgtaggcggcgttttaggttcgggcgagttagggagagcggggcgcgg

SEQ ID NO: 172 - DNA, 647 bp, Artificial Sequence
  chemically treated genomic DNA (Homo sapiens) CpG-island No: 172
ccgcgccccgctctccctaactcgcccgaacctaaaacgccgcctacaattacgcgcgaccgcctctaaataaaactttctcaccaacgcaaaacccgaccgaaacaactacccgaaaactaaacgacgaaaaactactttctctcattccgacgaatacaaaatcgaaaaacctaaacaataactaataaaaaaaaacgctaaactatacacgtcgaacccgacaaatttccgcatacgacatacgaaaaaaatcccgaaatttccctacaaaacccgaacacgactcccccgaaatttcctaccccgcgtctacgactccttaaatcatctcaataaaataaccgtcccgataaccacccataccccttcctacgcaatacccgcaacgaaccgcgctatataatacctcgaaccctaaaaactctattacacgcgtccctcaaaccctcgaaaacgaaaaataaaaaaacaatcgccaaaaccgcgaaacgaaacaaataacgaaaccgccgcgcgacgccaaacaaactttacaaaaaaaccgcgcgacttaccgactctactttaaacattcccgaaaaaaaaacatataacgaaacacttatcatctaccatatattattctcgataacgctttctaaaac

SEQ ID NO: 173 - DNA, 513 bp, Artificial Sequence
  chemically treated genomic DNA (Homo sapiens) CpG-island No: 173
acgggaagggggtaggcgcgttcggcgttttgattgggcgtgcggcggtaggattttaaagcgttttgtttcggatcgtttgttttgggtgatttttcggatttgttttggtggaattcggatttgtttcgtcgagatgacgaggtattttcgtttcgcgaatttaataggagggatttttgaagttagcggttttcgggatgagtcggggtaattttcgttttttgagcgtgggttggatggatgtttaattaggatttagggaggatgggggtcgcgggggaagtcgggcgtttcggggttttcgatatttatattttcgtacggcgtacgttttgtttcgagtttgcgtttttcgagttagtacggcgagtttgggattttcgtgttttttttttgtggttttcgagaaacgtcggagtttcgtgttttgttgggggttggggggatggagaaaaggtttcggggattttgtttaaaaagtaaaggtaaacgtattttaatagtttttcg

SEQ ID NO: 174 - DNA, 513 bp, Artificial Sequence
  chemically treated genomic DNA (Homo sapiens) CpG-island No: 174
cgaaaaactattaaaatacgtttacctttactttttaaacaaaatccccgaaaccttttctccatccccccaacccccaacaaaacacgaaactccgacgtttctcgaaaaccacaaaaaaaaaacacgaaaatcccaaactcgccgtactaactcgaaaaacgcaaactcgaaacaaaacgtacgccgtacgaaaatataaatatcgaaaaccccgaaacgcccgacttcccccgcgacccccatcctccctaaatcctaattaaacatccatccaacccacgctcaaaaaacgaaaattaccccgactcatcccgaaaaccgctaacttcaaaaatccctcctattaaattcgcgaaacgaaaatacctcgtcatctcgacgaaacaaatccgaattccaccaaaacaaatccgaaaaatcacccaaaacaaacgatccgaaacaaaacgctttaaaatcctaccgccgcacgcccaatcaaaacgccgaacgcgcctacccccttcccgt

SEQ ID NO: 175 - DNA, 513 bp, Artificial Sequence
  chemically treated genomic DNA (Homo sapiens) CpG-island No: 175
cgaggagttgttggggtgcgtttgtttttgttttttaaataagattttcgagattttttttttatttttttaatttttagtaggatacggaatttcggcgtttttcgaaagttataaaagaggggtacggaaattttaagttcgtcgtgttaattcggagaacgtaaattcgaggtagagcgtgcgtcgtgcggggatgtgggtgtcgaggatttcgaagcgttcggtttttttcgcgatttttattttttttagattttggttagatatttatttagtttacgtttagagggcgggggttatttcgatttatttcggaagtcgttaattttagaaattttttttgttaggttcgcgaaacgaaggtatttcgttatttcggcggggtaagttcggattttattagggtaggttcgggaggttatttagggtagacgattcgaggtagagcgttttaaaattttgtcgtcgtacgtttagttagagcgtcgagcgcgtttgtttttttttcgt

SEQ ID NO: 176 - DNA, 513 bp, Artificial Sequence
  chemically treated genomic DNA (Homo sapiens) CpG-island No: 176
acgaaaaaaaaacaaacgcgctcgacgctctaactaaacgtacgacgacaaaattttaaaacgctctacctcgaatcgtctaccctaaataacctcccgaacctaccctaataaaatccgaacttaccccgccgaaataacgaaataccttcgtttcgcgaacctaacaaaaaaaatttctaaaattaacgacttccgaaataaatcgaaataacccccgccctctaaacgtaaactaaataaatatctaaccaaaatctaaaaaaaataaaaatcgcgaaaaaaaccgaacgcttcgaaatcctcgacacccacatccccgcacgacgcacgctctacctcgaatttacgttctccgaattaacacgacgaacttaaaatttccgtacccctcttttataactttcgaaaaacgccgaaattccgtatcctactaaaaattaaaaaaataaaaaaaaaatctcgaaaatcttatttaaaaaacaaaaacaaacgcaccccaacaactcctcg

SEQ ID NO: 177 - DNA, 673 bp, Artificial Sequence
  chemically treated genomic DNA (Homo sapiens) CpG-island No: 177
tggcgtcgggtatcgatagagcggttttttttttcgtttttcggagttttcgcgtttcgtagttcgagtttttatcgagtacgattcgttcgtataattttcgtaggtttcgggcgagcggttgttgtttttttagcgggtcggaggattggaggtttcgttcggtatcgtcggtgtcggttttcgagtcgaggacgtagaggggttgcgaggcggtaggcgtcgggggttggagtcgagggtcggggaaaggcgcggtttttttgttcggtagcgggtgcgttgcgttcggcgcgtagtttcgcggttacgttcgtcgtttgtcgtttttgtttttcgtcgttgggtgtttgagttcgtcggagttttcgcgtatcgttgtaggcgcgggagggtagcgagacgaggggttgggtcgttttaaggtttcggttttttgttttcgcgttgaggtgtttcgcgagtttttttcggatttgagggaggggggcgtacgcgggtcggggggttacgtcgggcgagtaggttaaggcgttttcgttgcgtttttagagttcggaatggggggaggggggcgcgggggtagttttggggggtttgcgtatttttttttcgattagcgggggggttttgcgtggggcgtttcgagggtttcggtttttttttttgtgtt

SEQ ID NO: 178 - DNA, 673 bp, Artificial Sequence
  chemically treated genomic DNA (Homo sapiens) CpG-island No: 178
aacacaaaaaaaaaaaccgaaaccctcgaaacgccccacgcaaaacccccccgctaatcgaaaaaaaaatacgcaaaccccccaaaactacccccgcgcccccctccccccattccgaactctaaaaacgcaacgaaaacgccttaacctactcgcccgacgtaaccccccgacccgcgtacgcccccctccctcaaatccgaaaaaaactcgcgaaacacctcaacgcgaaaacaaaaaaccgaaaccttaaaacgacccaacccctcgtctcgctaccctcccgcgcctacaacgatacgcgaaaactccgacgaactcaaacacccaacgacgaaaaacaaaaacgacaaacgacgaacgtaaccgcgaaactacgcgccgaacgcaacgcacccgctaccgaacaaaaaaaccgcgcctttccccgaccctcgactccaacccccgacgcctaccgcctcgcaacccctctacgtcctcgactcgaaaaccgacaccgacgataccgaacgaaacctccaatcctccgacccgctaaaaaaacaacaaccgctcgcccgaaacctacgaaaattatacgaacgaatcgtactcgataaaaactcgaactacgaaacgcgaaaactccgaaaaacgaaaaaaaaaaccgctctatcgatacccgacgcca

SEQ ID NO: 179 - DNA, 673 bp, Artificial Sequence
  chemically treated genomic DNA (Homo sapiens) CpG-island No: 179
gatatagagaggggagtcgagattttcggaacgttttacgtagagttttttcgttagtcgggagaggggtgcgtagattttttagagttgttttcgcgtttttttttttttatttcgggttttgagagcgtagcgggaacgttttagtttgttcgttcggcgtggtttttcgattcgcgtacgttttttttttttaggttcgagagggattcgcgaagtattttagcgcggaggtagggaatcggagttttggagcgatttaatttttcgtttcgttgttttttcgcgtttgtaacggtgcgcggagatttcggcgaatttagatatttaacggcggagaatagaagcggtaggcggcggacgtggtcgcgaagttgcgcgtcgaacgtagcgtattcgttgtcgagtagaggagtcgcgttttttttcgattttcggttttagttttcggcgtttgtcgtttcgtagtttttttgcgttttcggttcgggggtcggtatcggcgatgtcgagcggagtttttagtttttcgattcgttgaagaagtagtagtcgttcgttcggagtttacggggattgtgcgagcggatcgtgttcggtggaggttcgggttgcggggcgcggggatttcggggggcggggggagggatcgttttgtcggtgttcggcgtta

SEQ ID NO: 180 - DNA, 673 bp, Artificial Sequence
  chemically treated genomic DNA (Homo sapiens) CpG-island No: 180
taacgccgaacaccgacaaaacgatccctccccccgccccccgaaatccccgcgccccgcaacccgaacctccaccgaacacgatccgctcgcacaatccccgtaaactccgaacgaacgactactacttcttcaacgaatcgaaaaactaaaaactccgctcgacatcgccgataccgacccccgaaccgaaaacgcaaaaaaactacgaaacgacaaacgccgaaaactaaaaccgaaaatcgaaaaaaaacgcgactcctctactcgacaacgaatacgctacgttcgacgcgcaacttcgcgaccacgtccgccgcctaccgcttctattctccgccgttaaatatctaaattcgccgaaatctccgcgcaccgttacaaacgcgaaaaaacaacgaaacgaaaaattaaatcgctccaaaactccgattccctacctccgcgctaaaatacttcgcgaatccctctcgaacctaaaaaaaaaaaacgtacgcgaatcgaaaaaccacgccgaacgaacaaactaaaacgttcccgctacgctctcaaaacccgaaataaaaaaaaaaaaacgcgaaaacaactctaaaaaatctacgcacccctctcccgactaacgaaaaaactctacgtaaaacgttccgaaaatctcgactcccctctctatatc

SEQ ID NO: 181 - DNA, 506 bp, Artificial Sequence
  chemically treated genomic DNA (Homo sapiens) CpG-island No: 181
cgggggaggggaagagggcggtcggggttgcgagcgcgtaaggttggaatatgagtcgggtttgatcgcgaggcggaggtaagagttatcgttttttttttttttttttcgagtgaggcggcgtagcggtcggagagggatggggggcgtttatttagtttgagtttcgtcgcgggcgttttcggtttacgtagcgtttttcgcgggtcgttagtgcgtattttcggttatattagttttcgtttggcgggtgtattcgggtcggcgaggaaggggtaatcgttcgggtgggtggggcgggttgggtatttgaggttattagttcggttgtagaggtaggggcggcggaggcggaattgcggagttgttgggtttatcgatttttatttttagcgagagaagtaatcgtaagttttagtttcgcggtatagatgtgtttgaggttgtttttatttatttgtggtttcgagtttagagttatttattttatattttttcggatttat

SEQ ID NO: 182 - DNA, 506 bp, Artificial Sequence
  chemically treated genomic DNA (Homo sapiens) CpG-island No: 182
ataaatccgaaaaaatataaaataaataactctaaactcgaaaccacaaataaataaaaacaacctcaaacacatctataccgcgaaactaaaacttacgattacttctctcgctaaaaataaaaatcgataaacccaacaactccgcaattccgcctccgccgcccctacctctacaaccgaactaataacctcaaatacccaacccgccccacccacccgaacgattaccccttcctcgccgacccgaatacacccgccaaacgaaaactaatataaccgaaaatacgcactaacgacccgcgaaaaacgctacgtaaaccgaaaacgcccgcgacgaaactcaaactaaataaacgccccccatccctctccgaccgctacgccgcctcactcgaaaaaaaaaaaaaaaaaacgataactcttacctccgcctcgcgatcaaacccgactcatattccaaccttacgcgctcgcaaccccgaccgccctcttcccctcccccg

SEQ ID NO: 183 - DNA, 506 bp, Artificial Sequence
  chemically treated genomic DNA (Homo sapiens) CpG-island No: 183
gtagattcgggagggtgtgaagtaggtagttttgaattcggagttataaatgggtagaggtagttttaaatatatttgtatcgcgaagttgagatttacggttatttttttcgttgagggtaagggtcggtggatttagtaatttcgtagtttcgttttcgtcgtttttgtttttatagtcgagttggtgattttaggtatttagttcgttttatttattcggacggttgtttttttttcgtcggttcgggtgtattcgttaggcggaggttgatgtggtcgagggtgcgtattggcggttcgcgggaagcgttgcgtgagtcgaaggcgttcgcggcgaggtttagattgggtgggcgttttttattttttttcggtcgttgcgtcgttttattcgggggaggggaagagggggcggtggtttttgttttcgtttcgcggttaagttcggtttatgttttagttttgcgcgttcgtagtttcggtcgttttttttttttttttcg

SEQ ID NO: 184 - DNA, 506 bp, Artificial Sequence
  chemically treated genomic DNA (Homo sapiens) CpG-island No: 184
cgaaaaaaaaaaaaaaaacgaccgaaactacgaacgcgcaaaactaaaacataaaccgaacttaaccgcgaaacgaaaacaaaaaccaccgccccctcttcccctcccccgaataaaacgacgcaacgaccgaaaaaaaataaaaaacgcccacccaatctaaacctcgccgcgaacgccttcgactcacgcaacgcttcccgcgaaccgccaatacgcaccctcgaccacatcaacctccgcctaacgaatacacccgaaccgacgaaaaaaaaacaaccgtccgaataaataaaacgaactaaatacctaaaatcaccaactcgactataaaaacaaaaacgacgaaaacgaaactacgaaattactaaatccaccgacccttaccctcaacgaaaaaaataaccgtaaatctcaacttcgcgatacaaatatatttaaaactacctctacccatttataactccgaattcaaaactacctacttcacaccctcccgaatctac

SEQ ID NO: 185 - DNA, 836 bp, Artificial Sequence
  chemically treated genomic DNA (Homo sapiens) CpG-island No: 185
ttttttacggattcgtatttttttttcgaaaagaaaatagaaagacgtataaatttttttgtagtttaaattttttatataggtttatcgttttattcggaaacgtagtttcgggtgcgtagcgtagggcgaaggtttggtcggtagcgcgggcggttgcggtttcgtcgtttcgggcgggcgcgcggaaacggagcgtagagcgcggcgggtatcgtcgggtttcgggattacggaggtgtcgttttcgtcggttgttggtttacgtcgcgttttttcgttacgtacgtgcgttggggtttttttggcggagatttcgtttttataattaagtgcgtttaatttatttaatttttagggcgggtcggcgggcgggcggaaggaaggaaggtaggtcgggcggtcgcggggatagtttggcgtgggaggcggttgcgggttttatttggcgtagttttcgttgattacgcgggggaattcggattcgggttcgacgcgtttttaaagagttttcgtcggcgttgacgcggaagcgttatagtttattacgttttttcgcgggtcgagacgattgcggcggcggtttacggcgtttttcgcgttgtgtggttaggcgggaggcgcgcgggcggaggtagttgataggaggaatcgttcggtagtagttgtcgtcgttattatcgaaggagtcggaatcggagcgggtaggatttgaggtttttttcgtcggggtaacggttgtcgtcgtaattcgggttttattagcgtcgttttatttgtaacggttttttaggttttaggagaggggcggagaaaaatgggggttttttttaatt

SEQ ID NO: 186 - DNA, 836 bp, Artificial Sequence
  chemically treated genomic DNA (Homo sapiens) CpG-island No: 186
aattaaaaaaaacccccatttttctccgcccctctcctaaaacctaaaaaaccgttacaaataaaacgacgctaataaaacccgaattacgacgacaaccgttaccccgacgaaaaaaacctcaaatcctacccgctccgattccgactccttcgataataacgacgacaactactaccgaacgattcctcctatcaactacctccgcccgcgcgcctcccgcctaaccacacaacgcgaaaaacgccgtaaaccgccgccgcaatcgtctcgacccgcgaaaaaacgtaataaactataacgcttccgcgtcaacgccgacgaaaactctttaaaaacgcgtcgaacccgaatccgaattcccccgcgtaatcaacgaaaactacgccaaataaaacccgcaaccgcctcccacgccaaactatccccgcgaccgcccgacctaccttccttccttccgcccgcccgccgacccgccctaaaaattaaataaattaaacgcacttaattataaaaacgaaatctccgccaaaaaaaccccaacgcacgtacgtaacgaaaaaacgcgacgtaaaccaacaaccgacgaaaacgacacctccgtaatcccgaaacccgacgatacccgccgcgctctacgctccgtttccgcgcgcccgcccgaaacgacgaaaccgcaaccgcccgcgctaccgaccaaaccttcgccctacgctacgcacccgaaactacgtttccgaataaaacgataaacctatataaaaaatttaaactacaaaaaaatttatacgtctttctattttcttttcgaaaaaaaaatacgaatccgtaaaaaa

SEQ ID NO: 187 - DNA, 836 bp, Artificial Sequence
  chemically treated genomic DNA (Homo sapiens) CpG-island No: 187
ggttgggggagatttttattttttttcgttttttttttaaagtttgagggatcgttgtaggtggagcggcgttggtgggattcgggttgcggcggtagtcgttgtttcggcgagggaagttttaggttttgttcgtttcggtttcggttttttcggtggtggcggcggtagttgttgtcgggcggttttttttgttaattgttttcgttcgcgcgtttttcgtttagttatatagcgcggaggacgtcgtgagtcgtcgtcgtagtcgtttcggttcgcggagggacgtggtgagttgtggcgttttcgcgttagcgtcggcggggattttttgggagcgcgtcgggttcgagttcgggttttttcgcgtggttagcggaggttgcgttaggtggggttcgtagtcgttttttacgttaggttgttttcgcggtcgttcggtttgtttttttttttttcgttcgttcgtcggttcgttttaagagttgagtaagttgggcgtatttggttgtggggacggggttttcgttagggagattttaacgtacgtgcgtagcgggagggcgcggcgtgggttagtagtcggcgggagcggtattttcgtagtttcggagttcggcggtgttcgtcgcgttttgcgtttcgttttcgcgcgttcgttcgggacggcgaggtcgtagtcgttcgcgttgtcggttaggttttcgttttgcgttgcgtattcgaggttgcgttttcgggtagggcgatgaatttgtgtggggagtttgggttgtaggagggtttgtgcgtttttttgtttttttttcgagagggaggtgcgggttcgtggaggg

SEQ ID NO: 188 - DNA, 836 bp, Artificial Sequence
  chemically treated genomic DNA (Homo sapiens) CpG-island No: 188
ccctccacgaacccgcacctccctctcgaaaaaaaaacaaaaaaacgcacaaaccctcctacaacccaaactccccacacaaattcatcgccctacccgaaaacgcaacctcgaatacgcaacgcaaaacgaaaacctaaccgacaacgcgaacgactacgacctcgccgtcccgaacgaacgcgcgaaaacgaaacgcaaaacgcgacgaacaccgccgaactccgaaactacgaaaataccgctcccgccgactactaacccacgccgcgccctcccgctacgcacgtacgttaaaatctccctaacgaaaaccccgtccccacaaccaaatacgcccaacttactcaactcttaaaacgaaccgacgaacgaacgaaaaaaaaaaaaacaaaccgaacgaccgcgaaaacaacctaacgtaaaaaacgactacgaaccccacctaacgcaacctccgctaaccacgcgaaaaaacccgaactcgaacccgacgcgctcccaaaaaatccccgccgacgctaacgcgaaaacgccacaactcaccacgtccctccgcgaaccgaaacgactacgacgacgactcacgacgtcctccgcgctatataactaaacgaaaaacgcgcgaacgaaaacaattaacaaaaaaaaccgcccgacaacaactaccgccgccaccaccgaaaaaaccgaaaccgaaacgaacaaaacctaaaacttccctcgccgaaacaacgactaccgccgcaacccgaatcccaccaacgccgctccacctacaacgatccctcaaactttaaaaaaaaaacgaaaaaaaataaaaatctcccccaacc

SEQ ID NO: 189 - DNA, 762 bp, Artificial Sequence
  chemically treated genomic DNA (Homo sapiens) CpG-island No: 189
tcgcggcggcgttagtcgttattgagggatcgattttataaaggtcgtttcgcgaggggtgcgtagtattcggtagagggcgtttcgacgggttgggttgtgcgtttgcgtagtgtgggtcgttttcgattttttgtttcggtcggtttcgtttcggtttcgtattttcgtttcgtttttagtcgtcgttttgtttcgtagtagttagtttcgtgttcggtagtatgtttagttgggttagtaaggatgttcgtcgtaagaaggagtcggagtttttttagacggtggtcgaggggttgcggtagttgtacgcgtagaagttgttatttttggaggagtattatcgtttttacgagttttattcgttcgcgttggaggacgttgatttcgataataagtttatggtgtttttcgtggggtagtatagtacgggtaagattatttttattcgatatttgatcgagtaggatttttcggggatgcgtatcgggttcgagtttattatcgatttttttatcgtcgttatgtacggttttattgagggcgtggtgtcgggtaacgcgttcgtggtggattcgcggcgtttttttcgtaagtttaacgcgtttggtaacgttttttttaataggtatttatttattattttagggggcggggggcgcgttcggggtatattttttattcggagtttgattttttcgtggttgtcgtttcgtcgttttttgttttcgaggttttagtgagatttttagtgattatttt

SEQ ID NO: 190 - DNA, 762 bp, Artificial Sequence
  chemically treated genomic DNA (Homo sapiens) CpG-island No: 190
aaaataatcactaaaaatctcactaaaacctcgaaaacaaaaaacgacgaaacgacaaccacgaaaaaatcaaactccgaataaaaaatataccccgaacgcgccccccgccccctaaaataataaataaatacctattaaaaaaaacgttaccaaacgcgttaaacttacgaaaaaaacgccgcgaatccaccacgaacgcgttacccgacaccacgccctcaataaaaccgtacataacgacgataaaaaaatcgataataaactcgaacccgatacgcatccccgaaaaatcctactcgatcaaatatcgaataaaaataatcttacccgtactatactaccccacgaaaaacaccataaacttattatcgaaatcaacgtcctccaacgcgaacgaataaaactcgtaaaaacgataatactcctccaaaaataacaacttctacgcgtacaactaccgcaacccctcgaccaccgtctaaaaaaactccgactccttcttacgacgaacatccttactaacccaactaaacatactaccgaacacgaaactaactactacgaaacaaaacgacgactaaaaacgaaacgaaaatacgaaaccgaaacgaaaccgaccgaaacaaaaaatcgaaaacgacccacactacgcaaacgcacaacccaacccgtcgaaacgccctctaccgaatactacgcacccctcgcgaaacgacctttataaaatcgatccctcaataacgactaacgccgccgcga

SEQ ID NO: 191 - DNA, 762 bp, Artificial Sequence
  chemically treated genomic DNA (Homo sapiens) CpG-island No: 191
ggagtggttattgagggttttattggggtttcggagataaaggacggcggggcgatagttacgggagggttaggtttcgagtgaggggtgtgtttcggacgcgtttttcgttttttggagtgatgggtgggtatttgttgaggaaagcgttgttaaacgcgttgagtttgcggaaggggcgtcgcgggtttattacgagcgcgttgttcggtattacgtttttagtggggtcgtgtatgacggcgatgaaggagtcggtggtgggttcgggttcgatgcgtattttcgggaagttttgttcgattaggtgtcggatgaaggtggttttgttcgtgttgtattgttttacgaggagtattataggtttgttgtcgaagttagcgttttttagcgcgggcgagtggaattcgtggaagcggtagtgtttttttaggggtagtagtttttgcgcgtatagttgtcgtagtttttcggttatcgtttggaagagtttcggtttttttttgcggcgggtatttttgttgatttagttgaatatattgtcggatacggggttggttgttgcggggtagagcggcggttgagagcggggcgagggtgcggagtcgaggcggggtcggtcggggtagggaatcgggagcgatttatattgcgtaggcgtatagtttagttcgtcgaagcgttttttgtcgaatgttgcgtatttttcgcggagcggtttttatagggtcggttttttagtggcggttagcgtcgtcgcgg

SEQ ID NO: 192 - DNA, 762 bp, Artificial Sequence
  chemically treated genomic DNA (Homo sapiens) CpG-island No: 192
ccgcgacgacgctaaccgccactaaaaaaccgaccctataaaaaccgctccgcgaaaaatacgcaacattcgacaaaaaacgcttcgacgaactaaactatacgcctacgcaatataaatcgctcccgattccctaccccgaccgaccccgcctcgactccgcaccctcgccccgctctcaaccgccgctctaccccgcaacaaccaaccccgtatccgacaatatattcaactaaatcaacaaaaatacccgccgcaaaaaaaaaccgaaactcttccaaacgataaccgaaaaactacgacaactatacgcgcaaaaactactacccctaaaaaaacactaccgcttccacgaattccactcgcccgcgctaaaaaacgctaacttcgacaacaaacctataatactcctcgtaaaacaatacaacacgaacaaaaccaccttcatccgacacctaatcgaacaaaacttcccgaaaatacgcatcgaacccgaacccaccaccgactccttcatcgccgtcatacacgaccccactaaaaacgtaataccgaacaacgcgctcgtaataaacccgcgacgccccttccgcaaactcaacgcgtttaacaacgctttcctcaacaaatacccacccatcactccaaaaaacgaaaaacgcgtccgaaacacacccctcactcgaaacctaaccctcccgtaactatcgccccgccgtcctttatctccgaaaccccaataaaaccctcaataaccactcc

SEQ ID NO: 193 - DNA, 743 bp, Artificial Sequence
  chemically treated genomic DNA (Homo sapiens) CpG-island No: 193
ttttacgttagttttttagtagaacgggagagggtcgtgaagacgtaggcgggggtttaaagaaatagcgagcgggttgttcggcggcgggtcgtatatttattttatttagttatttcggatttaatgcggaacggtcggacggattggcgaaagcggtcgttcggttttaggttcggagggttggggcggattttatttcggaggcggggcgatattggtattagaggtgcgtattgttagggttcgttagcgttggtttagaagtcgtttcgtatttttcgttcgtttgggttatagtagttcgggtcggttttttcggtttacgtcggttagagggttacgttgagttcggttttattacgatattttaattaaagttgtttgtcgataacggcgttttcgtgttcgttggaagtgacgttagcgaggcgtcgtaggtttcgtttttagtgggtttaaggtaggcggggttaagtcggtcggtgggtgggcgcggtttgttgagaacgtagtggggtcgcgagcggtaaaaaataggtttgggaaaggcgaagttagtaaagtcgaagatattagagtggtatcggttttgtgagagcgtttaagtttgatttcgggttacgtttagcgagcgatagagtaacgtcgtattgtatttttattaaatatttaggtgaacgacgtatttaacgatttgggagtttaggatttatggtttttaaaaggtaataattaagatt

SEQ ID NO: 194 - DNA, 743 bp, Artificial Sequence
  chemically treated genomic DNA (Homo sapiens) CpG-island No: 194
aatcttaattattaccttttaaaaaccataaatcctaaactcccaaatcgttaaatacgtcgttcacctaaatatttaataaaaatacaatacgacgttactctatcgctcgctaaacgtaacccgaaatcaaacttaaacgctctcacaaaaccgataccactctaatatcttcgactttactaacttcgcctttcccaaacctattttttaccgctcgcgaccccactacgttctcaacaaaccgcgcccacccaccgaccgacttaaccccgcctaccttaaacccactaaaaacgaaacctacgacgcctcgctaacgtcacttccaacgaacacgaaaacgccgttatcgacaaacaactttaattaaaatatcgtaataaaaccgaactcaacgtaaccctctaaccgacgtaaaccgaaaaaaccgacccgaactactataacccaaacgaacgaaaaatacgaaacgacttctaaaccaacgctaacgaaccctaacaatacgcacctctaataccaatatcgccccgcctccgaaataaaatccgccccaaccctccgaacctaaaaccgaacgaccgctttcgccaatccgtccgaccgttccgcattaaatccgaaataactaaataaaataaatatacgacccgccgccgaacaacccgctcgctatttctttaaacccccgcctacgtcttcacgaccctctcccgttctactaaaaaactaacgtaaaa

SEQ ID NO: 195 - DNA, 743 bp, Artificial Sequence
  chemically treated genomic DNA (Homo sapiens) CpG-island No: 195
agttttaattgttgttttttagggattatgggttttgagtttttaaatcgttggatgcgtcgtttatttgggtgtttggtaagaatgtagtgcgacgttgttttgtcgttcgttgagcgtagttcgaggttaagtttgggcgtttttataaaatcggtgttattttggtgttttcgattttgttggtttcgttttttttaagtttgttttttgtcgttcgcggttttattgcgtttttaataggtcgcgtttatttatcggtcgatttggtttcgtttattttgggtttattgggggcggagtttgcggcgtttcgttgacgttatttttagcggatacggaagcgtcgttgtcggtaggtagttttagttaggatgtcgtgatgggatcgagtttagcgtaattttttggtcgacgtgggtcgagggggtcggttcgggttgttgtggtttagacgagcggagagtgcggagcggtttttgggttagcgttaacgagttttggtagtgcgtatttttggtgttagtgtcgtttcgttttcggggtagaattcgttttagtttttcgggtttgggatcgggcggtcgttttcgttagttcgttcggtcgtttcgtattaggttcgggataattaggtggagtaggtgtgcggttcgtcgtcggatagttcgttcgttgtttttttaagttttcgtttgcgtttttacggttttttttcgttttgttggaaagttgacgtgggg

SEQ ID NO: 196 - DNA, 743 bp, Artificial Sequence
  chemically treated genomic DNA (Homo sapiens) CpG-island No: 196
ccccacgtcaactttccaacaaaacgaaaaaaaaccgtaaaaacgcaaacgaaaacttaaaaaaacaacgaacgaactatccgacgacgaaccgcacacctactccacctaattatcccgaacctaatacgaaacgaccgaacgaactaacgaaaacgaccgcccgatcccaaacccgaaaaactaaaacgaattctaccccgaaaacgaaacgacactaacaccaaaaatacgcactaccaaaactcgttaacgctaacccaaaaaccgctccgcactctccgctcgtctaaaccacaacaacccgaaccgaccccctcgacccacgtcgaccaaaaaattacgctaaactcgatcccatcacgacatcctaactaaaactacctaccgacaacgacgcttccgtatccgctaaaaataacgtcaacgaaacgccgcaaactccgcccccaataaacccaaaataaacgaaaccaaatcgaccgataaataaacgcgacctattaaaaacgcaataaaaccgcgaacgacaaaaaacaaacttaaaaaaaacgaaaccaacaaaatcgaaaacaccaaaataacaccgattttataaaaacgcccaaacttaacctcgaactacgctcaacgaacgacaaaacaacgtcgcactacattcttaccaaacacccaaataaacgacgcatccaacgatttaaaaactcaaaacccataatccctaaaaaacaacaattaaaact

SEQ ID NO: 197 - DNA, 663 bp, Artificial Sequence
  chemically treated genomic DNA (Homo sapiens) CpG-island No: 197
agcgatgaattttttttttagtcgcgttcgggttgtcggttcggcggttataggtttggtaggcgcgttagagatttagattcgtttttaagtaagggtcgtacgggatttaggttagtagcggtaattcgcggagttttagtttttttaggagttagagtcgggggaggcggggtcgagagtcgggggcggggttcggacgggggcgggttcgcggtgacgtcgggagggtagcgacgcgcggaggcggcggcggagtttttttttgttgttgttgcgttttattttttcgcggtcggttagttttagttcgtatttcgcgtcggtgttcgcgttttttttcgggtttcgttatgggttttatcgtgttcgcgtttttttcgcggattttcgggaagaagtagatgcggatttttatgggtgaggtagatcgagcgcgcggttcggatcggggcgtcggtttcggcgtagttttttcgttttcgcgtttttttagtttcgtttatttgggtttttggtttcgagttatttattttataacgtttcggggtttttgttttcgggcgggtttcggtttgtatcgtcgatttcggggtttgatattcggagttgcgggtttgggtggggtgaagtttttttcgttttagttcggttggtaagaag

SEQ ID NO: 198 - DNA, 663 bp, Artificial Sequence
  chemically treated genomic DNA (Homo sapiens) CpG-island No: 198
cttcttaccaaccgaactaaaacgaaaaaaacttcaccccacccaaacccgcaactccgaatatcaaaccccgaaatcgacgatacaaaccgaaacccgcccgaaaacaaaaaccccgaaacgttataaaataaataactcgaaaccaaaaacccaaataaacgaaactaaaaaaacgcgaaaacgaaaaaactacgccgaaaccgacgccccgatccgaaccgcgcgctcgatctacctcacccataaaaatccgcatctacttcttcccgaaaatccgcgaaaaaaacgcgaacacgataaaacccataacgaaacccgaaaaaaaacgcgaacaccgacgcgaaatacgaactaaaactaaccgaccgcgaaaaaataaaacgcaacaacaacaaaaaaaaactccgccgccgcctccgcgcgtcgctaccctcccgacgtcaccgcgaacccgcccccgtccgaaccccgcccccgactctcgaccccgcctcccccgactctaactcctaaaaaaactaaaactccgcgaattaccgctactaacctaaatcccgtacgacccttacttaaaaacgaatctaaatctctaacgcgcctaccaaacctataaccgccgaaccgacaacccgaacgcgactaaaaaaaaaattcatcgct

SEQ ID NO: 199 - DNA, 663 bp, Artificial Sequence
  chemically treated genomic DNA (Homo sapiens) CpG-island No: 199
ttttttattagtcgggttggggcggagggagttttattttatttaggttcgtagtttcgggtgttaggtttcggggtcggcgatgtagatcgggattcgttcgagagtagaggtttcggggcgttatgaggtgggtgattcggggttagagatttaggtgagcggggttggagggacgcgggggcggaagggttgcgtcggggtcggcgtttcggttcgggtcgcgcgttcgatttgttttatttatgagaattcgtatttgttttttttcgaagattcgcgaaaagagcgcggatacggtgaggtttatggcggggttcggggaggggcgcgggtatcgacgcggggtgcgggttggaattggtcggtcgcggggggatggggcgtagtagtagtaggaggaggtttcgtcgtcgttttcgcgcgtcgttgttttttcgacgttatcgcgggttcgttttcgttcgggtttcgttttcggttttcggtttcgtttttttcggttttggtttttaggggagttgaagtttcgcgagttgtcgttgttggtttgggtttcgtgcggtttttatttgggaacgggtttaggtttttaacgcgtttgttaggtttgtggtcgtcgaatcggtagttcgagcgcggttgaggaaaggatttatcgtt

SEQ ID NO: 200 - DNA, 663 bp, Artificial Sequence
  chemically treated genomic DNA (Homo sapiens) CpG-island No: 200
aacgataaatcctttcctcaaccgcgctcgaactaccgattcgacgaccacaaacctaacaaacgcgttaaaaacctaaacccgttcccaaataaaaaccgcacgaaacccaaaccaacaacgacaactcgcgaaacttcaactcccctaaaaaccaaaaccgaaaaaaacgaaaccgaaaaccgaaaacgaaacccgaacgaaaacgaacccgcgataacgtcgaaaaaacaacgacgcgcgaaaacgacgacgaaacctcctcctactactactacgccccatccccccgcgaccgaccaattccaacccgcaccccgcgtcgatacccgcgcccctccccgaaccccgccataaacctcaccgtatccgcgctcttttcgcgaatcttcgaaaaaaaacaaatacgaattctcataaataaaacaaatcgaacgcgcgacccgaaccgaaacgccgaccccgacgcaacccttccgcccccgcgtccctccaaccccgctcacctaaatctctaaccccgaatcacccacctcataacgccccgaaacctctactctcgaacgaatcccgatctacatcgccgaccccgaaacctaacacccgaaactacgaacctaaataaaataaaactccctccgccccaacccgactaataaaaaa

SEQ ID NO: 201 - DNA, 631 bp, Artificial Sequence
  chemically treated genomic DNA (Homo sapiens) CpG-island No: 201
taggcgagatttggagtttgtttcgcggaaagtcgtttttatgggtgacgacgtatggtaacgcgtttaagggaacgtcggcgagtcgattattgtgtttttaaagtcgttttgaaatgaggatagaagttcgggggagtcgggggcgtagagtaaaggtacgatttgattggttcgcggtcgcgtaacgatgggcgggacggggtagaagtgtgggcgagttggggcgttatcgcgcgtcgggtagttttttttacgttttggcgggtgcgtaggtttttaaattgggcggagtaagggaagtgatgtgtggttttcggaagaacgcgcgtaaatttttatttataagtaacgagtcgtcgtggttaaataaggtttttttacgatattaatcgcgtggcgggtgtggtattgtcgaattcgaggaatgagaaaggaggttcggtagaaagttcggattagttgtcggtcgttttcggcgtagtttagggcggggagggattgatttttcggaatatttcggggtaaagatttcgtataatagcgaaatcgttgagggattgttgtgtggcgaggttttggagatagataggtttatatatttttttttttcgtgagggttatcgatttg

SEQ ID NO: 202 - DNA, 631 bp, Artificial Sequence
  chemically treated genomic DNA (Homo sapiens) CpG-island No: 202
caaatcgataaccctcacgaaaaaaaaaaatatataaacctatctatctccaaaacctcgccacacaacaatccctcaacgatttcgctattatacgaaatctttaccccgaaatattccgaaaaatcaatccctccccgccctaaactacgccgaaaacgaccgacaactaatccgaactttctaccgaacctcctttctcattcctcgaattcgacaataccacacccgccacgcgattaatatcgtaaaaaaaccttatttaaccacgacgactcgttacttataaataaaaatttacgcgcgttcttccgaaaaccacacatcacttcccttactccgcccaatttaaaaacctacgcacccgccaaaacgtaaaaaaaactacccgacgcgcgataacgccccaactcgcccacacttctaccccgtcccgcccatcgttacgcgaccgcgaaccaatcaaatcgtacctttactctacgcccccgactcccccgaacttctatcctcatttcaaaacgactttaaaaacacaataatcgactcgccgacgttcccttaaacgcgttaccatacgtcgtcacccataaaaacgactttccgcgaaacaaactccaaatctcgccta

SEQ ID NO: 203 - DNA, 631 bp, Artificial Sequence
  chemically treated genomic DNA (Homo sapiens) CpG-island No: 203
taggtcggtgatttttacgaggaaagggagtgtgtgggtttgtttgtttttaaggtttcgttatataatagttttttagcggtttcgttgttatgcgaggtttttatttcgggatgtttcggggagttaattttttttcgttttaggttacgtcgggaacggtcggtagttgattcgaattttttgtcgggtttttttttttatttttcgggttcggtagtgttatattcgttacgcgattggtatcgtaggagggttttgtttgattacggcgattcgttatttatgggtgaggatttacgcgcgttttttcggaggttatatattattttttttgtttcgtttagtttagagatttgcgtattcgttagggcgtgagagagattattcggcgcgcggtgacgttttagttcgtttatatttttgtttcgtttcgtttatcgttgcgcggtcgcgggttaattagatcgtgtttttattttacgttttcggttttttcgaatttttgtttttattttagggcgattttgggaatataatagtcgattcgtcgacgtttttttagacgcgttgttatacgtcgttatttatagaaacggtttttcgcggggtagattttaagtttcgtttg

SEQ ID NO: 204 - DNA, 631 bp, Artificial Sequence
  chemically treated genomic DNA (Homo sapiens) CpG-island No: 204
caaacgaaacttaaaatctaccccgcgaaaaaccgtttctataaataacgacgtataacaacgcgtctaaaaaaacgtcgacgaatcgactattatattcccaaaatcgccctaaaataaaaacaaaaattcgaaaaaaccgaaaacgtaaaataaaaacacgatctaattaacccgcgaccgcgcaacgataaacgaaacgaaacaaaaatataaacgaactaaaacgtcaccgcgcgccgaataatctctctcacgccctaacgaatacgcaaatctctaaactaaacgaaacaaaaaaaataatatataacctccgaaaaaacgcgcgtaaatcctcacccataaataacgaatcgccgtaatcaaacaaaaccctcctacgataccaatcgcgtaacgaatataacactaccgaacccgaaaaataaaaaaaaaaacccgacaaaaaattcgaatcaactaccgaccgttcccgacgtaacctaaaacgaaaaaaaattaactccccgaaacatcccgaaataaaaacctcgcataacaacgaaaccgctaaaaaactattatataacgaaaccttaaaaacaaacaaacccacacactccctttcctcgtaaaaatcaccgaccta

SEQ ID NO: 205 - DNA, 706 bp, Artificial Sequence
  chemically treated genomic DNA (Homo sapiens) CpG-island No: 205
gtaataggaggaggtaggagagcgggtgattaggaagaatgacgcgacgtggtgaggacggagagagatcgggcgatgtatagtgcggagtatgaagatggagtaggagagtgtagtaggagggacgggagtgtaggtagtgaggacgagattataaggagataggagaacgagcgagtagaatacgacggagcgagtagaagagggtagttgcgggagaatagaggagagagagggacgagacgaaagagtatattaggagggacgagagggagagggttggaaggatgacgaggtgtggagaagcgagaggtagagtagaaggtagtcggagtggtagggtgcgaggcgggaatgataggagaagagagggacgaggagaaggaggtaggaagaggtatggaaggagaaagtgcgagagaggtaatggacggacgaaagcgatataagcgcgggagacgggagagcggcgagaggttacggtcgtatgagagagataggacgttagtgggtagacgtaaaaacgggtacggaggagaagaacgaggaagaagggacggaggaagcgattggagcggagatgggtgagacggcggaagagaaagagggaaaacgaggtaagtggtaggaaagaggggaggtagtagaaacgaatagtagaggtggaaagagggaagaggaagcggagaggagggtaaggaagaag

SEQ ID NO: 206 - DNA, 706 bp, Artificial Sequence
  chemically treated genomic DNA (Homo sapiens) CpG-island No: 206
cttcttccttaccctcctctccgcttcctcttccctctttccacctctactattcgtttctactacctcccctctttcctaccacttacctcgttttccctctttctcttccgccgtctcacccatctccgctccaatcgcttcctccgtcccttcttcctcgttcttctcctccgtacccgtttttacgtctacccactaacgtcctatctctctcatacgaccgtaacctctcgccgctctcccgtctcccgcgcttatatcgctttcgtccgtccattacctctctcgcactttctccttccatacctcttcctacctccttctcctcgtccctctcttctcctatcattcccgcctcgcaccctaccactccgactaccttctactctacctctcgcttctccacacctcgtcatccttccaaccctctccctctcgtccctcctaatatactctttcgtctcgtccctctctctcctctattctcccgcaactaccctcttctactcgctccgtcgtattctactcgctcgttctcctatctccttataatctcgtcctcactacctacactcccgtccctcctactacactctcctactccatcttcatactccgcactatacatcgcccgatctctctccgtcctcaccacgtcgcgtcattcttcctaatcacccgctctcctacctcctcctattac

SEQ ID NO: 207 - DNA, 706 bp, Artificial Sequence
  chemically treated genomic DNA (Homo sapiens) CpG-island No: 207
ttttttttttgttttttttttcgtttttttttttttttttttatttttgttgttcgtttttgttgtttttttttttttttgttatttgtttcgttttttttttttttttttcgtcgttttatttattttcgttttagtcgtttttttcgttttttttttttcgtttttttttttcgtattcgtttttgcgtttgtttattggcgttttattttttttatacggtcgtggtttttcgtcgttttttcgtttttcgcgtttgtatcgttttcgttcgtttattatttttttcgtattttttttttttatgtttttttttgttttttttttttcgtttttttttttttttgttattttcgtttcgtattttgttatttcggttgttttttattttgtttttcgtttttttatatttcgttatttttttagttttttttttttcgttttttttaatatattttttcgtttcgttttttttttttttttattttttcgtagttatttttttttgttcgtttcgtcgtattttgttcgttcgtttttttatttttttgtggtttcgtttttattatttgtattttcgttttttttgttatatttttttgttttatttttatatttcgtattatgtatcgttcggttttttttcgtttttattacgtcgcgttattttttttagttattcgtttttttatttttttttgttat

SEQ ID NO: 208 - DNA, 706 bp, Artificial Sequence
  chemically treated genomic DNA (Homo sapiens) CpG-island No: 208
ataacaaaaaaaaataaaaaaacgaataactaaaaaaaataacgcgacgtaataaaaacgaaaaaaaaccgaacgatacataatacgaaatataaaaataaaacaaaaaaatataacaaaaaaaacgaaaatacaaataataaaaacgaaaccacaaaaaaataaaaaaacgaacgaacaaaatacgacgaaacgaacaaaaaaaaataactacgaaaaaataaaaaaaaaaaaaaaacgaaacgaaaaaatatattaaaaaaaacgaaaaaaaaaaaactaaaaaaataacgaaatataaaaaaacgaaaaacaaaataaaaaacaaccgaaataacaaaatacgaaacgaaaataacaaaaaaaaaaaaaaacgaaaaaaaaaaaacaaaaaaaaacataaaaaaaaaaaatacgaaaaaaataataaacgaacgaaaacgatacaaacgcgaaaaacgaaaaaacgacgaaaaaccacgaccgtataaaaaaaataaaacgccaataaacaaacgcaaaaacgaatacgaaaaaaaaaaacgaaaaaaaaaaaacgaaaaaaacgactaaaacgaaaataaataaaacgacgaaaaaaaaaaaaaaaaaacgaaacaaataacaaaaaaaaaaaaaaacaacaaaaacgaacaacaaaaataaaaaaaaaaaaaaaaaaacgaaaaaaaaaacaaaaaaaaaa

SEQ ID NO: 209 - DNA, 1052 bp, Artificial Sequence
  chemically treated genomic DNA (Homo sapiens) CpG-island No: 209
ttttgcgcgtttttatttgtgatttatttagtttacgattcgttcggttttcgttcgttttcgttttcgttttcgtcgtcgtcgtcgtcgtcgtcgtcgttatcgttcgggtgtatttggatgttgagtttgcgttcgtaggtcggtttcgtgttttgtattacgttgtcgagtatcgttattacgtcgggcgtcggttttacgaagtaggcggtgcgcgtagttcggatggcggttcgtacgtcggcgaagcggaaggcgtagagtgcggtcggagtagcgcgggtcgcgggggatttttggggtcgttcgaagatagtaaagagtcgttttcgggttgggaagatcgatattaggcggttgtagaggtcgtcgcggttcgcgtcgttcgcgtattgtaagtttaattggatgtaggattcggtgagttttttggcgtcgtcgtcggcgtcgtggggtaggtagatgcgcgttagtaggtttcgcgtttggttttttttgtcgttcgcgcgcgtttcgttgttgagcgttaggtacgcgtaggattgtgtattcggcggcgggtcggacgggtgtaggaaggcgtttacgaagtttagtttgtgttgttttttggcgttttgtttgattttgaggatgttgtcgtcggaggggttgaggtcgaaggtgaagagtttggttaggtcgtcgcgcgtgtttagggagcggatggcgatttcgggcgtgttttcgaagcggtggttttttaggttgcggttgcgcgggaagaaggagttgtcgtaatcggtgtacgtggcgtttacgagtaggcggttgtttttcgcgttcgcggcgggaggtagaattagttttacggtggacgcgttcgggtggttggtcgttacgtttagtatgttggggaatatcgtgacgggttcggcgggcggcgcggcgggcgggaagcgtacggttacggtcgagatgttgtttcggcgtcgtagttggtagaagttttggtagatggattcgtatacgattattaggttttggtcggggtttagttgtaggatttt

SEQ ID NO: 210 - DNA, 1052 bp, Artificial Sequence
  chemically treated genomic DNA (Homo sapiens) CpG-island No: 210
aaaatcctacaactaaaccccgaccaaaacctaataatcgtatacgaatccatctaccaaaacttctaccaactacgacgccgaaacaacatctcgaccgtaaccgtacgcttcccgcccgccgcgccgcccgccgaacccgtcacgatattccccaacatactaaacgtaacgaccaaccacccgaacgcgtccaccgtaaaactaattctacctcccgccgcgaacgcgaaaaacaaccgcctactcgtaaacgccacgtacaccgattacgacaactccttcttcccgcgcaaccgcaacctaaaaaaccaccgcttcgaaaacacgcccgaaatcgccatccgctccctaaacacgcgcgacgacctaaccaaactcttcaccttcgacctcaacccctccgacgacaacatcctcaaaatcaaacaaaacgccaaaaaacaacacaaactaaacttcgtaaacgccttcctacacccgtccgacccgccgccgaatacacaatcctacgcgtacctaacgctcaacaacgaaacgcgcgcgaacgacaaaaaaaaccaaacgcgaaacctactaacgcgcatctacctaccccacgacgccgacgacgacgccaaaaaactcaccgaatcctacatccaattaaacttacaatacgcgaacgacgcgaaccgcgacgacctctacaaccgcctaatatcgatcttcccaacccgaaaacgactctttactatcttcgaacgaccccaaaaatcccccgcgacccgcgctactccgaccgcactctacgccttccgcttcgccgacgtacgaaccgccatccgaactacgcgcaccgcctacttcgtaaaaccgacgcccgacgtaataacgatactcgacaacgtaatacaaaacacgaaaccgacctacgaacgcaaactcaacatccaaatacacccgaacgataacgacgacgacgacgacgacgacgacgaaaacgaaaacgaaaacgaacgaaaaccgaacgaatcgtaaactaaataaatcacaaataaaaacgcgcaaaa

SEQ ID NO: 211 - DNA, 1052 bp, Artificial Sequence
  chemically treated genomic DNA (Homo sapiens) CpG-island No: 211
aagattttgtagttggatttcggttagggtttggtagtcgtgtgcgggtttatttattagggtttttgttagttgcggcgtcggggtaatatttcggtcgtggtcgtgcgtttttcgttcgtcgcgtcgttcgtcgagttcgttacggtgttttttagtatgttgaacgtggcggttaattattcgaacgcgtttatcgtggggttagttttgtttttcgtcgcgggcgcggggggtagtcgtttgttcgtgggcgttacgtatatcggttacggtagtttttttttttcgcgtaatcgtagtttggaggattatcgtttcgagaatacgttcgagatcgttattcgttttttggatacgcgcggcgatttggttaagttttttattttcgattttaattttttcgacgataatatttttaagattaagtagggcgttaaggagtagtataagttgggtttcgtgagcgtttttttgtattcgttcgattcgtcgtcgggtgtatagttttacgcgtatttggcgtttaatagcgaggcgcgcgcgggcgataaggagagttaggcgcggagtttgttggcgcgtatttgtttgttttacggcgtcggcggcgacgttaagaagtttatcgagttttatatttagttgggtttgtagtgcgcgggcggcgcgggtcgcggcgatttttatagtcgtttggtgtcggtttttttagttcgggagcggttttttgttgttttcgagcggttttaggggtttttcgcggttcgcgttgtttcggtcgtattttgcgtttttcgtttcgtcgacgtgcgagtcgttattcgagttgcgcgtatcgtttgtttcgtggaatcggcgttcgacgtggtggcggtgttcgatagcgtggtgtagggtacgggatcggtttgcgagcgtaagtttaatatttaggtatattcgggcggtggcggcggcggcggcggcggcggcggcgggggcgggggcgggggcgggcgggaatcgagcgggtcgtgagttgagtgggttataggtgggagcgcgtagag

SEQ ID NO: 212 - DNA, 1052 bp, Artificial Sequence
  chemically treated genomic DNA (Homo sapiens) CpG-island No: 212
ctctacgcgctcccacctataacccactcaactcacgacccgctcgattcccgcccgcccccgcccccgcccccgccgccgccgccgccgccgccgccgccaccgcccgaatatacctaaatattaaacttacgctcgcaaaccgatcccgtaccctacaccacgctatcgaacaccgccaccacgtcgaacgccgattccacgaaacaaacgatacgcgcaactcgaataacgactcgcacgtcgacgaaacgaaaaacgcaaaatacgaccgaaacaacgcgaaccgcgaaaaacccctaaaaccgctcgaaaacaacaaaaaaccgctcccgaactaaaaaaaccgacaccaaacgactataaaaatcgccgcgacccgcgccgcccgcgcactacaaacccaactaaatataaaactcgataaacttcttaacgtcgccgccgacgccgtaaaacaaacaaatacgcgccaacaaactccgcgcctaactctccttatcgcccgcgcgcgcctcgctattaaacgccaaatacgcgtaaaactatacacccgacgacgaatcgaacgaatacaaaaaaacgctcacgaaacccaacttatactactccttaacgccctacttaatcttaaaaatattatcgtcgaaaaaattaaaatcgaaaataaaaaacttaaccaaatcgccgcgcgtatccaaaaaacgaataacgatctcgaacgtattctcgaaacgataatcctccaaactacgattacgcgaaaaaaaaaaactaccgtaaccgatatacgtaacgcccacgaacaaacgactaccccccgcgcccgcgacgaaaaacaaaactaaccccacgataaacgcgttcgaataattaaccgccacgttcaacatactaaaaaacaccgtaacgaactcgacgaacgacgcgacgaacgaaaaacgcacgaccacgaccgaaatattaccccgacgccgcaactaacaaaaaccctaataaataaacccgcacacgactaccaaaccctaaccgaaatccaactacaaaatctt

SEQ ID NO: 213 - DNA, 1151 bp, Artificial Sequence
  unsure (391): chemically treated genomic DNA (Homo sapiens) CpG-island No: 213
tgttcgtgaggcgtcgcgggtgttcgtacgaggtttgcggtagttgcggagcgtgatatagcgggttgtcgggtatcgggtttacggtcgtttcggtttttaggtttaggttggcgttcgatagttgatagaggcggttgacggtcgttaggtatacggttttcgtcgcgtcgtttagggcgaagttgttggtgggcgtgggcgaggggaatcgacgttggatttttagggcgtcggttcgcgtcgtttttaggagtagtagtaatagtagcggtatcgggtatcgcggcggcgtttggaacggcggggggttggtagcggcgtcgggtcgttaaagggtgcgtcgttcgcggcgcgaagagttattcgggcgtgcgcgggttgcgcggtncggttattgtatgggacgagcgtcggtcgggagtcgggagttcggagcgggcgagaggcggggggcgggttcgggtcgcgaggcgttttttgttcgcgttagtcgttttcggtttcggcgttcgggttcggtttagtttcgtcgcgtagttcgggggcggggcgggggcggggcgggggcggtttcgttgcggatacgtttttatttttcgtttcggtttcgttcgttttcgggattttcgtttgtttttggtcgttttgggttacgtttcgtcgttcgcgggtttcgtcgttcgcgttttttaggattcgttcgcggttttagggttttttttcgtagtcgtcgtcgtcgtcgttcgtttttttcgttttttttttttatttggtcgtttggtttgtttcgttcgcgtttgttttttttttttcgtttttttttttatttcgtttttttttttttttgcgtttttcggtttttgcgttttttcgtttttgtttttattttaaatttcgcgcgtgtggcgttttttcgggttttgtttttgttttttttttttttttcgatttcgtttcgttttttagtttttggtagtttcgttttcggttttttttagttttttttttttttttgtttcgttttttcgtttttgacgttcgtttttttttttcgtggttttttttgtttttttttcggatttttcgtttttttttcggtttttttgagtttttttttttttttttttttgttttttcgaattttgtgt

SEQ ID NO: 214 - DNA, 1151 bp, Artificial Sequence
  unsure (761): chemically treated genomic DNA (Homo sapiens) CpG-island No: 214
acacaaaattcgaaaaaacaaaaaaaaaaaaaaaaaaaaactcaaaaaaaccgaaaaaaaaacgaaaaatccgaaaaaaaaacaaaaaaaaccacgaaaaaaaaaaacgaacgtcaaaaacgaaaaaacgaaacaaaaaaaaaaaaaaaactaaaaaaaaccgaaaacgaaactaccaaaaactaaaaaacgaaacgaaatcgaaaaaaaaaaaaaaaacaaaaacaaaacccgaaaaaacgccacacgcgcgaaatttaaaataaaaacaaaaacgaaaaaacgcaaaaaccgaaaaacgcaaaaaaaaaaaaaaacgaaataaaaaaaaaaacgaaaaaaaaaaaacaaacgcgaacgaaacaaaccaaacgaccaaataaaaaaaaaaaacgaaaaaaacgaacgacgacgacgacgactacgaaaaaaaaccctaaaaccgcgaacgaatcctaaaaaacgcgaacgacgaaacccgcgaacgacgaaacgtaacccaaaacgaccaaaaacaaacgaaaatcccgaaaacgaacgaaaccgaaacgaaaaataaaaacgtatccgcaacgaaaccgcccccgccccgcccccgccccgcccccgaactacgcgacgaaactaaaccgaacccgaacgccgaaaccgaaaacgactaacgcgaacaaaaaacgcctcgcgacccgaacccgccccccgcctctcgcccgctccgaactcccgactcccgaccgacgctcgtcccatacaataaccgnaccgcgcaacccgcgcacgcccgaataactcttcgcgccgcgaacgacgcaccctttaacgacccgacgccgctaccaaccccccgccgttccaaacgccgccgcgatacccgataccgctactattactactactcctaaaaacgacgcgaaccgacgccctaaaaatccaacgtcgattcccctcgcccacgcccaccaacaacttcgccctaaacgacgcgacgaaaaccgtatacctaacgaccgtcaaccgcctctatcaactatcgaacgccaacctaaacctaaaaaccgaaacgaccgtaaacccgatacccgacaacccgctatatcacgctccgcaactaccgcaaacctcgtacgaacacccgcgacgcctcacgaaca

SEQ ID NO: 215 - DNA, 1151 bp, Artificial Sequence
  unsure (761): chemically treated genomic DNA (Homo sapiens) CpG-island No: 215
atatagggttcgggaaggtagagggagaaggaaaggggagtttagagggatcgagagagggacggagggttcgagggggaggtagagggagttacggagagagggagcgagcgttagggacggaaaaacggagtaggagagagaaggagattagaaagggtcgggggcggggttgttagggattggagagcgaagcggagtcggagggagaaggagaagtagaggtagaattcggagaagcgttatacgcgcggagtttggggtggggatagagacggagagacgtagagatcgagagacgtagagagagggagagacggggtgggggagagggcggaaaagagaaaataggcgcgagcgaggtaggttaagcggttaagtgggaggaaagagcgaggagagcgagcgacggcggcggcggttacggggagggattttggggtcgcgggcgggttttggagggcgcgggcggcgggattcgcggacggcggggcgtggtttagggcggttaggggtaggcgggggtttcgggggcgggcggggtcggggcggggagtgagggcgtgttcgtagcggagtcgttttcgtttcgttttcgtttcgttttcgggttgcgcggcgaggttgagtcgggttcgggcgtcggggtcgggggcggttggcgcgggtaggaagcgtttcgcggttcgggttcgtttttcgtttttcgttcgtttcgggttttcggttttcggtcggcgttcgttttatgtaatagtcgngtcgcgtagttcgcgtacgttcggatggtttttcgcgtcgcgggcggcgtattttttagcggttcggcgtcgttgttagtttttcgtcgttttagacgtcgtcgcggtgttcggtgtcgttgttgttgttgttgtttttgggggcggcgcgggtcggcgttttggagatttagcgtcggtttttttcgtttacgtttattaataatttcgttttggacggcgcggcggggatcgtgtatttggcggtcgttaatcgtttttattagttgtcgggcgttaatttgagtttggaggtcgaggcggtcgtgggttcggtgttcgatagttcgttgtgttacgtttcgtagttgtcgtaggtttcgtgcgagtattcgcggcgttttacggata

SEQ ID NO: 216 - DNA, 1151 bp, Artificial Sequence
  unsure (391): chemically treated genomic DNA (Homo sapiens) CpG-island No: 216
tatccgtaaaacgccgcgaatactcgcacgaaacctacgacaactacgaaacgtaacacaacgaactatcgaacaccgaacccacgaccgcctcgacctccaaactcaaattaacgcccgacaactaataaaaacgattaacgaccgccaaatacacgatccccgccgcgccgtccaaaacgaaattattaataaacgtaaacgaaaaaaaccgacgctaaatctccaaaacgccgacccgcgccgcccccaaaaacaacaacaacaacaacgacaccgaacaccgcgacgacgtctaaaacgacgaaaaactaacaacgacgccgaaccgctaaaaaatacgccgcccgcgacgcgaaaaaccatccgaacgtacgcgaactacgcgacncgactattacataaaacgaacgccgaccgaaaaccgaaaacccgaaacgaacgaaaaacgaaaaacgaacccgaaccgcgaaacgcttcctacccgcgccaaccgcccccgaccccgacgcccgaacccgactcaacctcgccgcgcaacccgaaaacgaaacgaaaacgaaacgaaaacgactccgctacgaacacgccctcactccccgccccgaccccgcccgcccccgaaacccccgcctacccctaaccgccctaaaccacgccccgccgtccgcgaatcccgccgcccgcgccctccaaaacccgcccgcgaccccaaaatccctccccgtaaccgccgccgccgtcgctcgctctcctcgctctttcctcccacttaaccgcttaacctacctcgctcgcgcctattttctcttttccgccctctcccccaccccgtctctccctctctctacgtctctcgatctctacgtctctccgtctctatccccaccccaaactccgcgcgtataacgcttctccgaattctacctctacttctccttctccctccgactccgcttcgctctccaatccctaacaaccccgcccccgaccctttctaatctccttctctctcctactccgtttttccgtccctaacgctcgctccctctctccgtaactccctctacctccccctcgaaccctccgtccctctctcgatccctctaaactcccctttccttctccctctaccttcccgaaccctatat

SEQ ID NO: 217 - DNA, 594 bp, Artificial Sequence
  unsure (338, 468): chemically treated genomic DNA (Homo sapiens) CpG-island No: 217
cgggaggatagggtgacggagagtgaggagagagcggaggtggtgcgttatacggcgaagtgagaaggagtagttgggcgtgtagggtgcgtcgagtgtgcgggacgagagtgaaagaatgaagagcgcgagattttgtattttggttgtttatgtgtagaagagtgggaaggcgagttggggagagatgagagggacgcgttaggatgtcgattgtagaacgttaggtagagggcgtgattttaagaggatggggtgttggagggaaggatttcgaagggaggagcgacgaaagagtgaggcgatggtattttgttaggtgtagagagaatagcganggcgggggggggcggaagaagatcggagaggcgagagaggaggagggcgatagaggcggtcggggagagaagtagggggtggggcgtcgacgggggttcgcggggcgttagggggggggggtacggcggnaaggagcggggtaagggggatagaacggcgggggggaaagggcgaggggggacgggggggggaggagtagtcgagggggcgtaacggttttttttttttttttttttttttttttttaagttttat

SEQ ID NO: 218 - DNA, 594 bp, Artificial Sequence
  unsure (127, 257): chemically treated genomic DNA (Homo sapiens) CpG-island No: 218
ataaaacttaaaaaaaaaaaaaaaaaaaaaaaaaaaaaaccgttacgccccctcgactactcctcccccccccgtcccccctcgccctttcccccccgccgttctatcccccttaccccgctccttnccgccgtaccccccccccctaacgccccgcgaacccccgtcgacgccccaccccctacttctctccccgaccgcctctatcgccctcctcctctctcgcctctccgatcttcttccgcccccccccgccntcgctattctctctacacctaacaaaataccatcgcctcactctttcgtcgctcctcccttcgaaatccttccctccaacaccccatcctcttaaaatcacgccctctacctaacgttctacaatcgacatcctaacgcgtccctctcatctctccccaactcgccttcccactcttctacacataaacaaccaaaatacaaaatctcgcgctcttcattctttcactctcgtcccgcacactcgacgcaccctacacgcccaactactccttctcacttcgccgtataacgcaccacctccgctctctcctcactctccgtcaccctatcctcccg

SEQ ID NO: 219 - DNA, 594 bp, Artificial Sequence
  unsure (127, 257): chemically treated genomic DNA (Homo sapiens) CpG-island No: 219
atagggtttaaggaaaggaagaaaggaggaaaggaaggatcgttgcgttttttcggttgtttttttttttttcgttttttttcgttttttttttttcgtcgttttgttttttttgtttcgttttttntcgtcgtgttttttttttttggcgtttcgcgggttttcgtcggcgttttattttttgttttttttttcgatcgtttttgtcgttttttttttttttcgttttttcggttttttttcgttttttttcgttntcgttgttttttttgtatttggtaaagtgttatcgttttattttttcgtcgttttttttttcggagtttttttttttagtattttatttttttagagttacgttttttatttgacgttttatagtcggtattttagcgcgttttttttatttttttttagttcgtttttttatttttttgtatatgggtagttaggatgtaagatttcgcgttttttatttttttattttcgtttcgtatattcggcgtattttgtacgtttagttgtttttttttatttcgtcgtgtgacgtattattttcgttttttttttatttttcgttattttgttttttcg

SEQ ID NO: 220 - DNA, 594 bp, Artificial Sequence
  unsure (338, 468): chemically treated genomic DNA (Homo sapiens) CpG-island No: 220
cgaaaaaacaaaataacgaaaaataaaaaaaaaacgaaaataatacgtcacacgacgaaataaaaaaaaacaactaaacgtacaaaatacgccgaatatacgaaacgaaaataaaaaaataaaaaacgcgaaatcttacatcctaactacccatatacaaaaaaataaaaaaacgaactaaaaaaaaataaaaaaaacgcgctaaaataccgactataaaacgtcaaataaaaaacgtaactctaaaaaaataaaatactaaaaaaaaaaactccgaaaaaaaaaacgacgaaaaaataaaacgataacactttaccaaatacaaaaaaaacaacganaacgaaaaaaaacgaaaaaaaaccgaaaaaacgaaaaaaaaaaaaaacgacaaaaacgatcgaaaaaaaaaacaaaaaataaaacgccgacgaaaacccgcgaaacgccaaaaaaaaaaaacacgacganaaaaaacgaaacaaaaaaaacaaaacgacgaaaaaaaaaaaacgaaaaaaaacgaaaaaaaaaaaaacaaccgaaaaaacgcaacgatccttcctttcctcctttcttcctttccttaaaccctat

SEQ ID NO: 221 - DNA, 526 bp, Artificial Sequence
  unsure (107, 305, 360): chemically treated genomic DNA (Homo sapiens) CpG-island No: 221
attacggaaaaggcgcgagagagtgcgtaaatcgcgataggcgcgacgtagatagataggttatacggtacgacgacgcgaggggacgattcggtcgaggaagacgngcgttatcgcgggtcggcgaggagcggaagggcgggcgtcgtaggtgcgcgttagggagagtatatatcgataggggcgtagcgacgtggtacgtaagagcgacggcggagcgtaaaggtagtttatttcggagttttagagtcgtcggtcgcggagagcgcgacgggtcgcgcggaattaggagggtcgcgttacgnggcggtagaagatcgtttcgtgtcgtttcgaaaaagagggatttttcgcgaaggngtgggtttcggacgaatcgattttcgttgacgagaaagtgcgggatcgatattaaaagggtaaggatcgtttatattaaaggggggtcgggcgaagtcgatgggttaaatgattttttcggggtttttatttcgggaaaagaattcggatttgagggttgggaagg

SEQ ID NO: 222 - DNA, 526 bp, Artificial Sequence
  unsure (167, 222, 420): chemically treated genomic DNA (Homo sapiens) CpG-island No: 222
ccttcccaaccctcaaatccgaattcttttcccgaaataaaaaccccgaaaaaatcatttaacccatcgacttcgcccgacccccctttaatataaacgatccttacccttttaatatcgatcccgcactttctcgtcaacgaaaatcgattcgtccgaaacccacnccttcgcgaaaaatccctctttttcgaaacgacacgaaacgatcttctaccgccncgtaacgcgaccctcctaattccgcgcgacccgtcgcgctctccgcgaccgacgactctaaaactccgaaataaactacctttacgctccgccgtcgctcttacgtaccacgtcgctacgcccctatcgatatatactctccctaacgcgcacctacgacgcccgcccttccgctcctcgccgacccgcgataacgcncgtcttcctcgaccgaatcgtcccctcgcgtcgtcgtaccgtataacctatctatctacgtcgcgcctatcgcgatttacgcactctctcgcgccttttccgtaat

SEQ ID NO: 223 - DNA, 526 bp, Artificial Sequence
  unsure (167, 222, 420): chemically treated genomic DNA (Homo sapiens) CpG-island No: 223
tttttttaatttttaggttcgggtttttttttcggggtgggggtttcgggggggttatttaatttatcggtttcgttcggtttttttttaatgtaagcggtttttgtttttttgatgtcgatttcgtattttttcgttaacgggaatcggttcgttcggggtttatnttttcgcggggggtttttttttttcggggcgatacggagcggttttttgtcgttncgtggcgcggtttttttgatttcgcgcggttcgtcgcgtttttcgcggtcggcggttttgggatttcggggtggattgtttttgcgtttcgtcgtcgtttttgcgtgttacgtcgttgcgtttttgtcggtgtatgttttttttggcgcgtatttacggcgttcgttttttcgtttttcgtcggttcgcggtggcgtncgtttttttcggtcgggtcgttttttcgcgtcgtcgtgtcgtgtggtttgtttgtttgcgtcgcgtttgtcgcggtttgcgtattttttcgcgtttttttcgtgat

SEQ ID NO: 224 - DNA, 526 bp, Artificial Sequence
  unsure (107, 305, 360): chemically treated genomic DNA (Homo sapiens) CpG-island No: 224
atcacgaaaaaaacgcgaaaaaatacgcaaaccgcgacaaacgcgacgcaaacaaacaaaccacacgacacgacgacgcgaaaaaacgacccgaccgaaaaaaacgnacgccaccgcgaaccgacgaaaaacgaaaaaacgaacgccgtaaatacgcgccaaaaaaaacatacaccgacaaaaacgcaacgacgtaacacgcaaaaacgacgacgaaacgcaaaaacaatccaccccgaaatcccaaaaccgccgaccgcgaaaaacgcgacgaaccgcgcgaaatcaaaaaaaccgcgccacgnaacgacaaaaaaccgctccgtatcgccccgaaaaaaaaaaaccccccgcgaaaanataaaccccgaacgaaccgattcccgttaacgaaaaaatacgaaatcgacatcaaaaaaacaaaaaccgcttacattaaaaaaaaaccgaacgaaaccgataaattaaataacccccccgaaacccccaccccgaaaaaaaaacccgaacctaaaaattaaaaaaa

SEQ ID NO: 225 - DNA, 574 bp, Artificial Sequence
  chemically treated genomic DNA (Homo sapiens) CpG-island No: 225
cggttttagagtttttttttacgttgtcggttatggtttgggtagggtcggagtttaggcgggttcgtcggttcggttcgattgcgagcgagggagagaaataaggcgtgaaggaggggtttttttcggtcgtcgtcgtcgtcgtcgtcgtcgtcgtcgtcgtcgtcgtcggttattcgggcggagggaggagcggtcgtggggaggggagtgggcggcgtcgggagtgcgcgggacgcgtttttttagagcgcgcgagttcggggcgggcggggcgcgtttcggaggcggatcggtttattggtaagttcggggaagcggtcggtcgcggtcggattgggtagcgacgattttcgggttatcggtttcgagtagttcgcgtgtttatagttttcggaaagtcgcggttaggtttttgtgttcgtttttttcgtttttacgtcggggcggggcggggttaggttggggcggggtcggcggaatttttgggtttgcgttttttgttggagaaacggggaaaggagcggcggggggttggggagtaggtttaaggtggagtttgcgtagtagttag

SEQ ID NO: 226 - DNA, 574 bp, Artificial Sequence
  chemically treated genomic DNA (Homo sapiens) CpG-island No: 226
ctaactactacgcaaactccaccttaaacctactccccaaccccccgccgctcctttccccgtttctccaacaaaaaacgcaaacccaaaaattccgccgaccccgccccaacctaaccccgccccgccccgacgtaaaaacgaaaaaaacgaacacaaaaacctaaccgcgactttccgaaaactataaacacgcgaactactcgaaaccgataacccgaaaatcgtcgctacccaatccgaccgcgaccgaccgcttccccgaacttaccaataaaccgatccgcctccgaaacgcgccccgcccgccccgaactcgcgcgctctaaaaaaacgcgtcccgcgcactcccgacgccgcccactcccctccccacgaccgctcctccctccgcccgaataaccgacgacgacgacgacgacgacgacgacgacgacgacgacgaccgaaaaaaacccctccttcacgccttatttctctccctcgctcgcaatcgaaccgaaccgacgaacccgcctaaactccgaccctacccaaaccataaccgacaacgtaaaaaaaaactctaaaaccg

SEQ ID NO: 227 - DNA, 574 bp, Artificial Sequence
  chemically treated genomic DNA (Homo sapiens) CpG-island No: 227
ttggttattgcgtagattttattttggatttattttttaatttttcgtcgttttttttttcgtttttttagtagagggcgtaggtttaaaggtttcgtcgatttcgttttagtttggtttcgtttcgtttcggcgtaggggcggggaagacgggtatagaaatttggtcgcggtttttcgggagttgtgggtacgcgagttgttcgaagtcggtggttcggggatcgtcgttgtttagttcggtcgcggtcggtcgttttttcgagtttattagtaagtcggttcgttttcgggacgcgtttcgttcgtttcgggttcgcgcgttttgaaggggcgcgtttcgcgtattttcggcgtcgtttatttttttttttacggtcgttttttttttcgttcggatagtcggcggcggcggcggcggcggcggcggcggcggcggcggcggtcgggagaggttttttttttacgttttgtttttttttttcgttcgtagtcgagtcgagtcggcggattcgtttgggtttcgattttgtttaggttatggtcggtaacgtgaagaagagttttggggtcg

SEQ ID NO: 228 - DNA, 574 bp, Artificial Sequence
  chemically treated genomic DNA (Homo sapiens) CpG-island No: 228
cgaccccaaaactcttcttcacgttaccgaccataacctaaacaaaatcgaaacccaaacgaatccgccgactcgactcgactacgaacgaaaaaaaaaaacaaaacgtaaaaaaaaaacctctcccgaccgccgccgccgccgccgccgccgccgccgccgccgccgccgactatccgaacgaaaaaaaaaacgaccgtaaaaaaaaaaataaacgacgccgaaaatacgcgaaacgcgccccttcaaaacgcgcgaacccgaaacgaacgaaacgcgtcccgaaaacgaaccgacttactaataaactcgaaaaaacgaccgaccgcgaccgaactaaacaacgacgatccccgaaccaccgacttcgaacaactcgcgtacccacaactcccgaaaaaccgcgaccaaatttctatacccgtcttccccgcccctacgccgaaacgaaacgaaaccaaactaaaacgaaatcgacgaaacctttaaacctacgccctctactaaaaaaacgaaaaaaaaaacgacgaaaaattaaaaaataaatccaaaataaaatctacgcaataaccaa

SEQ ID NO: 229 - DNA, 727 bp, Artificial Sequence
  chemically treated genomic DNA (Homo sapiens) CpG-island No: 229
gcggattacgggaaggcggataggatgatgttttatgttttcggttgcgttttattttttattttttggcgcgacgtttaggtcggtttttttcgtcggtattttcgggttcgcgtgtttcgggttgtttttaaagttaggcgtattattcggatttaaaattaagcgttttacggtagtttaagttttcgttttatttttcgtatgtttagttattttgacgcgttttcgggtcggtgcggggtcgggatgtttagcgttgttacggatcggggacggagagtcggggttttttttatttgtttcgggttgcggtattcgcgtttcggttttcggtttcggcggttcgggtcggggcggggtaggggcggggtaggcgaggtaggagggtcggttttcggttcggaggagacggtaaggatggtgagaggcggttggggtcgcgttttgattttgttgggttgtgtatattcgttttttagagtttggtttcggacgatgtgtttttcgagttcgcggggcgattgcgtttttttattagttattgttcgtcggtttcgtcgtttttaaagggttcgcgtcgttcggtagttcgcggggggcgaggacggtaaaggagagagtagcgtttgcggcgcgggggtcggaggaggtgtaggggtgaatttaggattgggggttgatggtaaagggtcgatttggaggtagtgaggaaaggagagttgga

SEQ ID NO: 230 - DNA, 727 bp, Artificial Sequence
  chemically treated genomic DNA (Homo sapiens) CpG-island No: 230
tccaactctcctttcctcactacctccaaatcgaccctttaccatcaacccccaatcctaaattcacccctacacctcctccgacccccgcgccgcaaacgctactctctcctttaccgtcctcgccccccgcgaactaccgaacgacgcgaaccctttaaaaacgacgaaaccgacgaacaataactaataaaaaaacgcaatcgccccgcgaactcgaaaaacacatcgtccgaaaccaaactctaaaaaacgaatatacacaacccaacaaaatcaaaacgcgaccccaaccgcctctcaccatccttaccgtctcctccgaaccgaaaaccgaccctcctacctcgcctaccccgcccctaccccgccccgacccgaaccgccgaaaccgaaaaccgaaacgcgaataccgcaacccgaaacaaataaaaaaaaccccgactctccgtccccgatccgtaacaacgctaaacatcccgaccccgcaccgacccgaaaacgcgtcaaaataactaaacatacgaaaaataaaacgaaaacttaaactaccgtaaaacgcttaattttaaatccgaataatacgcctaactttaaaaacaacccgaaacacgcgaacccgaaaataccgacgaaaaaaaccgacctaaacgtcgcgccaaaaaataaaaaataaaacgcaaccgaaaacataaaacatcatcctatccgccttcccgtaatccgc

SEQ ID NO: 231 - DNA, 727 bp, Artificial Sequence
  chemically treated genomic DNA (Homo sapiens) CpG-island No: 231
tttagtttttttttttttattgtttttaagtcggttttttgttattaatttttagttttgagtttatttttgtatttttttcggttttcgcgtcgtaagcgttgtttttttttttgtcgttttcgtttttcgcgggttgtcgggcggcgcgggttttttaagaacggcgggatcggcgagtagtagttggtaggagagcgtagtcgtttcgcgggttcggaggatatatcgttcgggattaggttttgggaagcgggtgtgtatagtttagtagagttagggcgcgattttaatcgttttttattatttttgtcgtttttttcgagtcgagggtcggtttttttgtttcgtttgtttcgtttttgtttcgtttcggttcgggtcgtcgggatcgggagtcgggacgcgggtgtcgtagttcgaggtaggtaaggggagtttcggtttttcgttttcggttcgtggtagcgttgagtatttcggtttcgtatcggttcgggggcgcgttaaggtgattaggtatgcgggagatggggcgggggtttgagttgtcgtggggcgtttagttttgagttcgggtggtgcgtttggttttggggatagttcggggtacgcgggttcgggggtgtcggcgggaggggtcggtttgggcgtcgcgttaagggatggggagtgggacgtagtcggaggtatgaagtattattttattcgttttttcgtggttcgt

SEQ ID NO: 232 - DNA, 727 bp, Artificial Sequence
  chemically treated genomic DNA (Homo sapiens) CpG-island No: 232
acgaaccacgaaaaaacgaataaaataatacttcatacctccgactacgtcccactccccatcccttaacgcgacgcccaaaccgacccctcccgccgacacccccgaacccgcgtaccccgaactatccccaaaaccaaacgcaccacccgaactcaaaactaaacgccccacgacaactcaaacccccgccccatctcccgcatacctaatcaccttaacgcgcccccgaaccgatacgaaaccgaaatactcaacgctaccacgaaccgaaaacgaaaaaccgaaactccccttacctacctcgaactacgacacccgcgtcccgactcccgatcccgacgacccgaaccgaaacgaaacaaaaacgaaacaaacgaaacaaaaaaaccgaccctcgactcgaaaaaaacgacaaaaataataaaaaacgattaaaatcgcgccctaactctactaaactatacacacccgcttcccaaaacctaatcccgaacgatatatcctccgaacccgcgaaacgactacgctctcctaccaactactactcgccgatcccgccgttcttaaaaaacccgcgccgcccgacaacccgcgaaaaacgaaaacgacaaaaaaaaaaacaacgcttacgacgcgaaaaccgaaaaaaatacaaaaataaactcaaaactaaaaattaataacaaaaaaccgacttaaaaacaataaaaaaaaaaaaactaaa

SEQ ID NO: 233 - DNA, 691 bp, Artificial Sequence
  chemically treated genomic DNA (Homo sapiens) CpG-island No: 233
gacgtttttttgggcgatcgttacgtcgtttagtagtttgttgagtttttcgtcgttgcggatggttagttgtaggtggcgggggatgattcgcgtttttttgttgtcgcgggtcgtattgttcgttagttttaggattttagcggtgaggtattttagtattgtcgttaggtatattggcgcgtcggcgttaacgcgttcggcgtagtggttttttcgtagtagtcggtgtatacggtttattgggaattggaggtcggcgcgcgacgagcgcgatttggttttggcgcgggttttgtcgttagttttgtcgcggttcgatatgttagcgaggtagatcggtgaagtacgacggtttaaatattagaatagacgttcgtcgtagtgtaattgttgtcgcgcgcgcgtcgcgaggtcgtttttataagtttttaggatatatttttgcgtttttttgattggtttttttttttaatattcgttttcggttggttgcggttaatttttgggtgtcgcggttcggttgagggagcgcgttcgttgattggtcgaatttgaaaattttttgttcggggagaaaaggcgaggaggaggggtagtacgtagattgttaattattcgttgatgtagttaatttttgtaaagcgcgcgagatttaaatattataatcggaaattagaagcggaagatt

SEQ ID NO: 234 - DNA, 691 bp, Artificial Sequence
  chemically treated genomic DNA (Homo sapiens) CpG-island No: 234
aatcttccgcttctaatttccgattataatatttaaatctcgcgcgctttacaaaaattaactacatcaacgaataattaacaatctacgtactacccctcctcctcgccttttctccccgaacaaaaaattttcaaattcgaccaatcaacgaacgcgctccctcaaccgaaccgcgacacccaaaaattaaccgcaaccaaccgaaaacgaatattaaaaaaaaaaaccaatcaaaaaaacgcaaaaatatatcctaaaaacttataaaaacgacctcgcgacgcgcgcgcgacaacaattacactacgacgaacgtctattctaatatttaaaccgtcgtacttcaccgatctacctcgctaacatatcgaaccgcgacaaaactaacgacaaaacccgcgccaaaaccaaatcgcgctcgtcgcgcgccgacctccaattcccaataaaccgtatacaccgactactacgaaaaaaccactacgccgaacgcgttaacgccgacgcgccaatatacctaacgacaatactaaaatacctcaccgctaaaatcctaaaactaacgaacaatacgacccgcgacaacaaaaaaacgcgaatcatcccccgccacctacaactaaccatccgcaacgacgaaaaactcaacaaactactaaacgacgtaacgatcgcccaaaaaaacgtc

SEQ ID NO: 235 - DNA, 691 bp, Artificial Sequence
  chemically treated genomic DNA (Homo sapiens) CpG-island No: 235
ggtttttcgtttttggttttcgattgtagtgtttaaatttcgcgcgttttataaggattggttatattagcggatagttggtagtttgcgtgttatttttttttttcgtttttttttttcgggtaaaaggtttttaaattcgattaattagcgggcgcgtttttttagtcgagtcgcgatatttaagggttaatcgtaattaatcggaggcgggtattggagaaaagagttaattaggagggcgtagaggtgtgttttgggggtttataaaggcggtttcgcggcgcgcgcgcgatagtagttatattgcggcgggcgtttgttttagtgtttgagtcgtcgtgttttatcggtttatttcgttagtatgtcgggtcgcggtaagattggcggtaaggttcgcgttaaggttaagtcgcgttcgtcgcgcgtcggtttttagtttttagtgggtcgtgtatatcggttgttgcggaagggttattacgtcgagcgcgttggcgtcggcgcgttagtgtatttggcggtagtgttggagtattttatcgttgagattttggagttggcgggtaatgcggttcgcgataataagaagacgcgaattatttttcgttatttgtagttggttattcgtaacgacgaggagtttaataagttgttgggcggcgtgacgatcgtttagggaggcgtt

SEQ ID NO: 236 - DNA, 691 bp, Artificial Sequence
  chemically treated genomic DNA (Homo sapiens) CpG-island No: 236
aacgcctccctaaacgatcgtcacgccgcccaacaacttattaaactcctcgtcgttacgaataaccaactacaaataacgaaaaataattcgcgtcttcttattatcgcgaaccgcattacccgccaactccaaaatctcaacgataaaatactccaacactaccgccaaatacactaacgcgccgacgccaacgcgctcgacgtaataacccttccgcaacaaccgatatacacgacccactaaaaactaaaaaccgacgcgcgacgaacgcgacttaaccttaacgcgaaccttaccgccaatcttaccgcgacccgacatactaacgaaataaaccgataaaacacgacgactcaaacactaaaacaaacgcccgccgcaatataactactatcgcgcgcgcgccgcgaaaccgcctttataaacccccaaaacacacctctacgccctcctaattaactcttttctccaatacccgcctccgattaattacgattaacccttaaatatcgcgactcgactaaaaaaacgcgcccgctaattaatcgaatttaaaaaccttttacccgaaaaaaaaaaacgaaaaaaaaaaataacacgcaaactaccaactatccgctaatataaccaatccttataaaacgcgcgaaatttaaacactacaatcgaaaaccaaaaacgaaaaacc

SEQ ID NO: 237 - DNA, 938 bp, Artificial Sequence
  chemically treated genomic DNA (Homo sapiens) CpG-island No: 237
gttgttagttttttcggaaagagttgaaggcgaagagtgacgttaggaggtttcggatttttggtttttcggcggcgttagttcgagtcgttcgtagtcgtagtagcgagcgttatacgtttagttttcgtagggaattcgcgggtttttcggttaaggcgggtttcgggtttcggttttcgcgggttcgcgttagttataagtttcgggtatattgtagtagttaggcgaatatcgtgagtagcgaggcggcgaagaggattagtaaggtcgtttagtttacgtttcgttgtttttagttcggatttatgtttcgcgcgggtttcgatttcggtttcggttggggtttagtcgttgtttcgggggagtatggttcgggcgggtcgcggggaggaggtgggttttttcggggttgggcgcgcggggtcgggggtttttcgcgattgagtgtttaggattagtgggtgttatagggcgaggagaggaggttttcgggggtcgcgatgtcggggtttttgttttcgtggttcgggttttttttagtttggttagtagtcggattcgttagtcgtcggttagtgttcgattttttttatcgcgcgggtttcgtcggattttggaggggattggtttgtagagacgttggggttcgcgggtcggtatcggtttcgggagggttgcgtgcgtagagttgatattgataatatcgtcggcgtttcgtttttattcgtttttaaaggagtcgtattcgcgtcgggcggggttaggatagtttggcgttttttcgttggaggagggcgggagggttagtagcgagcggaggaggtttcggggtggaaaataggcgggatttttgattatttcgttttattttgtaatcgcggtgtttttatatttagtttaaggtaagagtaattttatttatttaagatgttgtt

SEQ ID NO: 238 - DNA, 938 bp, Artificial Sequence
  chemically treated genomic DNA (Homo sapiens) CpG-island No: 238
aacaacatcttaaataaataaaattactcttaccttaaactaaatataaaaacaccgcgattacaaaataaaacgaaataatcaaaaatcccgcctattttccaccccgaaacctcctccgctcgctactaaccctcccgccctcctccaacgaaaaaacgccaaactatcctaaccccgcccgacgcgaatacgactcctttaaaaacgaataaaaacgaaacgccgacgatattatcaatatcaactctacgcacgcaaccctcccgaaaccgataccgacccgcgaaccccaacgtctctacaaaccaatcccctccaaaatccgacgaaacccgcgcgataaaaaaaatcgaacactaaccgacgactaacgaatccgactactaaccaaactaaaaaaaacccgaaccacgaaaacaaaaaccccgacatcgcgacccccgaaaacctcctctcctcgccctataacacccactaatcctaaacactcaatcgcgaaaaacccccgaccccgcgcgcccaaccccgaaaaaacccacctcctccccgcgacccgcccgaaccatactcccccgaaacaacgactaaaccccaaccgaaaccgaaatcgaaacccgcgcgaaacataaatccgaactaaaaacaacgaaacgtaaactaaacgaccttactaatcctcttcgccgcctcgctactcacgatattcgcctaactactacaatatacccgaaacttataactaacgcgaacccgcgaaaaccgaaacccgaaacccgccttaaccgaaaaacccgcgaattccctacgaaaactaaacgtataacgctcgctactacgactacgaacgactcgaactaacgccgccgaaaaaccaaaaatccgaaacctcctaacgtcactcttcgccttcaactctttccgaaaaaactaacaac

SEQ ID NO: 239 - DNA, 938 bp, Artificial Sequence
  chemically treated genomic DNA (Homo sapiens) CpG-island No: 239
ggtagtattttaggtaagtgaagttatttttgttttgagttgagtgtgggagtatcgcgattgtaagatggggcgaggtgattaaagatttcgtttattttttatttcggaatttttttcgttcgttgttagttttttcgtttttttttagcgagggagcgttaggttgttttggtttcgttcggcgcgggtgcggtttttttaagggcgggtgggggcggggcgtcggcggtgttgttagtgttagttttgcgtacgtagttttttcggagtcggtgtcggttcgcgagttttagcgtttttgtagattagttttttttagggttcggcggggttcgcgcggtgggaggagtcgggtattggtcggcgattaacgggttcgattgttgattaagttaggagagattcggattacggagatagagatttcggtatcgcgattttcgaggatttttttttttcgttttgtggtatttattagttttgggtatttagtcgcggagagttttcgatttcgcgcgtttagtttcgggggagtttatttttttttcgcggttcgttcgggttatgttttttcggggtagcggttgagttttagtcgggatcgggatcggagttcgcgcggagtatggattcgggttgggggtagcgggacgtgggttgggcggttttgttgatttttttcgtcgtttcgttgtttacggtgttcgtttggttgttgtaatatgttcggggtttgtggttggcgcgggttcgcggggatcggggttcgggattcgttttagtcggggaattcgcgggttttttgcgggagttgggcgtgtggcgttcgttgttgcggttgcgggcgattcgggttggcgtcgtcgaggagttaggagttcggggttttttggcgttatttttcgtttttaatttttttcgggagaattggtagt

SEQ ID NO: 240 - DNA, 938 bp, Artificial Sequence
  chemically treated genomic DNA (Homo sapiens) CpG-island No: 240
actaccaattctcccgaaaaaaattaaaaacgaaaaataacgccaaaaaaccccgaactcctaactcctcgacgacgccaacccgaatcgcccgcaaccgcaacaacgaacgccacacgcccaactcccgcaaaaaacccgcgaattccccgactaaaacgaatcccgaaccccgatccccgcgaacccgcgccaaccacaaaccccgaacatattacaacaaccaaacgaacaccgtaaacaacgaaacgacgaaaaaaatcaacaaaaccgcccaacccacgtcccgctacccccaacccgaatccatactccgcgcgaactccgatcccgatcccgactaaaactcaaccgctaccccgaaaaaacataacccgaacgaaccgcgaaaaaaaaataaactcccccgaaactaaacgcgcgaaatcgaaaactctccgcgactaaatacccaaaactaataaataccacaaaacgaaaaaaaaaaatcctcgaaaatcgcgataccgaaatctctatctccgtaatccgaatctctcctaacttaatcaacaatcgaacccgttaatcgccgaccaatacccgactcctcccaccgcgcgaaccccgccgaaccctaaaaaaaactaatctacaaaaacgctaaaactcgcgaaccgacaccgactccgaaaaaactacgtacgcaaaactaacactaacaacaccgccgacgccccgcccccacccgcccttaaaaaaaccgcacccgcgccgaacgaaaccaaaacaacctaacgctccctcgctaaaaaaaaacgaaaaaactaacaacgaacgaaaaaaattccgaaataaaaaataaacgaaatctttaatcacctcgccccatcttacaatcgcgatactcccacactcaactcaaaacaaaaataacttcacttacctaaaatactacc

SEQ ID NO: 241 - DNA, 530 bp, Artificial Sequence
  unsure (234): chemically treated genomic DNA (Homo sapiens) CpG-island No: 241
tagggaggggggacgatggcgggacgggtggcgtcggggttttagttttgcgtttgtttcggagtatcgggtttttttcgttgattttttcgttttaggatttcgtaggttcgagtgtttgggttcgttttttttcgcgttcgttgttaggtgttagggtcgcgtaggcgggcggaggtgggtaggaagcgttacgtcgaggagtcgggattttgggagttagcgggagacgtnggtttcgttttaagtcgatttttttgggtcgcggttgacggttttcggaattgggtattcgcgggtaaaggtttagcgggtttgataatttttgcgttatggttgggaggtcgcgttgagcggggggtagggcgggtcgggggaggaggttgtgtaagggtcgcggggagatttcggtcgagaacgagagggacggagttgggcgttgaatggcgggcgttttggtaagtttttttttgcgttttcgaggttattcgaaagtaggagagttgtttgggatttagtttggtggagga

SEQ ID NO: 242 - DNA, 530 bp, Artificial Sequence
  unsure (297): chemically treated genomic DNA (Homo sapiens) CpG-island No: 242
tcctccaccaaactaaatcccaaacaactctcctactttcgaataacctcgaaaacgcaaaaaaaaacttaccaaaacgcccgccattcaacgcccaactccgtccctctcgttctcgaccgaaatctccccgcgacccttacacaacctcctcccccgacccgccctaccccccgctcaacgcgacctcccaaccataacgcaaaaattatcaaacccgctaaacctttacccgcgaatacccaattccgaaaaccgtcaaccgcgacccaaaaaaatcgacttaaaacgaaaccnacgtctcccgctaactcccaaaatcccgactcctcgacgtaacgcttcctacccacctccgcccgcctacgcgaccctaacacctaacaacgaacgcgaaaaaaaacgaacccaaacactcgaacctacgaaatcctaaaacgaaaaaatcaacgaaaaaaacccgatactccgaaacaaacgcaaaactaaaaccccgacgccacccgtcccgccatcgtcccccctcccta

SEQ ID NO: 243 - DNA, 530 bp, Artificial Sequence
  unsure (297): chemically treated genomic DNA (Homo sapiens) CpG-island No: 243
ttttttattaaattgggttttaaatagtttttttattttcgggtggtttcgggaacgtagggggagatttgttagaacgttcgttatttagcgtttagtttcgtttttttcgttttcggtcgggattttttcgcggtttttgtatagttttttttttcggttcgttttgtttttcgtttagcgcggttttttagttatggcgtaagggttattaagttcgttaggtttttattcgcggatgtttagtttcgggagtcgttagtcgcggtttagaggggtcggtttgggacgaaattngcgtttttcgttagtttttagagtttcggtttttcggcgtggcgttttttgtttattttcgttcgtttgcgcggttttggtatttggtagcgggcgcgaaagaggacgagtttaggtattcgggtttgcggggttttgggacgagggggttagcgagaggggttcggtgtttcggagtaggcgtagggttggaatttcggcgttattcgtttcgttatcgttttttttttttg

SEQ ID NO: 244 - DNA, 530 bp, Artificial Sequence
  unsure (234): chemically treated genomic DNA (Homo sapiens) CpG-island No: 244
caaaaaaaaaaaacgataacgaaacgaataacgccgaaattccaaccctacgcctactccgaaacaccgaacccctctcgctaaccccctcgtcccaaaaccccgcaaacccgaatacctaaactcgtcctctttcgcgcccgctaccaaataccaaaaccgcgcaaacgaacgaaaataaacaaaaaacgccacgccgaaaaaccgaaactctaaaaactaacgaaaaacgcnaatttcgtcccaaaccgacccctctaaaccgcgactaacgactcccgaaactaaacatccgcgaataaaaacctaacgaacttaataacccttacgccataactaaaaaaccgcgctaaacgaaaaacaaaacgaaccgaaaaaaaaaactatacaaaaaccgcgaaaaaatcccgaccgaaaacgaaaaaaacgaaactaaacgctaaataacgaacgttctaacaaatctccccctacgttcccgaaaccacccgaaaataaaaaaactatttaaaacccaatttaataaaaaa

SEQ ID NO: 245 - DNA, 940 bp, Artificial Sequence
  chemically treated genomic DNA (Homo sapiens) CpG-island No: 245
tagttgtcggcgcggtgtttagggcggtatttcgttcggttttggtttttttagttttgggttcgatttttattacgtttttgtttcgacgcgaacgcggagttcgagcgcgcgttacgtcgtgtggggtcgaagaggttgttatttatacgcggagtgcgggttcgcgagggtttttattcgattttcgttttcgttagtatttacggattcgcgttttcgtcgcgcgtcgattttggagtattatcgttttcggtatacgagtttcgtacgttttttatttaataggaagttgggtggaagtagcgcggatttacggcgtatcgaacgtattttaatagaattcgacgtagatacgcgtttttaatcggcggagatattggtagggttagaaacgcgcgtagcgggggcgggaggtcggtaagtttttcgtttttgttcgaaatttcgtttcggttcggttcggtttcgtttttttttttgttttttttttttgtacgtacgcgtttcgtttttcgcgcgacgttttttgttgattcggaaacggattattcggagttaaggttcgttcgggtgagtgtttttcgttttttgtggttaaatttagttacgtagttttttttttgcggcgttttttatattcggggtttgttggttttcgcggatgttataggttcggtaatcgtttttttgtcggcggggagtttcgagacgttcggaaatgtttcgaagtttgtcgtttagttgttagatttgcgtttgtgttcggtttcgttattgaagtcgtttttgttcggttttttttttttagttttttttatcgttcgtttattttgtcgcgcgtcgcgttaggtttttattcggtatgtggtttgttttttatcgtttttattttcgttttttttggttttttagggtagttttgggattcggtagacgt

SEQ ID NO: 246 - DNA, 940 bp, Artificial Sequence
  chemically treated genomic DNA (Homo sapiens) CpG-island No: 246
acgtctaccgaatcccaaaactaccctaaaaaaccaaaaaaaacgaaaataaaaacgataaaaaacaaaccacataccgaataaaaacctaacgcgacgcgcgacaaaataaacgaacgataaaaaaaactaaaaaaaaaaaaccgaacaaaaacgacttcaataacgaaaccgaacacaaacgcaaatctaacaactaaacgacaaacttcgaaacatttccgaacgtctcgaaactccccgccgacaaaaaaacgattaccgaacctataacatccgcgaaaaccaacaaaccccgaatataaaaaacgccgcaaaaaaaaaactacgtaactaaatttaaccacaaaaaacgaaaaacactcacccgaacgaaccttaactccgaataatccgtttccgaatcaacaaaaaacgtcgcgcgaaaaacgaaacgcgtacgtacaaaaaaaaaaaacaaaaaaaaaaacgaaaccgaaccgaaccgaaacgaaatttcgaacaaaaacgaaaaacttaccgacctcccgcccccgctacgcgcgtttctaaccctaccaatatctccgccgattaaaaacgcgtatctacgtcgaattctattaaaatacgttcgatacgccgtaaatccgcgctacttccacccaacttcctattaaataaaaaacgtacgaaactcgtataccgaaaacgataatactccaaaatcgacgcgcgacgaaaacgcgaatccgtaaatactaacgaaaacgaaaatcgaataaaaaccctcgcgaacccgcactccgcgtataaataacaacctcttcgaccccacacgacgtaacgcgcgctcgaactccgcgttcgcgtcgaaacaaaaacgtaataaaaatcgaacccaaaactaaaaaaaccaaaaccgaacgaaataccgccctaaacaccgcgccgacaacta

SEQ ID NO: 247 - DNA, 940 bp, Artificial Sequence
  chemically treated genomic DNA (Homo sapiens) CpG-island No: 247
gcgtttgtcgaattttagggttgttttgaggggttaagaggggcgagggtggggacgatggaagataagttatatgtcgaatggggatttgacgcggcgcgcgataggatgggcggacggtgaagagaattagggaggaagggtcggataggggcgattttagtgacggaatcggatatagacgtagatttggtagttgagcgataggtttcggagtattttcgggcgtttcgggatttttcgtcgataggagggcggttgtcgagtttgtgatattcgcggagattagtagatttcgggtgtggaggacgtcgtagggaggggattgcgtggttgggtttggttataaaaagcggagggtatttattcgagcggattttggtttcggataattcgttttcgggttaataaaaaacgtcgcgcgaggggcggggcgcgtacgtgtagggaggggaggtagagaaaaaggcggggtcgggtcgggtcggggcggggtttcgggtaggggcggggagtttatcgatttttcgttttcgttgcgcgcgtttttggttttgttagtgttttcgtcggttgaaagcgcgtgtttgcgtcgggttttgttggagtgcgttcgatgcgtcgtgggttcgcgttgtttttatttaattttttgttaggtaagaggcgtgcgaggttcgtgtgtcgggggcggtgatgttttagagtcggcgcgcggcggggacgcgagttcgtaggtgttggcgggagcgagagtcgggtggggattttcgcgagttcgtatttcgcgtgtgggtagtagttttttcggttttatacggcgtgacgcgcgttcgggtttcgcgttcgcgtcgaggtagaggcgtagtaggggtcgggtttagggttggaggggttaggatcgggcggggtgtcgttttggatatcgcgtcggtagttg

SEQ ID NO: 248 - DNA, 940 bp, Artificial Sequence
  chemically treated genomic DNA (Homo sapiens) CpG-island No: 248
caactaccgacgcgatatccaaaacgacaccccgcccgatcctaacccctccaaccctaaacccgacccctactacgcctctacctcgacgcgaacgcgaaacccgaacgcgcgtcacgccgtataaaaccgaaaaaactactacccacacgcgaaatacgaactcgcgaaaatccccacccgactctcgctcccgccaacacctacgaactcgcgtccccgccgcgcgccgactctaaaacatcaccgcccccgacacacgaacctcgcacgcctcttacctaacaaaaaattaaataaaaacaacgcgaacccacgacgcatcgaacgcactccaacaaaacccgacgcaaacacgcgctttcaaccgacgaaaacactaacaaaaccaaaaacgcgcgcaacgaaaacgaaaaatcgataaactccccgcccctacccgaaaccccgccccgacccgacccgaccccgcctttttctctacctcccctccctacacgtacgcgccccgcccctcgcgcgacgttttttattaacccgaaaacgaattatccgaaaccaaaatccgctcgaataaataccctccgctttttataaccaaacccaaccacgcaatcccctccctacgacgtcctccacacccgaaatctactaatctccgcgaatatcacaaactcgacaaccgccctcctatcgacgaaaaatcccgaaacgcccgaaaatactccgaaacctatcgctcaactaccaaatctacgtctatatccgattccgtcactaaaatcgcccctatccgacccttcctccctaattctcttcaccgtccgcccatcctatcgcgcgccgcgtcaaatccccattcgacatataacttatcttccatcgtccccaccctcgcccctcttaacccctcaaaacaaccctaaaattcgacaaacgc

SEQ ID NO: 249 - DNA, 726 bp, Artificial Sequence
  chemically treated genomic DNA (Homo sapiens) CpG-island No: 249
tcgtttcgatttgtttagttttgtcgcgggtggggaggtttcgacgtatttttcgttcgatcgttttagtttatttattttcgggcgcggtaggtcggggtttagttgcgtgaagttgtgtagtattatcgggtagttgtcggggacgtttatttttaggcgtacggcgttttatacgttgcggtttcgtcgggagttcggaaatagcggttcggcgtcgttagtaggttcggtcgtttcggtttatatgcgttgtattatggaaggttcgtagcgcgggcgcggggtcggttcggcgcgcggcgggggcggcggcgcggttcgcgcggttgggttttgttatcgttgtgagttcgcggttcggttttgttgatgttaggttggggggcggggtcggaggggaagagggtggggtcggggaggggcggaatcggagagttcgagggacgcgtgcgtgcgcgcgttcgcggtttcgttttcgtcgaggttagattcggggcgggatcgggagtttggaggggcggggtttgaataaagagggcggggtcggggaggtcgaggggtgcgcgttggttgggtttttcggaggatcggttgttacgtgtgtcgtggggttttgggtatttcggttaggtatcgtttgcgtgttacgttgttgtagtgcgtgtgttgcgtagggttgaaatgtgtacgtgttgattatgtgtggggaagtcgttttggagt

SEQ ID NO: 250 - DNA, 726 bp, Artificial Sequence
  chemically treated genomic DNA (Homo sapiens) CpG-island No: 250
actccaaaacgacttccccacacataatcaacacgtacacatttcaaccctacgcaacacacgcactacaacaacgtaacacgcaaacgatacctaaccgaaatacccaaaaccccacgacacacgtaacaaccgatcctccgaaaaacccaaccaacgcgcacccctcgacctccccgaccccgccctctttattcaaaccccgcccctccaaactcccgatcccgccccgaatctaacctcgacgaaaacgaaaccgcgaacgcgcgcacgcacgcgtccctcgaactctccgattccgcccctccccgaccccaccctcttcccctccgaccccgccccccaacctaacatcaacaaaaccgaaccgcgaactcacaacgataacaaaacccaaccgcgcgaaccgcgccgccgcccccgccgcgcgccgaaccgaccccgcgcccgcgctacgaaccttccataatacaacgcatataaaccgaaacgaccgaacctactaacgacgccgaaccgctatttccgaactcccgacgaaaccgcaacgtataaaacgccgtacgcctaaaaataaacgtccccgacaactacccgataatactacacaacttcacgcaactaaaccccgacctaccgcgcccgaaaataaataaactaaaacgatcgaacgaaaaatacgtcgaaacctccccacccgcgacaaaactaaacaaatcgaaacga

SEQ ID NO: 251 - DNA, 726 bp, Artificial Sequence
  chemically treated genomic DNA (Homo sapiens) CpG-island No: 251
attttagggcggtttttttatatatgattagtacgtatatattttagttttacgtaatatacgtattgtagtagcgtgatacgtaaacggtgtttaatcggggtatttaaggttttacgatatacgtgatagtcggtttttcgggagatttagttaacgcgtatttttcgattttttcggtttcgttttttttgtttagatttcgtttttttaggttttcggtttcgtttcgggtttgatttcggcgagggcggggtcgcgggcgcgcgtacgtacgcgtttttcggatttttcggtttcgttttttttcggttttatttttttttttttcggtttcgttttttagtttgatattagtagggtcgggtcgcgggtttatagcggtggtaaagtttagtcgcgcgggtcgcgtcgtcgttttcgtcgcgcgtcgggtcggtttcgcgttcgcgttgcgagttttttatggtgtagcgtatgtgggtcgaggcggtcgggtttgttggcggcgtcgagtcgttgttttcgggttttcggcggagtcgtagcgtgtgggacgtcgtgcgtttggaggtgggcgttttcgatagttgttcggtggtgttgtatagttttacgtagttagatttcgatttgtcgcgttcggaggtgggtgagttggggcggtcgggcggggggtgcgtcggagtttttttattcgcggtagagttgggtaggtcggggcga

SEQ ID NO: 252 - DNA, 726 bp, Artificial Sequence
  chemically treated genomic DNA (Homo sapiens) CpG-island No: 252
tcgccccgacctacccaactctaccgcgaataaaaaaactccgacgcaccccccgcccgaccgccccaactcacccacctccgaacgcgacaaatcgaaatctaactacgtaaaactatacaacaccaccgaacaactatcgaaaacgcccacctccaaacgcacgacgtcccacacgctacgactccgccgaaaacccgaaaacaacgactcgacgccgccaacaaacccgaccgcctcgacccacatacgctacaccataaaaaactcgcaacgcgaacgcgaaaccgacccgacgcgcgacgaaaacgacgacgcgacccgcgcgactaaactttaccaccgctataaacccgcgacccgaccctactaatatcaaactaaaaaacgaaaccgaaaaaaaaaaaaataaaaccgaaaaaaaacgaaaccgaaaaatccgaaaaacgcgtacgtacgcgcgcccgcgaccccgccctcgccgaaatcaaacccgaaacgaaaccgaaaacctaaaaaaacgaaatctaaacaaaaaaaacgaaaccgaaaaaatcgaaaaatacgcgttaactaaatctcccgaaaaaccgactatcacgtatatcgtaaaaccttaaataccccgattaaacaccgtttacgtatcacgctactacaatacgtatattacgtaaaactaaaatatatacgtactaatcatatataaaaaaaccgccctaaaat

SEQ ID NO: 253 - DNA, 640 bp, Artificial Sequence
  chemically treated genomic DNA (Homo sapiens) CpG-island No: 253
agatcgttacggcgtcgagggatttcgtttttattaggattcggggatttcggagacgagtttttcgttaggtcgcgttatcgcgtttattttttttgcgggttttaggtatttatagcgcggtcgagtttatttgttcgtcggttttttaggacgtagggtttcggaggttggggcggcggtcggtttgaagtttcgtagttttgggcgtttttatttcggttcggttgtcgggtgtatttcgtattttttgcggtagcggttttttcgcgggtattcggggtcgaggtttgtatttatcggttagcgttcgtaatatttcggttatggtttcgcgtttggtttcggttttcgtttttcgttcggcggttttggggcggggtgagttcgaggcgttttttttcggttcgcgtcgttcgtcgtttcgatttttcgaggtcgaatacgggaggggatagaggggcgcgggaggcggtcgcgggtttttagggatttttgttaggaagggacggcgttttttcgcgcgtatttttaagggattcgcgcgtttttcgtggttttggtattttggggttttgttttcgtatttcgttttggggtcgagcggtttcgggtgtttttgaagtttcgttttcggggg

SEQ ID NO: 254 - DNA, 640 bp, Artificial Sequence
  chemically treated genomic DNA (Homo sapiens) CpG-island No: 254
cccccgaaaacgaaacttcaaaaacacccgaaaccgctcgaccccaaaacgaaatacgaaaacaaaaccccaaaataccaaaaccacgaaaaacgcgcgaatcccttaaaaatacgcgcgaaaaaacgccgtcccttcctaacaaaaatccctaaaaacccgcgaccgcctcccgcgcccctctatcccctcccgtattcgacctcgaaaaatcgaaacgacgaacgacgcgaaccgaaaaaaaacgcctcgaactcaccccgccccaaaaccgccgaacgaaaaacgaaaaccgaaaccaaacgcgaaaccataaccgaaatattacgaacgctaaccgataaatacaaacctcgaccccgaatacccgcgaaaaaaccgctaccgcaaaaaatacgaaatacacccgacaaccgaaccgaaataaaaacgcccaaaactacgaaacttcaaaccgaccgccgccccaacctccgaaaccctacgtcctaaaaaaccgacgaacaaataaactcgaccgcgctataaatacctaaaacccgcaaaaaaaataaacgcgataacgcgacctaacgaaaaactcgtctccgaaatccccgaatcctaataaaaacgaaatccctcgacgccgtaacgatct

SEQ ID NO: 255 - DNA, 640 bp, Artificial Sequence
  chemically treated genomic DNA (Homo sapiens) CpG-island No: 255
ttttcggggacggggttttaggggtattcggagtcgttcggttttagggcgggatgcggggatagggttttaaggtattagggttacgaggggcgcgcgggttttttggggatgcgcgcgaggaggcgtcgtttttttttagtaggggtttttggggattcgcggtcgtttttcgcgtttttttgttttttttcgtgttcggtttcgggaagtcggggcggcgggcggcgcgggtcgggagggggcgtttcgggtttatttcgttttagggtcgtcgggcggaaggcggaggtcgagattagacgcggagttatggtcgaggtgttgcggacgttggtcggtgagtgtaggtttcggtttcgggtgttcgcgagggagtcgttatcgtagggaatgcggggtgtattcgatagtcgggtcggggtgggggcgtttagggttgcgaggttttaggtcggtcgtcgttttagttttcgagattttgcgttttggggagtcggcgggtaggtgggttcggtcgcgttgtgggtgtttgggattcgtagggaggatgggcgcggtggcgcggtttggcggggggttcgttttcggggttttcgggttttggtgagagcggggtttttcgacgtcgtggcggttt

SEQ ID NO: 256 - DNA, 640 bp, Artificial Sequence
  chemically treated genomic DNA (Homo sapiens) CpG-island No: 256
aaaccgccacgacgtcgaaaaaccccgctctcaccaaaacccgaaaaccccgaaaacgaaccccccgccaaaccgcgccaccgcgcccatcctccctacgaatcccaaacacccacaacgcgaccgaacccacctacccgccgactccccaaaacgcaaaatctcgaaaactaaaacgacgaccgacctaaaacctcgcaaccctaaacgcccccaccccgacccgactatcgaatacaccccgcattccctacgataacgactccctcgcgaacacccgaaaccgaaacctacactcaccgaccaacgtccgcaacacctcgaccataactccgcgtctaatctcgacctccgccttccgcccgacgaccctaaaacgaaataaacccgaaacgccccctcccgacccgcgccgcccgccgccccgacttcccgaaaccgaacacgaaaaaaaacaaaaaaacgcgaaaaacgaccgcgaatccccaaaaacccctactaaaaaaaaacgacgcctcctcgcgcgcatccccaaaaaacccgcgcgcccctcgtaaccctaataccttaaaaccctatccccgcatcccgccctaaaaccgaacgactccgaatacccctaaaaccccgtccccgaaaa

SEQ ID NO: 257 - DNA, 1757 bp, Artificial Sequence
  chemically treated genomic DNA (Homo sapiens) CpG-island No: 257
cgtggagttgtacgttattatgtggaagttcgattcggatagtttgtcgaaggtttgttttaggaagttgaatttgaggtaatagcgcgaggtgtagcgtttcgggggacggtcggggtttcggttttcgtttagggtgtttttaaatatttttttggttagcgacgttttttcgtaaacggtgatgcgcgttattcgtcggaatttggcgttcgtttgcgcgtttcgttcgatggtgtaggagtcgcggtagtcgatggtgatgtagttcgagcgtcggttgtcgtttagcgattgggacggcgtgagtagcgggttcgtcgcgttttcggacggattgcggttagttagttttagcgtgggcgacggcgtttcggtagaggcgtttttttgttgttcgggtttcgagtagttaagcggtagtagttcgttatttagcgagttttttttgtgtatttcgcgtcgcgagggcggcggtttcgggtcgggttgttggggcgtttcgaggcggcgtacgagttttggtagttcgaagtattcggtttcgcgttgtagtcggttgcgttcggggaagtagtcgggtagtacgagttgtaagtttcgtaggtaatttaggatgtagcggaagaggaagtcgtttcggtttagaaagaagcggtttttgttgtttcgggttagtttttgcggttgttgttgcgtgaatatgcgttagagtagcgagtcgggtatcgatattatcgtgtagcgtcgggttacgtatatttggttttttacgtttagttttacgatgtcggggaagagcggtggtttcgcggaggacgacgaggagttattgtcgttttcgtcgtcgttttcgttgggtaatttacgtgtgttgttcgttagagttatgatagagaggtggtcgggtcgggatagtggtaggaagtcgcgttgtatttaggagttgtaatcgtttttttcggagtttcggaattcggacgttcgtttagttttgcgtttcgtcgtcgtcgtcgtcgttatcgtcgttatcgttatcgtcgttattttttagagtcgcgcggagtcgagcggtgcgagcgcgtcgttgtgcgtttttttgagttttagtgcgtttcgttcgttttgttcgcgcgttttaggcgagtgtcgggtcgcggttcgcgcgttgtttaagtagagtcgtttgttttggtgtcgtggcgcgtaggaggcgtgggcggcggcggagtttcgtttatcgggcgaggggaggtggggagcggggattcgatttgtattttaaacgcggacgttacgcggggttgttggttttatttcggttcgcgagcgttgggggcgttcggatttttattcgttttttatttattagtttcgtttcgtggtttcgtttaattttttttttttttcgaagaggattcgttcgagatttggcggtttcggaagatagttttttggagggatagttatcgcgtttttttttttttcgttttagttcgtatttaaggattttggaaggaggacgtgaattttcggaagtttgtcgtttcgggagtggaaatgcgtggtcgttttcggttttttcgtttgcggaattgggcgtttttagtagtgtagttgcggtttgttatcgttggttgtcgtgttattgaaagtagagagacgcgaaaaatttggagagacgaaagagtcgttttagttcgagcgtagttagattttgtttaagttgttttgtagttagtttggaaaataaataa

SEQ ID NO: 258 - DNA, 1757 bp, Artificial Sequence
  chemically treated genomic DNA (Homo sapiens) CpG-island No: 258
ttatttattttccaaactaactacaaaacaacttaaacaaaatctaactacgctcgaactaaaacgactctttcgtctctccaaatttttcgcgtctctctactttcaataacacgacaaccaacgataacaaaccgcaactacactactaaaaacgcccaattccgcaaacgaaaaaaccgaaaacgaccacgcatttccactcccgaaacgacaaacttccgaaaattcacgtcctccttccaaaatccttaaatacgaactaaaacgaaaaaaaaaaaaacgcgataactatccctccaaaaaactatcttccgaaaccgccaaatctcgaacgaatcctcttcgaaaaaaaaaaaaaattaaacgaaaccacgaaacgaaactaataaataaaaaacgaataaaaatccgaacgcccccaacgctcgcgaaccgaaataaaaccaacaaccccgcgtaacgtccgcgtttaaaatacaaatcgaatccccgctccccacctcccctcgcccgataaacgaaactccgccgccgcccacgcctcctacgcgccacgacaccaaaacaaacgactctacttaaacaacgcgcgaaccgcgacccgacactcgcctaaaacgcgcgaacaaaacgaacgaaacgcactaaaactcaaaaaaacgcacaacgacgcgctcgcaccgctcgactccgcgcgactctaaaaaataacgacgataacgataacgacgataacgacgacgacgacgacgaaacgcaaaactaaacgaacgtccgaattccgaaactccgaaaaaaacgattacaactcctaaatacaacgcgacttcctaccactatcccgacccgaccacctctctatcataactctaacgaacaacacacgtaaattacccaacgaaaacgacgacgaaaacgacaataactcctcgtcgtcctccgcgaaaccaccgctcttccccgacatcgtaaaactaaacgtaaaaaaccaaatatacgtaacccgacgctacacgataatatcgatacccgactcgctactctaacgcatattcacgcaacaacaaccgcaaaaactaacccgaaacaacaaaaaccgcttctttctaaaccgaaacgacttcctcttccgctacatcctaaattacctacgaaacttacaactcgtactacccgactacttccccgaacgcaaccgactacaacgcgaaaccgaatacttcgaactaccaaaactcgtacgccgcctcgaaacgccccaacaacccgacccgaaaccgccgccctcgcgacgcgaaatacacaaaaaaaactcgctaaataacgaactactaccgcttaactactcgaaacccgaacaacaaaaaaacgcctctaccgaaacgccgtcgcccacgctaaaactaactaaccgcaatccgtccgaaaacgcgacgaacccgctactcacgccgtcccaatcgctaaacgacaaccgacgctcgaactacatcaccatcgactaccgcgactcctacaccatcgaacgaaacgcgcaaacgaacgccaaattccgacgaataacgcgcatcaccgtttacgaaaaaacgtcgctaaccaaaaaaatatttaaaaacaccctaaacgaaaaccgaaaccccgaccgtcccccgaaacgctacacctcgcgctattacctcaaattcaacttcctaaaacaaaccttcgacaaactatccgaatcgaacttccacataataacgtacaactccacg

SEQ ID NO: 259 - DNA, 1757 bp, Artificial Sequence
  chemically treated genomic DNA (Homo sapiens) CpG-island No: 259
ttatttattttttaggttggttgtaaggtaatttgaataaaatttggttgcgttcggattggggcggttttttcgtttttttaggtttttcgcgtttttttatttttagtgatacgataattaacgatggtaggtcgtagttgtattgttggaagcgtttagtttcgtaggcgggagggtcggaggcggttacgtatttttattttcggggcgataggttttcgaaagtttacgttttttttttagagtttttgggtgcgggttggggcgagaggggagggggcgcggtgattgtttttttaaggagttgtttttcgaagtcgttaagtttcgggcgggtttttttcggaagagggagaaagttgggcgggattacggggcggggttggtgggtggggagcgggtgggagttcgggcgtttttagcgttcgcgagtcggggtggagttagtagtttcgcgtggcgttcgcgtttaagatgtaaatcgagttttcgttttttattttttttcgttcggtaagcgaggtttcgtcgtcgtttacgttttttgcgcgttacggtattagagtaggcggttttatttaagtagcgcgcgggtcgcgattcggtattcgtttggagcgcgcgggtaaggcgggcggagcgtattggaatttaagggggcgtatagcggcgcgttcgtatcgttcggtttcgcgcggttttaggaggtggcggcggtggcggtggcggcggtggcggcggcggcggcggcggggcgtagggttgagcgagcgttcgggtttcggggtttcggggaaggcggttgtagtttttgagtgtagcgcggttttttgttattgtttcggttcggttatttttttgttatggttttggcggatagtatacgtggattatttaacgggggcggcggcgggggcggtagtggtttttcgtcgtttttcgcggagttatcgttttttttcgatatcgtggagttgaacgtggggggttaggtgtacgtgattcggcgttgtacggtggtgtcggtgttcgattcgttgttttggcgtatgtttacgtagtagtagtcgtaggagttggttcgggatagtaaaggtcgtttttttttggatcgggacggttttttttttcgttatattttggattatttgcgggatttgtagttcgtgttgttcgattattttttcgagcgtagtcggttgtagcgcgaggtcgagtatttcgagttgttagagttcgtgcgtcgtttcggggcgttttagtagttcggttcggggtcgtcgttttcgcggcgcggggtgtataaggagggttcgttgggtgacgagttgttgtcgtttggttattcggagttcgaatagtaggagggcgtttttgtcggggcgtcgtcgtttacgttggagttggttagtcgtagttcgttcgggggcgcggcgggttcgttgtttacgtcgttttagtcgttggacggtagtcggcgttcgggttatattattatcggttatcgcggtttttatattatcgggcgggacgcgtaggcggacgttaagtttcggcgagtggcgcgtattatcgtttgcggaaagacgtcgttggttaaggaggtgtttggggatattttgaacgaaagtcgggatttcgatcgtttttcggagcgttatatttcgcgttattattttaagtttaattttttggagtaggttttcgataagttgttcgagtcgggtttttatatggtggcgtgtagttttacg

SEQ ID NO: 260 - DNA, 1757 bp, Artificial Sequence
  chemically treated genomic DNA (Homo sapiens) CpG-island No: 260
cgtaaaactacacgccaccatataaaaacccgactcgaacaacttatcgaaaacctactccaaaaaattaaacttaaaataataacgcgaaatataacgctccgaaaaacgatcgaaatcccgactttcgttcaaaatatccccaaacacctccttaaccaacgacgtctttccgcaaacgataatacgcgccactcgccgaaacttaacgtccgcctacgcgtcccgcccgataatataaaaaccgcgataaccgataataatataacccgaacgccgactaccgtccaacgactaaaacgacgtaaacaacgaacccgccgcgcccccgaacgaactacgactaaccaactccaacgtaaacgacgacgccccgacaaaaacgccctcctactattcgaactccgaataaccaaacgacaacaactcgtcacccaacgaaccctccttatacaccccgcgccgcgaaaacgacgaccccgaaccgaactactaaaacgccccgaaacgacgcacgaactctaacaactcgaaatactcgacctcgcgctacaaccgactacgctcgaaaaaataatcgaacaacacgaactacaaatcccgcaaataatccaaaatataacgaaaaaaaaaaccgtcccgatccaaaaaaaaacgacctttactatcccgaaccaactcctacgactactactacgtaaacatacgccaaaacaacgaatcgaacaccgacaccaccgtacaacgccgaatcacgtacacctaaccccccacgttcaactccacgatatcgaaaaaaaacgataactccgcgaaaaacgacgaaaaaccactaccgcccccgccgccgcccccgttaaataatccacgtatactatccgccaaaaccataacaaaaaaataaccgaaccgaaacaataacaaaaaaccgcgctacactcaaaaactacaaccgccttccccgaaaccccgaaacccgaacgctcgctcaaccctacgccccgccgccgccgccgccgccaccgccgccaccgccaccgccgccacctcctaaaaccgcgcgaaaccgaacgatacgaacgcgccgctatacgcccccttaaattccaatacgctccgcccgccttacccgcgcgctccaaacgaataccgaatcgcgacccgcgcgctacttaaataaaaccgcctactctaataccgtaacgcgcaaaaaacgtaaacgacgacgaaacctcgcttaccgaacgaaaaaaaataaaaaacgaaaactcgatttacatcttaaacgcgaacgccacgcgaaactactaactccaccccgactcgcgaacgctaaaaacgcccgaactcccacccgctccccacccaccaaccccgccccgtaatcccgcccaactttctccctcttccgaaaaaaacccgcccgaaacttaacgacttcgaaaaacaactccttaaaaaaacaatcaccgcgccccctcccctctcgccccaacccgcacccaaaaactctaaaaaaaaaacgtaaactttcgaaaacctatcgccccgaaaataaaaatacgtaaccgcctccgaccctcccgcctacgaaactaaacgcttccaacaatacaactacgacctaccatcgttaattatcgtatcactaaaaataaaaaaacgcgaaaaacctaaaaaaacgaaaaaaccgccccaatccgaacgcaaccaaattttattcaaattaccttacaaccaacctaaaaaataaataa

SEQ ID NO: 261 - DNA, 1593 bp, Artificial Sequence
  chemically treated genomic DNA (Homo sapiens) CpG-island No: 261
agttcgagcgtttttggagaaagtcggtcggatttgggtttgcgtcgtaattttcgtttatcgtaattttcgcgggcggtagcggggtaggaagtgggggggcgggggcggcgtttgggatacggggaggtgttaggcgagtgtttcggtttcgtttttgtttcgttcggtcgtggtcgcgttttttgcgtttttagcgtttcggagtcgtggagtcgtcgagtcgtcgagtcgtcgagtcgtagcgtcgggcgtggggattgcgggtggggcgaataaagcggcggcgacgcgggcggtttaggttcgggacgcgcggagcgagcgatttcgtcgggtttttgtttcgggcggggtaggagtcgcggcggtcgcggggcgtttcgagcgtagaatgcggcgttcggcggcgcggattggggagcgttgcggcgattggttgcgtggagttcggttcggggttcgtaggtatttgcgtgtgtgaagcggggagattcggcgcgttgttcgttgttcgtttcgcggtcgtacgtgggcgggagcggcggttcgagaggagttcgaggagtaggaggaggaagaggaggggacgtacggcggcgtagcgggggatttggggtagttcgcgcgaagtttcgtttcggttttgagtttcgcgcgcgcgcgggcgggatgtttcgcggtcgttgtattttggttcgagtattgttttgagtcggtcgggttcgcgggcgttatggagtagtggcggtagtgcggtcgttggtttatcgattgtaaggttttgtcgtttaattatcgggtggtgtggttttcggtcgtggttttcgatttggcgtaggcgttgcgcgacggggtttttttgtgttagttgttgtataatttttttttcggttttatcgattttaaggatattaattttcggtcgtagatgttttaggtgagcgttcggcgggcgggagggtttcggggaggcggcgttcgcgttgttcgacgcgcggattgaacgcggaggtcgtagcggcggcggtttaggcgttttggttggggcggtcgggtttcgggacgcgggcgggcggttggagggtgcgtttcgggttttcgagacgcgattttaggaggcgcgaagttggttaaagtttttttagtttgggtcgcgtcgtcgtcgttcgcgggtattgttttggtgcgtcggtttcgcggtttgcgcggtttgggatgggggaggtttcggcgttgcgttcgttttgcggggttttgcgagtggttttttattttttagggagtttgtcgagtcgggtgtgcgcgtcgtgggtcgtatttttgggtttcgcgttttttggtcggacgtcggtggaagagcgggcgcggtcgttgcgtcggttcggggcgcggttggagggttcgggaggggcgcggggcgggagttttcggggtcggagggagttgggttggtttcgggtatcgttttttcgtcggttttcgttttttttcggattcggattcgggttatttggcgttagttttggttttcgggtcgagtcgtttcgaggatttttagggttatttggttttagttttggtttttatcgt

SEQ ID NO: 262 - DNA, 1593 bp, Artificial Sequence
  chemically treated genomic DNA (Homo sapiens) CpG-island No: 262
acgataaaaaccaaaactaaaaccaaataaccctaaaaatcctcgaaacgactcgacccgaaaaccaaaactaacgccaaataacccgaatccgaatccgaaaaaaaacgaaaaccgacgaaaaaacgatacccgaaaccaacccaactccctccgaccccgaaaactcccgccccgcgcccctcccgaaccctccaaccgcgccccgaaccgacgcaacgaccgcgcccgctcttccaccgacgtccgaccaaaaaacgcgaaacccaaaaatacgacccacgacgcgcacacccgactcgacaaactccctaaaaaataaaaaaccactcgcaaaaccccgcaaaacgaacgcaacgccgaaacctcccccatcccaaaccgcgcaaaccgcgaaaccgacgcaccaaaacaatacccgcgaacgacgacgacgcgacccaaactaaaaaaactttaaccaacttcgcgcctcctaaaatcgcgtctcgaaaacccgaaacgcaccctccaaccgcccgcccgcgtcccgaaacccgaccgccccaaccaaaacgcctaaaccgccgccgctacgacctccgcgttcaatccgcgcgtcgaacaacgcgaacgccgcctccccgaaaccctcccgcccgccgaacgctcacctaaaacatctacgaccgaaaattaatatccttaaaatcgataaaaccgaaaaaaaaattatacaacaactaacacaaaaaaaccccgtcgcgcaacgcctacgccaaatcgaaaaccacgaccgaaaaccacaccacccgataattaaacgacaaaaccttacaatcgataaaccaacgaccgcactaccgccactactccataacgcccgcgaacccgaccgactcaaaacaatactcgaaccaaaatacaacgaccgcgaaacatcccgcccgcgcgcgcgcgaaactcaaaaccgaaacgaaacttcgcgcgaactaccccaaatcccccgctacgccgccgtacgtcccctcctcttcctcctcctactcctcgaactcctctcgaaccgccgctcccgcccacgtacgaccgcgaaacgaacaacgaacaacgcgccgaatctccccgcttcacacacgcaaatacctacgaaccccgaaccgaactccacgcaaccaatcgccgcaacgctccccaatccgcgccgccgaacgccgcattctacgctcgaaacgccccgcgaccgccgcgactcctaccccgcccgaaacaaaaacccgacgaaatcgctcgctccgcgcgtcccgaacctaaaccgcccgcgtcgccgccgctttattcgccccacccgcaatccccacgcccgacgctacgactcgacgactcgacgactcgacgactccacgactccgaaacgctaaaaacgcaaaaaacgcgaccacgaccgaacgaaacaaaaacgaaaccgaaacactcgcctaacacctccccgtatcccaaacgccgcccccgcccccccacttcctaccccgctaccgcccgcgaaaattacgataaacgaaaattacgacgcaaacccaaatccgaccgactttctccaaaaacgctcgaact

SEQ ID NO: 263 - DNA, 1593 bp, Artificial Sequence
  chemically treated genomic DNA (Homo sapiens) CpG-island No: 263
gcgatgggggttaggattggggttaagtggttttggggattttcgaggcggttcgattcgggagttaggattggcgttaagtggttcgggttcgggttcgggaagaggcggaggtcggcgagggggcggtgttcggggttaatttagtttttttcggtttcgagggttttcgtttcgcgtttttttcgggttttttagtcgcgtttcgggtcggcgtagcgatcgcgttcgtttttttatcggcgttcggttaggaggcgcgaggtttaaggatgcgatttacgacgcgtatattcggttcggtaggttttttgggaaatgaggggttattcgtagggtttcgtagagcgagcgtagcgtcggagttttttttattttaggtcgcgtagatcgcggaatcggcgtattagagtagtgttcgcgggcggcggcggcgcgatttaggttgaggggattttggttaatttcgcgttttttgaggtcgcgtttcggaggttcggggcgtattttttagtcgttcgttcgcgtttcggagttcggtcgttttagttagggcgtttgggtcgtcgtcgttgcgattttcgcgtttagttcgcgcgtcgggtagcgcgaacgtcgttttttcggggttttttcgttcgtcgggcgtttatttgggatatttgcggtcggaagttgatgtttttgaggtcgatggagtcgggggagaggttgtgtagtagttggtatagaaggatttcgtcgcgtagcgtttgcgttaggtcgaagattacggtcgagggttatattattcggtggttgggcggtaggattttgtaatcgatgagttagcggtcgtattgtcgttattgttttatggcgttcgcgggttcgatcggtttagggtagtgttcgagttaaagtgtagcggtcgcggggtatttcgttcgcgcgcgcgcggggtttagggtcggggcggggtttcgcgcgggttgttttaggtttttcgttgcgtcgtcgtgcgtttttttttttttttttttttatttttcgggtttttttcgggtcgtcgttttcgtttacgtgcggtcgcggggcgggtaacgggtagcgcgtcggattttttcgttttatatacgtaagtgtttgcgggtttcgggtcgggttttacgtagttagtcgtcgtagcgttttttaattcgcgtcgtcgggcgtcgtattttgcgttcggggcgtttcgcggtcgtcgcggtttttgtttcgttcgagataaaggttcggcggggtcgttcgtttcgcgcgtttcgggtttgggtcgttcgcgtcgtcgtcgttttgttcgttttattcgtagtttttacgttcggcgttgcgattcgacgattcggcggttcggcggttttacggtttcggggcgttgggggcgtagggggcgcggttacggtcgggcggggtaggggcggggtcggagtattcgtttggtattttttcgtgttttaagcgtcgttttcgtttttttattttttgtttcgttatcgttcgcgaaagttgcggtgggcgggggttgcggcgtaggtttaggttcggtcgattttttttaagggcgttcggatt

SEQ ID NO: 264 - DNA, 1593 bp, Artificial Sequence
  chemically treated genomic DNA (Homo sapiens) CpG-island No: 264
aatccgaacgcccttaaaaaaaatcgaccgaacctaaacctacgccgcaacccccgcccaccgcaactttcgcgaacgataacgaaacaaaaaataaaaaaacgaaaacgacgcttaaaacacgaaaaaataccaaacgaatactccgaccccgcccctaccccgcccgaccgtaaccgcgccccctacgcccccaacgccccgaaaccgtaaaaccgccgaaccgccgaatcgtcgaatcgcaacgccgaacgtaaaaactacgaataaaacgaacaaaacgacgacgacgcgaacgacccaaacccgaaacgcgcgaaacgaacgaccccgccgaacctttatctcgaacgaaacaaaaaccgcgacgaccgcgaaacgccccgaacgcaaaatacgacgcccgacgacgcgaattaaaaaacgctacgacgactaactacgtaaaacccgacccgaaacccgcaaacacttacgtatataaaacgaaaaaatccgacgcgctacccgttacccgccccgcgaccgcacgtaaacgaaaacgacgacccgaaaaaaacccgaaaaataaaaaaaaaaaaaaaaaaaaacgcacgacgacgcaacgaaaaacctaaaacaacccgcgcgaaaccccgccccgaccctaaaccccgcgcgcgcgcgaacgaaataccccgcgaccgctacactttaactcgaacactaccctaaaccgatcgaacccgcgaacgccataaaacaataacgacaatacgaccgctaactcatcgattacaaaatcctaccgcccaaccaccgaataatataaccctcgaccgtaatcttcgacctaacgcaaacgctacgcgacgaaatccttctataccaactactacacaacctctcccccgactccatcgacctcaaaaacatcaacttccgaccgcaaatatcccaaataaacgcccgacgaacgaaaaaaccccgaaaaaacgacgttcgcgctacccgacgcgcgaactaaacgcgaaaatcgcaacgacgacgacccaaacgccctaactaaaacgaccgaactccgaaacgcgaacgaacgactaaaaaatacgccccgaacctccgaaacgcgacctcaaaaaacgcgaaattaaccaaaatcccctcaacctaaatcgcgccgccgccgcccgcgaacactactctaatacgccgattccgcgatctacgcgacctaaaataaaaaaaactccgacgctacgctcgctctacgaaaccctacgaataacccctcatttcccaaaaaacctaccgaaccgaatatacgcgtcgtaaatcgcatccttaaacctcgcgcctcctaaccgaacgccgataaaaaaacgaacgcgatcgctacgccgacccgaaacgcgactaaaaaacccgaaaaaaacgcgaaacgaaaaccctcgaaaccgaaaaaaactaaattaaccccgaacaccgccccctcgccgacctccgcctcttcccgaacccgaacccgaaccacttaacgccaatcctaactcccgaatcgaaccgcctcgaaaatccccaaaaccacttaaccccaatcctaacccccatcgc

SEQ ID NO: 265 - DNA, 634 bp, Artificial Sequence
  chemically treated genomic DNA (Homo sapiens) CpG-island No: 265
gtttcgtcgtcgttatgttttatgttgttcgtcgtagcgtttgtcgaacgttttttttagttttttcgtgtagtttggtcgtattattgggtttcgtgcgtcgttttcgtttttattttattatcgttgttttatgcgagttgtcgttttttatatttttttcgttttattttagaatatagtttgttcgtttgtgttttttttatcgtatttggtcgtattttattcgtttatcgtttttcggtttgatttttttttcgttttttgtattgtgttattttcgatttttttattacgcgttagttttgtttttttgttttgtttgtatttcgcgcgtttttcgcgtttttttttttgtacgtttcgttttggtagcgagtcgtatttatttttttgttttatggttcgttcgtttttttcgtttgttttttgttagatcgtttatatatgttttatcgtatttttatttttttcgttcgttacgcggcgttttagttttcgggtattttgtatgcgtgcgttttattttttttacgtttttttgtttgttgtttttatttttttttatgtgtttattgttgtttttcgcgttacgttgtatttttttatatttgttatttttatattttttatt

SEQ ID NO: 266 - DNA, 634 bp, Artificial Sequence
  chemically treated genomic DNA (Homo sapiens) CpG-island No: 266
aataaaaaatataaaaataacaaatataaaaaaatacaacgtaacgcgaaaaacaacaataaacacataaaaaaaaataaaaacaacaaacaaaaaaacgtaaaaaaaataaaacgcacgcatacaaaatacccgaaaactaaaacgccgcgtaacgaacgaaaaaaataaaaatacgataaaacatatataaacgatctaacaaaaaacaaacgaaaaaaacgaacgaaccataaaacaaaaaaataaatacgactcgctaccaaaacgaaacgtacaaaaaaaaaaacgcgaaaaacgcgcgaaatacaaacaaaacaaaaaaacaaaactaacgcgtaataaaaaaatcgaaaataacacaatacaaaaaacgaaaaaaaaatcaaaccgaaaaacgataaacgaataaaatacgaccaaatacgataaaaaaaacacaaacgaacaaactatattctaaaataaaacgaaaaaaatataaaaaacgacaactcgcataaaacaacgataataaaataaaaacgaaaacgacgcacgaaacccaataatacgaccaaactacacgaaaaaactaaaaaaaacgttcgacaaacgctacgacgaacaacataaaacataacgacgacgaaac

SEQ ID NO: 267 - DNA, 634 bp, Artificial Sequence
  chemically treated genomic DNA (Homo sapiens) CpG-island No: 267
ggtgggggatatggaggtagtagatatgagaagatatagcgtagcgcgagaagtagtagtgagtatatagagaagggtagaagtagtaggtagaaggacgtagagaggatgagacgtacgtatgtaggatgttcgaggattagagcgtcgcgtagcgagcggaggaagtgagggtgcgatagagtatatatggacgatttagtaggaagtaggcgagaggagcgagcgagttataggataggagagtgggtgcgattcgttgttaggacgaagcgtgtaggaagagagacgcgaaagacgcgcgaaatgtagatagagtagagagataggattagcgcgtaatagagagatcgaggataatatagtatagagagcgagagaggaattaggtcggaggacggtggacgagtagaatgcgattagatgcgatagaggaggtataggcgagtaggttatgttttgaggtgaaacggagaagatatgagaggcggtagttcgtatgagatagcgatgatggaatgagagcgagagcgacgtacgaggtttaataatacgattaggttgtacgggagagttgagaggaacgttcggtaggcgttacggcgagtagtatggggtatagcggcgacgagat

SEQ ID NO: 268 - DNA, 634 bp, Artificial Sequence
  chemically treated genomic DNA (Homo sapiens) CpG-island No: 268
atctcgtcgccgctataccccatactactcgccgtaacgcctaccgaacgttcctctcaactctcccgtacaacctaatcgtattattaaacctcgtacgtcgctctcgctctcattccatcatcgctatctcatacgaactaccgcctctcatatcttctccgtttcacctcaaaacataacctactcgcctatacctcctctatcgcatctaatcgcattctactcgtccaccgtcctccgacctaattcctctctcgctctctatactatattatcctcgatctctctattacgcgctaatcctatctctctactctatctacatttcgcgcgtctttcgcgtctctcttcctacacgcttcgtcctaacaacgaatcgcacccactctcctatcctataactcgctcgctcctctcgcctacttcctactaaatcgtccatatatactctatcgcaccctcacttcctccgctcgctacgcgacgctctaatcctcgaacatcctacatacgtacgtctcatcctctctacgtccttctacctactacttctacccttctctatatactcactactacttctcgcgctacgctatatcttctcatatctactacctccatatcccccacc

SEQ ID NO: 269 - DNA, 754 bp, Artificial Sequence
  chemically treated genomic DNA (Homo sapiens) CpG-island No: 269
tcgtatcgtcgtgtttttcggtttaagttttaatattcgggcgaattggcgtgttttattagttcggtagtatgaattattattcgttagttattttattggagacgacggaagatcgttgtcgaagttgcgttttatcgtttttagtatgacgttttgtattgttttattgttgaagtcgtcggtagtgatcgtttagtgtagtgttttacgattatagtagtttagcgcgaacgtgatacgtagttttttttcgttattatagtagaattcgaatcgttagagtattatcgttgattgttttttttacggttattttgtttgtatgtgttcgtttcgatggcggtatagtaggttttcgtttaagtaatagcgtattttggcgtatgattcggtaaatacgtttggtattgatcgtaggtatattattaagttttgtttgtttgcgaagtagcgtttatattcgacgataattatacgttggtagtttttcgataatatggtgtatacggagaagtatattcgtattattagtgtgacgattgcggcggttatttatttagttatcggttcgtttgagaatgacgtgtaattgcgtacgcgatattcggagataacgttgaattaagtttattttttattttcggggtatagggcgcgtgcgttatttatttttttgttcgttttatatttaacgggtttttttaggagtttattttttatcgtttttttgtcgagtaggcgttggagtttt

SEQ ID NO: 270 - DNA, 754 bp, Artificial Sequence
  chemically treated genomic DNA (Homo sapiens) CpG-island No: 270
aaaactccaacgcctactcgacaaaaaaacgataaaaaataaactcctaaaaaaacccgttaaatataaaacgaacaaaaaaataaataacgcacgcgccctataccccgaaaataaaaaataaacttaattcaacgttatctccgaatatcgcgtacgcaattacacgtcattctcaaacgaaccgataactaaataaataaccgccgcaatcgtcacactaataatacgaatatacttctccgtatacaccatattatcgaaaaactaccaacgtataattatcgtcgaatataaacgctacttcgcaaacaaacaaaacttaataatatacctacgatcaataccaaacgtatttaccgaatcatacgccaaaatacgctattacttaaacgaaaacctactataccgccatcgaaacgaacacatacaaacaaaataaccgtaaaaaaaacaatcaacgataatactctaacgattcgaattctactataataacgaaaaaaaactacgtatcacgttcgcgctaaactactataatcgtaaaacactacactaaacgatcactaccgacgacttcaacaataaaacaatacaaaacgtcatactaaaaacgataaaacgcaacttcgacaacgatcttccgtcgtctccaataaaataactaacgaataataattcatactaccgaactaataaaacacgccaattcgcccgaatattaaaacttaaaccgaaaaacacgacgatacga

SEQ ID NO: 271 - DNA, 754 bp, Artificial Sequence
  chemically treated genomic DNA (Homo sapiens) CpG-island No: 271
aagattttagcgtttgttcggtaagaaaacgatggaaaatgaatttttgaaagagttcgttgaatatgggacgggtaaaaaagtggatagcgtacgcgttttatgtttcggggatggggagtaagtttagtttagcgttgttttcgagtgtcgcgtgcgtagttgtacgttatttttagacgaatcgatgattggatggatggtcgtcgtagtcgttatattgatgatacggatgtgttttttcgtatatattatgttatcggagagttgttaacgtatggttatcgtcgggtatgggcgttgtttcgtagataggtagaatttgatggtatgtttgcgattaatgttaaacgtgtttatcggattatgcgttagaatgcgttgttgtttgagcgaaaatttgttgtatcgttatcgaaacgggtatatataggtagagtggtcgtgaaagaaataattagcgatggtgttttgacggttcgagttttgttgtgataacgaagagagattgcgtgttacgttcgcgttggattgttgtgatcgtgaggtattgtattgggcggttattatcggcggttttaatagtgaaatagtataggacgttatgttgggagcggtggaacgtagtttcggtaacgatttttcgtcgtttttagtggagtggttgacggataatggtttatgttatcgggttaatgaaatacgttagttcgttcggatgttgggatttgaatcgaagaatacggcggtgcgg

SEQ ID NO: 272 - DNA, 754 bp, Artificial Sequence
  chemically treated genomic DNA (Homo sapiens) CpG-island No: 272
ccgcaccgccgtattcttcgattcaaatcccaacatccgaacgaactaacgtatttcattaacccgataacataaaccattatccgtcaaccactccactaaaaacgacgaaaaatcgttaccgaaactacgttccaccgctcccaacataacgtcctatactatttcactattaaaaccgccgataataaccgcccaatacaatacctcacgatcacaacaatccaacgcgaacgtaacacgcaatctctcttcgttatcacaacaaaactcgaaccgtcaaaacaccatcgctaattatttctttcacgaccactctacctatatatacccgtttcgataacgatacaacaaattttcgctcaaacaacaacgcattctaacgcataatccgataaacacgtttaacattaatcgcaaacataccatcaaattctacctatctacgaaacaacgcccatacccgacgataaccatacgttaacaactctccgataacataatatatacgaaaaaacacatccgtatcatcaatataacgactacgacgaccatccatccaatcatcgattcgtctaaaaataacgtacaactacgcacgcgacactcgaaaacaacgctaaactaaacttactccccatccccgaaacataaaacgcgtacgctatccacttttttacccgtcccatattcaacgaactctttcaaaaattcattttccatcgttttcttaccgaacaaacgctaaaatctt

SEQ ID NO: 273 - DNA, 584 bp, Artificial Sequence
  chemically treated genomic DNA (Homo sapiens) CpG-island No: 273
cggtcgttagcgtttatagtagaattaggagcgtcgcgtacgtggaggcggtagttttttacgttatcgtcgcggttgttgttgtgtaatttttttcgtcgagtgggagtaggcggttcggtagaaattaagggtagggggagatttttgttgcgtaaagagttgacggagatatagtcgggatttttagtcggcgtttttgtatattttatttttttagattttttcggtaattgcgaagtcgtttggattttttaggttcgtattgtaggaagttaggcgcgtgattagttttattcgcgtcgtattttagttcgggggcgggtatcggtcggggaattttttttcgttttcgttcgcggtacgaggttgcgcggttatagtttcggtgtttttcgcgagcggttttgcggtttaggattcggggtattttttgggttcgtttagtaaattgagatcgggatttaagtggttcggggcgttgttttaaggaagatgttgatcgtagtcggtgattgcgagagtaggtgtacgcgtttagagcgatattttatcgttggcgcgataaatttatattattttaa

SEQ ID NO: 274 - DNA, 584 bp, Artificial Sequence
  chemically treated genomic DNA (Homo sapiens) CpG-island No: 274
ttaaaataatataaatttatcgcgccaacgataaaatatcgctctaaacgcgtacacctactctcgcaatcaccgactacgatcaacatcttccttaaaacaacgccccgaaccacttaaatcccgatctcaatttactaaacgaacccaaaaaataccccgaatcctaaaccgcaaaaccgctcgcgaaaaacaccgaaactataaccgcgcaacctcgtaccgcgaacgaaaacgaaaaaaaattccccgaccgatacccgcccccgaactaaaatacgacgcgaataaaactaatcacgcgcctaacttcctacaatacgaacctaaaaaatccaaacgacttcgcaattaccgaaaaaatctaaaaaaataaaatatacaaaaacgccgactaaaaatcccgactatatctccgtcaactctttacgcaacaaaaatctccccctacccttaatttctaccgaaccgcctactcccactcgacgaaaaaaattacacaacaacaaccgcgacgataacgtaaaaaactaccgcctccacgtacgcgacgctcctaattctactataaacgctaacgaccg

SEQ ID NO: 275 - DNA, 584 bp, Artificial Sequence
  chemically treated genomic DNA (Homo sapiens) CpG-island No: 275
ttaaagtaatgtaagtttatcgcgttaacggtaagatgtcgttttggacgcgtgtatttgttttcgtaattatcgattgcggttagtattttttttagagtagcgtttcgggttatttggatttcggttttaatttattaagcgaatttagaggatgtttcgagttttggatcgtagagtcgttcgcgagaggtatcggggttgtaatcgcgtaatttcgtgtcgcgggcggaggcgagggaggatttttcggtcggtgttcgttttcgggttaaagtgcggcgcgggtggggttggttacgcgtttggttttttgtagtgcgaatttgggaaatttaggcgatttcgtagttgtcgaagggatttgaagaagtgggatgtgtaaaagcgtcggttggaaatttcggttgtgttttcgttaattttttacgtaatagaggtttttttttgtttttggtttttatcgggtcgtttgtttttattcggcgaaaaaaattatataatagtagtcgcggcgatgacgtggagggttgtcgtttttacgtgcgcggcgtttttgattttgttgtgggcgttgacgatcg

SEQ ID NO: 276 - DNA, 584 bp, Artificial Sequence
  chemically treated genomic DNA (Homo sapiens) CpG-island No: 276
cgatcgtcaacgcccacaacaaaatcaaaaacgccgcgcacgtaaaaacgacaaccctccacgtcatcgccgcgactactattatataatttttttcgccgaataaaaacaaacgacccgataaaaaccaaaaacaaaaaaaaacctctattacgtaaaaaattaacgaaaacacaaccgaaatttccaaccgacgcttttacacatcccacttcttcaaatcccttcgacaactacgaaatcgcctaaatttcccaaattcgcactacaaaaaaccaaacgcgtaaccaaccccacccgcgccgcactttaacccgaaaacgaacaccgaccgaaaaatcctccctcgcctccgcccgcgacacgaaattacgcgattacaaccccgatacctctcgcgaacgactctacgatccaaaactcgaaacatcctctaaattcgcttaataaattaaaaccgaaatccaaataacccgaaacgctactctaaaaaaaatactaaccgcaatcgataattacgaaaacaaatacacgcgtccaaaacgacatcttaccgttaacgcgataaacttacattactttaa

SEQ ID NO: 277 - DNA, 649 bp, Artificial Sequence
  chemically treated genomic DNA (Homo sapiens) CpG-island No: 277
ttagaacgtagttcgaagggttttagagtcggggcggaattagcgtttgcggaattttttttttcgttttcggtgtttcggaagtttcggtaggaaatgcgttagggattacgttgcgtcgcgtcgtcgtagtcgggtttcggtcgttacggtaacgcgcgcgggtaggtgttcgattatgagcgttcgggtcgtacgggtagcgtgggttaggggtttgggcgttagttatcgtcgcggcgtttcgagtttttcggtgttttcgtcgggcgtttagggtgtagcggagttgttgcgagatgcgatcggggcggaggaggaggcgttttgggcggcgacggagcggcgaatgtcgggttagtgtttcgtgttgtttttttcgggttagggtagttaggtggtgggtatgggtcgcggtttgtttaattattcgcgcgttcgcgaaatttacgtcgtcgttcgtcgcgtgttgggttacgatttgttggaattgagtttgtacgggtcgtaggagattttggatcgtatcgtgtattgttagttcgcgattttcgtggtatcgttggtcgttgtcgagaaattatattatttgtagttttcggtgaggttcgaggtttcgtgataggagggggaaggtgagttttgtttg

SEQ ID NO: 278 - DNA, 649 bp, Artificial Sequence
  chemically treated genomic DNA (Homo sapiens) CpG-island No: 278
caaacaaaactcaccttccccctcctatcacgaaacctcgaacctcaccgaaaactacaaataatataatttctcgacaacgaccaacgataccacgaaaatcgcgaactaacaatacacgatacgatccaaaatctcctacgacccgtacaaactcaattccaacaaatcgtaacccaacacgcgacgaacgacgacgtaaatttcgcgaacgcgcgaataattaaacaaaccgcgacccatacccaccacctaactaccctaacccgaaaaaaacaacacgaaacactaacccgacattcgccgctccgtcgccgcccaaaacgcctcctcctccgccccgatcgcatctcgcaacaactccgctacaccctaaacgcccgacgaaaacaccgaaaaactcgaaacgccgcgacgataactaacgcccaaacccctaacccacgctacccgtacgacccgaacgctcataatcgaacacctacccgcgcgcgttaccgtaacgaccgaaacccgactacgacgacgcgacgcaacgtaatccctaacgcatttcctaccgaaacttccgaaacaccgaaaacgaaaaaaaaaattccgcaaacgctaattccgccccgactctaaaacccttcgaactacgttctaa

SEQ ID NO: 279 - DNA, 649 bp, Artificial Sequence
  chemically treated genomic DNA (Homo sapiens) CpG-island No: 279
taggtagagtttatttttttttttttgttacggggtttcgggttttatcgagggttgtaggtgatgtagtttttcgatagcggttagcgatgttacgaagatcgcgggttgatagtgtacggtgcggtttagggttttttgcggttcgtgtaggtttagttttagtaggtcgtagtttagtacgcggcgggcggcggcgtagatttcgcggacgcgcgggtagttgagtagatcgcggtttatgtttattatttggttgttttggttcgggaagagtagtacggagtattggttcggtattcgtcgtttcgtcgtcgtttagggcgttttttttttcgtttcggtcgtatttcgtagtagtttcgttatattttgggcgttcggcggaggtatcgggaagttcgaggcgtcgcggcggtagttggcgtttaagtttttgatttacgttattcgtgcgattcggacgtttatggtcggatatttgttcgcgcgcgttatcgtggcgatcgaggttcgattgcggcggcgcggcgtagcgtggtttttgacgtattttttgtcggggttttcggggtatcgggagcgggaagaaaggtttcgtagacgttggtttcgtttcggttttgaggtttttcgggttgcgttttgg

SEQ ID NO: 280 - DNA, 649 bp, Artificial Sequence
  chemically treated genomic DNA (Homo sapiens) CpG-island No: 280
ccaaaacgcaacccgaaaaacctcaaaaccgaaacgaaaccaacgtctacgaaacctttcttcccgctcccgataccccgaaaaccccgacaaaaaatacgtcaaaaaccacgctacgccgcgccgccgcaatcgaacctcgatcgccacgataacgcgcgcgaacaaatatccgaccataaacgtccgaatcgcacgaataacgtaaatcaaaaacttaaacgccaactaccgccgcgacgcctcgaacttcccgatacctccgccgaacgcccaaaatataacgaaactactacgaaatacgaccgaaacgaaaaaaaaaacgccctaaacgacgacgaaacgacgaataccgaaccaatactccgtactactcttcccgaaccaaaacaaccaaataataaacataaaccgcgatctactcaactacccgcgcgtccgcgaaatctacgccgccgcccgccgcgtactaaactacgacctactaaaactaaacctacacgaaccgcaaaaaaccctaaaccgcaccgtacactatcaacccgcgatcttcgtaacatcgctaaccgctatcgaaaaactacatcacctacaaccctcgataaaacccgaaaccccgtaacaaaaaaaaaaaaataaactctaccta

SEQ ID NO: 281 - DNA, 1026 bp, Artificial Sequence
  chemically treated genomic DNA (Homo sapiens) CpG-island No: 281
tagacgacgattagtttcgaattttataagttttgtcgtgatcgcgtttcgtaggcggggggttttttcgcgggttattcgtaggggcgtatttttaatttattaaataaggtcgtatgttttagtcgggttttagttttcgtttagtttggggcgtatttgtgtagggcgcgtgggtaagcgagggcgggcggttgcgcgtcgtttcgtgtgtacgtttttgtttcggattttttgggcgtttcgttacgaagttttttttcggtttttttttaggtgcgtagcgttttcgggagtcggtttcggcggtatcgggtacgacgttatttttttttttttaagggtatcggggttgtgcggtcgcggtcgtgggttggcgttgtcgcgttacggtttggtcgggttcgtacgattttagagttcggagtcgggtgttcggaagtcgtattggaggattgtgcggcggcgatggggcgtttagtcgtcgcggcgagacgtagagggattattttattgtataggcgcggagattgaggttcgtaggggtcgcgtttggtacgatcgttcgtcggggatttggagtttcggatagagagggtacgtttcggagtcggagtttcgagacgtcgtttcgttagcgatttgttggagcggtaaaatttgggtacggttttttatatttttagtcgttcggtattcgggtcgcggtttgggcgttaatcgtcgggttcgagttgggcggagtagcgggcggtagtagggtcgggggtatttatttggcggcggcgatgttggtagcgtttgtaagttattcgggaggtttcgtgtttgcggttcggttgtcggcgcgggatttaataggttcgggcgtttcgtttttttcgtttcgttcgggtttcgttttttttcgggagcggtttttcgtatttcgagcgcggaatttcggattggggtttgaatggtattggtaatagaatcgttataagtgtagttcgttggtttgtttatagtttttttgttttttgt

SEQ ID NO: 282 - DNA, 1026 bp, Artificial Sequence
  chemically treated genomic DNA (Homo sapiens) CpG-island No: 282
acaaaaaacaaaaaaactataaacaaaccaacgaactacacttataacgattctattaccaataccattcaaaccccaatccgaaattccgcgctcgaaatacgaaaaaccgctcccgaaaaaaaacgaaacccgaacgaaacgaaaaaaacgaaacgcccgaacctattaaatcccgcgccgacaaccgaaccgcaaacacgaaacctcccgaataacttacaaacgctaccaacatcgccgccgccaaataaatacccccgaccctactaccgcccgctactccgcccaactcgaacccgacgattaacgcccaaaccgcgacccgaataccgaacgactaaaaatataaaaaaccgtacccaaattttaccgctccaacaaatcgctaacgaaacgacgtctcgaaactccgactccgaaacgtaccctctctatccgaaactccaaatccccgacgaacgatcgtaccaaacgcgacccctacgaacctcaatctccgcgcctatacaataaaataatccctctacgtctcgccgcgacgactaaacgccccatcgccgccgcacaatcctccaatacgacttccgaacacccgactccgaactctaaaatcgtacgaacccgaccaaaccgtaacgcgacaacgccaacccacgaccgcgaccgcacaaccccgatacccttaaaaaaaaaaaaataacgtcgtacccgataccgccgaaaccgactcccgaaaacgctacgcacctaaaaaaaaaccgaaaaaaaacttcgtaacgaaacgcccaaaaaatccgaaacaaaaacgtacacacgaaacgacgcgcaaccgcccgccctcgcttacccacgcgccctacacaaatacgccccaaactaaacgaaaactaaaacccgactaaaacatacgaccttatttaataaattaaaaatacgcccctacgaataacccgcgaaaaaaccccccgcctacgaaacgcgatcacgacaaaacttataaaattcgaaactaatcgtcgtcta

SEQ ID NO: 283 - DNA, 1026 bp, Artificial Sequence
  chemically treated genomic DNA (Homo sapiens) CpG-island No: 283
gtagggggtagagaggttgtaaataagttaacgggttgtatttgtagcggttttgttgttaatgttatttagattttagttcgggatttcgcgttcggggtgcgagaggtcgttttcggggaggggcgggattcgggcggggcgggaggggcggggcgttcgggtttattaggtttcgcgtcggtagtcgggtcgtagatacgaagtttttcgggtggtttatagacgttgttagtatcgtcgtcgttaggtgagtgttttcgattttgttgtcgttcgttgtttcgtttagttcgagttcggcggttagcgtttaggtcgcggttcgggtgtcgagcggttggaagtgtggggagtcgtgtttaggttttatcgttttagtaagtcgttggcggggcgacgtttcgggatttcggtttcgaaacgtattttttttgttcggggttttaggttttcgacgggcgatcgtgttaggcgcggtttttgcgggttttagttttcgcgtttgtgtaatggggtggtttttttgcgtttcgtcgcgacggttggacgttttatcgtcgtcgtatagttttttagtgcggttttcgggtattcggtttcgaattttggggtcgtgcggattcggttagatcgtagcgcggtaacgttagtttacggtcgcggtcgtatagtttcggtgtttttaaaagagggaagatggcgtcgtgttcggtgtcgtcgggatcggttttcggaggcgttgcgtatttgaggaagggtcgaggaaaggtttcgtaacgggacgtttagaaagttcggaataggaacgtgtatacggagcggcgcgtagtcgttcgttttcgtttgtttacgcgttttgtataggtgcgttttagattgggcggggattagagttcggttggggtatgcgattttgtttggtaaattggaggtgcgtttttgcgggtgattcgcgagggggtttttcgtttgcggggcgcggttacgataaggtttgtggggttcggagttggtcgtcgtttg

SEQ ID NO: 284 - DNA, 1026 bp, Artificial Sequence
  chemically treated genomic DNA (Homo sapiens) CpG-island No: 284
caaacgacgaccaactccgaaccccacaaaccttatcgtaaccgcgccccgcaaacgaaaaaccccctcgcgaatcacccgcaaaaacgcacctccaatttaccaaacaaaatcgcataccccaaccgaactctaatccccgcccaatctaaaacgcacctatacaaaacgcgtaaacaaacgaaaacgaacgactacgcgccgctccgtatacacgttcctattccgaactttctaaacgtcccgttacgaaacctttcctcgacccttcctcaaatacgcaacgcctccgaaaaccgatcccgacgacaccgaacacgacgccatcttccctcttttaaaaacaccgaaactatacgaccgcgaccgtaaactaacgttaccgcgctacgatctaaccgaatccgcacgaccccaaaattcgaaaccgaatacccgaaaaccgcactaaaaaactatacgacgacgataaaacgtccaaccgtcgcgacgaaacgcaaaaaaaccaccccattacacaaacgcgaaaactaaaacccgcaaaaaccgcgcctaacacgatcgcccgtcgaaaacctaaaaccccgaacaaaaaaaatacgtttcgaaaccgaaatcccgaaacgtcgccccgccaacgacttactaaaacgataaaacctaaacacgactccccacacttccaaccgctcgacacccgaaccgcgacctaaacgctaaccgccgaactcgaactaaacgaaacaacgaacgacaacaaaatcgaaaacactcacctaacgacgacgatactaacaacgtctataaaccacccgaaaaacttcgtatctacgacccgactaccgacgcgaaacctaataaacccgaacgccccgcccctcccgccccgcccgaatcccgcccctccccgaaaacgacctctcgcaccccgaacgcgaaatcccgaactaaaatctaaataacattaacaacaaaaccgctacaaatacaacccgttaacttatttacaacctctctaccccctac

SEQ ID NO: 285 - DNA, 603 bp, Artificial Sequence
  chemically treated genomic DNA (Homo sapiens) CpG-island No: 285
tcgtcgtttttcggatttttttttagttttcgttttttttgtttttttgggattttgcgttttttggagttattattttattcggtttaatcgcggtttttcggatttgcgcgcgattcggcggggttgatttcgagtcgcggtttttcggtttttgtcgttcgttcgcgtcgcggttttcgtttcgcgtcgggtttcggtttcgttcgtcgtcgtcgttgtatttgtttttgttttttacgttacggtcgtcgttttttcgttttttttcgtcgttcgggcgttcgcggttggtcgttttttcgtttgtttgttcgttcgtgggttcgcggagatcgatttgggttaggtaggggtttaggacggcgggaggggggcgtacgaggagaggaacggggtcggggatcgttagggggagttcgatttgtatcggagcgtagggggcggggtcggagtaagttttcgtttttttcgcgttttttttcgttttcgttttttattttttttttcgggatttataattcggtttttggagtttttttgattcgcggaatttagaggttttttttgtttacgttttacgaaagtggggggttgggaggg

SEQ ID NO: 286 - DNA, 603 bp, Artificial Sequence
  chemically treated genomic DNA (Homo sapiens) CpG-island No: 286
ccctcccaaccccccactttcgtaaaacgtaaacaaaaaaaacctctaaattccgcgaatcaaaaaaactccaaaaaccgaattataaatcccgaaaaaaaaaataaaaaacgaaaacgaaaaaaaacgcgaaaaaaacgaaaacttactccgaccccgccccctacgctccgatacaaatcgaactccccctaacgatccccgaccccgttcctctcctcgtacgcccccctcccgccgtcctaaacccctacctaacccaaatcgatctccgcgaacccacgaacgaacaaacaaacgaaaaaacgaccaaccgcgaacgcccgaacgacgaaaaaaaacgaaaaaacgacgaccgtaacgtaaaaaacaaaaacaaatacaacgacgacgacgaacgaaaccgaaacccgacgcgaaacgaaaaccgcgacgcgaacgaacgacaaaaaccgaaaaaccgcgactcgaaatcaaccccgccgaatcgcgcgcaaatccgaaaaaccgcgattaaaccgaataaaataataactccaaaaaacgcaaaatcccaaaaaaacaaaaaaaacgaaaactaaaaaaaaatccgaaaaacgacga

SEQ ID NO: 287 - DNA, 603 bp, Artificial Sequence
  chemically treated genomic DNA (Homo sapiens) CpG-island No: 287
tttttttagttttttattttcgtagagcgtgggtaggaggaatttttgggtttcgcggattagaaaaattttaaaggtcgggttgtgagtttcgggaggggaggtggagggcgggggcggggaggggcgcgggaggggcgggggtttgtttcggtttcgttttttgcgtttcggtgtaggtcgggttttttttggcggttttcggtttcgttttttttttcgtgcgtttttttttcgtcgttttagatttttgtttagtttaggtcggttttcgcggatttacggacggatagatagacgggaggacggttagtcgcgagcgttcgggcggcgggagggggcggggaggcgacggtcgtggcgtgaggagtaggagtaggtgtagcggcggcggcgggcggggtcgggattcggcgcggagcgggagtcgcggcgcgggcgggcggtagggatcgggaggtcgcgattcggagttagtttcgtcgggtcgcgcgtaggttcggggagtcgcggttgagtcgggtggggtggtgattttagagaacgtaggattttaaggagatagagaggacgagagttggagggggattcggaaagcggcgg

SEQ ID NO: 288 - DNA, 603 bp, Artificial Sequence
  chemically treated genomic DNA (Homo sapiens) CpG-island No: 288
ccgccgctttccgaatccccctccaactctcgtcctctctatctccttaaaatcctacgttctctaaaatcaccaccccacccgactcaaccgcgactccccgaacctacgcgcgacccgacgaaactaactccgaatcgcgacctcccgatccctaccgcccgcccgcgccgcgactcccgctccgcgccgaatcccgaccccgcccgccgccgccgctacacctactcctactcctcacgccacgaccgtcgcctccccgccccctcccgccgcccgaacgctcgcgactaaccgtcctcccgtctatctatccgtccgtaaatccgcgaaaaccgacctaaactaaacaaaaatctaaaacgacgaaaaaaaaacgcacgaaaaaaaaaacgaaaccgaaaaccgccaaaaaaaacccgacctacaccgaaacgcaaaaaacgaaaccgaaacaaacccccgcccctcccgcgcccctccccgcccccgccctccacctcccctcccgaaactcacaacccgacctttaaaatttttctaatccgcgaaacccaaaaattcctcctacccacgctctacgaaaataaaaaactaaaaaaa

SEQ ID NO: 289 - DNA, 541 bp, Artificial Sequence
  chemically treated genomic DNA (Homo sapiens) CpG-island No: 289
cgggggtatcgggggagtgaagggatgagttggtgtgcgagtgcggggatcggcgggtaggatatagggtaggggatttcgggaacgaggcggacggcggtcgcgggtcggaaggggacgtcgagcggtgcggcgcgtatcgtttttttttttttttttgttttttcgttttttttttcgcggttcgttgcgcgtatttattaatgaagaggatggggaaggtgatgaagagtaggaagacgtgcggtattacgttgagcgcgtttataaagtagtcgttgttgaggattttttggtttattcggtaggcggtcgagtggttttcgttgtcgtagaaggttaggggtatggcggcgcgggcgcgggttgggttcgggtttagttggtttcgttggtttcgcgcgtttgtcgcgtttttgttttttgtagtttcgtcgttcggttcggtcgttaggttttcgtttttcgggtttcgtttagtttcgttggttttttttttttttatttcgttttgttttattatttgcggggtcggggggcg

SEQ ID NO: 290 - DNA, 541 bp, Artificial Sequence
  chemically treated genomic DNA (Homo sapiens) CpG-island No: 290
cgccccccgaccccgcaaataataaaacaaaacgaaataaaaaaaaaaaaaaccaacgaaactaaacgaaacccgaaaaacgaaaacctaacgaccgaaccgaacgacgaaactacaaaaaacaaaaacgcgacaaacgcgcgaaaccaacgaaaccaactaaacccgaacccaacccgcgcccgcgccgccatacccctaaccttctacgacaacgaaaaccactcgaccgcctaccgaataaaccaaaaaatcctcaacaacgactactttataaacgcgctcaacgtaataccgcacgtcttcctactcttcatcaccttccccatcctcttcattaataaatacgcgcaacgaaccgcgaaaaaaaaaacgaaaaaacaaaaaaaaaaaaaaaaacgatacgcgccgcaccgctcgacgtccccttccgacccgcgaccgccgtccgcctcgttcccgaaatcccctaccctatatcctacccgccgatccccgcactcgcacaccaactcatcccttcactcccccgatacccccg

SEQ ID NO: 291 - DNA, 541 bp, Artificial Sequence
  chemically treated genomic DNA (Homo sapiens) CpG-island No: 291
cgtttttcggtttcgtaggtggtggagtagggcggggtgagggagggggaggttagcggggttgggcggggttcggggggcgggggtttgacggtcgggtcgggcggcggagttgtaagggatagaggcgcggtaggcgcgcggagttagcggagttagttgagttcgagtttagttcgcgttcgcgtcgttatgtttttggttttttgcggtagcgagaattattcggtcgtttatcgggtggattagggggtttttaataacggttgttttgtggacgcgtttaacgtggtgtcgtacgtttttttattttttattattttttttattttttttattggtgagtgcgcgtagcgagtcgcggaggaggggacgggagagtagggagggaggaggaggcgatgcgcgtcgtatcgttcggcgttttttttcggttcgcgatcgtcgttcgtttcgttttcggggttttttgttttgtgttttgttcgtcggttttcgtattcgtatattagtttatttttttattttttcggtgttttcg

SEQ ID NO: 292 - DNA, 541 bp, Artificial Sequence
  chemically treated genomic DNA (Homo sapiens) CpG-island No: 292
cgaaaacaccgaaaaaataaaaaaataaactaatatacgaatacgaaaaccgacgaacaaaacacaaaacaaaaaaccccgaaaacgaaacgaacgacgatcgcgaaccgaaaaaaaacgccgaacgatacgacgcgcatcgcctcctcctccctccctactctcccgtcccctcctccgcgactcgctacgcgcactcaccaataaaaaaaataaaaaaaataataaaaaataaaaaaacgtacgacaccacgttaaacgcgtccacaaaacaaccgttattaaaaaccccctaatccacccgataaacgaccgaataattctcgctaccgcaaaaaaccaaaaacataacgacgcgaacgcgaactaaactcgaactcaactaactccgctaactccgcgcgcctaccgcgcctctatcccttacaactccgccgcccgacccgaccgtcaaacccccgccccccgaaccccgcccaaccccgctaacctccccctccctcaccccgccctactccaccacctacgaaaccgaaaaacg

SEQ ID NO: 293 - DNA, 631 bp, Artificial Sequence
  chemically treated genomic DNA (Homo sapiens) CpG-island No: 293
cgcgggtcgggcgcggggaggtgttatgcgtcggaatttgcgtttggggttaagttttggagttgacgcgtaggggtaaggcgtttcgcgtttcggattggcggtttcgcgtatgttttttttatcggcgtcgtaggtttcgagaggtttcggaagtattgggtgtagtttgatggcgtaggaggtagatacggtatagggcgtcgagatgcggcggggcgcgggcgcggttcggggacgcgttttttggtgttgggttttggcgttgttttggttcgcggtggtttcgggttggtttcgggtttcgggtattttttttcggcgttattggtcggtgttttataagtgagtgcggcggcgcgcgtattgtcggggttggggtcggcgttgacgatgggggatggggtgttggggcggggatttttgtttatcgtggtttgtgtcgggttacgagatggtgcggggatagcgtcgggtgacgttcggagcgtatttgagagtaaagttgaggattggggagtcgtagtcgttcgttacgtgtagttttgggatttttcgttttttttggttatttgcggtagatttaggatagttttgaatcgtggaagaagaaaaggagagtaatgttatt

SEQ ID NO: 294 - DNA, 631 bp, Artificial Sequence
  chemically treated genomic DNA (Homo sapiens) CpG-island No: 294
aataacattactctccttttcttcttccacgattcaaaactatcctaaatctaccgcaaataaccaaaaaaaacgaaaaatcccaaaactacacgtaacgaacgactacgactccccaatcctcaactttactctcaaatacgctccgaacgtcacccgacgctatccccgcaccatctcgtaacccgacacaaaccacgataaacaaaaatccccgccccaacaccccatcccccatcgtcaacgccgaccccaaccccgacaatacgcgcgccgccgcactcacttataaaacaccgaccaataacgccgaaaaaaaatacccgaaacccgaaaccaacccgaaaccaccgcgaaccaaaacaacgccaaaacccaacaccaaaaaacgcgtccccgaaccgcgcccgcgccccgccgcatctcgacgccctataccgtatctacctcctacgccatcaaactacacccaatacttccgaaacctctcgaaacctacgacgccgataaaaaaaacatacgcgaaaccgccaatccgaaacgcgaaacgccttacccctacgcgtcaactccaaaacttaaccccaaacgcaaattccgacgcataacacctccccgcgcccgacccgcg

SEQ ID NO: 295 - DNA, 631 bp, Artificial Sequence
  chemically treated genomic DNA (Homo sapiens) CpG-island No: 295
aataatattattttttttttttttttttacgatttaggattgttttgagtttgtcgtaagtgattagaggggacgaaaggttttagggttgtacgtaacgagcggttgcgattttttagtttttaattttgtttttaagtgcgtttcgagcgttattcggcgttgttttcgtattatttcgtgattcgatataaattacggtgagtaggggttttcgttttagtattttattttttatcgttaacgtcgattttaatttcgatagtgcgcgcgtcgtcgtatttatttgtagggtatcggttagtggcgtcgggaggggatgttcgagattcgggattagttcggaattatcgcgagttaaagtagcgttagggtttagtattaggaagcgcgttttcgagtcgcgttcgcgtttcgtcgtatttcggcgttttgtgtcgtgtttattttttgcgttattaggttgtatttagtattttcggagtttttcgaggtttgcgacgtcggtgggaggagtatgcgcggagtcgttagttcgggacgcggggcgttttgtttttgcgcgttagttttagagtttggttttaagcgtaggtttcggcgtatgatattttttcgcgttcggttcgcg

SEQ ID NO: 296 - DNA, 631 bp, Artificial Sequence
  chemically treated genomic DNA (Homo sapiens) CpG-island No: 296
cgcgaaccgaacgcgaaaaaatatcatacgccgaaacctacgcttaaaaccaaactctaaaactaacgcgcaaaaacaaaacgccccgcgtcccgaactaacgactccgcgcatactcctcccaccgacgtcgcaaacctcgaaaaactccgaaaatactaaatacaacctaataacgcaaaaaataaacacgacacaaaacgccgaaatacgacgaaacgcgaacgcgactcgaaaacgcgcttcctaatactaaaccctaacgctactttaactcgcgataattccgaactaatcccgaatctcgaacatcccctcccgacgccactaaccgataccctacaaataaatacgacgacgcgcgcactatcgaaattaaaatcgacgttaacgataaaaaataaaatactaaaacgaaaacccctactcaccgtaatttatatcgaatcacgaaataatacgaaaacaacgccgaataacgctcgaaacgcacttaaaaacaaaattaaaaactaaaaaatcgcaaccgctcgttacgtacaaccctaaaacctttcgtcccctctaatcacttacgacaaactcaaaacaatcctaaatcgtaaaaaaaaaaaaaaaaaataatattatt

SEQ ID NO: 297 - DNA, 934 bp, Artificial Sequence
  chemically treated genomic DNA (Homo sapiens) CpG-island No: 297
tcgacgtcgggagagtttatagagtgcgagttttatggtgtttgttattagttttcgttaagggttataaagtttggtaggagtcgcggcgaattcgggagcggcggcgtcgcgggtaggttgtaggcggtcgtcgtatacgtattacgttttgttgatatgtttggaagtaggtacggcggggaaacgtttttaagtaagttttaaggtttgggtgtcgcgtttcgcgtttcgttcggtatttttgaggagcggttcgcgcgcgtttcggttttcgcgtttttttttattttattttatttcggttcgtttatagacggttcgcggttttttttcggtttcgtcgtcgtagcggggttcggttttgttttttcgtcgttatttgttgtcgggggcggttttttttatatattatttcgtgtttcggggacggcggcggttgtaggtttcgcggtttttatatgaggcgtttttggtttttcgtttcgcgttttcgtagtcgcggtttttcgcgtttcgttcgtattcgaggcgttggtttcgcggagggcgttaacgcggttttatttttgcggttttggttgtttagaaagaagtttttttttttagtttcgcgttgtttgtgtttagggattttcggcgtcgcgagagattattttagcgagcggttgttatcgcgtaagttttttgtatttgggttataaatagcgagtttaaaatggcgtttagggttcgcggtcgcgcgtttttttggcgcgttttcgtttaagggggcgggaagggggcggggggggggcggagttcggcgggagtagggtcgcgtttaagcgggagcgcgcgttgcggtcgttttagtttttttgttgtgggacgagtttttgtttttttgttagagatgtgattttcgtttgaaggggattttttttgttgtttt

SEQ ID NO: 298 - DNA, 934 bp, Artificial Sequence
  chemically treated genomic DNA (Homo sapiens) CpG-island No: 298
aaaacaacaaaaaaaatccccttcaaacgaaaatcacatctctaacaaaaaaacaaaaactcgtcccacaacaaaaaaactaaaacgaccgcaacgcgcgctcccgcttaaacgcgaccctactcccgccgaactccgccccccccccgcccccttcccgcccccttaaacgaaaacgcgccaaaaaaacgcgcgaccgcgaaccctaaacgccattttaaactcgctatttataacccaaatacaaaaaacttacgcgataacaaccgctcgctaaaataatctctcgcgacgccgaaaatccctaaacacaaacaacgcgaaactaaaaaaaaaaacttctttctaaacaaccaaaaccgcaaaaataaaaccgcgttaacgccctccgcgaaaccaacgcctcgaatacgaacgaaacgcgaaaaaccgcgactacgaaaacgcgaaacgaaaaaccaaaaacgcctcatataaaaaccgcgaaacctacaaccgccgccgtccccgaaacacgaaataatatataaaaaaaaccgcccccgacaacaaataacgacgaaaaaacaaaaccgaaccccgctacgacgacgaaaccgaaaaaaaaccgcgaaccgtctataaacgaaccgaaataaaataaaataaaaaaaaacgcgaaaaccgaaacgcgcgcgaaccgctcctcaaaaataccgaacgaaacgcgaaacgcgacacccaaaccttaaaacttacttaaaaacgtttccccgccgtacctacttccaaacatatcaacaaaacgtaatacgtatacgacgaccgcctacaacctacccgcgacgccgccgctcccgaattcgccgcgactcctaccaaactttataacccttaacgaaaactaataacaaacaccataaaactcgcactctataaactctcccgacgtcga

SEQ ID NO: 299 - DNA, 934 bp, Artificial Sequence
  chemically treated genomic DNA (Homo sapiens) CpG-island No: 299
aaaataataaaaaaaattttttttaagcgggagttatatttttggtaggaaggtagaggttcgttttatagtaaggagattggggcggtcgtagcgcgcgttttcgtttgggcgcggttttattttcgtcgggtttcgtttttttttcgtttttttttcgtttttttgggcggggacgcgttagggaagcgcgcggtcgcgagttttgggcgttattttagattcgttgtttgtggtttaggtgtaggaagtttacgcggtggtagtcgttcgttgaggtagtttttcgcggcgtcggggatttttgaatatagatagcgcgggattgagaaggaaagtttttttttgggtagttagagtcgtaaaggtggagtcgcgttggcgtttttcgcgggattagcgtttcggatgcgggcggagcgcggggggtcgcggttgcgggagcgcgaagcggggggttaggggcgttttatgtgagagtcgcgggatttgtagtcgtcgtcgttttcggagtacggggtggtgtgtgggggaagtcgttttcggtagtaggtaacggcggaggggtagggtcgagtttcgttgcgacggcggagtcggggagggatcgcggatcgtttgtgggcgggtcggggtggggtggggtgggggggggcgcgggggtcggggcgcgcgcgggtcgttttttaggagtgtcgggcggggcgcggggcgcggtatttagattttggagtttgtttgggggcgttttttcgtcgtgtttgtttttaaatatgttaataaggcgtggtgcgtgtgcggcggtcgtttgtagtttgttcgcgacgtcgtcgttttcgggttcgtcgcggtttttgttaggttttatgatttttggcgggggttggtgataggtattatggagttcgtattttgtgggttttttcggcgtcgg

SEQ ID NO: 300 - DNA, 934 bp, Artificial Sequence
  chemically treated genomic DNA (Homo sapiens) CpG-island No: 300
ccgacgccgaaaaaacccacaaaatacgaactccataatacctatcaccaacccccgccaaaaatcataaaacctaacaaaaaccgcgacgaacccgaaaacgacgacgtcgcgaacaaactacaaacgaccgccgcacacgcaccacgccttattaacatatttaaaaacaaacacgacgaaaaaacgcccccaaacaaactccaaaatctaaataccgcgccccgcgccccgcccgacactcctaaaaaacgacccgcgcgcgccccgacccccgcgcccccccccaccccaccccaccccgacccgcccacaaacgatccgcgatccctccccgactccgccgtcgcaacgaaactcgaccctacccctccgccgttacctactaccgaaaacgacttcccccacacaccaccccgtactccgaaaacgacgacgactacaaatcccgcgactctcacataaaacgcccctaaccccccgcttcgcgctcccgcaaccgcgaccccccgcgctccgcccgcatccgaaacgctaatcccgcgaaaaacgccaacgcgactccacctttacgactctaactacccaaaaaaaaactttccttctcaatcccgcgctatctatattcaaaaatccccgacgccgcgaaaaactacctcaacgaacgactaccaccgcgtaaacttcctacacctaaaccacaaacaacgaatctaaaataacgcccaaaactcgcgaccgcgcgcttccctaacgcgtccccgcccaaaaaaacgaaaaaaaaacgaaaaaaaaacgaaacccgacgaaaataaaaccgcgcccaaacgaaaacgcgcgctacgaccgccccaatctccttactataaaacgaacctctaccttcctaccaaaaatataactcccgcttaaaaaaaattttttttattatttt

SEQ ID NO: 301 - DNA, 518 bp, Artificial Sequence
  chemically treated genomic DNA (Homo sapiens) CpG-island No: 301
gatttttagattttcggggtgtttagttcgagtttgggtcgttaggggtcgcgggtttggcgggcggggcgggggtcggggtcgggggttcggcgagttttaatgcgcgtataaagttttatttgtaggttaatgtcgcggtatattcgttttttttttcgttcggcgttttttgttcggtcgcgttcgtttttcgcgttagatggtcgcggaaatgttaatttcgggagtttttgtttttttattttcgcgtttaattgcgtttttgtagatgggtcgcgagtgtgcgttttatgtagatgagcgcggtttcgtcgtttttttcggattttcgggagtcgcggtcgggcgtgttggggtcgagggtagggagggggtcgttgtttttttattcgacgcgtcgtcgggtacgggcgggtatttagcggttcgggttcgggaagcgcgtttttttttttttatttttttaaaatgggattttaagtgattttgaatgaaaataaattggttcgtttttt

SEQ ID NO: 302 - DNA, 518 bp, Artificial Sequence
  chemically treated genomic DNA (Homo sapiens) CpG-island No: 302
aaaaaacgaaccaatttattttcattcaaaatcacttaaaatcccattttaaaaaaataaaaaaaaaaaaacgcgcttcccgaacccgaaccgctaaatacccgcccgtacccgacgacgcgtcgaataaaaaaacaacgaccccctccctaccctcgaccccaacacgcccgaccgcgactcccgaaaatccgaaaaaaacgacgaaaccgcgctcatctacataaaacgcacactcgcgacccatctacaaaaacgcaattaaacgcgaaaataaaaaaacaaaaactcccgaaattaacatttccgcgaccatctaacgcgaaaaacgaacgcgaccgaacaaaaaacgccgaacgaaaaaaaaaacgaatataccgcgacattaacctacaaataaaactttatacgcgcattaaaactcgccgaacccccgaccccgacccccgccccgcccgccaaacccgcgacccctaacgacccaaactcgaactaaacaccccgaaaatctaaaaatc

SEQ ID NO: 303 - DNA, 518 bp, Artificial Sequence
  chemically treated genomic DNA (Homo sapiens) CpG-island No: 303
agaaagcgggttaatttgtttttatttagaattatttaagattttattttggagaaatgaaaagagagaagcgcgtttttcgggttcgggtcgttgggtgttcgttcgtgttcggcggcgcgtcgagtggagggatagcggttttttttttgttttcggttttagtacgttcggtcgcggttttcggaggttcgaggaaggcggcgaggtcgcgtttatttgtatgaagcgtatattcgcggtttatttgtaaaggcgtaattaaacgcgggggtgggggggtaggggttttcgaaattagtattttcgcggttatttggcgcgaggagcgggcgcggtcggataaagggcgtcgggcgaggggagaggcgagtgtgtcgcggtattgatttgtaaatgaggttttgtgcgcgtattaaagttcgtcggattttcgatttcggttttcgtttcgttcgttaggttcgcggtttttagcggtttaggttcggattgggtatttcgaaggtttgggggtt

SEQ ID NO: 304 - DNA, 518 bp, Artificial Sequence
  chemically treated genomic DNA (Homo sapiens) CpG-island No: 304
aacccccaaaccttcgaaatacccaatccgaacctaaaccgctaaaaaccgcgaacctaacgaacgaaacgaaaaccgaaatcgaaaatccgacgaactttaatacgcgcacaaaacctcatttacaaatcaataccgcgacacactcgcctctcccctcgcccgacgccctttatccgaccgcgcccgctcctcgcgccaaataaccgcgaaaatactaatttcgaaaacccctacccccccacccccgcgtttaattacgcctttacaaataaaccgcgaatatacgcttcatacaaataaacgcgacctcgccgccttcctcgaacctccgaaaaccgcgaccgaacgtactaaaaccgaaaacaaaaaaaaaaccgctatccctccactcgacgcgccgccgaacacgaacgaacacccaacgacccgaacccgaaaaacgcgcttctctcttttcatttctccaaaataaaatcttaaataattctaaataaaaacaaattaacccgctttct

SEQ ID NO: 305 - DNA, 707 bp, Artificial Sequence
  chemically treated genomic DNA (Homo sapiens) CpG-island No: 305
gggggttgttgtgtcgacgcggatttgttatatggttgcgcggagttaggaagaatgggtttttgtgtgtgcgatcgggacgtagcggcgcgggtcgtgttagtcgggcggagtcgggtgttcgacggcgtaggacgagcgggcgtaggacgagcgagcgtagcgggcgcgggcgtatcgtcggggcgcggggatttcgagggttagcggagtcgtgttgcgcgtagggatggacgttgggcgtttaaggttcgttttcgtggataggcgcgcggagggtagtaggatcgatgtatcgacggacgtatcgacggacgcgcggatagatgcgtcgatcgtaggttttttcgtcgtttcggggtcgtcgtgttcgtgtaggtcgcgagtagcggcggggtcggttttgcggttgtagtagttttattgtgaggtcggcgagataatgggcggttcgaggaggtatttgttcgtttgaaaggtttataaatcgtcgtcgcgtttagttgttttttcgttttttttcgcggattcgttagcgggaagcgcggtcgcggtcgggagggggaggttcggttcgatagtcgggtagggtcgtttgggttatcgacgcgcgttttttttcgtttgggcgggtttggattttggtcgcgtttagtattgtttttagttttttttttggagtttgtattttaggttttttttcggtt

SEQ ID NO: 306 - DNA, 707 bp, Artificial Sequence
  chemically treated genomic DNA (Homo sapiens) CpG-island No: 306
aaccgaaaaaaaacctaaaatacaaactccaaaaaaaaaactaaaaacaatactaaacgcgaccaaaatccaaacccgcccaaacgaaaaaaaacgcgcgtcgataacccaaacgaccctacccgactatcgaaccgaacctccccctcccgaccgcgaccgcgcttcccgctaacgaatccgcgaaaaaaaacgaaaaaacaactaaacgcgacgacgatttataaacctttcaaacgaacaaatacctcctcgaaccgcccattatctcgccgacctcacaataaaactactacaaccgcaaaaccgaccccgccgctactcgcgacctacacgaacacgacgaccccgaaacgacgaaaaaacctacgatcgacgcatctatccgcgcgtccgtcgatacgtccgtcgatacatcgatcctactaccctccgcgcgcctatccacgaaaacgaaccttaaacgcccaacgtccatccctacgcgcaacacgactccgctaaccctcgaaatccccgcgccccgacgatacgcccgcgcccgctacgctcgctcgtcctacgcccgctcgtcctacgccgtcgaacacccgactccgcccgactaacacgacccgcgccgctacgtcccgatcgcacacacaaaaacccattcttcctaactccgcgcaaccatataacaaatccgcgtcgacacaacaaccccc

SEQ ID NO: 307 - DNA, 707 bp, Artificial Sequence
  chemically treated genomic DNA (Homo sapiens) CpG-island No: 307
ggtcgggaagaagtttggagtgtagattttagaggggaggttggaggtagtattagacgcggttagagtttagattcgtttaggcgggagggagcgcgcgtcggtggtttaggcggttttgttcgattgtcggatcgagtttttttttttcggtcgcggtcgcgtttttcgttagcgggttcgcggggaggggcgggaaggtagttggacgcggcggcgatttatgggttttttaggcgagtaggtgttttttcgggtcgtttattgtttcgtcggttttataatggggttgttgtagtcgtagagtcggtttcgtcgttgttcgcggtttgtacgggtacgacggtttcgggacggcgggagagtttgcggtcggcgtatttgttcgcgcgttcgtcggtgcgttcgtcggtgtatcggttttgttgtttttcgcgcgtttgtttacgggaacgggttttgggcgtttagcgtttatttttgcgcgtagtacggtttcgttggttttcggggttttcgcgtttcgacggtgcgttcgcgttcgttgcgttcgttcgttttgcgttcgttcgttttgcgtcgtcgggtattcggtttcgttcggttggtacggttcgcgtcgttgcgtttcggtcgtatatataggggtttattttttttggtttcgcgtaattatatggtaaattcgcgtcgatatagtagttttt

SEQ ID NO: 308 - DNA, 707 bp, Artificial Sequence
  chemically treated genomic DNA (Homo sapiens) CpG-island No: 308
aaaaactactatatcgacgcgaatttaccatataattacgcgaaaccaaaaaaaataaacccctatatatacgaccgaaacgcaacgacgcgaaccgtaccaaccgaacgaaaccgaatacccgacgacgcaaaacgaacgaacgcaaaacgaacgaacgcaacgaacgcgaacgcaccgtcgaaacgcgaaaaccccgaaaaccaacgaaaccgtactacgcgcaaaaataaacgctaaacgcccaaaacccgttcccgtaaacaaacgcgcgaaaaacaacaaaaccgatacaccgacgaacgcaccgacgaacgcgcgaacaaatacgccgaccgcaaactctcccgccgtcccgaaaccgtcgtacccgtacaaaccgcgaacaacgacgaaaccgactctacgactacaacaaccccattataaaaccgacgaaacaataaacgacccgaaaaaacacctactcgcctaaaaaacccataaatcgccgccgcgtccaactaccttcccgcccctccccgcgaacccgctaacgaaaaacgcgaccgcgaccgaaaaaaaaaaactcgatccgacaatcgaacaaaaccgcctaaaccaccgacgcgcgctccctcccgcctaaacgaatctaaactctaaccgcgtctaatactacctccaacctcccctctaaaatctacactccaaacttcttcccgacc

SEQ ID NO: 309 - DNA, 2395 bp, Artificial Sequence
  chemically treated genomic DNA (Homo sapiens) CpG-island No: 309
cgaggtttagcgtttttttaacgttcgttgtttcggtaggttttttcggggttttttgggttttaaattgcgaggagaggggcggttagtaaagtcggcggggattcggcgggtcggtttttcgcgtttttttaggtgcgttgtatttatttggtttatcgtagttttttgcgcggggtttgttttatcgagtttacgttaggggcggcgtttggagagggatacggcgcggggatatcgttcgacgattttttaggcgttgattttttgcgtttggcgaagaaatttgcgggcgatagcgcgcgcggtcggttagggcggggtcggttcggagattcgagagggggtcgggagagggcgcggggcgcgggtcggtcggggtgggggcgtcgttttcgttcgcgtcgaggttcgcggcgggttagttttgtttacgtcgtcgcgtaatgtgttgtgtaagtatttttttttgtttcgcggttaagtttttcggggtcgtcgtcgcgtttaattttttttacgtcgtgtttacggggcgcgggcgcgttcggggaggggttttcgcggtcgggggcgaaaattgcgttttcggggggtcgcggtcgggatttagttttttatttcggttcgcgcgaagtcgttttattcgagaagaacggggtcgcgaagtcgttggagggtataataacggggcggggaggggggtaagcgtagtcgcgttttgagcgttgcgggttttttaatgttacgggaggaggcgggaatttagcgaggttttcgagggttggggggatcggtcggtcggataaagcggggtcggttcgggtcggggcggggtcgtgcggggtttatcggagattagaggttcggatagttttttgatcgtcgcgtcgttggcgttggcggtcgcggtgtcggtcgcgggacgtttcgaaattttcgagtgtagttggttagcgagaggtttttggtcgcgttgtttttggttcgcgttttgttcggcgtttttttgaggcgtcgcgttcggggtcggggtcggggcgggggtcggggttcgggttcgggtcggggttggggttcgggtcgcgattggagtcggggtcggagtcggagtcggagtcggggtcggggtcggggttaggatcgcgatcgcgatcggagtcgcgatcggagtcgcgatcggagtcggagtcggggtcggggttggagttaggatcgggattgggggcggggtggacgtcggggtcgggatcgggatattaggtagttgtttcggcgttttttcgaggtcgtcgagggatttagcggtcggttcgaggggcgggttgatagttatcgcgatcgcgacgggtcgcggcgttagtagtaggcggtagcgttttatttgtatcgtttcgcggtagaacgcgggtatcgagtcgttgtttatttcggtttattgtaggcgtttagggtttcgtagcggtatgttttgttggaagtcgtaattttagcggttttggttttcggcgtttagttcggttaggcgggtttgtagttcgcggtttagtttttcgtggtttatcggttcgaagaggttgcggtaggcgttggtgcgtattagtattgggaaggttttacgggcgataagacgttttatcgtggatgtgttgcggagggacgcgtcggatatggttcggggttgcgtaaacgcgggtagcgagagaggagaggatagcgagaagaaggggaaaggagaggaggagagggcggaggtcgggcgtaagggagatttcgcgtcgttcgattttgcgtgtgcgagggacgcggcggttatttggttgttcggtggtggatttttttgcgtcgggttcgtttgtttcgttcggacggtagtcgcgttttttcgatgtttgttggttagttcgttcgtttaggtttggtcggtatttttcgagtatagcgtatttggtttgtggaacgtttagttcgtttgcgttttttttatacgcgcgggttttattttcgtgcgcgcgggttcggtcgcgattagtataatgtagtatttttagttttaataatattacggcgattggcggtcgtttcgttgtttcgtttcgtcgcggttcggttttcgcgtatcgtttattggtcgcgcgtatatttatcgggggcggggcggggcgcgcggtcggggcgcgcggttgattggcggtcgcggggcgagcgcgttgtagtaggggaagggggcggtgagcggggcgggggcgggagttaaagggcgttgcgggcggtaacgtgatatcgcgacgtttcgttttttcgttttattttttttgtaatatttttttattttttcggttttcgtttttcgtcggtttttttgtttgtaggcgggggttttagtttagcgcgg

SEQ ID NO: 310 - DNA, 2395 bp, Artificial Sequence
  chemically treated genomic DNA (Homo sapiens) CpG-island No: 310
ccgcgctaaactaaaacccccgcctacaaacaaaaaaaccgacgaaaaacgaaaaccgaaaaaataaaaaaatattacaaaaaaaataaaacgaaaaaacgaaacgtcgcgatatcacgttaccgcccgcaacgccctttaactcccgcccccgccccgctcaccgcccccttcccctactacaacgcgctcgccccgcgaccgccaatcaaccgcgcgccccgaccgcgcgccccgccccgcccccgataaatatacgcgcgaccaataaacgatacgcgaaaaccgaaccgcgacgaaacgaaacaacgaaacgaccgccaatcgccgtaatattattaaaactaaaaatactacattatactaatcgcgaccgaacccgcgcgcacgaaaataaaacccgcgcgtataaaaaaaacgcaaacgaactaaacgttccacaaaccaaatacgctatactcgaaaaataccgaccaaacctaaacgaacgaactaaccaacaaacatcgaaaaaacgcgactaccgtccgaacgaaacaaacgaacccgacgcaaaaaaatccaccaccgaacaaccaaataaccgccgcgtccctcgcacacgcaaaatcgaacgacgcgaaatctcccttacgcccgacctccgccctctcctcctctcctttccccttcttctcgctatcctctcctctctcgctacccgcgtttacgcaaccccgaaccatatccgacgcgtccctccgcaacacatccacgataaaacgtcttatcgcccgtaaaaccttcccaatactaatacgcaccaacgcctaccgcaacctcttcgaaccgataaaccacgaaaaactaaaccgcgaactacaaacccgcctaaccgaactaaacgccgaaaaccaaaaccgctaaaattacgacttccaacaaaacataccgctacgaaaccctaaacgcctacaataaaccgaaataaacaacgactcgatacccgcgttctaccgcgaaacgatacaaataaaacgctaccgcctactactaacgccgcgacccgtcgcgatcgcgataactatcaacccgcccctcgaaccgaccgctaaatccctcgacgacctcgaaaaaacgccgaaacaactacctaatatcccgatcccgaccccgacgtccaccccgcccccaatcccgatcctaactccaaccccgaccccgactccgactccgatcgcgactccgatcgcgactccgatcgcgatcgcgatcctaaccccgaccccgaccccgactccgactccgactccgaccccgactccaatcgcgacccgaaccccaaccccgacccgaacccgaaccccgacccccgccccgaccccgaccccgaacgcgacgcctcaaaaaaacgccgaacaaaacgcgaaccaaaaacaacgcgaccaaaaacctctcgctaaccaactacactcgaaaatttcgaaacgtcccgcgaccgacaccgcgaccgccaacgccaacgacgcgacgatcaaaaaactatccgaacctctaatctccgataaaccccgcacgaccccgccccgacccgaaccgaccccgctttatccgaccgaccgatccccccaaccctcgaaaacctcgctaaattcccgcctcctcccgtaacattaaaaaacccgcaacgctcaaaacgcgactacgcttacccccctccccgccccgttattataccctccaacgacttcgcgaccccgttcttctcgaataaaacgacttcgcgcgaaccgaaataaaaaactaaatcccgaccgcgaccccccgaaaacgcaattttcgcccccgaccgcgaaaacccctccccgaacgcgcccgcgccccgtaaacacgacgtaaaaaaaattaaacgcgacgacgaccccgaaaaacttaaccgcgaaacaaaaaaaaatacttacacaacacattacgcgacgacgtaaacaaaactaacccgccgcgaacctcgacgcgaacgaaaacgacgcccccaccccgaccgacccgcgccccgcgccctctcccgaccccctctcgaatctccgaaccgaccccgccctaaccgaccgcgcgcgctatcgcccgcaaatttcttcgccaaacgcaaaaaatcaacgcctaaaaaatcgtcgaacgatatccccgcgccgtatccctctccaaacgccgcccctaacgtaaactcgataaaacaaaccccgcgcaaaaaactacgataaaccaaataaatacaacgcacctaaaaaaacgcgaaaaaccgacccgccgaatccccgccgactttactaaccgcccctctcctcgcaatttaaaacccaaaaaaccccgaaaaaacctaccgaaacaacgaacgttaaaaaaacgctaaacctcg

SEQ ID NO: 311 - DNA, 2395 bp, Artificial Sequence
  chemically treated genomic DNA (Homo sapiens) CpG-island No: 311
tcgcgttgggttgaggttttcgtttgtagataaaggagtcggcggggggcgggagtcgggggggtgggggagtgttgtaggggggatggggcgagggggcggggcgtcgcggtgttacgttatcgttcgtagcgttttttaattttcgttttcgtttcgtttatcgttttttttttttgttatagcgcgttcgtttcgcggtcgttaattagtcgcgcgtttcggtcgcgcgtttcgtttcgttttcggtgggtgtgcgcgcggttaatgggcggtgcgcgggggtcgggtcgcggcggggcggggtagcggggcggtcgttaatcgtcgtggtgttgttgaaattgaaaatattatattatgttaatcgcggtcgggttcgcgcgtacgggggtggggttcgcgcgtataaagggggcgtaggcgggttgggcgttttataggttaagtgcgttgtgttcgaggggtgtcggttaggtttgagcgagcgagttagttagtaggtatcgagggggcgcggttgtcgttcggacgagataggcgaattcgacgtagaagagtttattatcggatagttaggtagtcgtcgcgtttttcgtatacgtagagtcgggcggcgcggggttttttttgcgttcggttttcgttttttttttttttttttttttttttttttcgttgtttttttttttttcgttgttcgcgtttgcgtagtttcgggttatgttcgacgcgttttttcgtagtatatttacgatggagcgttttgtcgttcgtgggatttttttagtattagtgcgtattagcgtttgtcgtagttttttcgggtcggtggattacgaggagttgagtcgcgagttgtaggttcgtttggtcgagttgaacgtcgaggattagaatcgttgggattacgatttttagtaggatatgtcgttgcggggttttggacgtttgtagtggatcgaagtggatagcgattcggtgttcgcgttttatcgcgagacggtgtaggtggggcgttgtcgtttgttgttggcgtcgcggttcgtcgcggtcgcggtggttgttagttcgtttttcgagtcggtcgttgagtttttcgacggtttcgaggaggcgtcggagtagttgtttagtgtttcggtttcggtttcggcgtttatttcgtttttagtttcggttttggttttagtttcggtttcggtttcggtttcggtcgcggtttcggtcgcggtttcggtcgcggtcgcggttttggtttcggtttcggtttcggtttcggtttcggtttcggtttcggttttagtcgcggttcgggttttagtttcggttcgggttcgggtttcggttttcgtttcggtttcggtttcggacgcggcgttttaagagagcgtcgagtagggcgcgaattaggggtagcgcggttaggagtttttcgttgattagttgtattcggggatttcgggacgtttcgcggtcggtatcgcggtcgttagcgttaacggcgcggcgattaagaagttgttcgggtttttgattttcggtgagtttcgtacggtttcgtttcggttcgggtcggtttcgttttgttcggtcggtcggtttttttagttttcgggggtttcgttgggttttcgttttttttcgtggtattaaagggttcgtagcgtttagggcgcggttgcgtttattttttttttcgtttcgttgttgtgttttttagcggtttcgcggtttcgtttttttcgggtggagcggtttcgcgcgggtcggggtgggaggttgaatttcggtcgcgatttttcgggagcgtagttttcgttttcggtcgcgggagttttttttcgggcgcgttcgcgtttcgtgagtacggcgtggagggggttaagcgcggcggcggtttcggggggtttggtcgcgggataaggggaaatgtttatatagtatattgcgcggcgacgtaaataaagttgattcgtcgcggatttcggcgcgggcggggacggcgtttttatttcggtcggttcgcgtttcgcgttttttttcggttttttttcgggttttcgggtcggtttcgttttgatcggtcgcgcgcgttgtcgttcgtagattttttcgttaagcgtaagagattagcgtttgagaagtcgtcgggcgatgttttcgcgtcgtgtttttttttaagcgtcgtttttggcgtgggttcggtggagtagatttcgcgtaagaggttgcggtgagttaagtgagtatagcgtatttgggggggcgcggagggtcgattcgtcgggttttcgtcggttttgttgatcgttttttttttcgtagtttagagtttaaagagtttcgagggaatttgtcggggtagcggacgttggaagggcgttgggtttcg

SEQ ID NO: 312 - DNA, 2395 bp, Artificial Sequence
  chemically treated genomic DNA (Homo sapiens) CpG-island No: 312
cgaaacccaacgcccttccaacgtccgctaccccgacaaattccctcgaaactctttaaactctaaactacgaaaaaaaaaacgatcaacaaaaccgacgaaaacccgacgaatcgaccctccgcgcccccccaaatacgctatactcacttaactcaccgcaacctcttacgcgaaatctactccaccgaacccacgccaaaaacgacgcttaaaaaaaaacacgacgcgaaaacatcgcccgacgacttctcaaacgctaatctcttacgcttaacgaaaaaatctacgaacgacaacgcgcgcgaccgatcaaaacgaaaccgacccgaaaacccgaaaaaaaaccgaaaaaaaacgcgaaacgcgaaccgaccgaaataaaaacgccgtccccgcccgcgccgaaatccgcgacgaatcaactttatttacgtcgccgcgcaatatactatataaacatttccccttatcccgcgaccaaaccccccgaaaccgccgccgcgcttaaccccctccacgccgtactcacgaaacgcgaacgcgcccgaaaaaaaactcccgcgaccgaaaacgaaaactacgctcccgaaaaatcgcgaccgaaattcaacctcccaccccgacccgcgcgaaaccgctccacccgaaaaaaacgaaaccgcgaaaccgctaaaaaacacaacaacgaaacgaaaaaaaaaataaacgcaaccgcgccctaaacgctacgaaccctttaataccacgaaaaaaaacgaaaacccaacgaaacccccgaaaactaaaaaaaccgaccgaccgaacaaaacgaaaccgacccgaaccgaaacgaaaccgtacgaaactcaccgaaaatcaaaaacccgaacaacttcttaatcgccgcgccgttaacgctaacgaccgcgataccgaccgcgaaacgtcccgaaatccccgaatacaactaatcaacgaaaaactcctaaccgcgctacccctaattcgcgccctactcgacgctctcttaaaacgccgcgtccgaaaccgaaaccgaaacgaaaaccgaaacccgaacccgaaccgaaactaaaacccgaaccgcgactaaaaccgaaaccgaaaccgaaaccgaaaccgaaaccgaaaccgaaaccaaaaccgcgaccgcgaccgaaaccgcgaccgaaaccgcgaccgaaaccgaaaccgaaaccgaaactaaaaccaaaaccgaaactaaaaacgaaataaacgccgaaaccgaaaccgaaacactaaacaactactccgacgcctcctcgaaaccgtcgaaaaactcaacgaccgactcgaaaaacgaactaacaaccaccgcgaccgcgacgaaccgcgacgccaacaacaaacgacaacgccccacctacaccgtctcgcgataaaacgcgaacaccgaatcgctatccacttcgatccactacaaacgtccaaaaccccgcaacgacatatcctactaaaaatcgtaatcccaacgattctaatcctcgacgttcaactcgaccaaacgaacctacaactcgcgactcaactcctcgtaatccaccgacccgaaaaaactacgacaaacgctaatacgcactaatactaaaaaaatcccacgaacgacaaaacgctccatcgtaaatatactacgaaaaaacgcgtcgaacataacccgaaactacgcaaacgcgaacaacgaaaaaaaaaaaaacaacgaaaaaaaaaaaaaaaaaaaaaaaaaaaaaacgaaaaccgaacgcaaaaaaaaccccgcgccgcccgactctacgtatacgaaaaacgcgacgactacctaactatccgataataaactcttctacgtcgaattcgcctatctcgtccgaacgacaaccgcgccccctcgatacctactaactaactcgctcgctcaaacctaaccgacacccctcgaacacaacgcacttaacctataaaacgcccaacccgcctacgccccctttatacgcgcgaaccccacccccgtacgcgcgaacccgaccgcgattaacataatataatattttcaatttcaacaacaccacgacgattaacgaccgccccgctaccccgccccgccgcgacccgacccccgcgcaccgcccattaaccgcgcgcacacccaccgaaaacgaaacgaaacgcgcgaccgaaacgcgcgactaattaacgaccgcgaaacgaacgcgctataacaaaaaaaaaaaacgataaacgaaacgaaaacgaaaattaaaaaacgctacgaacgataacgtaacaccgcgacgccccgccccctcgccccatcccccctacaacactcccccacccccccgactcccgccccccgccgactcctttatctacaaacgaaaacctcaacccaacgcga

SEQ ID NO: 313 - DNA, 1101 bp, Artificial Sequence
  chemically treated genomic DNA (Homo sapiens) CpG-island No: 313
attgcggggcgtcgggttttttaaggaggtgtagcgttttcgtttcgtcgtttggggttgaagtggttttttttaaaggtttcggtttcggttgttagggcgtagggttcgtcgggacgcgggtagttatttatcgcggcgggtttatggcgtgcggggtttgggttgcggggatggtttggagggtttcgagggttcggagggtgcggcggtcgcggtagttacggcgttttcggcgggtgcggcgggtgcggtgcgtttttggcggttgcgaaagttttgtagggcgcggcggttttggaaatcgatgagcgttagcgcgatggtcgcgttttagtagttttcgttcgcgtagcggaagtcgatttttttgtggtcggtggtgacgatggtgaagtatacgtatttgttcgtgcgttttacgtagtttattttgaggatggagtggaagcgtagttttttggggcgcgcgcgggggttggcggggaataggtttaggcggtcggaggtgagtatttcgcgtttttttttttatagttggaagaggttgtcgttgcgtttttttaattcgttttcgcgtagtatttcgtcgggggattttatgtcgtgtcgagcgcgggattgggagcggtaatgcgggcggtgacggcgtcggttttgtttttcgtggtttcggcgcggtttttatagttgttttttttcgtttcgttttttttcgtttcgtttcggttttcgggttatttcgttcgtttgagtttcgcgcgtttcgggttatattttttttaagtttagtcgttcgggttcgtatcgtcgcgttcgcgttttggtcggttttcggtcgtttttttttattttaaaagttcgcgttttttttgtttttcgtgttttagttgttcggtttcgtggggtgattcgaggtttcgtttcgttcgggcgttcgttcgtatcgtttcgtaggtcggtttcgcggaagaatgcgttgtagttagttttgttcgcgatgatttacgtcggggagtttcgggaagtatcggagggtcgggggcgggtttatcgtggggagatagtcgggattagatttttattttttaggcgttttaa

SEQ ID NO: 314 - DNA, 1101 bp, Artificial Sequence
  chemically treated genomic DNA (Homo sapiens) CpG-island No: 314
ttaaaacgcctaaaaaataaaaatctaatcccgactatctccccacgataaacccgcccccgaccctccgatacttcccgaaactccccgacgtaaatcatcgcgaacaaaactaactacaacgcattcttccgcgaaaccgacctacgaaacgatacgaacgaacgcccgaacgaaacgaaacctcgaatcaccccacgaaaccgaacaactaaaacacgaaaaacaaaaaaaacgcgaacttttaaaataaaaaaaaacgaccgaaaaccgaccaaaacgcgaacgcgacgatacgaacccgaacgactaaacttaaaaaaaatataacccgaaacgcgcgaaactcaaacgaacgaaataacccgaaaaccgaaacgaaacgaaaaaaaacgaaacgaaaaaaaacaactataaaaaccgcgccgaaaccacgaaaaacaaaaccgacgccgtcaccgcccgcattaccgctcccaatcccgcgctcgacacgacataaaatcccccgacgaaatactacgcgaaaacgaattaaaaaaacgcaacgacaacctcttccaactataaaaaaaaaaacgcgaaatactcacctccgaccgcctaaacctattccccgccaacccccgcgcgcgccccaaaaaactacgcttccactccatcctcaaaataaactacgtaaaacgcacgaacaaatacgtatacttcaccatcgtcaccaccgaccacaaaaaaatcgacttccgctacgcgaacgaaaactactaaaacgcgaccatcgcgctaacgctcatcgatttccaaaaccgccgcgccctacaaaactttcgcaaccgccaaaaacgcaccgcacccgccgcacccgccgaaaacgccgtaactaccgcgaccgccgcaccctccgaaccctcgaaaccctccaaaccatccccgcaacccaaaccccgcacgccataaacccgccgcgataaataactacccgcgtcccgacgaaccctacgccctaacaaccgaaaccgaaacctttaaaaaaaaccacttcaaccccaaacgacgaaacgaaaacgctacacctccttaaaaaacccgacgccccgcaat

SEQ ID NO: 315 - DNA, 1101 bp, Artificial Sequence
  chemically treated genomic DNA (Homo sapiens) CpG-island No: 315
ttggggcgtttggagggtgaaggtttggtttcggttgtttttttacggtgggttcgttttcggtttttcggtgtttttcggggtttttcggcgtgagttatcgcgggtagggttggttgtagcgtattttttcgcggggtcggtttgcgagacggtgcgggcgagcgttcgggcggggcgggatttcgagttattttacggggtcggatagttggggtacggggggtaagaggagcgcgggtttttgagatgggaggggacggtcggggatcgattagagcgcggacgcgacggtgcgggttcggacggttgggtttggggagggtatggttcggggcgcgcggggtttaggcgggcggggtggttcgagggtcggggcggggcggggaggggcggggcggggaggggtagttataaaggtcgcgtcggggttacgaggagtagagtcggcgtcgttatcgttcgtattgtcgtttttagtttcgcgttcggtacgatatgaaatttttcgacgaggtgttacgcgagggcgagttggagaagcgtagcgatagttttttttagttatggaagaagaagcgcggggtgtttattttcgatcgtttgagtttgtttttcgttagttttcgcgcgcgttttaaggagttgcgtttttattttatttttaaggtggattgcgtggagcgtacgggtaagtacgtgtattttattatcgttattatcgattataaggagatcgattttcgttgcgcgggcgagagttgttggaacgcggttatcgcgttggcgtttatcgatttttagaatcgtcgcgttttgtaggattttcgtagtcgttaggaacgtatcgtattcgtcgtattcgtcgaggacgtcgtggttgtcgcggtcgtcgtatttttcgagttttcggagttttttaggttattttcgtagtttaaatttcgtacgttatgagttcgtcgcggtgagtgattgttcgcgtttcggcgagttttgcgttttaatagtcgggatcggggtttttgggaaaaattattttaattttagacggcggggcgggggcgttgtatttttttgggggattcggcgtttcgtaat

SEQ ID NO: 316 - DNA, 1101 bp, Artificial Sequence
  chemically treated genomic DNA (Homo sapiens) CpG-island No: 316
attacgaaacgccgaatcccccaaaaaaatacaacgcccccgccccgccgtctaaaattaaaataatttttcccaaaaaccccgatcccgactattaaaacgcaaaactcgccgaaacgcgaacaatcactcaccgcgacgaactcataacgtacgaaatttaaactacgaaaataacctaaaaaactccgaaaactcgaaaaatacgacgaccgcgacaaccacgacgtcctcgacgaatacgacgaatacgatacgttcctaacgactacgaaaatcctacaaaacgcgacgattctaaaaatcgataaacgccaacgcgataaccgcgttccaacaactctcgcccgcgcaacgaaaatcgatctccttataatcgataataacgataataaaatacacgtacttacccgtacgctccacgcaatccaccttaaaaataaaataaaaacgcaactccttaaaacgcgcgcgaaaactaacgaaaaacaaactcaaacgatcgaaaataaacaccccgcgcttcttcttccataactaaaaaaaactatcgctacgcttctccaactcgccctcgcgtaacacctcgtcgaaaaatttcatatcgtaccgaacgcgaaactaaaaacgacaatacgaacgataacgacgccgactctactcctcgtaaccccgacgcgacctttataactacccctccccgccccgcccctccccgccccgccccgaccctcgaaccaccccgcccgcctaaaccccgcgcgccccgaaccataccctccccaaacccaaccgtccgaacccgcaccgtcgcgtccgcgctctaatcgatccccgaccgtcccctcccatctcaaaaacccgcgctcctcttaccccccgtaccccaactatccgaccccgtaaaataactcgaaatcccgccccgcccgaacgctcgcccgcaccgtctcgcaaaccgaccccgcgaaaaaatacgctacaaccaaccctacccgcgataactcacgccgaaaaaccccgaaaaacaccgaaaaaccgaaaacgaacccaccgtaaaaaaacaaccgaaaccaaaccttcaccctccaaacgccccaa

SEQ ID NO: 317 - DNA, 826 bp, Artificial Sequence
  chemically treated genomic DNA (Homo sapiens) CpG-island No: 317
tttcgtcgcggtcgtcgttgtttgtttcgattagaacgcggtttcgtttttgttttatcgtttcgaggtttttagagatggtcgtcgtcgcgttcgcgtcggattcgcggttttattcgttcgttcgggttcggtcgttttttttagcgcgtcgttatcggtttagtattcgtgttttcgtattttacgttttttgcggtagtggcggcgattttagtttcgttcgttttggggttgcgtcgtcgtggtttttaataacgtcggtttttattggtcgaggtttttagttttttttttcgcgagtaagataggttgcgattcgtcgagcgcggcgtaagttaattgcgtttcgcgtcgtagttagtaattaattataagttttcgaagaaacgtcgcgttatatgtaaatattttttcgcgcggcgcgcgttttgcgttttttcgtttttttaaatggggcggggtaaggtggagatcgcgtgtgtggtttcggggggtttcgggttttcgttttcgggatttttttcgggtggtattatatttttcgcgggatattgggtattattttttttcgtgggtttcggttttagtcgtttttattttttgcgtttttttagttttttagtttaatttcgttcgcggcgggtcggtgtttttagtatttcgtgcgttcgttgatgtgagaattttattttttatgtcgttttttcgcgttattttttgagaatatcgcggagggttttttcgtttgggagtcgtttttaattagtttcgttagtggttgggacgtaagtttaattttcgtttattttttaggttttaggtt

SEQ ID NO: 318 - DNA, 826 bp, Artificial Sequence
  chemically treated genomic DNA (Homo sapiens) CpG-island No: 318
aacctaaaacctaaaaaataaacgaaaattaaacttacgtcccaaccactaacgaaactaattaaaaacgactcccaaacgaaaaaaccctccgcgatattctcaaaaaataacgcgaaaaaacgacataaaaaataaaattctcacatcaacgaacgcacgaaatactaaaaacaccgacccgccgcgaacgaaattaaactaaaaaactaaaaaaacgcaaaaaataaaaacgactaaaaccgaaacccacgaaaaaaaataatacccaatatcccgcgaaaaatataataccacccgaaaaaaatcccgaaaacgaaaacccgaaaccccccgaaaccacacacgcgatctccaccttaccccgccccatttaaaaaaacgaaaaaacgcaaaacgcgcgccgcgcgaaaaaatatttacatataacgcgacgtttcttcgaaaacttataattaattactaactacgacgcgaaacgcaattaacttacgccgcgctcgacgaatcgcaacctatcttactcgcgaaaaaaaaaactaaaaacctcgaccaataaaaaccgacgttattaaaaaccacgacgacgcaaccccaaaacgaacgaaactaaaatcgccgccactaccgcaaaaaacgtaaaatacgaaaacacgaatactaaaccgataacgacgcgctaaaaaaaacgaccgaacccgaacgaacgaataaaaccgcgaatccgacgcgaacgcgacgacgaccatctctaaaaacctcgaaacgataaaacaaaaacgaaaccgcgttctaatcgaaacaaacaacgacgaccgcgacgaaa

SEQ ID NO: 319 - DNA, 826 bp, Artificial Sequence
  chemically treated genomic DNA (Homo sapiens) CpG-island No: 319
aatttgggatttgggggatgagcgggggttaggtttacgttttaattattaacggggttggttgaaaacggtttttaggcggaggggtttttcgcgatgtttttaaggagtagcgcgaggggacgatataggaggtggggtttttatattagcgggcgtacggagtgttggaggtatcgattcgtcgcggacgggattgaattagggaattgggagggcgtaggagataaagacggttggggtcggggtttacggagaggggtggtgtttagtgtttcgcgagggatgtggtgttattcggggaaggtttcgggagcggggattcgggatttttcggaattatatacgcggtttttattttgtttcgttttatttaaagaggcggaggaacgtagggcgcgcgtcgcgcggaggaatatttgtatatggcgcggcgttttttcggaggtttgtgattggttgttgattgcggcgcgaagcgtagttgatttgcgtcgcgttcggcgaatcgtagtttgttttgttcgcggagagaggagttaggagtttcggttaatgggagtcggcgttgttggaggttacggcggcgtagttttaaagcgagcgaagttagggtcgtcgttattgtcgtaggaggcgtgaggtgcggagatacgggtgttgggtcggtaacggcgcgttggggagggcggtcgggttcggacgggcgggtggggtcgcgggttcggcgcgggcgcggcggcggttatttttggaagtttcggggcggtggggtaggggcggggtcgcgttttggtcggggtaggtagcggcggtcgcggcgggg

SEQ ID NO: 320 - DNA, 826 bp, Artificial Sequence
  chemically treated genomic DNA (Homo sapiens) CpG-island No: 320
ccccgccgcgaccgccgctacctaccccgaccaaaacgcgaccccgcccctaccccaccgccccgaaacttccaaaaataaccgccgccgcgcccgcgccgaacccgcgaccccacccgcccgtccgaacccgaccgccctccccaacgcgccgttaccgacccaacacccgtatctccgcacctcacgcctcctacgacaataacgacgaccctaacttcgctcgctttaaaactacgccgccgtaacctccaacaacgccgactcccattaaccgaaactcctaactcctctctccgcgaacaaaacaaactacgattcgccgaacgcgacgcaaatcaactacgcttcgcgccgcaatcaacaaccaatcacaaacctccgaaaaaacgccgcgccatatacaaatattcctccgcgcgacgcgcgccctacgttcctccgcctctttaaataaaacgaaacaaaataaaaaccgcgtatataattccgaaaaatcccgaatccccgctcccgaaaccttccccgaataacaccacatccctcgcgaaacactaaacaccacccctctccgtaaaccccgaccccaaccgtctttatctcctacgccctcccaattccctaattcaatcccgtccgcgacgaatcgatacctccaacactccgtacgcccgctaatataaaaaccccacctcctatatcgtcccctcgcgctactccttaaaaacatcgcgaaaaacccctccgcctaaaaaccgttttcaaccaaccccgttaataattaaaacgtaaacctaacccccgctcatcccccaaatcccaaatt

SEQ ID NO: 321 - DNA, 978 bp, Artificial Sequence
  chemically treated genomic DNA (Homo sapiens) CpG-island No: 321
tagcggaacgagagggagttgtttttgggtaaacgtcgtcgtttaggagggaagttgtgcgtattttatattttgttttcgtttttttttcgggattaatcgtagcgttttttcgggtgacggacgggtttttaggatttcggagggggacgcggttcgtgcggcgtttcgcgtatttttattttatttcggtcgcgtcgagcgtcgttttcgtttttttataatttttgtacgtattcgtttatttttttttgtttcggtcgagtcgtttcgggttttcgggaaggtgttttcggtaagttcgttttgtagtcggagtaggtgtagtttcgtcgcgtttttaatcgcgtttgtataaatttgtttgttcgcggtaaggggaatattttgttcgtagttcgcgcgggggttcggttggagcgtcgagagataggatttatttcgcgatcgcggtcggttggggcgttcgtattcgcgtttatggttcgtttttttcgggcgtcgagttcgtagtttttcgtagtgttcggagtttagaagtttcggcgttcgtacgttttcggtcgttcgcggtaagcggatttacgcgttcgggtatagggcgtcgtcgtttggtttttcggggttgttggcgttcgggttgaacggcggggcgggcgggcgggcgcggagtcggggcgggtagcgggcgggcgagcgggcgtcgggttttgtatatgtttattcgcgcggttcggggatagcggtcggtcgtcgtcgggttttagaggcgtcggtgcgtatttttcgtcgttcgggggaggggtcgcggtttcgtcggagggggtttacgttttgtttcggttcgcgagaatacgcgcgcggggcgggttatacgcgttattgtcgagtagagacgtcgttatttattttgatatatatatatatatatatatatattagttatttagagttatagttttttatcggggttttacg

SEQ ID NO: 322 - DNA, 978 bp, Artificial Sequence
  chemically treated genomic DNA (Homo sapiens) CpG-island No: 322
cgtaaaaccccgataaaaaactataactctaaataactaatatatatatatatatatatatatatcaaaataaataacgacgtctctactcgacaataacgcgtataacccgccccgcgcgcgtattctcgcgaaccgaaacaaaacgtaaaccccctccgacgaaaccgcgacccctcccccgaacgacgaaaaatacgcaccgacgcctctaaaacccgacgacgaccgaccgctatccccgaaccgcgcgaataaacatatacaaaacccgacgcccgctcgcccgcccgctacccgccccgactccgcgcccgcccgcccgccccgccgttcaacccgaacgccaacaaccccgaaaaaccaaacgacgacgccctatacccgaacgcgtaaatccgcttaccgcgaacgaccgaaaacgtacgaacgccgaaacttctaaactccgaacactacgaaaaactacgaactcgacgcccgaaaaaaacgaaccataaacgcgaatacgaacgccccaaccgaccgcgatcgcgaaataaatcctatctctcgacgctccaaccgaacccccgcgcgaactacgaacaaaatattccccttaccgcgaacaaacaaatttatacaaacgcgattaaaaacgcgacgaaactacacctactccgactacaaaacgaacttaccgaaaacaccttcccgaaaacccgaaacgactcgaccgaaacaaaaaaaaataaacgaatacgtacaaaaattataaaaaaacgaaaacgacgctcgacgcgaccgaaataaaataaaaatacgcgaaacgccgcacgaaccgcgtccccctccgaaatcctaaaaacccgtccgtcacccgaaaaaacgctacgattaatcccgaaaaaaaaacgaaaacaaaatataaaatacgcacaacttccctcctaaacgacgacgtttacccaaaaacaactccctctcgttccgcta

SEQ ID NO: 323 - DNA, 978 bp, Artificial Sequence
  chemically treated genomic DNA (Homo sapiens) CpG-island No: 323
cgtggggtttcggtgaaaggttgtggttttgggtgattggtgtgtgtgtgtgtgtgtgtgtgtattagagtgggtggcggcgtttttgttcggtagtggcgcgtgtggttcgtttcgcgcgcgtgttttcgcgggtcggggtagggcgtgggtttttttcggcggagtcgcgatttttttttcgggcggcgggaggtgcgtatcggcgtttttaggattcggcggcggtcggtcgttgttttcgggtcgcgcgagtgagtatgtgtagagttcggcgttcgttcgttcgttcgttgttcgtttcggtttcgcgttcgttcgttcgtttcgtcgtttagttcggacgttagtagtttcggggagttaggcggcggcgttttgtgttcgggcgcgtgggttcgtttgtcgcgggcggtcggagacgtgcgggcgtcggggtttttgggtttcgggtattgcggggggttgcgggttcggcgttcggggaaggcgggttatgggcgcgggtgcgggcgttttagtcggtcgcgatcgcggggtgagttttgtttttcggcgttttagtcggattttcgcgcgggttgcgagtagggtgttttttttgtcgcgggtaaataagtttgtgtagacgcggttgggagcgcggcggggttgtatttgtttcggttgtagggcgggtttgtcgggggtattttttcgggggttcggggcggttcggtcggggtaggggagagtgagcgggtgcgtgtaggggttgtgggggggcgggggcggcgttcggcgcggtcgggatggggtgggggtgcgcgaggcgtcgtacgagtcgcgttttttttcggagttttgagagttcgttcgttattcgggagggcgttgcggttggtttcggggagggggcgagggtagggtgtggggtgcgtatagttttttttttaggcggcgacgtttatttagaagtagttttttttcgtttcgtta

SEQ ID NO: 324 - DNA, 978 bp, Artificial Sequence
  chemically treated genomic DNA (Homo sapiens) CpG-island No: 324
taacgaaacgaaaaaaaactacttctaaataaacgtcgccgcctaaaaaaaaaactatacgcaccccacaccctaccctcgccccctccccgaaaccaaccgcaacgccctcccgaataacgaacgaactctcaaaactccgaaaaaaaacgcgactcgtacgacgcctcgcgcacccccaccccatcccgaccgcgccgaacgccgcccccgcccccccacaacccctacacgcacccgctcactctcccctaccccgaccgaaccgccccgaacccccgaaaaaatacccccgacaaacccgccctacaaccgaaacaaatacaaccccgccgcgctcccaaccgcgtctacacaaacttatttacccgcgacaaaaaaaacaccctactcgcaacccgcgcgaaaatccgactaaaacgccgaaaaacaaaactcaccccgcgatcgcgaccgactaaaacgcccgcacccgcgcccataacccgccttccccgaacgccgaacccgcaaccccccgcaatacccgaaacccaaaaaccccgacgcccgcacgtctccgaccgcccgcgacaaacgaacccacgcgcccgaacacaaaacgccgccgcctaactccccgaaactactaacgtccgaactaaacgacgaaacgaacgaacgaacgcgaaaccgaaacgaacaacgaacgaacgaacgaacgccgaactctacacatactcactcgcgcgacccgaaaacaacgaccgaccgccgccgaatcctaaaaacgccgatacgcacctcccgccgcccgaaaaaaaaatcgcgactccgccgaaaaaaacccacgccctaccccgacccgcgaaaacacgcgcgcgaaacgaaccacacgcgccactaccgaacaaaaacgccgccacccactctaatacacacacacacacacacacacaccaatcacccaaaaccacaacctttcaccgaaaccccacg

SEQ ID NO: 325 - DNA, 601 bp, Artificial Sequence
  chemically treated genomic DNA (Homo sapiens) CpG-island No: 325
ggtgttggggtttatcgtcgttgtgtttggttggtaatttcgcgtttttatatattttttagagtcgggtttgagtatttattatttttcgtgcgttttttgttatttttttattttcgtttgtgttttttattttatttttttcgtttcgcgtttttttatattagtttgttttttttttttttcgttagcgtgacgtgttttttcgtttttcgtttttcgtttttttagttcgttcgtcgttttttcgtttttttttcgttttttttgcgtcgagcgttatgttattttgtgtttttttcgtttcgtttttttcgtttttttagttacgtttcgtttttttattttttcgcgtcgattcgttttttttttttcgtttcgttttttcgttattgtttatttttttgtttcgcgtcgtcgtttgttttcgttttcgttgttagattttttttttttttattttttttcgtcgcggttgatattgtgttgtttttcgtcgtgtttatttattcgcgtcgtcgttttttgtaatttgttgttgtagtcgagttagatgatttatatattattgtaatttttgtttattaggaataagtagttt

SEQ ID NO: 326 - DNA, 601 bp, Artificial Sequence
  chemically treated genomic DNA (Homo sapiens) CpG-island No: 326
aaactacttattcctaataaacaaaaattacaataatatataaatcatctaactcgactacaacaacaaattacaaaaaacgacgacgcgaataaataaacacgacgaaaaacaacacaatatcaaccgcgacgaaaaaaaataaaaaaaaaaaaaatctaacaacgaaaacgaaaacaaacgacgacgcgaaacaaaaaaataaacaataacgaaaaaacgaaacgaaaaaaaaaaaacgaatcgacgcgaaaaaataaaaaaacgaaacgtaactaaaaaaacgaaaaaaacgaaacgaaaaaaacacaaaataacataacgctcgacgcaaaaaaaacgaaaaaaaaacgaaaaaacgacgaacgaactaaaaaaacgaaaaacgaaaaacgaaaaaacacgtcacgctaacgaaaaaaaaaaaaaacaaactaatataaaaaaacgcgaaacgaaaaaaataaaataaaaaacacaaacgaaaataaaaaaataacaaaaaacgcacgaaaaataataaatactcaaacccgactctaaaaaatatataaaaacgcgaaattaccaaccaaacacaacgacgataaaccccaacacc

SEQ ID NO: 327 - DNA, 601 bp, Artificial Sequence
  chemically treated genomic DNA (Homo sapiens) CpG-island No: 327
aaattgtttgtttttggtggatagaaattataatgatgtgtggattatttagttcgattgtagtagtaagttgtaggggacgacggcgcggatgaataggtacggcgaggagtagtatagtgttaatcgcggcggagaggagtgggaggagagagagtttaatagcgggagcgaaggtaagcgacgacgcgggataaggagataggtagtagcgaggaggcgagacgaggaggagagaacgaatcgacgcgagagagtgggagagcgaagcgtgattgaggaggcgagaggaacgaggcgagggaagtatagagtggtatagcgttcgacgtaggaaggacgagagaagggcgagagggcgacgagcgagttgggagagcgggaagcgggagacggaggagtacgttacgttagcgagaggagaagaggataggttgatgtgggagagcgcggagcgagagagatagggtgagggatatagacgaaagtaaaagaatgatagagagcgtacgaaggatggtaggtatttaaattcggttttgagaggtgtgtagaagcgcggggttattagttagatatagcgacgataggttttagtatt

SEQ ID NO: 328 - DNA, 601 bp, Artificial Sequence
  chemically treated genomic DNA (Homo sapiens) CpG-island No: 328
aatactaaaacctatcgtcgctatatctaactaataaccccgcgcttctacacacctctcaaaaccgaatttaaatacctaccatccttcgtacgctctctatcattcttttactttcgtctatatccctcaccctatctctctcgctccgcgctctcccacatcaacctatcctcttctcctctcgctaacgtaacgtactcctccgtctcccgcttcccgctctcccaactcgctcgtcgccctctcgcccttctctcgtccttcctacgtcgaacgctataccactctatacttccctcgcctcgttcctctcgcctcctcaatcacgcttcgctctcccactctctcgcgtcgattcgttctctcctcctcgtctcgcctcctcgctactacctatctccttatcccgcgtcgtcgcttaccttcgctcccgctattaaactctctctcctcccactcctctccgccgcgattaacactatactactcctcgccgtacctattcatccgcgccgtcgtcccctacaacttactactacaatcgaactaaataatccacacatcattataatttctatccaccaaaaacaaacaattt

SEQ ID NO: 329 - DNA, 653 bp, Artificial Sequence
  unsure (4, 652): chemically treated genomic DNA (Homo sapiens) CpG-island No: 329
cgtnggcggcggtgttagtgcgtttttcgcgttggtttttgcgtatgtttcggtgacgtgcgcgtggcgtacgattgcgtttttgtgcgtttttcgtttttatggcgtattttttttcgtgggcgtagtcgcgcgcgttttcgaatagttatttcgcgatcgtattacgtatgtagtattgattagtagcggcgcgtacgcgttgttaaatagtagcgtcgtagttttcgtaaggtcgagatatcgacgtgtgggagagaggttatattagatttagagagagggagagagggtagatatacgtaggtagcgaattagtgtaggaacgataagtgagttgtacgcgcggagcgattattgttttagtattgtgcggggttagagacgttattgtgcgagtagttcgcgcgtagcgaagtcgatagtaatattatagttaattggcgaaatagataagagataagacgttttagcgagggggagttgaacgagacgtagacgttaagttagcgagagatgtagatagataggtatacggtcgtgttgcgcgatatagtagtacgtacgagtaggagataagtaacgatggagaatagacgataaggtaaattaggtttgtcgcgcgaagtaacgtattagatgttagggagant

SEQ ID NO: 330 - DNA, 653 bp, Artificial Sequence
  unsure (2, 650): chemically treated genomic DNA (Homo sapiens) CpG-island No: 330
antctccctaacatctaatacgttacttcgcgcgacaaacctaatttaccttatcgtctattctccatcgttacttatctcctactcgtacgtactactatatcgcgcaacacgaccgtatacctatctatctacatctctcgctaacttaacgtctacgtctcgttcaactccccctcgctaaaacgtcttatctcttatctatttcgccaattaactataatattactatcgacttcgctacgcgcgaactactcgcacaataacgtctctaaccccgcacaatactaaaacaataatcgctccgcgcgtacaactcacttatcgttcctacactaattcgctacctacgtatatctaccctctctccctctctctaaatctaatataacctctctcccacacgtcgatatctcgaccttacgaaaactacgacgctactatttaacaacgcgtacgcgccgctactaatcaatactacatacgtaatacgatcgcgaaataactattcgaaaacgcgcgcgactacgcccacgaaaaaaaatacgccataaaaacgaaaaacgcacaaaaacgcaatcgtacgccacgcgcacgtcaccgaaacatacgcaaaaaccaacgcgaaaaacgcactaacaccgccgccnacg

SEQ ID NO: 331 - DNA, 653 bp, Artificial Sequence
  unsure (2, 650): chemically treated genomic DNA (Homo sapiens) CpG-island No: 331
antttttttaatatttagtgcgttgtttcgcgcgatagatttgatttgttttgtcgtttgttttttatcgttgtttattttttattcgtgcgtgttgttgtgtcgcgtagtacggtcgtgtatttgtttgtttgtatttttcgttagtttagcgtttgcgtttcgtttagttttttttcgttagagcgttttgttttttatttgtttcgttagttgattgtgatgttgttgtcgatttcgttgcgcgcggattgttcgtatagtgacgtttttgatttcgtatagtgttagagtagtagtcgtttcgcgcgtgtagtttatttatcgtttttgtattaattcgttgtttgcgtatgtttattttttttttttttttttgaatttggtgtggttttttttttatacgtcgatgtttcggttttacgaggattgcgacgttgttgtttagtagcgcgtgcgcgtcgttattagttagtgttgtatgcgtgatgcggtcgcgagatggttattcgagggcgcgcgcggttacgtttacggagagaggtacgttatagaggcggaaggcgtataaggacgtaatcgtacgttacgcgtacgttatcgaggtatacgtagagattagcgcgagaaacgtattgatatcgtcgttngcg

SEQ ID NO: 332 - DNA, 653 bp, Artificial Sequence
  unsure (4, 652): chemically treated genomic DNA (Homo sapiens) CpG-island No: 332
cgcnaacgacgatatcaatacgtttctcgcgctaatctctacgtatacctcgataacgtacgcgtaacgtacgattacgtccttatacgccttccgcctctataacgtacctctctccgtaaacgtaaccgcgcgcgccctcgaataaccatctcgcgaccgcatcacgcatacaacactaactaataacgacgcgcacgcgctactaaacaacaacgtcgcaatcctcgtaaaaccgaaacatcgacgtataaaaaaaaaaccacaccaaattcaaaaaaaaaaaaaaaaaataaacatacgcaaacaacgaattaatacaaaaacgataaataaactacacgcgcgaaacgactactactctaacactatacgaaatcaaaaacgtcactatacgaacaatccgcgcgcaacgaaatcgacaacaacatcacaatcaactaacgaaacaaataaaaaacaaaacgctctaacgaaaaaaaactaaacgaaacgcaaacgctaaactaacgaaaaatacaaacaaacaaatacacgaccgtactacgcgacacaacaacacgcacgaataaaaaataaacaacgataaaaaacaaacgacaaaacaaatcaaatctatcgcgcgaaacaacgcactaaatattaaaaaaant

SEQ ID NO: 333 - DNA, 901 bp, Artificial Sequence
  unsure (29, 49, 101, 146, 194, 199, 217, 238, 251, 310, 396, 416,465, 486, 502,503, 550, 568, 630, 669, 762, 806, 839): chemically treated genomic DNA (Homo sapiens) CpG-island No: 333
ttttttttttttttttttttttttttttntttttttttttttttttttntttttttttttttttttttttttcgtttttgttttttttcgtttttcgtttncgcggttttttgtcgtcgggtcgtttttttcgcgttttttttgtngttcgttggtttttgtcgttttcgtttttgcgtttttttggttttttnttttntttttttgtcgtggtttngggtgtcgtgcgcgtttcgtncgtggttgttttntttttcgttcgtcgtggggtcggtcgttcgttttgtgggtgtttttcgttttttttttntttcgggttgcgttgttgttcgtttgttttggtttcgtttttgtgtttttcgtgggtttttcgtttgttcgttgttttttttcgtntgcgcgtgggtgtttcgttnggtcgttcgcgcgcgttttttcgcgttcgtttcgtcgttcgtcgttttntttttttttttcgtttgggtnttgtttttcggttcgnntttttggttcgttcgttgtgtttgtttttttttttgtttcgcgttgntttttttgcgcgtcgcgntttgttttgtttttttttttcggttggtgtttttttcgtttttttttttttggtttgttttngtcgttttcgttttttttttttgtttgtttcgttttttngtgttcgtttttttttcgttttgttggtgtgtttcgtcggtgttttttttttttgttgtgtcggtttcgttcgtcgtcgcgttttttttgttngttcgttggcgttttttgcgtcgtcgtgtgtgttcgttttcgtngttttgtttgttcggtttttggttttgtttttncgtcggcggtttgtttttttttgtttttttttttgtttaaattatataggtgagagtagaaa

SEQ ID NO: 334 - DNA, 901 bp, Artificial Sequence
  unsure (63, 96, 140, 233, 272, 334, 352, 399, 400, 416, 437, 486,506, 592, 651, 664, 685, 703, 708, 756, 801, 853, 873): chemically treated genomic DNA (Homo sapiens) CpG-island No: 334
tttctactctcacctatataatttaaacaaaaaaaaaaacaaaaaaaaacaaaccgccgacgnaaaaacaaaaccaaaaaccgaacaaacaaaacnacgaaaacgaacacacacgacgacgcaaaaaacgccaacgaacnaacaaaaaaaacgcgacgacgaacgaaaccgacacaacaaaaaaaaaaaacaccgacgaaacacaccaacaaaacgaaaaaaaaacgaacacnaaaaaacgaaacaaacaaaaaaaaaaaacgaaaacgacnaaaacaaaccaaaaaaaaaaaaacgaaaaaaacaccaaccgaaaaaaaaaaacaaaacaaancgcgacgcgcaaaaaaancaacgcgaaacaaaaaaaaaaacaaacacaacgaacgaaccaaaaanncgaaccgaaaaacaanacccaaacgaaaaaaaaaaanaaaacgacgaacgacgaaacgaacgcgaaaaaacgcgcgcgaacgaccnaacgaaacacccacgcgcanacgaaaaaaaacaacgaacaaacgaaaaacccacgaaaaacacaaaaacgaaaccaaaacaaacgaacaacaacgcaacccgaaanaaaaaaaaaacgaaaaacacccacaaaacgaacgaccgaccccacgacgaacgaaaaanaaaacaaccacgnacgaaacgcgcacgacacccnaaaccacgacaaaaaaanaaaanaaaaaaccaaaaaaacgcaaaaacgaaaacgacaaaaaccaacgaacnacaaaaaaaacgcgaaaaaaacgacccgacgacaaaaaaccgcgnaaacgaaaaacgaaaaaaaacaaaaacgaaaaaaaaaaaaaaaaaaaaaaanaaaaaaaaaaaaaaaaaaanaaaaaaaaaaaaaaaaaaaaaaaaaaaa

SEQ ID NO: 335 - DNA, 901 bp, Artificial Sequence
  unsure (63, 96, 140, 233, 272, 334, 352, 399, 400, 416, 437, 486,506, 592, 651, 664, 685, 703, 708, 756, 801, 853, 873): chemically treated genomic DNA (Homo sapiens) CpG-island No: 335
tttttgtttttatttatatagtttaagtagaagagagggtaggaaggagtaggtcgtcggcgnagagataggattagaggtcgagtaagtaagatnacggggacggatatatacggcggcgtagaaagcgttaacgagtnaataggaggagcgcggcggcgagcgaggtcgatatagtagagagagaagatatcggcggggtatattagtaggacgaggaggaggcgagtatnggggagcggagtaggtagagaggagagacggggacgatnggagtaagttagagaggagggaacgagagaggtattaatcgggagagagaggtaggatagancgcggcgcgtaagggagntaacgcgggataggaggggaagtagatatagcgggcggattaggagnncgaatcggagagtaangtttagacgagaggggagagngaaacggcgggcgacgagacggacgcgagagaacgcgcgcgaacgattnagcgaggtatttacgcgtanacggggaggagtagcgggtagacgggggatttacgagaagtataaaggcggggttaaagtaagcggatagtagcgtagttcgagangaggagaggacgagaagtatttataggacgagcgatcgattttacgacgagcgaggggnagagtaattacgngcgaggcgcgtacgatatttnaagttacggtaggagganggaangagaagttagaaaagcgtagaagcggaagcggtaagaattaacgaatngtagagagagcgcgggagagacggttcgacgataggaagtcgcgnaaacggagagcggagggaggtaggggcgaaagaaggggagaggggaaagagngaggaggagggggaaggagnagaaggagagaggaggaagagaagaaga

SEQ ID NO: 336 - DNA, 901 bp, Artificial Sequence
  unsure (29, 49, 101, 146, 194, 199, 217, 238, 251, 310, 396, 416,465, 486, 502, 503, 550, 568, 630, 669, 762, 806, 839): chemically treated genomic DNA (Homo sapiens) CpG-island No: 336
tcttcttctcttcctcctctctccttctnctccttccccctcctcctcnctctttcccctctccccttctttcgcccctacctccctccgctctccgtttncgcgacttcctatcgtcgaaccgtctctcccgcgctctctctacnattcgttaattcttaccgcttccgcttctacgcttttctaacttctcnttccntcctcctaccgtaacttnaaatatcgtacgcgcctcgcncgtaattactctncccctcgctcgtcgtaaaatcgatcgctcgtcctataaatacttctcgtcctctcctcntctcgaactacgctactatccgcttactttaaccccgcctttatacttctcgtaaatcccccgtctacccgctactcctccccgtntacgcgtaaatacctcgctnaatcgttcgcgcgcgttctctcgcgtccgtctcgtcgcccgccgtttcnctctcccctctcgtctaaacnttactctccgattcgnnctcctaatccgcccgctatatctacttcccctcctatcccgcgttanctcccttacgcgccgcgntctatcctacctctctctcccgattaatacctctctcgttccctcctctctaacttactccnatcgtccccgtctctcctctctacctactccgctccccnatactcgcctcctcctcgtcctactaatataccccgccgatatcttctctctctactatatcgacctcgctcgccgccgcgctcctcctattnactcgttaacgctttctacgccgccgtatatatccgtccccgtnatcttacttactcgacctctaatcctatctctncgccgacgacctactccttcctaccctctcttctacttaaactatataaataaaaacaaaaa

SEQ ID NO: 337 - DNA, 1598 bp, Artificial Sequence
  chemically treated genomic DNA (Homo sapiens) CpG-island No: 337
ggatagcgcgtttaggtttagtcgcgggggcgaggagtagggcggggtttagtaggaatttagttttgttagcgatgtttttcgtgagttacgcgttacgcgtacgcgtttttttaatggggtcgggcgtggagtcgcgttttgcgcgattggttaaacgggtggtttacgattggttgagattttggttttcgttttttcggttttaggagggtggggcgtgggtgtgggttgcgcggcgcgtgttgttttcggggattttgcgcgtttttcgaatattcgtgttgtcgttagggtcgtttttttttttttatagcgcgcgttgcgcgtgcgaaggtttggcggtttttgggattggcggggttgcgcgcggggttagggtgggggtacgggaaggtttaatttaggatttgcgtattttgttttgggggcgtattaagtatttgtcgggagtagggggcgtatcgggaattcgtagatttcgttagttgggcgtattggggatttgtggattgcgttcgggggatgggttagggggatatgcgtacgttttgggttttatagaatgtgagcgcgcgagggggagggcgaagcgtggcgggagggcgaggcgaaagaaggagggcgtgagaaaggcgacggcggcggcgcggaggagggttatttatatatttaaaaattagtcgtttgcgtcgcgtttgcggagatttgggagagttcggtcgtacgcgcgggatacgagcgttttacgttttttggcgcgtacggtttgttattattaggttttttattttcgggttttagacgatttaggacgcgtgttttggggagttgtttggcggcgtcgtgttagaagtttttttggggcgttatagtttttttcgtcgttttcggtttttttgtttgtttttttttgcggcgcgtcgggatttggagcgggcgggtggatttaggcgcgatggacggcggtatattgtttatgttcgcgttttttgcgtttttcgtttttgtcggttgcgttgttcggcggagattcgcgttttcggaattgttgcgttgtagtcggcggcggcgatcggttatcgtagagatcggaggcggcgtagcggtcgtagcgcggcgtaatgagcgcgagcgtaatcgcgtgaagttggtgaatttgggtttttaggcgttgcggtagtacgtgtcgtacggcggcgttagtaagaagttgagtaaggtggagacgttgcgtttagtcgtggagtatattcgcgcgttgtagcgtttgttggtcgagtacgacgtcgtgcgtaacgcgttggcgggagggttgaggtcgtaggtcgtgcgggcgtttgcgtttcgcgggtcgttagggattatttcggtcgtcgtttcgttttttcgcggtttttcgttttcgggtcgcgggggtagttcggagttcggtttttcgcgtttcgtttattcgtcggacgatagcggttgcgaaggcgcgttgagttttgcggagcgcgagttattcgatttttttagttggttagggggttattgagcgttttcgatttatgaggtaatagtcgggaggtagggaggagggagggtcgggggtt

SEQ ID NO: 338 - DNA, 1598 bp, Artificial Sequence
  chemically treated genomic DNA (Homo sapiens) CpG-island No: 338
aacccccgaccctccctcctccctacctcccgactattacctcataaatcgaaaacgctcaataaccccctaaccaactaaaaaaatcgaataactcgcgctccgcaaaactcaacgcgccttcgcaaccgctatcgtccgacgaataaacgaaacgcgaaaaaccgaactccgaactacccccgcgacccgaaaacgaaaaaccgcgaaaaaacgaaacgacgaccgaaataatccctaacgacccgcgaaacgcaaacgcccgcacgacctacgacctcaaccctcccgccaacgcgttacgcacgacgtcgtactcgaccaacaaacgctacaacgcgcgaatatactccacgactaaacgcaacgtctccaccttactcaacttcttactaacgccgccgtacgacacgtactaccgcaacgcctaaaaacccaaattcaccaacttcacgcgattacgctcgcgctcattacgccgcgctacgaccgctacgccgcctccgatctctacgataaccgatcgccgccgccgactacaacgcaacaattccgaaaacgcgaatctccgccgaacaacgcaaccgacaaaaacgaaaaacgcaaaaaacgcgaacataaacaatataccgccgtccatcgcgcctaaatccacccgcccgctccaaatcccgacgcgccgcaaaaaaaaacaaacaaaaaaaccgaaaacgacgaaaaaaactataacgccccaaaaaaacttctaacacgacgccgccaaacaactccccaaaacacgcgtcctaaatcgtctaaaacccgaaaataaaaaacctaataataacaaaccgtacgcgccaaaaaacgtaaaacgctcgtatcccgcgcgtacgaccgaactctcccaaatctccgcaaacgcgacgcaaacgactaatttttaaatatataaataaccctcctccgcgccgccgccgtcgcctttctcacgccctccttctttcgcctcgccctcccgccacgcttcgccctccccctcgcgcgctcacattctataaaacccaaaacgtacgcatatccccctaacccatcccccgaacgcaatccacaaatccccaatacgcccaactaacgaaatctacgaattcccgatacgccccctactcccgacaaatacttaatacgcccccaaaacaaaatacgcaaatcctaaattaaaccttcccgtacccccaccctaaccccgcgcgcaaccccgccaatcccaaaaaccgccaaaccttcgcacgcgcaacgcgcgctataaaaaaaaaaaaacgaccctaacgacaacacgaatattcgaaaaacgcgcaaaatccccgaaaacaacacgcgccgcgcaacccacacccacgccccaccctcctaaaaccgaaaaaacgaaaaccaaaatctcaaccaatcgtaaaccacccgtttaaccaatcgcgcaaaacgcgactccacgcccgaccccattaaaaaaacgcgtacgcgtaacgcgtaactcacgaaaaacatcgctaacaaaactaaattcctactaaaccccgccctactcctcgcccccgcgactaaacctaaacgcgctatcc

SEQ ID NO: 339 - DNA, 1598 bp, Artificial Sequence
  chemically treated genomic DNA (Homo sapiens) CpG-island No: 339
ggttttcggtttttttttttttttgtttttcggttgttattttataggtcgagggcgtttagtagttttttaattagttggagaagtcgagtagttcgcgtttcgtaggatttagcgcgttttcgtagtcgttgtcgttcgacgagtaggcggaacgcggggagtcgggtttcgagttgttttcgcggttcggggacgaagaatcgcgggagggcgaggcggcgatcggggtggtttttggcggttcgcggggcgtagacgttcgtacggtttgcggttttagttttttcgttagcgcgttgcgtacggcgtcgtgttcggttagtaggcgttgtagcgcgcggatgtattttacggttgagcgtagcgtttttattttgtttagttttttgttggcgtcgtcgtgcggtacgtgttgtcgtagcgtttggaagtttaagtttattagttttacgcggttgcgttcgcgtttattgcgtcgcgttacggtcgttgcgtcgttttcggtttttgcggtggtcggtcgtcgtcgtcggttgtagcgtaatagtttcggggacgcgggttttcgtcgggtagcgtagtcgatagggacggggggcgtagggggcgcggatatgggtagtgtgtcgtcgtttatcgcgtttggatttattcgttcgttttaggtttcggcgcgtcgtaggaaggagtaggtagaggaatcggaggcgacggggaaaattgtggcgttttaagggggtttttggtacggcgtcgttaggtaattttttagggtacgcgttttaggtcgtttggagttcggggataggaggtttagtggtggtaggtcgtacgcgttagggagcgtgggacgttcgtgtttcgcgcgtgcggtcggatttttttaggttttcgtaggcgcggcgtaggcggttggtttttaaatgtatagataattttttttcgcgtcgtcgtcgtcgttttttttacgttttttttttttcgtttcgttttttcgttacgtttcgttttttttttcgcgcgtttatattttgtaaggtttaaagcgtgcgtatgtttttttagtttatttttcggacgtagtttatagatttttagtgcgtttaattggcgaaatttgcgagttttcggtgcgttttttgttttcggtaggtgtttagtgcgtttttaaagtaaggtacgtaggttttgggttgagttttttcgtatttttattttaatttcgcgcgtagtttcgttagttttaagagtcgttagattttcgtacgcgtagcgcgcgttgtgggagggaaggggcggttttggcgataatacggatgttcgggaggcgcgtaagattttcgggggtagtacgcgtcgcgtagtttatatttacgttttatttttttggggtcgaggaggcgggggttagggttttagttaatcgtgggttattcgtttggttaatcgcgtagggcgcggttttacgttcggttttattgaggaagcgcgtacgcgtggcgcgtggtttacggggagtatcgttaataaagttgggtttttgttgggtttcgttttgtttttcgttttcgcgattgggtttgggcgcgttgttt

SEQ ID NO: 340 - DNA, 1598 bp, Artificial Sequence
  chemically treated genomic DNA (Homo sapiens) CpG-island No: 340
aaacaacgcgcccaaacccaatcgcgaaaacgaaaaacaaaacgaaacccaacaaaaacccaactttattaacgatactccccgtaaaccacgcgccacgcgtacgcgcttcctcaataaaaccgaacgtaaaaccgcgccctacgcgattaaccaaacgaataacccacgattaactaaaaccctaacccccgcctcctcgaccccaaaaaaataaaacgtaaatataaactacgcgacgcgtactacccccgaaaatcttacgcgcctcccgaacatccgtattatcgccaaaaccgccccttccctcccacaacgcgcgctacgcgtacgaaaatctaacgactcttaaaactaacgaaactacgcgcgaaattaaaataaaaatacgaaaaaactcaacccaaaacctacgtaccttactttaaaaacgcactaaacacctaccgaaaacaaaaaacgcaccgaaaactcgcaaatttcgccaattaaacgcactaaaaatctataaactacgtccgaaaaataaactaaaaaaacatacgcacgctttaaaccttacaaaatataaacgcgcgaaaaaaaaaacgaaacgtaacgaaaaaacgaaacgaaaaaaaaaaaacgtaaaaaaaacgacgacgacgacgcgaaaaaaaattatctatacatttaaaaaccaaccgcctacgccgcgcctacgaaaacctaaaaaaatccgaccgcacgcgcgaaacacgaacgtcccacgctccctaacgcgtacgacctaccaccactaaacctcctatccccgaactccaaacgacctaaaacgcgtaccctaaaaaattacctaacgacgccgtaccaaaaacccccttaaaacgccacaattttccccgtcgcctccgattcctctacctactccttcctacgacgcgccgaaacctaaaacgaacgaataaatccaaacgcgataaacgacgacacactacccatatccgcgccccctacgccccccgtccctatcgactacgctacccgacgaaaacccgcgtccccgaaactattacgctacaaccgacgacgacgaccgaccaccgcaaaaaccgaaaacgacgcaacgaccgtaacgcgacgcaataaacgcgaacgcaaccgcgtaaaactaataaacttaaacttccaaacgctacgacaacacgtaccgcacgacgacgccaacaaaaaactaaacaaaataaaaacgctacgctcaaccgtaaaatacatccgcgcgctacaacgcctactaaccgaacacgacgccgtacgcaacgcgctaacgaaaaaactaaaaccgcaaaccgtacgaacgtctacgccccgcgaaccgccaaaaaccaccccgatcgccgcctcgccctcccgcgattcttcgtccccgaaccgcgaaaacaactcgaaacccgactccccgcgttccgcctactcgtcgaacgacaacgactacgaaaacgcgctaaatcctacgaaacgcgaactactcgacttctccaactaattaaaaaactactaaacgccctcgacctataaaataacaaccgaaaaacaaaaaaaaaaaaaaaccgaaaacc

SEQ ID NO: 341 - DNA, 801 bp, Artificial Sequence
  unsure (332): chemically treated genomic DNA (Homo sapiens) CpG-island No: 341
gttcggcgggtcgcgtttttaggagttcgcggagtcgagcgttaggttcgagcgatggtttcgatttcgtttattttttattttttttaaagttttttaagttcgtgtaagatcggcgtttgtttgttcgggattgtaaaattttttttcgcggtttagtcgtcgacgagggaggggtagacgaggggaggggagcggtcgtcgggtcgttgaggtttttagtgttggcggattttggggtagattggggtgttggaggcggggtgattttgtattgtaaatcgcgttttcgggtcggggcggtagaaatgagtcggcgggcgcggattttngatttatcgcggtttcgagcgttcgtttcgttttcgtcgtgttttagatcgagtcgcggtatttacggatttaagattttaaaattaatcgagtaaacgaaattgtcgatttcgtttgggggaagtgcgggtaaggtcggttcgggcggggtttgtttcgggttcgcgttcgcgttgacgcgcgtttggttttttatttttttttcgtagttttagtttcggaagtcgagcgagcggtcggcgcgtttatcgtcgggggagttcgttaggtggatcggttcgcgttcgtttttagcgagtcggggatttatttattatttttcgtatcgtcgacgtcgtttcgttcgttcggtttagtttgattaatgtcgcggtggaaacgggtttggagttggttttataagggttggcggtttttttcgacgtcgtttttttttatagtttttcgattgtagtggggcggggggta

SEQ ID NO: 342 - DNA, 801 bp, Artificial Sequence
  unsure (470): chemically treated genomic DNA (Homo sapiens) CpG-island No: 342
taccccccgccccactacaatcgaaaaactataaaaaaaaacgacgtcgaaaaaaaccgccaacccttataaaaccaactccaaacccgtttccaccgcgacattaatcaaactaaaccgaacgaacgaaacgacgtcgacgatacgaaaaataataaataaatccccgactcgctaaaaacgaacgcgaaccgatccacctaacgaactcccccgacgataaacgcgccgaccgctcgctcgacttccgaaactaaaactacgaaaaaaaaataaaaaaccaaacgcgcgtcaacgcgaacgcgaacccgaaacaaaccccgcccgaaccgaccttacccgcacttcccccaaacgaaatcgacaatttcgtttactcgattaattttaaaatcttaaatccgtaaataccgcgactcgatctaaaacacgacgaaaacgaaacgaacgctcgaaaccgcgataaatcnaaaatccgcgcccgccgactcatttctaccgccccgacccgaaaacgcgatttacaatacaaaatcaccccgcctccaacaccccaatctaccccaaaatccgccaacactaaaaacctcaacgacccgacgaccgctcccctcccctcgtctacccctccctcgtcgacgactaaaccgcgaaaaaaaattttacaatcccgaacaaacaaacgccgatcttacacgaacttaaaaaactttaaaaaaaataaaaaataaacgaaatcgaaaccatcgctcgaacctaacgctcgactccgcgaactcctaaaaacgcgacccgccgaac

SEQ ID NO: 343 - DNA, 801 bp, Artificial Sequence
  chemically treated genomic DNA (Homo sapiens) CpG-island No: 343
  unsure (470)
tgtttttcgttttattgtagtcgagaagttgtggggaggggcggcgtcggaggaagtcgttagtttttatggggttagttttaagttcgtttttatcgcggtattggttaggttgggtcggacgaacgaggcggcgtcggcggtgcggggggtggtgggtgggttttcggttcgttgggggcggacgcgggtcggtttatttggcgggttttttcggcgatgagcgcgtcggtcgttcgttcggttttcggggttgaagttgcggggggaaagtggggaattaaacgcgcgttaacgcgggcgcgggttcggggtagatttcgttcgggtcggttttgttcgtattttttttaagcgaagtcggtagtttcgtttgttcggttggttttggagttttgagttcgtgggtgtcgcgattcggtttgagatacggcgggggcggggcgggcgttcggagtcgcggtgagttnagggttcgcgttcgtcgatttatttttgtcgtttcggttcgggagcgcgatttgtaatgtaaagttatttcgtttttagtattttaatttgttttaggattcgttagtattagagattttaacggttcgacggtcgttttttttttttcgtttatttttttttcgtcggcggttgagtcgcgaggggaagttttgtaatttcggataaataaacgtcggttttgtacgggtttgaaaaattttgggggaaatgaagagtgagcgaaatcgaagttatcgttcgggtttggcgttcggtttcgcgggtttttgggggcgcgattcgtcgggt

SEQ ID NO: 344 - DNA, 801 bp, Artificial Sequence
  chemically treated genomic DNA (Homo sapiens) CpG-island No: 344
  unsure (332)
acccgacgaatcgcgcccccaaaaacccgcgaaaccgaacgccaaacccgaacgataacttcgatttcgctcactcttcatttcccccaaaatttttcaaacccgtacaaaaccgacgtttatttatccgaaattacaaaacttcccctcgcgactcaaccgccgacgaaaaaaaaataaacgaaaaaaaaaaaacgaccgtcgaaccgttaaaatctctaatactaacgaatcctaaaacaaattaaaatactaaaaacgaaataactttacattacaaatcgcgctcccgaaccgaaacgacaaaaataaatcgacgaacgcgaaccctnaactcaccgcgactccgaacgcccgccccgcccccgccgtatctcaaaccgaatcgcgacacccacgaactcaaaactccaaaaccaaccgaacaaacgaaactaccgacttcgcttaaaaaaaatacgaacaaaaccgacccgaacgaaatctaccccgaacccgcgcccgcgttaacgcgcgtttaattccccactttccccccgcaacttcaaccccgaaaaccgaacgaacgaccgacgcgctcatcgccgaaaaaacccgccaaataaaccgacccgcgtccgcccccaacgaaccgaaaacccacccaccaccccccgcaccgccgacgccgcctcgttcgtccgacccaacctaaccaataccgcgataaaaacgaacttaaaactaaccccataaaaactaacgacttcctccgacgccgcccctccccacaacttctcgactacaataaaacgaaaaaca

SEQ ID NO: 345 - DNA, 564 bp, Artificial Sequence
  chemically treated genomic DNA (Homo sapiens) CpG-island No: 345
tacggttattataatttgaagcgcgaaaggttcgggtatttatgggagagttatcggcgttttttggggttttttcgatattaaagtttaagtagttagagaacggtcgtttttttgggcgagggttttattttcgaacgtacgcgggagtgtacgtgcgagatttcgcgggagagtaattcgcggcgttcgggtttaagtgagttttatggcgtagtttgtttggttagcgggttatcggtcgtgtaataaatcggcgaaacgttggttttaacgattaacggggttttatacgttgtaagtatgtcgaacgcgtggtttaggggttatttatttagcgttaaacgcgtggttacgtggtgttacgggcgagtttattttataatacgtaattagcgttttgtagggtttttacgaggttacgagtattttcgaacgcggaacgtttacgagtgggatatgcgtaacgtttatattattgtatcgtgagatcgtcgttagcgtgtttcggggggcggtaggggttattttattttagttattttgatggggagagtatttttt

SEQ ID NO: 346 - DNA, 564 bp, Artificial Sequence
  chemically treated genomic DNA (Homo sapiens) CpG-island No: 346
aaaaaatactctccccatcaaaataactaaaataaaataacccctaccgccccccgaaacacgctaacgacgatctcacgatacaataatataaacgttacgcatatcccactcgtaaacgttccgcgttcgaaaatactcgtaacctcgtaaaaaccctacaaaacgctaattacgtattataaaataaactcgcccgtaacaccacgtaaccacgcgtttaacgctaaataaataacccctaaaccacgcgttcgacatacttacaacgtataaaaccccgttaatcgttaaaaccaacgtttcgccgatttattacacgaccgataacccgctaaccaaacaaactacgccataaaactcacttaaacccgaacgccgcgaattactctcccgcgaaatctcgcacgtacactcccgcgtacgttcgaaaataaaaccctcgcccaaaaaaacgaccgttctctaactacttaaactttaatatcgaaaaaaccccaaaaaacgccgataactctcccataaatacccgaacctttcgcgcttcaaattataataaccgta

SEQ ID NO: 347 - DNA, 564 bp, Artificial Sequence
  chemically treated genomic DNA (Homo sapiens) CpG-island No: 347
gggggatattttttttattaaaataattggggtaaggtggtttttgtcgtttttcggggtacgttggcggcggttttacggtgtagtggtgtgggcgttgcgtatgttttattcgtgagcgtttcgcgttcggaggtgttcgtggtttcgtgagaattttgtaggacgttggttgcgtgttgtgagatgggttcgttcgtggtattacgtagttacgcgtttggcgttgggtgggtggtttttgagttacgcgttcgatatgtttgtaacgtgtggagtttcgttggtcgttggagttagcgtttcgtcggtttgttgtacgatcggtggttcgttgattaggtaggttacgttatgagatttatttgagttcgggcgtcgcgggttgttttttcgcggagtttcgtacgtatattttcgcgtgcgttcgagagtggggttttcgtttaggaagacgatcgttttttaattgtttaggttttagtgtcgaaggagttttaggggacgtcgatgatttttttatgggtgttcgaatttttcgcgttttaggttgtggtggtcgtg

SEQ ID NO: 348 - DNA, 564 bp, Artificial Sequence
  chemically treated genomic DNA (Homo sapiens) CpG-island No: 348
cacgaccaccacaacctaaaacgcgaaaaattcgaacacccataaaaaaatcatcgacgtcccctaaaactccttcgacactaaaacctaaacaattaaaaaacgatcgtcttcctaaacgaaaaccccactctcgaacgcacgcgaaaatatacgtacgaaactccgcgaaaaaacaacccgcgacgcccgaactcaaataaatctcataacgtaacctacctaatcaacgaaccaccgatcgtacaacaaaccgacgaaacgctaactccaacgaccaacgaaactccacacgttacaaacatatcgaacgcgtaactcaaaaaccacccacccaacgccaaacgcgtaactacgtaataccacgaacgaacccatctcacaacacgcaaccaacgtcctacaaaattctcacgaaaccacgaacacctccgaacgcgaaacgctcacgaataaaacatacgcaacgcccacaccactacaccgtaaaaccgccgccaacgtaccccgaaaaacgacaaaaaccaccttaccccaattattttaataaaaaaaatatccccc

SEQ ID NO: 349 - DNA, 791 bp, Artificial Sequence
  chemically treated genomic DNA (Homo sapiens) CpG-island No: 349
ggtttcggcggcggggcgggtttaaaggtttttcgtttattttagttttttcgcgattgtttaattaacgttaagtaatcgtaattcgtagagatttaaggaaagtatattcgttaattacgagttgcgtcgttatcgtttttttttttaggttttatttttttatttttttttttttattagttaacgttcgggaaaaacgagtaagtataggttttttttgttaattttcgtcggttatagttaattttttcgttcggtttttttttgttataattgaggtgtttataattagttaattaggaacgcgagagtatttcgcgtttgttttcgttcgtcgaggcgcgtattagtcggaattttggggagttaatcgcgtcgtttgtttttggtaagttagcggcggtttaaaggaggtggcgggaagtttgtgtgtgttttaaatcgttatttttatggtcgtttcggtaagtgttgcggggtagtattttttttgaggaggagcggggacgggcgagattggtttaagcgttttcgcgagggagtaaggcggtttgtgggtcggttttatttcggttttcgatttgaaggttttagtatgtagcgcgggcgcggggttcgacggaagtcgggagtcggtcggaagtagtttttgcgttttggtttttgggttttgttttgcgcgatcgcggggttttagatagtttaattcgtcgagatgatttgggtatttttgcgttgaatcggtaaatattgattaagtcgtatttattttgtttttaggaatttta

SEQ ID NO: 350 - DNA, 791 bp, Artificial Sequence
  chemically treated genomic DNA (Homo sapiens) CpG-island No: 350
taaaattcctaaaaacaaaataaatacgacttaatcaatatttaccgattcaacgcaaaaatacccaaatcatctcgacgaattaaactatctaaaaccccgcgatcgcgcaaaacaaaacccaaaaaccaaaacgcaaaaactacttccgaccgactcccgacttccgtcgaaccccgcgcccgcgctacatactaaaaccttcaaatcgaaaaccgaaataaaaccgacccacaaaccgccttactccctcgcgaaaacgcttaaaccaatctcgcccgtccccgctcctcctcaaaaaaaatactaccccgcaacacttaccgaaacgaccataaaaataacgatttaaaacacacacaaacttcccgccacctcctttaaaccgccgctaacttaccaaaaacaaacgacgcgattaactccccaaaattccgactaatacgcgcctcgacgaacgaaaacaaacgcgaaatactctcgcgttcctaattaactaattataaacacctcaattataacaaaaaaaaaccgaacgaaaaaattaactataaccgacgaaaattaacaaaaaaaacctatacttactcgtttttcccgaacgttaactaataaaaaaaaaaaaataaaaaaataaaacctaaaaaaaaaaacgataacgacgcaactcgtaattaacgaatatactttccttaaatctctacgaattacgattacttaacgttaattaaacaatcgcgaaaaaactaaaataaacgaaaaacctttaaacccgccccgccgccgaaacc

SEQ ID NO: 351 - DNA, 791 bp, Artificial Sequence
  chemically treated genomic DNA (Homo sapiens) CpG-island No: 351
tagagtttttgagagtagaataaatgcggtttgattagtatttgtcgatttaacgtagaggtgtttaggttatttcggcgagttgagttgtttaagatttcgcgatcgcgtaggataggatttagaagttagagcgtaggaattgttttcggtcggttttcggttttcgtcgggtttcgcgttcgcgttgtatgttgggatttttaggtcggaggtcggggtgaggtcgatttataggtcgttttgttttttcgcgaagacgtttaagttagtttcgttcgttttcgtttttttttagagaaaatgttgtttcgtagtatttatcggagcgattatgagggtgacgatttgaagtatatataggtttttcgttattttttttaaatcgtcgttggtttgttagggatagacggcgcggttggttttttaaaatttcgattgatacgcgtttcggcgagcgaaagtaaacgcgggatattttcgcgtttttgattggttggttgtggatattttaattatgatagaaaggggtcgggcgggaaagttagttgtggtcggcggggattggtagaaggaatttgtatttattcgtttttttcggacgttggttggtggagaagagagggtggggagatggggtttgggggggggggcggtggcgacgtaattcgtgattggcggatgtgttttttttaggtttttacggattgcggttgtttggcgttgattgggtagtcgcgggaaaattaaagtgggcggggggtttttgggttcgtttcgtcgtcggggtt

SEQ ID NO: 352 - DNA, 791 bp, Artificial Sequence
  chemically treated genomic DNA (Homo sapiens) CpG-island No: 352
aaccccgacgacgaaacgaacccaaaaaccccccgcccactttaattttcccgcgactacccaatcaacgccaaacaaccgcaatccgtaaaaacctaaaaaaaacacatccgccaatcacgaattacgtcgccaccgcccccccccccaaaccccatctccccaccctctcttctccaccaaccaacgtccgaaaaaaacgaataaatacaaattccttctaccaatccccgccgaccacaactaactttcccgcccgacccctttctatcataattaaaatatccacaaccaaccaatcaaaaacgcgaaaatatcccgcgtttactttcgctcgccgaaacgcgtatcaatcgaaattttaaaaaaccaaccgcgccgtctatccctaacaaaccaacgacgatttaaaaaaaataacgaaaaacctatatatacttcaaatcgtcaccctcataatcgctccgataaatactacgaaacaacattttctctaaaaaaaaacgaaaacgaacgaaactaacttaaacgtcttcgcgaaaaaacaaaacgacctataaatcgacctcaccccgacctccgacctaaaaatcccaacatacaacgcgaacgcgaaacccgacgaaaaccgaaaaccgaccgaaaacaattcctacgctctaacttctaaatcctatcctacgcgatcgcgaaatcttaaacaactcaactcgccgaaataacctaaacacctctacgttaaatcgacaaatactaatcaaaccgcatttattctactctcaaaaactcta

SEQ ID NO: 353 - DNA, 918 bp, Artificial Sequence
  chemically treated genomic DNA (Homo sapiens) CpG-island No: 353
gtttcgggcggggttggacgcggagttgcgtaagcgtacgtttagcgtggacgcggcgtcgggtttttttttttcggtgggtgtgggttggggtatacggttttttttttattcgcgacgcgaggttggggacggcgcgtatttatttggtaatttattattatttttagtttcggtggtatatcgtcggttttagggcgggattcggggttcgtagaggtcgttcgtttgggttcgcgcgcggcgtaggggtgcgttcggttgcggggtttatggcgcggttttcggttttcgtcgggtttaggattttgcggttttcggggtcgtttcggtagtcgttagcgtcgtttttattgtttgcgtcgcgtcgcgtttcggtcgttcgggtttcgtcgttcggtttcgtttcggtttttcgggttcgggttcgggtgggcggggatagtcgcggtttcgttttagttcgttcgtaggtgcgaggggcgcgtttcgtcgcgtgagttcggggacgcgttcgggggcgcgtttaggtttttttttcgcgggtcgacgcgggtgtttttttcgcggggtagtcgggtttgttgtttaaggtcgggcgcgtatacggggtttgcgcgggatcgtagatagcgcgtgtacgttatttcgtttcgtcgcgcgtacgcgttacgtttttagcgttatgtgcggtcgattttacgtgttcgttcgttttagtcgtttgtttagtattttttatttcgttaggatttagggttaatttcgttttagttaggcgggggtcgttgagtcggcgcgtcggcgttattaaatatatacgtttattttggcgtttagtatttcgatgttatttgttggattcggttcggcggatggttgggagttgggggattcgaggtgatagcgaatttagtt

SEQ ID NO: 354 - DNA, 918 bp, Artificial Sequence
  chemically treated genomic DNA (Homo sapiens) CpG-island No: 354
aactaaattcgctatcacctcgaatcccccaactcccaaccatccgccgaaccgaatccaacaaataacatcgaaatactaaacgccaaaataaacgtatatatttaataacgccgacgcgccgactcaacgacccccgcctaactaaaacgaaattaaccctaaatcctaacgaaataaaaaatactaaacaaacgactaaaacgaacgaacacgtaaaatcgaccgcacataacgctaaaaacgtaacgcgtacgcgcgacgaaacgaaataacgtacacgcgctatctacgatcccgcgcaaaccccgtatacgcgcccgaccttaaacaacaaacccgactaccccgcgaaaaaaacacccgcgtcgacccgcgaaaaaaaaacctaaacgcgcccccgaacgcgtccccgaactcacgcgacgaaacgcgcccctcgcacctacgaacgaactaaaacgaaaccgcgactatccccgcccacccgaacccgaacccgaaaaaccgaaacgaaaccgaacgacgaaacccgaacgaccgaaacgcgacgcgacgcaaacaataaaaacgacgctaacgactaccgaaacgaccccgaaaaccgcaaaatcctaaacccgacgaaaaccgaaaaccgcgccataaaccccgcaaccgaacgcacccctacgccgcgcgcgaacccaaacgaacgacctctacgaaccccgaatcccgccctaaaaccgacgatataccaccgaaactaaaaataataataaattaccaaataaatacgcgccgtccccaacctcgcgtcgcgaataaaaaaaaaaccgtataccccaacccacacccaccgaaaaaaaaaaacccgacgccgcgtccacgctaaacgtacgcttacgcaactccgcgtccaaccccgcccgaaac

SEQ ID NO: 355 - DNA, 918 bp, Artificial Sequence
  chemically treated genomic DNA (Homo sapiens) CpG-island No: 355
ggttgagttcgttgttatttcgggttttttagtttttagttattcgtcgagtcgagtttagtaggtggtatcggggtgttgggcgttagggtgaacgtgtatatttggtgacgtcggcgcgtcgatttagcggttttcgtttggttggggcgaggttggttttaggttttagcggggtggggagtattgagtaggcggttggggcggacggatacgtgagatcggtcgtatatggcgttgggagcgtggcgcgtgcgcgcggcgaagcggagtgacgtgtacgcgttgtttgcggtttcgcgtaggtttcgtgtgcgcgttcggttttggataataggttcggttgtttcgcggggggaatattcgcgtcggttcgcgggagggaggtttgagcgcgttttcgagcgcgttttcgagtttacgcggcggggcgcgtttttcgtatttgcgggcgggttggggcggggtcgcggttgttttcgtttattcgggttcgagttcggggagtcggggcggaatcgagcggcgaggttcgagcggtcggagcgcggcgcggcgtagataatgggagcggcgttggcggttgtcggggcggtttcgagggtcgtagagttttgggttcggcggggatcggaggtcgcgttatgagtttcgtagtcgggcgtatttttgcgtcgcgcgcgggtttaggcgagcggtttttgcgagtttcgggtttcgttttggggtcggcgatgtgttatcgaggttgaggatgatggtagattgttaggtgagtgcgcgtcgtttttagtttcgcgtcgcgggtggagggaggatcgtatgttttagtttatatttatcggggggagggagttcggcgtcgcgtttacgttgagcgtgcgtttacgtagtttcgcgtttaatttcgttcgggat

SEQ ID NO: 356 - DNA, 918 bp, Artificial Sequence
  chemically treated genomic DNA (Homo sapiens) CpG-island No: 356
atcccgaacgaaattaaacgcgaaactacgtaaacgcacgctcaacgtaaacgcgacgccgaactccctccccccgataaatataaactaaaacatacgatcctccctccacccgcgacgcgaaactaaaaacgacgcgcactcacctaacaatctaccatcatcctcaacctcgataacacatcgccgaccccaaaacgaaacccgaaactcgcaaaaaccgctcgcctaaacccgcgcgcgacgcaaaaatacgcccgactacgaaactcataacgcgacctccgatccccgccgaacccaaaactctacgaccctcgaaaccgccccgacaaccgccaacgccgctcccattatctacgccgcgccgcgctccgaccgctcgaacctcgccgctcgattccgccccgactccccgaactcgaacccgaataaacgaaaacaaccgcgaccccgccccaacccgcccgcaaatacgaaaaacgcgccccgccgcgtaaactcgaaaacgcgctcgaaaacgcgctcaaacctccctcccgcgaaccgacgcgaatattccccccgcgaaacaaccgaacctattatccaaaaccgaacgcgcacacgaaacctacgcgaaaccgcaaacaacgcgtacacgtcactccgcttcgccgcgcgcacgcgccacgctcccaacgccatatacgaccgatctcacgtatccgtccgccccaaccgcctactcaatactccccaccccgctaaaacctaaaaccaacctcgccccaaccaaacgaaaaccgctaaatcgacgcgccgacgtcaccaaatatacacgttcaccctaacgcccaacaccccgataccacctactaaactcgactcgacgaataactaaaaactaaaaaacccgaaataacaacgaactcaacc

SEQ ID NO: 357 - DNA, 817 bp, Artificial Sequence
  chemically treated genomic DNA (Homo sapiens) CpG-island No: 357
cgtcggttttcggcggtttcgttattttttcgtttcgggaggcgttcggtagattttcgatttttagcgggtttttttttttggggtcgtcggggcggggcggggtagggtagggcgaggagcgtatgcgcggcggggtcggttttttttttcgattggatatttatagattgtttttagtattttagataggcgatatagttagcggtattattacgttatgttttttttttgcgcgggcggcgtagagttggcggacgtttcgggcgttttatttgagttgtttatggtgttatcgttaggcgtagtttatagtttttataaagggttcggtagtcggtcgcgttcgagtcggcgcgttgttttgtgggagagggagtatattagtatagggggcggggtttttaggttgcggcgaggcgcgttcgaagggaggcgggtgtttattaatatagtgagcgggatttttatgtcgcgattaggggcgtttgaggggaggtaggtgtttattattgtagggggcgggattcgtaggttgcggcgaggagttgggggtggggagttcgttagtatacggggcggggttcgtaggtatcggagaggtgtgttcgaggggggcgggcgttattagcgtagggggcgggggttcgtagtttgcggcgatttgtttttaaaggaggcgggcgtttattagtatagggggcggggtttggaggcgcgtagatattttagcggttagagttttatattaggatatacgggtggggtttcgtagggagttggttaatgcgttattttcggagtggaattttgattg

SEQ ID NO: 358 - DNA, 817 bp, Artificial Sequence
  chemically treated genomic DNA (Homo sapiens) CpG-island No: 358
caatcaaaattccactccgaaaataacgcattaaccaactccctacgaaaccccacccgtatatcctaatataaaactctaaccgctaaaatatctacgcgcctccaaaccccgccccctatactaataaacgcccgcctcctttaaaaacaaatcgccgcaaactacgaacccccgccccctacgctaataacgcccgcccccctcgaacacacctctccgatacctacgaaccccgccccgtatactaacgaactccccacccccaactcctcgccgcaacctacgaatcccgccccctacaataataaacacctacctcccctcaaacgcccctaatcgcgacataaaaatcccgctcactatattaataaacacccgcctcccttcgaacgcgcctcgccgcaacctaaaaaccccgccccctatactaatatactccctctcccacaaaacaacgcgccgactcgaacgcgaccgactaccgaaccctttataaaaactataaactacgcctaacgataacaccataaacaactcaaataaaacgcccgaaacgtccgccaactctacgccgcccgcgcaaaaaaaaaacataacgtaataataccgctaactatatcgcctatctaaaatactaaaaacaatctataaatatccaatcgaaaaaaaaaaccgaccccgccgcgcatacgctcctcgccctaccctaccccgccccgccccgacgaccccaaaaaaaaaaacccgctaaaaatcgaaaatctaccgaacgcctcccgaaacgaaaaaataacgaaaccgccgaaaaccgacg

SEQ ID NO: 359 - DNA, 817 bp, Artificial Sequence
  chemically treated genomic DNA (Homo sapiens) CpG-island No: 359
taattaggattttatttcgaggatggcgtattagttagttttttgcgaagttttattcgtgtgttttggtgtgaggttttgatcgttaaggtgtttgcgcgtttttaggtttcgttttttatgttaataagcgttcgttttttttgggagtaagtcgtcgtaaattgcgagttttcgttttttacgttaatgacgttcgtttttttcgggtatattttttcgatgtttgcgagtttcgtttcgtatgttaacgagttttttatttttagtttttcgtcgtagtttgcgggtttcgttttttataataatgagtatttatttttttttaaacgtttttagtcgcggtatgagggtttcgtttattatgttaatgagtattcgttttttttcgggcgcgtttcgtcgtagtttgaaagtttcgttttttatgttaatatgtttttttttttataaggtagcgcgtcggttcggacgcggtcggttatcgagttttttgtgagggttgtgagttgcgtttgacggtggtattatgagtagtttaggtggggcgttcggggcgttcgttagttttgcgtcgttcgcgtaggaagagggtatgacgtggtggtatcgttggttgtgtcgtttgtttggggtgttgggggtagtttgtgagtatttagtcggggagaggggtcggtttcgtcgcgtatgcgtttttcgttttgttttgtttcgtttcgtttcggcggttttaggggaaaggattcgttgggggtcgggggtttgtcgggcgtttttcggggcggaggaatggcggggtcgtcgggagtcggcg

SEQ ID NO: 360 - DNA, 817 bp, Artificial Sequence
  chemically treated genomic DNA (Homo sapiens) CpG-island No: 360
cgccgactcccgacgaccccgccattcctccgccccgaaaaacgcccgacaaacccccgacccccaacgaatcctttcccctaaaaccgccgaaacgaaacgaaacaaaacaaaacgaaaaacgcatacgcgacgaaaccgacccctctccccgactaaatactcacaaactacccccaacaccccaaacaaacgacacaaccaacgataccaccacgtcataccctcttcctacgcgaacgacgcaaaactaacgaacgccccgaacgccccacctaaactactcataataccaccgtcaaacgcaactcacaaccctcacaaaaaactcgataaccgaccgcgtccgaaccgacgcgctaccttataaaaaaaaaaacatattaacataaaaaacgaaactttcaaactacgacgaaacgcgcccgaaaaaaaacgaatactcattaacataataaacgaaaccctcataccgcgactaaaaacgtttaaaaaaaaataaatactcattattataaaaaacgaaacccgcaaactacgacgaaaaactaaaaataaaaaactcgttaacatacgaaacgaaactcgcaaacatcgaaaaaatatacccgaaaaaaacgaacgtcattaacgtaaaaaacgaaaactcgcaatttacgacgacttactcccaaaaaaaacgaacgcttattaacataaaaaacgaaacctaaaaacgcgcaaacaccttaacgatcaaaacctcacaccaaaacacacgaataaaacttcgcaaaaaactaactaatacgccatcctcgaaataaaatcctaatta

SEQ ID NO: 361 - DNA, 535 bp, Artificial Sequence
  chemically treated genomic DNA (Homo sapiens) CpG-island No: 361
ggggtaaaaattcgaggtagggtgggggtaaaaagtcgcggtcggtaaaaagtcgtgggggtagggggtaaaaagttacggcggggaaaaagtcgtagtagcggggagttaaaaagtcgtggcgggtaaaaagtcgtcgcggataaaaagttacggcggcgggtgtgtaaaaagtcgaggtagcggggtagtgggggtaaaaagtcggagcgggtaaaaagtcgttgcgataaaaagtcgcggcggtagaggggtaaaaagtcgtagtggcggggggggggtaaaaagttatggtcggtaaaaagtcgcggcggtagggggtaaaaagtcgcggcgggggtgtaaaaagtcggggcgggtagaaagtcgcggcggcggggggtaaaaagtcgtggcggttggcgttaaaaagtcgcgcggcgggggtgtaaaaagttttggtgggtaaataattacggtatttgaggaggggagggtaaaaagtcgaggcgggtaaaaagttacggcggcggggggaaaaaagcgagattacgtt

SEQ ID NO: 362 - DNA, 535 bp, Artificial Sequence
  chemically treated genomic DNA (Homo sapiens) CpG-island No: 362
aacgtaatctcgcttttttccccccgccgccgtaactttttacccgcctcgactttttaccctcccctcctcaaataccgtaattatttacccaccaaaactttttacacccccgccgcgcgactttttaacgccaaccgccacgactttttaccccccgccgccgcgactttctacccgccccgactttttacacccccgccgcgactttttaccccctaccgccgcgactttttaccgaccataactttttaccccccccccgccactacgactttttacccctctaccgccgcgactttttatcgcaacgactttttacccgctccgactttttacccccactaccccgctacctcgactttttacacacccgccgccgtaactttttatccgcgacgactttttacccgccacgactttttaactccccgctactacgactttttccccgccgtaactttttaccccctacccccacgactttttaccgaccgcgactttttacccccaccctacctcgaatttttacccc

SEQ ID NO: 363 - DNA, 535 bp, Artificial Sequence
  chemically treated genomic DNA (Homo sapiens) CpG-island No: 363
gacgtagtttcgttttttttttttcgtcgtcgtggttttttgttcgtttcggttttttgtttttttttttttaggtgtcgtggttatttgtttattagggttttttgtattttcgtcgcgcggttttttgacgttagtcgttacggttttttatttttcgtcgtcgcggttttttgttcgtttcggttttttgtattttcgtcgcggttttttgttttttgtcgtcgcggttttttgtcggttatggttttttgtttttttttcgttattgcggttttttgtttttttgtcgtcgcggttttttgtcgtagcggttttttgttcgtttcggttttttgtttttattgtttcgttgtttcggttttttgtatattcgtcgtcgtggttttttgttcgcggcggttttttgttcgttacggttttttgatttttcgttgttgcggtttttttttcgtcgtggttttttattttttgtttttacggttttttatcggtcgcggttttttgtttttattttgtttcgggtttttgtttt

SEQ ID NO: 364 - DNA, 535 bp, Artificial Sequence
  chemically treated genomic DNA (Homo sapiens) CpG-island No: 364
aaaacaaaaacccgaaacaaaataaaaacaaaaaaccgcgaccgataaaaaaccgtaaaaacaaaaaataaaaaaccacgacgaaaaaaaaaccgcaacaacgaaaaatcaaaaaaccgtaacgaacaaaaaaccgccgcgaacaaaaaaccacgacgacgaatatacaaaaaaccgaaacaacgaaacaataaaaacaaaaaaccgaaacgaacaaaaaaccgctacgacaaaaaaccgcgacgacaaaaaaacaaaaaaccgcaataacgaaaaaaaaacaaaaaaccataaccgacaaaaaaccgcgacgacaaaaaacaaaaaaccgcgacgaaaatacaaaaaaccgaaacgaacaaaaaaccgcgacgacgaaaaataaaaaaccgtaacgactaacgtcaaaaaaccgcgcgacgaaaatacaaaaaaccctaataaacaaataaccacgacacctaaaaaaaaaaaaacaaaaaaccgaaacgaacaaaaaaccacgacgacgaaaaaaaaaaaacgaaactacgtc

SEQ ID NO: 365 - DNA, 511 bp, Artificial Sequence
  chemically treated genomic DNA (Homo sapiens) CpG-island No: 365
gggttttacgtagtaggatcgcgttcgtagtttttaggtatcgcgttcggttggagaggtagttatcgttttatagtgaatatggcggtcgaggcggttttagcgtcgggcgggcggcgtcgggaggtacgttacgtgagcggtttagttgggcggatcgcgcgcgcgttcgttggtttcgtcggtcgtcgttcgttcgttggttcggttgcgtttttttcgcgtcgttcgtttgcgtcgtcgagtcggtgttcggcgtggcggggtttcgtaattacggtaatacgtgttttatgaacgttacgttgtagtgttttagtaatatcgagtttttcgtcgagtatttggcgttgggttagtatcgggcggggcggttcgagttttcgtttgattcggagtagtttgcgggtcgcggcgcgtagggttagggcgaggttattgagtagttggcgtatttggtgcgggttttttggattttggagtatatttcgtagtatagtcgcgattttaa

SEQ ID NO: 366 - DNA, 511 bp, Artificial Sequence
  chemically treated genomic DNA (Homo sapiens) CpG-island No: 366
ttaaaatcgcgactatactacgaaatatactccaaaatccaaaaaacccgcaccaaatacgccaactactcaataacctcgccctaaccctacgcgccgcgacccgcaaactactccgaatcaaacgaaaactcgaaccgccccgcccgatactaacccaacgccaaatactcgacgaaaaactcgatattactaaaacactacaacgtaacgttcataaaacacgtattaccgtaattacgaaaccccgccacgccgaacaccgactcgacgacgcaaacgaacgacgcgaaaaaaacgcaaccgaaccaacgaacgaacgacgaccgacgaaaccaacgaacgcgcgcgcgatccgcccaactaaaccgctcacgtaacgtacctcccgacgccgcccgcccgacgctaaaaccgcctcgaccgccatattcactataaaacgataactacctctccaaccgaacgcgatacctaaaaactacgaacgcgatcctactacgtaaaaccc

SEQ ID NO: 367 - DNA, 511 bp, Artificial Sequence
  chemically treated genomic DNA (Homo sapiens) CpG-island No: 367
ttgaagtcgcggttgtgttgcggggtgtattttagggtttagagggttcgtattaggtgcgttagttgtttagtgatttcgttttggttttgcgcgtcgcggttcgtaggttgtttcgggttaggcgagggttcgggtcgtttcgttcggtattggtttagcgttaggtattcggcgaagagttcggtgttgttgaggtattgtagcgtggcgtttatgaagtacgtgttgtcgtggttgcggagtttcgttacgtcgggtatcggttcggcggcgtaagcgggcggcgcgggaaaagcgtagtcgagttagcgagcgagcggcggtcggcggggttagcgggcgcgcgcgcggttcgtttagttgagtcgtttacgtgacgtgtttttcggcgtcgttcgttcggcgttgaagtcgtttcggtcgttatgtttattgtgggacggtagttgtttttttagtcggacgcgatgtttggaggttgcgggcgcggttttgttgcgtgaagttt

SEQ ID NO: 368 - DNA, 511 bp, Artificial Sequence
  chemically treated genomic DNA (Homo sapiens) CpG-island No: 368
aaacttcacgcaacaaaaccgcgcccgcaacctccaaacatcgcgtccgactaaaaaaacaactaccgtcccacaataaacataacgaccgaaacgacttcaacgccgaacgaacgacgccgaaaaacacgtcacgtaaacgactcaactaaacgaaccgcgcgcgcgcccgctaaccccgccgaccgccgctcgctcgctaactcgactacgcttttcccgcgccgcccgcttacgccgccgaaccgatacccgacgtaacgaaactccgcaaccacgacaacacgtacttcataaacgccacgctacaatacctcaacaacaccgaactcttcgccgaatacctaacgctaaaccaataccgaacgaaacgacccgaaccctcgcctaacccgaaacaacctacgaaccgcgacgcgcaaaaccaaaacgaaatcactaaacaactaacgcacctaatacgaaccctctaaaccctaaaatacaccccgcaacacaaccgcgacttcaa

SEQ ID NO: 369 - DNA, 521 bp, Artificial Sequence
  chemically treated genomic DNA (Homo sapiens) CpG-island No: 369
tacggcgttggggtagcgttggtagagcgttagttcgtgcgagaagtttattatttcgtttttcgtgttttggatgatgagtacgggcggcgtgattttggatattttttggattttgcgggaggggcgtggggcgggtgagatttcgttcggttcgggtttcgtttcgtttcgttttcgttttcgttttcgttttagtttgtttatttggggaaggcgtcgaagtagtaggttttggtgttcggaaggcgacgtttaggtttaaggtgagcggcgagtgtagtattatcgtggcggattcgtagcgcgaggttaggtttacggtgggtatcgtgtcgatgttttgtcggtataggatgatgtcgttcgggttgatgcggtatttggcggtatttgagtagggttagtttaggtttttaacgcgcgcgtattttttttgttagcgggcgttttcgggtttagtttcggatgcgattttttagttttttcgtttagttaagttagttggttaggtttaggtt

SEQ ID NO: 370 - DNA, 521 bp, Artificial Sequence
  chemically treated genomic DNA (Homo sapiens) CpG-island No: 370
aacctaaacctaaccaactaacttaactaaacgaaaaaactaaaaaatcgcatccgaaactaaacccgaaaacgcccgctaacaaaaaaaatacgcgcgcgttaaaaacctaaactaaccctactcaaataccgccaaataccgcatcaacccgaacgacatcatcctataccgacaaaacatcgacacgatacccaccgtaaacctaacctcgcgctacgaatccgccacgataatactacactcgccgctcaccttaaacctaaacgtcgccttccgaacaccaaaacctactacttcgacgccttccccaaataaacaaactaaaacgaaaacgaaaacgaaaacgaaacgaaacgaaacccgaaccgaacgaaatctcacccgccccacgcccctcccgcaaaatccaaaaaatatccaaaatcacgccgcccgtactcatcatccaaaacacgaaaaacgaaataataaacttctcgcacgaactaacgctctaccaacgctaccccaacgccgta

SEQ ID NO: 371 - DNA, 521 bp, Artificial Sequence
  chemically treated genomic DNA (Homo sapiens) CpG-island No: 371
agtttgggtttgattaattgatttggttgagcggggagattggagagtcgtattcggagttgggttcggggacgttcgttggtaggaggggtgcgcgcgcgttggaggtttaggttgattttgtttaggtgtcgttaggtatcgtattagttcggacggtattattttgtatcggtagagtatcggtacggtgtttatcgtggatttggtttcgcgttacgagttcgttacggtggtgttgtattcgtcgtttattttggatttgagcgtcgtttttcggatattaagatttattgtttcgacgttttttttaagtgagtaggttggggcggggacgggggcgggggcggagcggggcggggttcgggtcgggcgaggttttattcgttttacgtttttttcgtagaatttagaaggtgtttaagattacgtcgttcgtgtttattatttaggatacgaaagacgaggtgatggatttttcgtacgggttggcgttttattagcgttgttttaacgtcgtg

SEQ ID NO: 372 - DNA, 521 bp, Artificial Sequence
  chemically treated genomic DNA (Homo sapiens) CpG-island No: 372
cacgacgttaaaacaacgctaataaaacgccaacccgtacgaaaaatccatcacctcgtctttcgtatcctaaataataaacacgaacgacgtaatcttaaacaccttctaaattctacgaaaaaaacgtaaaacgaataaaacctcgcccgacccgaaccccgccccgctccgcccccgcccccgtccccgccccaacctactcacttaaaaaaaacgtcgaaacaataaatcttaatatccgaaaaacgacgctcaaatccaaaataaacgacgaatacaacaccaccgtaacgaactcgtaacgcgaaaccaaatccacgataaacaccgtaccgatactctaccgatacaaaataataccgtccgaactaatacgatacctaacgacacctaaacaaaatcaacctaaacctccaacgcgcgcgcacccctcctaccaacgaacgtccccgaacccaactccgaatacgactctccaatctccccgctcaaccaaatcaattaatcaaacccaaact

SEQ ID NO: 373 - DNA, 972 bp, Artificial Sequence
  chemically treated genomic DNA (Homo sapiens) CpG-island No: 373
cggcggggataaaaattttcggcggcgagggtaaaaagtcgcggtggtaaaaagcggcggcgatcggggtaaaaagtcgcggtagtaaaaagtcgcggcggcggggataaaaagtcgttgcggcgggggtaaaaggcggcggtaatagcggtaaaaagtcgcgggcgtaaaaagcggcggtaatagcggcggcggtaaaaagtcgcggcgaggaaaaagtcgttgcggcgggggggtaaaaagtcgtgatagcggggggtaaaaagtcgcggcgggtaaaaagttacggcggcggtggggtaaaaagtagcggcggtggcggcgggggggtagaaagtcgcggcggtagaaagtcgcggcggtaaaaagttacggcggcgagggtgtaaaaagttgtgtcggcggtggggtaaaaagtttggtcgggtaaaaagtcgcggtcgcggcggggggtaaaaagtcgaggcgggtaaaaagtcgaggtagggtgggggtaaaaagtcgcggcggcggaggggtaaaaagtcgcggcggcgggttagggtagaaagtcgtagcgggtaaaaagtcgaggcggggtgggggtaaaaagtcgcggcggcgggtgggtggtagaaagtcgcggcgggtaaaaagtcgcgggggtagggtggaaaaagttaaggcggtgataaagtcgcggcggcgggggggggggggggataaagttttggcgggtaaaaagttagggcggtaaaattcgtagcggtgaagagttaaaaattcgcggtggttaaaaagttttagcgttgagggggtaaaaagtcgtagcgtataaaaagtcgaggcgcggtggggggagaaagtcgtcgcgacgggggggtaaaaagtcgcggcggcggagggcgaaataatggagatggggtagaaggtcggtatagtttggtattgttggagtggatgtgataggaaatgtgtagttaaagataaaaa

SEQ ID NO: 374 - DNA, 972 bp, Artificial Sequence
  chemically treated genomic DNA (Homo sapiens) CpG-island No: 374
tttttatctttaactacacatttcctatcacatccactccaacaataccaaactataccgaccttctaccccatctccattatttcgccctccgccgccgcgactttttacccccccgtcgcgacgactttctccccccaccgcgcctcgactttttatacgctacgactttttaccccctcaacgctaaaactttttaaccaccgcgaatttttaactcttcaccgctacgaattttaccgccctaactttttacccgccaaaactttatcccccccccccccccgccgccgcgactttatcaccgccttaactttttccaccctacccccgcgactttttacccgccgcgactttctaccacccacccgccgccgcgactttttacccccaccccgcctcgactttttacccgctacgactttctaccctaacccgccgccgcgactttttacccctccgccgccgcgactttttacccccaccctacctcgactttttacccgcctcgactttttaccccccgccgcgaccgcgactttttacccgaccaaactttttaccccaccgccgacacaactttttacaccctcgccgccgtaactttttaccgccgcgactttctaccgccgcgactttctacccccccgccgccaccgccgctactttttaccccaccgccgccgtaactttttacccgccgcgactttttaccccccgctatcacgactttttacccccccgccgcaacgactttttcctcgccgcgactttttaccgccgccgctattaccgccgctttttacgcccgcgactttttaccgctattaccgccgccttttacccccgccgcaacgactttttatccccgccgccgcgactttttactaccgcgactttttaccccgatcgccgccgctttttaccaccgcgactttttaccctcgccgccgaaaatttttatccccgccg

SEQ ID NO: 375 - DNA, 972 bp, Artificial Sequence
  chemically treated genomic DNA (Homo sapiens) CpG-island No: 375
tttttgtttttggttgtatattttttgttatatttattttagtaatgttaagttgtgtcggttttttattttatttttattatttcgtttttcgtcgtcgcggttttttgttttttcgtcgcggcggttttttttttttatcgcgtttcggttttttgtacgttgcggttttttgtttttttaacgttagagttttttgattatcgcgggtttttgattttttatcgttgcgaattttgtcgttttggttttttgttcgttagggttttgtttttttttttttttcgtcgtcgcggttttattatcgttttggttttttttattttgttttcgcggttttttgttcgtcgcggttttttgttatttattcgtcgtcgcggttttttgtttttatttcgtttcggttttttgttcgttgcggttttttgttttaattcgtcgtcgcggttttttgttttttcgtcgtcgcggttttttgtttttattttgtttcggttttttgttcgtttcggttttttgtttttcgtcgcggtcgcggttttttgttcgattaggttttttgttttatcgtcgatatagttttttgtattttcgtcgtcgtggttttttgtcgtcgcggttttttgtcgtcgcggttttttgttttttcgtcgttatcgtcgttgttttttgttttatcgtcgtcgtggttttttgttcgtcgcggttttttgtttttcgttgttacggttttttgttttttcgtcgtagcgatttttttttcgtcgcggttttttgtcgtcgtcgttgttgtcgtcgttttttgcgttcgcggttttttgtcgttgttgtcgtcgttttttgttttcgtcgtagcggttttttgttttcgtcgtcgcggttttttgttatcgcgattttttgtttcggtcgtcgtcgttttttgttatcgcgattttttgttttcgtcgtcgaggatttttgttttcgtcg

SEQ ID NO: 376 - DNA, 972 bp, Artificial Sequence
  chemically treated genomic DNA (Homo sapiens) CpG-island No: 376
cgacgaaaacaaaaatcctcgacgacgaaaacaaaaaatcgcgataacaaaaaacgacgacgaccgaaacaaaaaatcgcgataacaaaaaaccgcgacgacgaaaacaaaaaaccgctacgacgaaaacaaaaaacgacgacaacaacgacaaaaaaccgcgaacgcaaaaaacgacgacaacaacgacgacgacaaaaaaccgcgacgaaaaaaaaatcgctacgacgaaaaaacaaaaaaccgtaacaacgaaaaacaaaaaaccgcgacgaacaaaaaaccacgacgacgataaaacaaaaaacaacgacgataacgacgaaaaaacaaaaaaccgcgacgacaaaaaaccgcgacgacaaaaaaccacgacgacgaaaatacaaaaaactatatcgacgataaaacaaaaaacctaatcgaacaaaaaaccgcgaccgcgacgaaaaacaaaaaaccgaaacgaacaaaaaaccgaaacaaaataaaaacaaaaaaccgcgacgacgaaaaaacaaaaaaccgcgacgacgaattaaaacaaaaaaccgcaacgaacaaaaaaccgaaacgaaataaaaacaaaaaaccgcgacgacgaataaataacaaaaaaccgcgacgaacaaaaaaccgcgaaaacaaaataaaaaaaaccaaaacgataataaaaccgcgacgacgaaaaaaaaaaaaaaacaaaaccctaacgaacaaaaaaccaaaacgacaaaattcgcaacgataaaaaatcaaaaacccgcgataatcaaaaaactctaacgttaaaaaaacaaaaaaccgcaacgtacaaaaaaccgaaacgcgataaaaaaaaaaaaccgccgcgacgaaaaaacaaaaaaccgcgacgacgaaaaacgaaataataaaaataaaataaaaaaccgacacaacttaacattactaaaataaatataacaaaaaatatacaaccaaaaacaaaaa

SEQ ID NO: 377 - DNA, 938 bp, Artificial Sequence
  chemically treated genomic DNA (Homo sapiens) CpG-island No: 377
gtagtattcggttagcggcggtttttgcgtttttttttgcgttatcgtattattttcgttatcgttttttttttttttttttatcgtagtcgggcgtagcgttattttatgtaggttgtagcggttaaggcggggagttaggggtgcgggcgtttaggtaaggaatttttgagtcgggagagttggacgaggagcgtttttcggcgttgttcgagttaggacgtcggtagagttggtagtttagttggcggattttgtagttagagtcgcggcggcgggggtaaaaagtggtatgggggggcgggtgtaaaaagtcgtaaaggtagaaagttgcggcggcgggtgtagaaagtcgaggcggcggaggtaaaaagtcgcggtgggaataatttgtggcggcgggggtaaaaagtcggggcggcgggggttaaaagttataaaaagtcgttgtggtagggtaaaaagtcgtggcggcgggggtaaaaaatcgtaaaaagtcgtggtttcgggggtaaaaagtcgcggcggcggaggtaaaaagtcgtgtcggcgggagtaaaaagtaacgggggcgggggtagaaagtcgtcgcgacgaggtcgaaagtcgcggcggcgggggtaaagagtcgcggcgacggggttaaaaagtcgcggtagagaaagttacggcggcgggggtaaaaagtcgcggcggcggaggtagaaagtcgtaaaaagtcgcggcggcggggataaaaagtcgtagcggtaaaaagttgcgtcggcggggggtataaagtcggggcgggagaaatttgcggcggcggtaaaaatttgcggcggcggttaaaagtcgtaaaaagtcgcggcggcgggattaaaaagttagttgtttttttgggatttttttaattattttgtttaaagtttttgtttatttatgcgttggaagaggga

SEQ ID NO: 378 - DNA, 938 bp, Artificial Sequence
  chemically treated genomic DNA (Homo sapiens) CpG-island No: 378
tccctcttccaacgcataaataaacaaaaactttaaacaaaataattaaaaaaatcccaaaaaaacaactaactttttaatcccgccgccgcgactttttacgacttttaaccgccgccgcaaatttttaccgccgccgcaaatttctcccgccccgactttataccccccgccgacgcaactttttaccgctacgactttttatccccgccgccgcgactttttacgactttctacctccgccgccgcgactttttacccccgccgccgtaactttctctaccgcgactttttaaccccgtcgccgcgactctttacccccgccgccgcgactttcgacctcgtcgcgacgactttctacccccgcccccgttactttttactcccgccgacacgactttttacctccgccgccgcgactttttacccccgaaaccacgactttttacgattttttacccccgccgccacgactttttaccctaccacaacgactttttataacttttaacccccgccgccccgactttttacccccgccgccacaaattattcccaccgcgactttttacctccgccgcctcgactttctacacccgccgccgcaactttctacctttacgactttttacacccgcccccccataccactttttacccccgccgccgcgactctaactacaaaatccgccaactaaactaccaactctaccgacgtcctaactcgaacaacgccgaaaaacgctcctcgtccaactctcccgactcaaaaattccttacctaaacgcccgcacccctaactccccgccttaaccgctacaacctacataaaataacgctacgcccgactacgataaaaaaaaaaaaaaaaaacgataacgaaaataatacgataacgcaaaaaaaaacgcaaaaaccgccgctaaccgaatactac

SEQ ID NO: 379 - DNA, 938 bp, Artificial Sequence
  chemically treated genomic DNA (Homo sapiens) CpG-island No: 379
ttttttttttagcgtatgagtgagtagaggttttaaatagggtaattggaggaattttaggggagtagttggttttttgatttcgtcgtcgcggttttttgcggtttttggtcgtcgtcgtaggtttttgtcgtcgtcgtaggtttttttcgtttcggttttatgtttttcgtcgacgtagttttttgtcgttgcggttttttgttttcgtcgtcgcggttttttgcggttttttattttcgtcgtcgcggttttttgttttcgtcgtcgtggttttttttgtcgcggttttttgatttcgtcgtcgcggttttttgttttcgtcgtcgcggttttcggtttcgtcgcggcggttttttgttttcgttttcgttgttttttgttttcgtcggtacggttttttgttttcgtcgtcgcggttttttgttttcgaagttacggttttttgcggttttttgttttcgtcgttacgattttttgttttgttatagcggttttttgtggtttttggttttcgtcgtttcggttttttgttttcgtcgttataggttgtttttatcgcggttttttgttttcgtcgtttcggttttttatattcgtcgtcgtagttttttgtttttgcggttttttgtattcgtttttttatgttattttttgttttcgtcgtcgcggttttgattgtaggattcgttaattaggttgttagttttatcggcgttttggttcgggtagcgtcgaggggcgtttttcgtttagttttttcggtttaggggttttttgtttagacgttcgtatttttagtttttcgttttgatcgttgtagtttgtatagagtggcgttgcgttcggttgcgatgggagagaagaaggagggcggtggcgggggtgatgcggtggcgtagagggaggcgtaggggtcgtcgttagtcgggtgttgt

SEQ ID NO: 380 - DNA, 938 bp, Artificial Sequence
  chemically treated genomic DNA (Homo sapiens) CpG-island No: 380
acaacacccgactaacgacgacccctacgcctccctctacgccaccgcatcacccccgccaccgccctccttcttctctcccatcgcaaccgaacgcaacgccactctatacaaactacaacgatcaaaacgaaaaactaaaaatacgaacgtctaaacaaaaaacccctaaaccgaaaaaactaaacgaaaaacgcccctcgacgctacccgaaccaaaacgccgataaaactaacaacctaattaacgaatcctacaatcaaaaccgcgacgacgaaaacaaaaaataacataaaaaaacgaatacaaaaaaccgcaaaaacaaaaaactacgacgacgaatataaaaaaccgaaacgacgaaaacaaaaaaccgcgataaaaacaacctataacgacgaaaacaaaaaaccgaaacgacgaaaaccaaaaaccacaaaaaaccgctataacaaaacaaaaaatcgtaacgacgaaaacaaaaaaccgcaaaaaaccgtaacttcgaaaacaaaaaaccgcgacgacgaaaacaaaaaaccgtaccgacgaaaacaaaaaacaacgaaaacgaaaacaaaaaaccgccgcgacgaaaccgaaaaccgcgacgacgaaaacaaaaaaccgcgacgacgaaatcaaaaaaccgcgacaaaaaaaaccacgacgacgaaaacaaaaaaccgcgacgacgaaaataaaaaaccgcaaaaaaccgcgacgacgaaaacaaaaaaccgcaacgacaaaaaactacgtcgacgaaaaacataaaaccgaaacgaaaaaaacctacgacgacgacaaaaacctacgacgacgaccaaaaaccgcaaaaaaccgcgacgacgaaatcaaaaaaccaactactcccctaaaattcctccaattaccctatttaaaacctctactcactcatacgctaaaaaaaaaa

SEQ ID NO: 381 - DNA, 607 bp, Artificial Sequence
  chemically treated genomic DNA (Homo sapiens) CpG-island No: 381
gagacgtttttcgttttataggcgttttttagttttaggttcggtttggtttttatcgtcggagttttataaagaaagttttcgggttttagttttttacgtatttatcggtatcgacgtcggcggcgattcgggttttcgtcgtttttagttttttgcggtggttggtttttgggtgggtttcggcgttagcggcggcgattgttttatatttacggggttcgggtcgtattcgtttcgatttaacggtttcgttagttaggcgcgcgcgtcggtttcgcgcgttatgttttcgtcgtgttgcgtatcgtttaggcgattttcgttgttcgttaattacgcgcgcgttttcgcgggtttatatatgaatcgcgtacgcgcgcgttagtcgtatttttttttcgtgcgtttcgttttacgttttttagagttggcggttgtttttagtgttttgtttatttttgtcgggtcgtcggattcggcgggtgagtgcgtggttttcggtttcgtatcgtcgtttgtttttttgtagattatttcggatttaattttttagttatttttttatattgtttttttcgttttttttattacgcggggtttagga

SEQ ID NO: 382 - DNA, 607 bp, Artificial Sequence
  chemically treated genomic DNA (Homo sapiens) CpG-island No: 382
tcctaaaccccgcgtaataaaaaaaacgaaaaaaacaatataaaaaaataactaaaaaattaaatccgaaataatctacaaaaaaacaaacgacgatacgaaaccgaaaaccacgcactcacccgccgaatccgacgacccgacaaaaataaacaaaacactaaaaacaaccgccaactctaaaaaacgtaaaacgaaacgcacgaaaaaaaaatacgactaacgcgcgcgtacgcgattcatatataaacccgcgaaaacgcgcgcgtaattaacgaacaacgaaaatcgcctaaacgatacgcaacacgacgaaaacataacgcgcgaaaccgacgcgcgcgcctaactaacgaaaccgttaaatcgaaacgaatacgacccgaaccccgtaaatataaaacaatcgccgccgctaacgccgaaacccacccaaaaaccaaccaccgcaaaaaactaaaaacgacgaaaacccgaatcgccgccgacgtcgataccgataaatacgtaaaaaactaaaacccgaaaactttctttataaaactccgacgataaaaaccaaaccgaacctaaaactaaaaaacgcctataaaacgaaaaacgtctc

SEQ ID NO: 383 - DNA, 607 bp, Artificial Sequence
  chemically treated genomic DNA (Homo sapiens) CpG-island No: 383
ttttaggtttcgcgtggtgggggaagcgaaaggggtagtgtggggaagtggttgaggggttgggttcggggtggtttgtagagaggtaggcggcggtgcggagtcgggaattacgtatttattcgtcgagttcgacggttcggtaggggtgggtaaggtattgggaatagtcgttagttttagagggcgtgaggcggggcgtacggggagggggtgcggttaacgcgcgcgtgcgcggtttatgtgtgggttcgcgggggcgcgcgcgtggttagcgggtagcgagggtcgtttgggcggtgcgtagtacggcgggaatatggcgcgcggaatcggcgcgcgcgtttagttggcgggatcgttagatcgaggcggatgcggttcggatttcgtggatatggagtagtcgtcgtcgttggcgtcggagtttatttaagggttaattatcgtaaggagttgaaggcggcgggagttcgagtcgtcgtcggcgtcggtgtcggtgagtgcgtgaggggttggggttcggagattttttttgtgaaatttcggcggtgggagttaggtcgggtttgaggttgaggagcgtttgtgaggcggaaggcgtttt

SEQ ID NO: 384 - DNA, 607 bp, Artificial Sequence
  chemically treated genomic DNA (Homo sapiens) CpG-island No: 384
aaaacgccttccgcctcacaaacgctcctcaacctcaaacccgacctaactcccaccgccgaaatttcacaaaaaaaatctccgaaccccaacccctcacgcactcaccgacaccgacgccgacgacgactcgaactcccgccgccttcaactccttacgataattaacccttaaataaactccgacgccaacgacgacgactactccatatccacgaaatccgaaccgcatccgcctcgatctaacgatcccgccaactaaacgcgcgcgccgattccgcgcgccatattcccgccgtactacgcaccgcccaaacgaccctcgctacccgctaaccacgcgcgcgcccccgcgaacccacacataaaccgcgcacgcgcgcgttaaccgcaccccctccccgtacgccccgcctcacgccctctaaaactaacgactattcccaataccttacccacccctaccgaaccgtcgaactcgacgaataaatacgtaattcccgactccgcaccgccgcctacctctctacaaaccaccccgaacccaacccctcaaccacttccccacactacccctttcgcttcccccaccacgcgaaacctaaaa

SEQ ID NO: 385 - DNA, 527 bp, Artificial Sequence
  chemically treated genomic DNA (Homo sapiens) CpG-island No: 385
tttttttttttttttttggtcgttacgcgtagcgtcgttttatgtaggtcgtagcggttaaggcggggagttcggggcgcgggcgtttaggtaaggaattttcgagtcgggagagttggattaggagcgtttttcggtttcgttcgaataaggacgtcggtagagtcggtagtcgagtgtgtcgttttcgtttttagagtcgcgtcggtggtggtaaaaagcggcggcggcgggggtaaaaagttggggcggcggggataaaaagtttcggtggcgggggtaaaaagttacggcggtaaaaatcggcggcggcgggggtaaaatgtcgtaggggtaaaaagtcgtaaaaagtcgcggcggcgggggtaagaagtcgcggtggcgggagtaaaaaattgcggcggtaaaaaggggcggcggcgggggtaaaaagtcgtaaaaagtttcggcgtagggggtaaaaagtcgtggcgtcgggggtaagaattcgcggcggcgggggtaaaaaaaatatatatataattata

SEQ ID NO: 386 - DNA, 527 bp, Artificial Sequence
  chemically treated genomic DNA (Homo sapiens) CpG-island No: 386
tataattatatatatattttttttacccccgccgccgcgaattcttacccccgacgccacgactttttaccccctacgccgaaactttttacgactttttacccccgccgccgcccctttttaccgccgcaattttttactcccgccaccgcgacttcttacccccgccgccgcgactttttacgactttttacccctacgacattttacccccgccgccgccgatttttaccgccgtaactttttacccccgccaccgaaactttttatccccgccgccccaactttttacccccgccgccgccgctttttaccaccaccgacgcgactctaaaaacgaaaacgacacactcgactaccgactctaccgacgtccttattcgaacgaaaccgaaaaacgctcctaatccaactctcccgactcgaaaattccttacctaaacgcccgcgccccgaactccccgccttaaccgctacgacctacataaaacgacgctacgcgtaacgaccaaaaaaaaaaaaaaaaa

SEQ ID NO: 387 - DNA, 527 bp, Artificial Sequence
  chemically treated genomic DNA (Homo sapiens) CpG-island No: 387
tataattatatatatattttttttgttttcgtcgtcgcggatttttgttttcgacgttacggttttttgttttttacgtcgaggttttttgcggttttttgttttcgtcgtcgtttttttttgtcgtcgtagttttttgttttcgttatcgcggttttttgttttcgtcgtcgcggttttttgcggttttttgtttttgcggtattttgttttcgtcgtcgtcggtttttgtcgtcgtggttttttattttcgttatcgaggttttttgttttcgtcgttttagttttttgttttcgtcgtcgtcgttttttgttattatcgacgcggttttgagggcgggagcggtatattcggttgtcggttttatcggcgtttttgttcgggcggagtcgaggggcgtttttggtttagttttttcggttcgggggttttttgtttaggcgttcgcgtttcgagtttttcgttttggtcgttgcggtttgtatagagcggcgttgcgcgtagcggttaggggagagaagaagga

SEQ ID NO: 388 - DNA, 527 bp, Artificial Sequence
  chemically treated genomic DNA (Homo sapiens) CpG-island No: 388
tccttcttctctcccctaaccgctacgcgcaacgccgctctatacaaaccgcaacgaccaaaacgaaaaactcgaaacgcgaacgcctaaacaaaaaacccccgaaccgaaaaaactaaaccaaaaacgcccctcgactccgcccgaacaaaaacgccgataaaaccgacaaccgaatataccgctcccgccctcaaaaccgcgtcgataataacaaaaaacgacgacgacgaaaacaaaaaactaaaacgacgaaaacaaaaaacctcgataacgaaaataaaaaaccacgacgacaaaaaccgacgacgacgaaaacaaaataccgcaaaaacaaaaaaccgcaaaaaaccgcgacgacgaaaacaaaaaaccgcgataacgaaaacaaaaaactacgacgacaaaaaaaaacgacgacgaaaacaaaaaaccgcaaaaaacctcgacgtaaaaaacaaaaaaccgtaacgtcgaaaacaaaaatccgcgacgacgaaaacaaaaaaaatatatatataattata

SEQ ID NO: 389 - DNA, 792 bp, Artificial Sequence
  chemically treated genomic DNA (Homo sapiens) CpG-island No: 389
aggcgtcgcgcgtattaggcgttgatagtatatcgatttttttttcggtgtgcgtaggttaatatttatatatatttttatatattcgtatatattttcgtggaaattgaggtaggtaggcggcggattaggtttcgtcgtttgacggttagcggttgggatggaattcggattgttagacgtttttcgttttataggtattttttagtcgttgaggttcggttaggtttttatcgtcggagttttataaagaaagtttttcggttcgagttttttacgtatttatcggcgtcgacgttcgcggcgattggggtttttattttttttagttttttgcgggggtcggttttggggtcggtttgggcgtcggtagcggcgattgttttatatttatcgggttcgggtcgcgttcgtttcgagttaacggtttcgttagttaggcgcgttcgttagtttcgggcgttatgttttcgttgtgttgttcgtcgtcgaggcgatttttattgttttttagttacgcgcgttttcgcgggtttatatacgaatttcgtacgcgcgcgttcgtcgcgtttttttttttttcgcgcgtttcgtttcgcgttttttggagttggtcgttgtttttagtgtttcgtttattttcgtcgggttcgttcgatttcgcgggtgagcgcgtggttttcggttcggtatcgtcgtttgtttttttgtagattatttcggatcgattttcgggttatttttttatattgttttttcgttttttttattacgcggggtttaggagagggt

SEQ ID NO: 390 - DNA, 792 bp, Artificial Sequence
  chemically treated genomic DNA (Homo sapiens) CpG-island No: 390
accctctcctaaaccccgcgtaataaaaaaaacgaaaaaacaatataaaaaaataacccgaaaatcgatccgaaataatctacaaaaaaacaaacgacgataccgaaccgaaaaccacgcgctcacccgcgaaatcgaacgaacccgacgaaaataaacgaaacactaaaaacaacgaccaactccaaaaaacgcgaaacgaaacgcgcgaaaaaaaaaaaaacgcgacgaacgcgcgcgtacgaaattcgtatataaacccgcgaaaacgcgcgtaactaaaaaacaataaaaatcgcctcgacgacgaacaacacaacgaaaacataacgcccgaaactaacgaacgcgcctaactaacgaaaccgttaactcgaaacgaacgcgacccgaacccgataaatataaaacaatcgccgctaccgacgcccaaaccgaccccaaaaccgacccccgcaaaaaactaaaaaaaataaaaaccccaatcgccgcgaacgtcgacgccgataaatacgtaaaaaactcgaaccgaaaaactttctttataaaactccgacgataaaaacctaaccgaacctcaacgactaaaaaatacctataaaacgaaaaacgtctaacaatccgaattccatcccaaccgctaaccgtcaaacgacgaaacctaatccgccgcctacctacctcaatttccacgaaaatatatacgaatatataaaaatatatataaatattaacctacgcacaccgaaaaaaaaatcgatatactatcaacgcctaatacgcgcgacgcct

SEQ ID NO: 391 - DNA, 792 bp, Artificial Sequence
  chemically treated genomic DNA (Homo sapiens) CpG-island No: 391
atttttttttaggtttcgcgtggtgggggaagcgaaagggtagtgtggggaagtggttcgagggtcggttcggggtggtttgtagagaggtaggcggcggtgtcgagtcgggaattacgcgtttattcgcggagtcggacgggttcggcgggggtgggcgagatattgggaatagcggttagttttagagggcgcgaggcggggcgcgcggggagggagggggcgcggcgaacgcgcgcgtgcggggttcgtgtgtgggttcgcgggggcgcgcgtggttggggggtagtgagggtcgtttcggcggcgagtagtatagcgggaatatggcgttcggaattggcgagcgcgtttagttggcgggatcgttagttcgaggcggacgcggttcggattcggtggatgtggagtagtcgtcgttgtcggcgtttaagtcgattttagggtcgattttcgtaaggagttgaaggaggtgggagttttagtcgtcgcgggcgtcggcgtcggtgagtgcgtgaggggttcgggtcgggagattttttttgtgaaatttcggcggtgggagtttggtcgggttttagcggttgaggagtgtttgtgaggcggaaggcgtttggtagttcgggttttattttagtcgttagtcgttaggcggcgggatttggttcgtcgtttgtttgttttagtttttacgggagtgtgtgcgggtgtgtgagggtgtgtatgggtgttggtttgcgtatatcggagggggggtcggtatattgttagcgtttaatgcgcgcggcgttt

SEQ ID NO: 392 - DNA, 792 bp, Artificial Sequence
  chemically treated genomic DNA (Homo sapiens) CpG-island No: 392
aaacgccgcgcgcattaaacgctaacaatataccgaccccccctccgatatacgcaaaccaacacccatacacaccctcacacacccgcacacactcccgtaaaaactaaaacaaacaaacgacgaaccaaatcccgccgcctaacgactaacgactaaaataaaacccgaactaccaaacgccttccgcctcacaaacactcctcaaccgctaaaacccgaccaaactcccaccgccgaaatttcacaaaaaaaatctcccgacccgaacccctcacgcactcaccgacgccgacgcccgcgacgactaaaactcccacctccttcaactccttacgaaaatcgaccctaaaatcgacttaaacgccgacaacgacgactactccacatccaccgaatccgaaccgcgtccgcctcgaactaacgatcccgccaactaaacgcgctcgccaattccgaacgccatattcccgctatactactcgccgccgaaacgaccctcactaccccccaaccacgcgcgcccccgcgaacccacacacgaaccccgcacgcgcgcgttcgccgcgccccctccctccccgcgcgccccgcctcgcgccctctaaaactaaccgctattcccaatatctcgcccacccccgccgaacccgtccgactccgcgaataaacgcgtaattcccgactcgacaccgccgcctacctctctacaaaccaccccgaaccgaccctcgaaccacttccccacactaccctttcgcttcccccaccacgcgaaacctaaaaaaaaat

SEQ ID NO: 393 - DNA, 717 bp, Artificial Sequence
  chemically treated genomic DNA (Homo sapiens) CpG-island No: 393
gaacggcggaaagagaagggaattattagtagtttcgggtgcggagttagggtgacggggaggtaggtacggggtttgggcggcgtgggttttgggcgcgaggtgcgtttttcgtcgcgtttttttttttttagattattgttggggcggtttttcgggtttcgtggtttttttgggtattcgtaggggtataatggggtgatcgaattgtttcgttcgggtttgttttttcgtttattcgaggggtcgttgggttatgttttacgtgtatttgtgaggggcgtttgggttttagtgcggcgattttgtattggtttaagcgttttagtcggtgttttcggggagtcggagggttcgaggttttttttcgggagtttagagttcgtaggaaaaaaaagggtttcgaaatggagatgagtgtgtcgggtattagggacgcgtacgttggtttcgtgaattgggattagtatttcggggtaattgtcgaatttttaatgataaggttttgggaacgagaggcggggagggaaggggtttgcgttatataatatttagcgtagagggacggaagagtagatacgagaagggcgcgttttacgttcgggttagaggaaattggcgtcgaatgtttttgtagttcgttgagttttggaattaaatagggaggcggttgagagggcgcgtttcgagtttataggggattagtgttttgttcgt

SEQ ID NO: 394 - DNA, 717 bp, Artificial Sequence
  chemically treated genomic DNA (Homo sapiens) CpG-island No: 394
acgaacaaaacactaatcccctataaactcgaaacgcgccctctcaaccgcctccctatttaattccaaaactcaacgaactacaaaaacattcgacgccaatttcctctaacccgaacgtaaaacgcgcccttctcgtatctactcttccgtccctctacgctaaatattatataacgcaaaccccttccctccccgcctctcgttcccaaaaccttatcattaaaaattcgacaattaccccgaaatactaatcccaattcacgaaaccaacgtacgcgtccctaatacccgacacactcatctccatttcgaaacccttttttttcctacgaactctaaactcccgaaaaaaaacctcgaaccctccgactccccgaaaacaccgactaaaacgcttaaaccaatacaaaatcgccgcactaaaacccaaacgcccctcacaaatacacgtaaaacataacccaacgacccctcgaataaacgaaaaaacaaacccgaacgaaacaattcgatcaccccattatacccctacgaatacccaaaaaaaccacgaaacccgaaaaaccgccccaacaataatctaaaaaaaaaaaaacgcgacgaaaaacgcacctcgcgcccaaaacccacgccgcccaaaccccgtacctacctccccgtcaccctaactccgcacccgaaactactaataattcccttctctttccgccgttc

SEQ ID NO: 395 - DNA, 717 bp, Artificial Sequence
  chemically treated genomic DNA (Homo sapiens) CpG-island No: 395
gcgggtagggtattggttttttgtggattcggggcgcgtttttttagtcgtttttttgtttaattttagagtttagcgggttgtagggatattcgacgttagttttttttggttcgggcgtgagacgcgtttttttcgtgtttgttttttcgtttttttgcgttggatgttgtatagcgtaggtttttttttttttcgtttttcgtttttaaaattttattattgagaattcgatagttgtttcgagatgttgattttagtttacggagttagcgtgcgcgtttttaatgttcggtatatttatttttatttcgggattttttttttttttgcgggttttggattttcgggaggaagtttcgggtttttcggtttttcggagatatcggttgaggcgtttaggttagtgtagagtcgtcgtattgggatttaggcgttttttataggtgtacgtagggtatggtttaacggtttttcggatgggcggggaaataggttcgggcggagtaattcgattattttattatgtttttgcggatgtttagaaaagttacgaggttcgggggatcgttttagtagtggtttggaaaggagagggcgcggcgaggggcgtatttcgcgtttagggtttacgtcgtttaggtttcgtgtttgttttttcgttattttaatttcgtattcgggattgttggtggttttttttttttttcgtcgttt

SEQ ID NO: 396 - DNA, 717 bp, Artificial Sequence
  chemically treated genomic DNA (Homo sapiens) CpG-island No: 396
aaacgacgaaaaaaaaaaaaaaccaccaacaatcccgaatacgaaattaaaataacgaaaaaacaaacacgaaacctaaacgacgtaaaccctaaacgcgaaatacgcccctcgccgcgccctctcctttccaaaccactactaaaacgatcccccgaacctcgtaacttttctaaacatccgcaaaaacataataaaataatcgaattactccgcccgaacctatttccccgcccatccgaaaaaccgttaaaccataccctacgtacacctataaaaaacgcctaaatcccaatacgacgactctacactaacctaaacgcctcaaccgatatctccgaaaaaccgaaaaacccgaaacttcctcccgaaaatccaaaacccgcaaaaaaaaaaaaaatcccgaaataaaaataaatataccgaacattaaaaacgcgcacgctaactccgtaaactaaaatcaacatctcgaaacaactatcgaattctcaataataaaattttaaaaacgaaaaacgaaaaaaaaaaaaacctacgctatacaacatccaacgcaaaaaaacgaaaaaacaaacacgaaaaaaacgcgtctcacgcccgaaccaaaaaaaactaacgtcgaatatccctacaacccgctaaactctaaaattaaacaaaaaaacgactaaaaaaacgcgccccgaatccacaaaaaaccaataccctacccgc

SEQ ID NO: 397 - DNA, 679 bp, Artificial Sequence
  chemically treated genomic DNA (Homo sapiens) CpG-island No: 397
agggcgcgttttttttttttcgttcgattttaggtcggtttttgatttttgatgagcgaggggttagcgttttcgggagggtttgggttttgttttcgtcggggtcggttttcggggcggcgtaggtcgagcggcgagggtttttggttttaggcgggtgcgcgggattttcggtttgttttaaggttcgcgttttaagcggagcgagcgtagttgagcgttcgggtttcgcgcgtttttgtgcgttttcgggtttttgcgggcgggcgggcgcggtcgtcgtcgagtaattcggtttgcgttcggtacgattgtagatgttaggttttgttcggggagtcgagcggtagcggggttgtgagttttaaattaatttttcgttttgttgttgtgtaatgtggattttcgaaggtttttcgtttcgttcgtttttttttttcgggcggtgcgcgttgtaaattgcgagttgggttttatttatataaagcgatttcgggcgggcggcggtagaggaggaggcggcggcggcgggtaggtcggggattcggacgttagcgtcgcgtttcgtgggtgaattttcgtcgcgtttcggggattttttttcggggacgggtcgatcgttagttttgtcgttattatgagttttttttttttgttttcgggttttttgtttttgatt

SEQ ID NO: 398 - DNA, 679 bp, Artificial Sequence
  chemically treated genomic DNA (Homo sapiens) CpG-island No: 398
aatcaaaaacaaaaaacccgaaaacaaaaaaaaaaaactcataataacgacaaaactaacgatcgacccgtccccgaaaaaaaatccccgaaacgcgacgaaaattcacccacgaaacgcgacgctaacgtccgaatccccgacctacccgccgccgccgcctcctcctctaccgccgcccgcccgaaatcgctttatataaataaaacccaactcgcaatttacaacgcgcaccgcccgaaaaaaaaaaacgaacgaaacgaaaaaccttcgaaaatccacattacacaacaacaaaacgaaaaattaatttaaaactcacaaccccgctaccgctcgactccccgaacaaaacctaacatctacaatcgtaccgaacgcaaaccgaattactcgacgacgaccgcgcccgcccgcccgcaaaaacccgaaaacgcacaaaaacgcgcgaaacccgaacgctcaactacgctcgctccgcttaaaacgcgaaccttaaaacaaaccgaaaatcccgcgcacccgcctaaaaccaaaaaccctcgccgctcgacctacgccgccccgaaaaccgaccccgacgaaaacaaaacccaaaccctcccgaaaacgctaacccctcgctcatcaaaaatcaaaaaccgacctaaaatcgaacgaaaaaaaaaaaacgcgccct

SEQ ID NO: 399 - DNA, 679 bp, Artificial Sequence
  chemically treated genomic DNA (Homo sapiens) CpG-island No: 399
ggttaggagtagggggttcggagataggggaggggagtttatggtggcggtagggttggcggtcggttcgttttcggagggaggttttcgggacgcggcggggatttatttacggggcgcggcgttggcgttcgggttttcggtttgttcgtcgtcgtcgtttttttttttgtcgtcgttcgttcggaatcgttttatgtaaatgaagtttaattcgtagtttgtagcgcgtatcgttcggggaaggggggcgggcggggcggggggttttcggggatttatattatatagtaataaagcggaaggttaatttgaaatttatagtttcgttgtcgttcggtttttcgggtaaagtttgatatttatagtcgtgtcgggcgtaggtcgggttgttcggcggcgatcgcgttcgttcgttcgtagggattcggggacgtatagggacgcgcgggattcgggcgtttagttgcgttcgtttcgtttggggcgcgggttttggggtaggtcgggggtttcgcgtattcgtttggggttaggaattttcgtcgttcggtttgcgtcgtttcgggaatcggtttcggcgggaataaagtttaggttttttcggaggcgttgatttttcgtttattaaaggttaggggtcggtttagaatcgggcgagaagaaagggacgcgtttt

SEQ ID NO: 400 - DNA, 679 bp, Artificial Sequence
  chemically treated genomic DNA (Homo sapiens) CpG-island No: 400
aaaacgcgtccctttcttctcgcccgattctaaaccgacccctaacctttaataaacgaaaaatcaacgcctccgaaaaaacctaaactttattcccgccgaaaccgattcccgaaacgacgcaaaccgaacgacgaaaattcctaaccccaaacgaatacgcgaaacccccgacctaccccaaaacccgcgccccaaacgaaacgaacgcaactaaacgcccgaatcccgcgcgtccctatacgtccccgaatccctacgaacgaacgaacgcgatcgccgccgaacaacccgacctacgcccgacacgactataaatatcaaactttacccgaaaaaccgaacgacaacgaaactataaatttcaaattaaccttccgctttattactatataatataaatccccgaaaaccccccgccccgcccgccccccttccccgaacgatacgcgctacaaactacgaattaaacttcatttacataaaacgattccgaacgaacgacgacaaaaaaaaaaacgacgacgacgaacaaaccgaaaacccgaacgccaacgccgcgccccgtaaataaatccccgccgcgtcccgaaaacctccctccgaaaacgaaccgaccgccaaccctaccgccaccataaactcccctcccctatctccgaaccccctactcctaacc

SEQ ID NO: 401 - DNA, 618 bp, Artificial Sequence
  chemically treated genomic DNA (Homo sapiens) CpG-island No: 401
cgggtcggcggggatttttcgttttttggcgtttttttttatcgtttcgtcggttgttggggaagcggcgggtgtttagtgtttggaggtcgttttttttttatttttggttgcgggaacggagaggtcgcggcggtcggagtagggtgggcggtttgaggcgagagtttagtcggttttcgcggggaatatggcgatttgcggcgagttgagcgttaattgttgcgtcgtcgatttttcggagtagcgaaggcgattcgagagaagacgtcgttaagtggaattcgggtttcgcggttttgggatggggtagtagttattgtagttaggaagttttgggcggggcgttgggcgttaacgagcgttacggtaatttttatgcggcgtttttattagtttataggcggtatcgtagtagtttttaggtagcgtttatattagtttataggggtcgtcgttcgtattgtatttgttttcgtcgtttcggggtgtgaattgcgttgtttgtcggtttggttacgttgattcgggtagtttaggttcgtagtagtcggacgaggagtttagggttattgttcggggttacgagaaggagtaggacggtgttttagaaaaatg

SEQ ID NO: 402 - DNA, 618 bp, Artificial Sequence
  chemically treated genomic DNA (Homo sapiens) CpG-island No: 402
catttttctaaaacaccgtcctactccttctcgtaaccccgaacaataaccctaaactcctcgtccgactactacgaacctaaactacccgaatcaacgtaaccaaaccgacaaacaacgcaattcacaccccgaaacgacgaaaacaaatacaatacgaacgacgacccctataaactaatataaacgctacctaaaaactactacgataccgcctataaactaataaaaacgccgcataaaaattaccgtaacgctcgttaacgcccaacgccccgcccaaaacttcctaactacaataactactaccccatcccaaaaccgcgaaacccgaattccacttaacgacgtcttctctcgaatcgccttcgctactccgaaaaatcgacgacgcaacaattaacgctcaactcgccgcaaatcgccatattccccgcgaaaaccgactaaactctcgcctcaaaccgcccaccctactccgaccgccgcgacctctccgttcccgcaaccaaaaataaaaaaaaaacgacctccaaacactaaacacccgccgcttccccaacaaccgacgaaacgataaaaaaaaacgccaaaaaacgaaaaatccccgccgacccg

SEQ ID NO: 403 - DNA, 618 bp, Artificial Sequence
  chemically treated genomic DNA (Homo sapiens) CpG-island No: 403
tatttttttggggtatcgttttgttttttttcgtaatttcgggtagtggttttgggtttttcgttcggttgttgcgggtttgggttgttcgggttagcgtagttaggtcgatagatagcgtagtttatatttcggggcggcggaggtaggtgtagtgcgagcggcgatttttgtaggttggtgtgggcgttgtttggaggttgttgcggtgtcgtttgtaggttggtgagggcgtcgtatggaggttgtcgtgacgttcgttggcgtttagcgtttcgtttagggttttttggttgtagtggttgttgttttattttagggtcgcggggttcgggttttatttggcggcgttttttttcgagtcgttttcgttgtttcgagaagtcggcggcgtagtagttgacgtttagttcgtcgtaggtcgttatatttttcgcggaggtcggttgggttttcgttttaggtcgtttattttgtttcggtcgtcgcggttttttcgttttcgtagttagaggtggggagagagcgatttttaggtattgggtattcgtcgtttttttagtagtcggcggggcgatggagaaagacgttaggaagcggaaggttttcgtcggttcg

SEQ ID NO: 404 - DNA, 618 bp, Artificial Sequence
  chemically treated genomic DNA (Homo sapiens) CpG-island No: 404
cgaaccgacgaaaaccttccgcttcctaacgtctttctccatcgccccgccgactactaaaaaaacgacgaatacccaatacctaaaaatcgctctctccccacctctaactacgaaaacgaaaaaaccgcgacgaccgaaacaaaataaacgacctaaaacgaaaacccaaccgacctccgcgaaaaatataacgacctacgacgaactaaacgtcaactactacgccgccgacttctcgaaacaacgaaaacgactcgaaaaaaaacgccgccaaataaaacccgaaccccgcgaccctaaaataaaacaacaaccactacaaccaaaaaaccctaaacgaaacgctaaacgccaacgaacgtcacgacaacctccatacgacgccctcaccaacctacaaacgacaccgcaacaacctccaaacaacgcccacaccaacctacaaaaatcgccgctcgcactacacctacctccgccgccccgaaatataaactacgctatctatcgacctaactacgctaacccgaacaacccaaacccgcaacaaccgaacgaaaaacccaaaaccactacccgaaattacgaaaaaaaacaaaacgataccccaaaaaaata

SEQ ID NO: 405 - DNA, 652 bp, Artificial Sequence
  chemically treated genomic DNA (Homo sapiens) CpG-island No: 405
gttcgcggttttcgcgcgttcgcggtcgtgtttcgcggtttcggtttcggttttcggcgatacgtattttcgtatatttcgttcgtacgtcgattatcggcgtattacgcgcgttagcgcgtttttggacgtttgcggattttattgggggtttttgagcgtgtacggggcgtacgagcggttgcgcgtcgagttcgtgggtatttttttggtgcgcgatagtcgttagcggaattgttttttcgtttttagcgtgaagatggtttcgggatttacgagtattcgcgtgtatttttaggtcggtcgtttttatttggatggtagtcgcgagagtttcgattgttttttcgagttgttggagtattacgtggcggcgtcgcgtcgtatgttgggggtttcgttgcgttagcgtcgcgtgcggtcgttgtaggagttgtgtcgttagcgtatcgtggttatcgtgggtcgcgagaatttggttcgtattttttttaatttcgtttttcgcgattatttgagttttttttttttttagatttgatcggtagcgttcgtcgtgtacgtagtattaattgggatgtcgtgttattttgttattatttgtttggaattatgtgggtatttttttcggtttgggttggagggagcggat

SEQ ID NO: 406 - DNA, 652 bp, Artificial Sequence
  chemically treated genomic DNA (Homo sapiens) CpG-island No: 406
atccgctccctccaacccaaaccgaaaaaaatacccacataattccaaacaaataataacaaaataacacgacatcccaattaatactacgtacacgacgaacgctaccgatcaaatctaaaaaaaaaaaaaactcaaataatcgcgaaaaacgaaattaaaaaaaatacgaaccaaattctcgcgacccacgataaccacgatacgctaacgacacaactcctacaacgaccgcacgcgacgctaacgcaacgaaacccccaacatacgacgcgacgccgccacgtaatactccaacaactcgaaaaaacaatcgaaactctcgcgactaccatccaaataaaaacgaccgacctaaaaatacacgcgaatactcgtaaatcccgaaaccatcttcacgctaaaaacgaaaaaacaattccgctaacgactatcgcgcaccaaaaaaatacccacgaactcgacgcgcaaccgctcgtacgccccgtacacgctcaaaaacccccaataaaatccgcaaacgtccaaaaacgcgctaacgcgcgtaatacgccgataatcgacgtacgaacgaaatatacgaaaatacgtatcgccgaaaaccgaaaccgaaaccgcgaaacacgaccgcgaacgcgcgaaaaccgcgaac

SEQ ID NO: 407 - DNA, 652 bp, Artificial Sequence
  chemically treated genomic DNA (Homo sapiens) CpG-island No: 407
attcgttttttttaatttaggtcggggagggtatttatatggttttaggtaagtaataataaaataatacggtattttagttaatgttgcgtgtacggcgggcgttgtcggttaaatttggaaggggaaggagtttaggtagtcgcggaggacggggttgagggggatgcgagttaggttttcgcggtttacggtggttacgatgcgttggcggtatagtttttgtagcggtcgtacgcggcgttggcgtagcggggtttttagtatgcggcgcggcgtcgttacgtagtgttttagtagttcgaagaggtagtcgaagttttcgcggttgttatttaggtgaaagcggtcggtttgaaagtgtacgcggatgttcgtgggtttcgaggttatttttacgttaagggcgaaaaagtagtttcgttggcggttgtcgcgtattaggaaggtgtttacgggttcggcgcgtagtcgttcgtgcgtttcgtgtacgtttaggggtttttagtagaattcgtaggcgtttaggagcgcgttggcgcgcgtgatgcgtcggtaatcggcgtgcgaacggaatgtgcggaagtgcgtgtcgtcgggggtcggggtcgggatcgcggggtacggtcgcgggcgcgcgggggtcgcgggt

SEQ ID NO: 408 - DNA, 652 bp, Artificial Sequence
  chemically treated genomic DNA (Homo sapiens) CpG-island No: 408
acccgcgacccccgcgcgcccgcgaccgtaccccgcgatcccgaccccgacccccgacgacacgcacttccgcacattccgttcgcacgccgattaccgacgcatcacgcgcgccaacgcgctcctaaacgcctacgaattctactaaaaacccctaaacgtacacgaaacgcacgaacgactacgcgccgaacccgtaaacaccttcctaatacgcgacaaccgccaacgaaactactttttcgcccttaacgtaaaaataacctcgaaacccacgaacatccgcgtacactttcaaaccgaccgctttcacctaaataacaaccgcgaaaacttcgactacctcttcgaactactaaaacactacgtaacgacgccgcgccgcatactaaaaaccccgctacgccaacgccgcgtacgaccgctacaaaaactataccgccaacgcatcgtaaccaccgtaaaccgcgaaaacctaactcgcatccccctcaaccccgtcctccgcgactacctaaactccttccccttccaaatttaaccgacaacgcccgccgtacacgcaacattaactaaaataccgtattattttattattacttacctaaaaccatataaataccctccccgacctaaattaaaaaaaacgaat

SEQ ID NO: 409 - DNA, 685 bp, Artificial Sequence
  chemically treated genomic DNA (Homo sapiens) CpG-island No: 409
tttcgtcgatcgcgtggggtttttcgttggggggtgcggggtgttttaagttatggatgtttcggcgtgtttttttgcgggcgtgtgtgtgtgttttagtgtgtatgacgacgttttatttttgttgtgtacgaatttcgtggtaagagtacgggagtttgtgtttattagtagaggttgtttgtagtttttatttcgtttggtatagcgttttatacgtacgtatatatacgtatataaagattttttcggcgtgtgtttgtcgtcgcggtattttcggggagggggttcgttaggagtttttcggtttttttgggttttagttatttttttttttacgtcgggaaatcgtttcggtatcgttttttgatttgttttcgatgtatttgttgtcgtgtttgtcgtggttgagtgtgttttttttttttttttcgatttttttttcgattggggataatatttcgttataattttgttcgatgtagatgcggggttcggggcgtttggggttaagtcgggtcgggcgggcgggtatatttgggggtgtggagtgtgcgcgtttacgcgcgtgaaacgtggatgtagagggtatcgtcgtttttttttatgtgcgttttaagaaggaggaaaaaaatgttaggcgtaacgtttattgtcgaaatttcgtttttttgttatttacggt

SEQ ID NO: 410 - DNA, 685 bp, Artificial Sequence
  chemically treated genomic DNA (Homo sapiens) CpG-island No: 410
accgtaaataacaaaaaaacgaaatttcgacaataaacgttacgcctaacatttttttcctccttcttaaaacgcacataaaaaaaaacgacgataccctctacatccacgtttcacgcgcgtaaacgcgcacactccacacccccaaatatacccgcccgcccgacccgacttaaccccaaacgccccgaaccccgcatctacatcgaacaaaattataacgaaatattatccccaatcgaaaaaaaaatcgaaaaaaaaaaaaaaaacacactcaaccacgacaaacacgacaacaaatacatcgaaaacaaatcaaaaaacgataccgaaacgatttcccgacgtaaaaaaaaaaataactaaaacccaaaaaaaccgaaaaactcctaacgaaccccctccccgaaaataccgcgacgacaaacacacgccgaaaaaatctttatatacgtatatatacgtacgtataaaacgctataccaaacgaaataaaaactacaaacaacctctactaataaacacaaactcccgtactcttaccacgaaattcgtacacaacaaaaataaaacgtcgtcatacacactaaaacacacacacacgcccgcaaaaaaacacgccgaaacatccataacttaaaacaccccgcaccccccaacgaaaaaccccacgcgatcgacgaaa

SEQ ID NO: 411 - DNA, 685 bp, Artificial Sequence
  chemically treated genomic DNA (Homo sapiens) CpG-island No: 411
gtcgtgaataataggaaggcgaggtttcggtagtgaacgttgcgtttgatatttttttttttttttttgaaacgtatataaaaggaaacggcggtgttttttgtatttacgttttacgcgcgtgggcgcgtatattttatatttttaaatatattcgttcgttcggttcggtttggttttaggcgtttcgggtttcgtatttatatcggataggattgtaacggaatgttatttttagtcgggaagggggtcggggaaaagagggagaatatatttagttacgataagtacgataataaatgtatcggaaataaattagaaggcgatgtcggggcggtttttcggcgtgggaggggaggtggttgggatttagggggatcgaagggtttttggcgagtttttttttcgaaagtatcgcggcgataggtatacgtcgaggaagtttttgtgtacgtgtgtgtgcgtgcgtgtggagcgttgtgttaggcgaaatggaaattataggtagtttttgttgatgggtataaattttcgtgtttttgttacggggttcgtgtataataaaaatgagacgtcgttatatatattgaaatatatatatacgttcgtaggaaaatacgtcgaggtatttataatttagagtatttcgtattttttagcgaaaagttttacgcgatcggcgagg

SEQ ID NO: 412 - DNA, 685 bp, Artificial Sequence
  chemically treated genomic DNA (Homo sapiens) CpG-island No: 412
cctcgccgatcgcgtaaaacttttcgctaaaaaatacgaaatactctaaattataaatacctcgacgtattttcctacgaacgtatatatatatttcaatatatataacgacgtctcatttttattatacacgaaccccgtaacaaaaacacgaaaatttatacccatcaacaaaaactacctataatttccatttcgcctaacacaacgctccacacgcacgcacacacacgtacacaaaaacttcctcgacgtatacctatcgccgcgatactttcgaaaaaaaaactcgccaaaaacccttcgatccccctaaatcccaaccacctcccctcccacgccgaaaaaccgccccgacatcgccttctaatttatttccgatacatttattatcgtacttatcgtaactaaatatattctccctcttttccccgacccccttcccgactaaaaataacattccgttacaatcctatccgatataaatacgaaacccgaaacgcctaaaaccaaaccgaaccgaacgaacgaatatatttaaaaatataaaatatacgcgcccacgcgcgtaaaacgtaaatacaaaaaacaccgccgtttccttttatatacgtttcaaaaaaaaaaaaaaaaatatcaaacgcaacgttcactaccgaaacctcgccttcctattattcacgac

SEQ ID NO: 413 - DNA, 577 bp, Artificial Sequence
  chemically treated genomic DNA (Homo sapiens) CpG-island No: 413
tattttttttaggcgggcggtattcgttgaagtttcggtattatatttatagttaggagttttagtttcgtattcggtcgtatgcgtattttttgcggttttttcgttaggcgtcgcgttgggtagttagcgtttcggcggggttttttaggttttcggtcgggtagtttttttcggggtttttgtgcggttgcgtagtagttgcgaggacgcgggtcgagtcggaagtggagtgcgttgcggcgcgagttgggtcggcgggcgtggttcgagagcgcgtagagtttagattggcggtagggttcgaggggtcgattcgtagcgtttttggtttttttagtttttattcggaatcgtacgtgagggtaaattcgtttcggtggttggtttagtacgcggggatagttttttcgaggtttttttagcggtgtgggcgagagggcgttcgggtcgggggaagtacggaaaggtggtttcgcgaggttgttgtggggggcgggacgggtagtttggcgatgtttggatatggttggtggttaaaaatatttatcgaaagatagtttatttatttagatgg

SEQ ID NO: 414 - DNA, 577 bp, Artificial Sequence
  chemically treated genomic DNA (Homo sapiens) CpG-island No: 414
ccatctaaataaataaactatctttcgataaatatttttaaccaccaaccatatccaaacatcgccaaactacccgtcccgccccccacaacaacctcgcgaaaccacctttccgtacttcccccgacccgaacgccctctcgcccacaccgctaaaaaaacctcgaaaaaactatccccgcgtactaaaccaaccaccgaaacgaatttaccctcacgtacgattccgaataaaaactaaaaaaaccaaaaacgctacgaatcgacccctcgaaccctaccgccaatctaaactctacgcgctctcgaaccacgcccgccgacccaactcgcgccgcaacgcactccacttccgactcgacccgcgtcctcgcaactactacgcaaccgcacaaaaaccccgaaaaaaactacccgaccgaaaacctaaaaaaccccgccgaaacgctaactacccaacgcgacgcctaacgaaaaaaccgcaaaaaatacgcatacgaccgaatacgaaactaaaactcctaactataaatataataccgaaacttcaacgaataccgcccgcctaaaaaaaata

SEQ ID NO: 415 - DNA, 577 bp, Artificial Sequence
  chemically treated genomic DNA (Homo sapiens) CpG-island No: 415
ttatttaagtgggtaagttatttttcgataaatgtttttggttattaattatgtttaggtatcgttaggttgttcgtttcgttttttataatagtttcgcgaagttattttttcgtgtttttttcgattcggacgttttttcgtttatatcgttagggaggtttcggaggggttgttttcgcgtgttaagttagttatcggggcggatttgtttttacgtgcggtttcgagtgagggttggagagattagggacgttgcgggtcggtttttcgggttttgtcgttagtttggattttgcgcgttttcgaattacgttcgtcggtttagttcgcgtcgtagcgtattttattttcggttcggttcgcgttttcgtagttgttacgtaatcgtataaggatttcgagggaggttgttcggtcgaaggtttgaaggatttcgtcggggcgttggttgtttagcgcggcgtttggcgggagggtcgtagggagtgcgtatgcggtcgagtgcgggattggggtttttggttgtgggtgtggtatcgaggttttagcgggtgtcgttcgtttagagggagtg

SEQ ID NO: 416 - DNA, 577 bp, Artificial Sequence
  chemically treated genomic DNA (Homo sapiens) CpG-island No: 416
cactccctctaaacgaacgacacccgctaaaacctcgataccacacccacaaccaaaaaccccaatcccgcactcgaccgcatacgcactccctacgaccctcccgccaaacgccgcgctaaacaaccaacgccccgacgaaatccttcaaaccttcgaccgaacaacctccctcgaaatccttatacgattacgtaacaactacgaaaacgcgaaccgaaccgaaaataaaatacgctacgacgcgaactaaaccgacgaacgtaattcgaaaacgcgcaaaatccaaactaacgacaaaacccgaaaaaccgacccgcaacgtccctaatctctccaaccctcactcgaaaccgcacgtaaaaacaaatccgccccgataactaacttaacacgcgaaaacaacccctccgaaacctccctaacgatataaacgaaaaaacgtccgaatcgaaaaaaacacgaaaaaataacttcgcgaaactattataaaaaacgaaacgaacaacctaacgatacctaaacataattaataaccaaaaacatttatcgaaaaataacttacccacttaaataa

SEQ ID NO: 417 - DNA, 511 bp, Artificial Sequence
  chemically treated genomic DNA (Homo sapiens) CpG-island No: 417
ttttcgcgttttacggtttttttcgattttagttagcgtttttcgggttttcggcgttacgagttgttcgggtacgtagtttttagcggcgcgtcgttgttaagtcggttttcgcgcgttttttttttttttttttttttggttgttcgcgatttagtttgggtaggcggggaagtagttggagtgcgatcgtcgcggtagttattttgtaatcgttagtcggaggtgtagttcgtaggttttggttttcgggtgggtttttggggagtcggcgtcgttttcggggagttgtaaggttcgtttttgttcggcgtggagggcgcggggggcgcggaggtgagcgggtcggggaggagcgcgaaagaaggtagcggcggcggagttgagggttaagatgtagtttgcgttacgcgttgtatttatttttttcgattttgcgtttttatcgggcgttcgttttgagttgcggggttttttattttttggtattttaaggtggaaagtgagaagg

SEQ ID NO: 418 - DNA, 511 bp, Artificial Sequence
  chemically treated genomic DNA (Homo sapiens) CpG-island No: 418
ccttctcactttccaccttaaaataccaaaaaataaaaaaccccgcaactcaaaacgaacgcccgataaaaacgcaaaatcgaaaaaaataaatacaacgcgtaacgcaaactacatcttaaccctcaactccgccgccgctaccttctttcgcgctcctccccgacccgctcacctccgcgccccccgcgccctccacgccgaacaaaaacgaaccttacaactccccgaaaacgacgccgactccccaaaaacccacccgaaaaccaaaacctacgaactacacctccgactaacgattacaaaataactaccgcgacgatcgcactccaactacttccccgcctacccaaactaaatcgcgaacaaccaaaaaaaaaaaaaaaaaaaaaacgcgcgaaaaccgacttaacaacgacgcgccgctaaaaactacgtacccgaacaactcgtaacgccgaaaacccgaaaaacgctaactaaaatcgaaaaaaaccgtaaaacgcgaaaa

SEQ ID NO: 419 - DNA, 511 bp, Artificial Sequence
  chemically treated genomic DNA (Homo sapiens) CpG-island No: 419
tttttttattttttattttaaggtgttaggagatgagggatttcgtagtttagggcggacgttcggtgagggcgtagaatcggggaggatggatgtagcgcgtggcgtagattgtattttgatttttaatttcgtcgtcgttattttttttcgcgttttttttcgattcgtttattttcgcgtttttcgcgttttttacgtcgggtaggggcgagttttgtagtttttcgggagcggcgtcgattttttaagggtttattcgggggttagggtttacggattgtattttcgattggcggttgtagggtggttgtcgcggcggtcgtattttagttgttttttcgtttatttaagttggatcgcgaatagttaggggagaaggaaggagggaggcgcgcggaggtcggtttggtagcgacgcgtcgttaggggttgcgtgttcggatagttcgtggcgtcgagggttcgaggaacgttgattggagtcgggaagagtcgtggagcgcgggga

SEQ ID NO: 420 - DNA, 511 bp, Artificial Sequence
  chemically treated genomic DNA (Homo sapiens) CpG-island No: 420
tccccgcgctccacgactcttcccgactccaatcaacgttcctcgaaccctcgacgccacgaactatccgaacacgcaacccctaacgacgcgtcgctaccaaaccgacctccgcgcgcctccctccttccttctcccctaactattcgcgatccaacttaaataaacgaaaaaacaactaaaatacgaccgccgcgacaaccaccctacaaccgccaatcgaaaatacaatccgtaaaccctaacccccgaataaacccttaaaaaatcgacgccgctcccgaaaaactacaaaactcgcccctacccgacgtaaaaaacgcgaaaaacgcgaaaataaacgaatcgaaaaaaaacgcgaaaaaaaataacgacgacgaaattaaaaatcaaaatacaatctacgccacgcgctacatccatcctccccgattctacgccctcaccgaacgtccgccctaaactacgaaatccctcatctcctaacaccttaaaataaaaaataaaaaaa

SEQ ID NO: 421 - DNA, 741 bp, Artificial Sequence
  chemically treated genomic DNA (Homo sapiens) CpG-island No: 421
cgcgggtttagcggttttcgatagcgttttcgtttcgtttttcggcgggcgtttttttttgttttttcgggtgcgaatcgggcgttggtcggggatttcggggacgcgtgcgtttttcgtcgcgcgaggtgtcgtcgagttagttcgagagggcggggggcgggcggggcggcgcgcgggggcgggggagcggtcgggatacgtgtggcggcggcgggggggacgcggcgttcggggttttaagaaggtgtggagcggggcgggcgtttttttaggtttggtcgaggggcgtcgcgtagaggcggcggcggcgtacggaggcggtagacgacgcgttttcggcgttcgtagtttcggtttcgcgttttcgcggtttaaagtaattttgggagtcgtcgtttttcgcggaatttttcggcgggggttcgtttttaggttcgttttcgagttcgtttcgttttcgttcgtttttttttcgtttttttttcgcgtggttttttcgtttcggcgtttttaaaattgaatgagcgagcggcgcgtagggcgcgcggcggcggcggcggcggcggcggtatggagcgtagtggttgggttcggtagattttttttttagcgttgttgttgggggcgacgttgagggcgcgcgcggcggttggttattattttcgtttttcgttttttttttttttgtgtatttattacggggagttggaaggggatggggagtagggcgaggtgttt

SEQ ID NO: 422 - DNA, 741 bp, Artificial Sequence
  chemically treated genomic DNA (Homo sapiens) CpG-island No: 422
aaacacctcgccctactccccatccccttccaactccccgtaataaatacacaaaaaaaaaaaaaacgaaaaacgaaaataataaccaaccgccgcgcgcgccctcaacgtcgcccccaacaacaacgctaaaaaaaaaatctaccgaacccaaccactacgctccataccgccgccgccgccgccgccgccgcgcgccctacgcgccgctcgctcattcaattttaaaaacgccgaaacgaaaaaaccacgcgaaaaaaaaacgaaaaaaaaacgaacgaaaacgaaacgaactcgaaaacgaacctaaaaacgaacccccgccgaaaaattccgcgaaaaacgacgactcccaaaattactttaaaccgcgaaaacgcgaaaccgaaactacgaacgccgaaaacgcgtcgtctaccgcctccgtacgccgccgccgcctctacgcgacgcccctcgaccaaacctaaaaaaacgcccgccccgctccacaccttcttaaaaccccgaacgccgcgtcccccccgccgccgccacacgtatcccgaccgctcccccgcccccgcgcgccgccccgcccgccccccgccctctcgaactaactcgacgacacctcgcgcgacgaaaaacgcacgcgtccccgaaatccccgaccaacgcccgattcgcacccgaaaaaacaaaaaaaaacgcccgccgaaaaacgaaacgaaaacgctatcgaaaaccgctaaacccgcg

SEQ ID NO: 423 - DNA, 741 bp, Artificial Sequence
  chemically treated genomic DNA (Homo sapiens) CpG-island No: 423
gagtatttcgttttgttttttatttttttttagtttttcgtggtgggtgtataggaaaaagaagggcgaaaagcgggggtaatagttagtcgtcgcgcgcgtttttagcgtcgtttttagtaatagcgttaggaggaaagtttgtcgggtttagttattgcgttttatgtcgtcgtcgtcgtcgtcgtcgtcgcgcgttttacgcgtcgttcgtttatttagttttggagacgtcgggacggaggagttacgcggagagaaggcgagaagaaggcggacgggagcggaacgggttcgggagcgggtttgggagcgggttttcgtcgagaagtttcgcgggagacggcggtttttaaagttattttgggtcgcgggagcgcgggatcggggttgcgggcgtcgagagcgcgtcgtttgtcgttttcgtgcgtcgtcgtcgtttttgcgcgacgtttttcggttaggtttgggaaagcgttcgtttcgttttatatttttttaaagtttcgggcgtcgcgtttttttcgtcgtcgttatacgtgtttcggtcgttttttcgttttcgcgcgtcgtttcgttcgtttttcgttttttcgggttggttcggcggtatttcgcgcggcgaggggcgtacgcgttttcggagttttcggttagcgttcggttcgtattcgggaggatagggaggggcgttcgtcggggagcgggacggggacgttgtcgaggatcgttgagttcgcg

SEQ ID NO: 424 - DNA, 741 bp, Artificial Sequence
  chemically treated genomic DNA (Homo sapiens) CpG-island No: 424
cgcgaactcaacgatcctcgacaacgtccccgtcccgctccccgacgaacgcccctccctatcctcccgaatacgaaccgaacgctaaccgaaaactccgaaaacgcgtacgcccctcgccgcgcgaaataccgccgaaccaacccgaaaaaacgaaaaacgaacgaaacgacgcgcgaaaacgaaaaaacgaccgaaacacgtataacgacgacgaaaaaaacgcgacgcccgaaactttaaaaaaatataaaacgaaacgaacgctttcccaaacctaaccgaaaaacgtcgcgcaaaaacgacgacgacgcacgaaaacgacaaacgacgcgctctcgacgcccgcaaccccgatcccgcgctcccgcgacccaaaataactttaaaaaccgccgtctcccgcgaaacttctcgacgaaaacccgctcccaaacccgctcccgaacccgttccgctcccgtccgccttcttctcgccttctctccgcgtaactcctccgtcccgacgtctccaaaactaaataaacgaacgacgcgtaaaacgcgcgacgacgacgacgacgacgacgacataaaacgcaataactaaacccgacaaactttcctcctaacgctattactaaaaacgacgctaaaaacgcgcgcgacgactaactattacccccgcttttcgcccttctttttcctatacacccaccacgaaaaactaaaaaaaaataaaaaacaaaacgaaatactc

SEQ ID NO: 425 - DNA, 613 bp, Artificial Sequence
  chemically treated genomic DNA (Homo sapiens) CpG-island No: 425
tggttggacgcgtagagcgggttggtttcggttttcgtgtcgggtaagtgtttttcgggggacggtttcggggttggcgggcggcggtcgcgttttcggtgttagtttcggtatatatttttttttttttttttttaggggtcggtaattatagttattgtcgaaattcggacgaggattcgcgcgggttttggtgttacgttagtggcgaggtcggcgtttttgagaaacggttttgcgaggatttgcgttgtttaggtatttgttcgggatttcgggaattttcgtttttggcgttgataggaagcggttgagatattcgtggcgtacgtgcggtcgcgcgatgtcggtcggtttcgtttcgttttcgcgtcgttcgattggttagggttgtttttaggtcgcggggtttaaagtttattggtcgtcgtcgttattcgtatgagtttattcgtcgcgagcgtttgtaaataattgcgcggggcgaggttggggtgaggttaggttttttcgtcgcgcgttttgaggagtggtttttggttttttagcgtttattgatcgtttgcggagcgtttgtagtgtgttagatttatattgtttataattttagttt

SEQ ID NO: 426 - DNA, 613 bp, Artificial Sequence
  chemically treated genomic DNA (Homo sapiens) CpG-island No: 426
aaactaaaattataaacaatataaatctaacacactacaaacgctccgcaaacgatcaataaacgctaaaaaaccaaaaaccactcctcaaaacgcgcgacgaaaaaacctaacctcaccccaacctcgccccgcgcaattatttacaaacgctcgcgacgaataaactcatacgaataacgacgacgaccaataaactttaaaccccgcgacctaaaaacaaccctaaccaatcgaacgacgcgaaaacgaaacgaaaccgaccgacatcgcgcgaccgcacgtacgccacgaatatctcaaccgcttcctatcaacgccaaaaacgaaaattcccgaaatcccgaacaaatacctaaacaacgcaaatcctcgcaaaaccgtttctcaaaaacgccgacctcgccactaacgtaacaccaaaacccgcgcgaatcctcgtccgaatttcgacaataactataattaccgacccctaaaaaaaaaaaaaaaaaaatatataccgaaactaacaccgaaaacgcgaccgccgcccgccaaccccgaaaccgtcccccgaaaaacacttacccgacacgaaaaccgaaaccaacccgctctacgcgtccaacca

SEQ ID NO: 427 - DNA, 613 bp, Artificial Sequence
  chemically treated genomic DNA (Homo sapiens) CpG-island No: 427
gagttggggttgtgagtagtgtgggtttagtatattgtagacgtttcgtaaacggttaataaacgttgaggggttaaaagttattttttaggacgcgcggcggagagatttagttttattttagtttcgtttcgcgtagttgtttataagcgttcgcggcggatgagtttatacgagtggcggcggcggttaataggttttgagtttcgcggtttggagatagttttggttaatcggacggcgcggaggcggagcggggtcggtcggtatcgcgcggtcgtacgtgcgttacgagtgttttagtcgttttttgttagcgttaggagcggggattttcggggtttcgggtaggtatttggatagcgtaggttttcgtaaggtcgttttttagggacgtcggtttcgttattgacgtagtattagggttcgcgcgggttttcgttcgggtttcggtagtaattgtgattgtcggtttttaagagaggagagaaggaaatgtgtgtcggggttggtatcgggaacgcggtcgtcgttcgttagtttcggggtcgtttttcggaggatatttattcgatacgggggtcgaggttagttcgttttgcgcgtttagtta

SEQ ID NO: 428 - DNA, 613 bp, Artificial Sequence
  chemically treated genomic DNA (Homo sapiens) CpG-island No: 428
taactaaacgcgcaaaacgaactaacctcgacccccgtatcgaataaatatcctccgaaaaacgaccccgaaactaacgaacgacgaccgcgttcccgataccaaccccgacacacatttccttctctcctctcttaaaaaccgacaatcacaattactaccgaaacccgaacgaaaacccgcgcgaaccctaatactacgtcaataacgaaaccgacgtccctaaaaaacgaccttacgaaaacctacgctatccaaatacctacccgaaaccccgaaaatccccgctcctaacgctaacaaaaaacgactaaaacactcgtaacgcacgtacgaccgcgcgataccgaccgaccccgctccgcctccgcgccgtccgattaaccaaaactatctccaaaccgcgaaactcaaaacctattaaccgccgccgccactcgtataaactcatccgccgcgaacgcttataaacaactacgcgaaacgaaactaaaataaaactaaatctctccgccgcgcgtcctaaaaaataacttttaacccctcaacgtttattaaccgtttacgaaacgtctacaatatactaaacccacactactcacaaccccaactc

SEQ ID NO: 429 - DNA, 725 bp, Artificial Sequence
  chemically treated genomic DNA (Homo sapiens) CpG-island No: 429
tcgaagtcggaagcggtttcggggtgcgttgtatcgtttttttcggggtttttttaggtcggagcgcgggatttcggtggtcgggagaggtcggaacggtttcgcggggtagcggcgttttttggcgggtttggggtgcggcgcgggagtcgaggtcgatttagtattttttcgcgttttagttttcgtttcgcggtttttatttacggtggttttcgttttgtttgtttttttgtttcgttttgttttcgggtttggttttcgttttcgtcgatttgttattttttggtcgtcgaggttcggttttcgtagagttgtagtcgttacgcgtttttttgtaattagttttttgtggtattttattttttttgtttcgcgcggggttttatttcgttagggtttttttcgcgatagtcgttatcggtttatttttagaacgtttttagtgatattcgtttttttgtttcgtttagtttagcgtttttatatttttcgttatgagacgttttttttttttcgcgtttttattttatagtagagattagacggtgatgtgggtgattttttcgttgggtatttcgtttgttttttgagggcggagtagtttcgtatcgtttatgttagtttagggtcgttgcgtcgtgggggttcggatgatttgttgagtttgattttagagttatcgggaggatagagaggaattgggtaaaatttgtttttagagg

SEQ ID NO: 430 - DNA, 725 bp, Artificial Sequence
  chemically treated genomic DNA (Homo sapiens) CpG-island No: 430
cctctaaaaacaaattttacccaattcctctctatcctcccgataactctaaaatcaaactcaacaaatcatccgaacccccacgacgcaacgaccctaaactaacataaacgatacgaaactactccgccctcaaaaaacaaacgaaatacccaacgaaaaaatcacccacatcaccgtctaatctctactataaaataaaaacgcgaaaaaaaaaaaacgtctcataacgaaaaatataaaaacgctaaactaaacgaaacaaaaaaacgaatatcactaaaaacgttctaaaaataaaccgataacgactatcgcgaaaaaaaccctaacgaaataaaaccccgcgcgaaacaaaaaaaataaaataccacaaaaaactaattacaaaaaaacgcgtaacgactacaactctacgaaaaccgaacctcgacgaccaaaaaataacaaatcgacgaaaacgaaaaccaaacccgaaaacaaaacgaaacaaaaaaacaaacaaaacgaaaaccaccgtaaataaaaaccgcgaaacgaaaactaaaacgcgaaaaaatactaaatcgacctcgactcccgcgccgcaccccaaacccgccaaaaaacgccgctaccccgcgaaaccgttccgacctctcccgaccaccgaaatcccgcgctccgacctaaaaaaaccccgaaaaaaacgatacaacgcaccccgaaaccgcttccgacttcga

SEQ ID NO: 431 - DNA, 725 bp, Artificial Sequence
  chemically treated genomic DNA (Homo sapiens) CpG-island No: 431
tttttgagagtaaattttatttagtttttttttattttttcgatgattttgaaattaaatttagtaagttattcgagtttttacggcgtagcggttttaggttggtatgggcgatgcggagttatttcgtttttaggaagtaggcgaggtgtttagcgggagaattatttatattatcgtttaatttttgttgtgaagtggaagcgcgagaaggagggagcgttttatgacggagggtgtgaagacgttaggttggacgaagtagaaaggcgggtgttattggggacgttttgagggtaagtcgatggcggttatcgcggaggagattttggcgaggtggggtttcgcgcggggtaagggggatggggtgttatagagggttagttgtaagaggacgcgtgacggttgtagttttgcggagatcgggtttcgacggttaaggagtggtaggtcggcggaggcgggggttaggttcggaggtagagcgagataggagagtaggtaaggcgggggttatcgtgagtgggggtcgcgaggcgggggttggggcgcggggaggtgttaggtcggtttcggttttcgcgtcgtattttaggttcgttaggaggcgtcgttgtttcgcgaagtcgtttcggtttttttcggttatcgaaatttcgcgtttcggtttagagaggtttcggaagaggcggtgtagcgtatttcgaggtcgttttcggtttcgg

SEQ ID NO: 432 - DNA, 725 bp, Artificial Sequence
  chemically treated genomic DNA (Homo sapiens) CpG-island No: 432
ccgaaaccgaaaacgacctcgaaatacgctacaccgcctcttccgaaacctctctaaaccgaaacgcgaaatttcgataaccgaaaaaaaccgaaacgacttcgcgaaacaacgacgcctcctaacgaacctaaaatacgacgcgaaaaccgaaaccgacctaacacctccccgcgccccaacccccgcctcgcgacccccactcacgataacccccgccttacctactctcctatctcgctctacctccgaacctaacccccgcctccgccgacctaccactccttaaccgtcgaaacccgatctccgcaaaactacaaccgtcacgcgtcctcttacaactaaccctctataacaccccatcccccttaccccgcgcgaaaccccacctcgccaaaatctcctccgcgataaccgccatcgacttaccctcaaaacgtccccaataacacccgcctttctacttcgtccaacctaacgtcttcacaccctccgtcataaaacgctccctccttctcgcgcttccacttcacaacaaaaattaaacgataatataaataattctcccgctaaacacctcgcctacttcctaaaaacgaaataactccgcatcgcccataccaacctaaaaccgctacgccgtaaaaactcgaataacttactaaatttaatttcaaaatcatcgaaaaaataaaaaaaaactaaataaaatttactctcaaaaa

SEQ ID NO: 433 - DNA, 580 bp, Artificial Sequence
  chemically treated genomic DNA (Homo sapiens) CpG-island No: 433
tagaggcgggaggaaacgcgattttcgcggggttaggcgcggcgcggacggtaggaagggcgggggtcgatttttttttgggtggtgttagtttttattttagcggttttcggaattcgcggattaggggacggatagtacgcgaggtagatagatacgtgttggggcgggtaggcgagcgttttagtttggtcgtttggcggtgttttcggttttaacgcgttcgggtcgtcgcgggtcgcgcgcgtcgatgttcggttgagttattggtagggtagcgcgcgtgtgggaaggggcggagggagtgcggtcggcgggcgggcggggcgttgggtttagttcggtcgtaggtgattcggaggttttcgtcgttcgcggcgtttcgagcgttttgtgagtagatgcggagtcgagtggagggcgcgagttagatgcggggcgatagttgatttgttgagaggaggcggggaggcgcggagcgcgcgtgtggtttttgcgtcgttgatttttttattggtttttgggtatcgaaaggtaaaattgtagttttttttagatttagtatttaatttttcgtttt

SEQ ID NO: 434 - DNA, 580 bp, Artificial Sequence
  chemically treated genomic DNA (Homo sapiens) CpG-island No: 434
aaaacgaaaaattaaatactaaatctaaaaaaaactacaattttacctttcgatacccaaaaaccaataaaaaaatcaacgacgcaaaaaccacacgcgcgctccgcgcctccccgcctcctctcaacaaatcaactatcgccccgcatctaactcgcgccctccactcgactccgcatctactcacaaaacgctcgaaacgccgcgaacgacgaaaacctccgaatcacctacgaccgaactaaacccaacgccccgcccgcccgccgaccgcactccctccgccccttcccacacgcgcgctaccctaccaataactcaaccgaacatcgacgcgcgcgacccgcgacgacccgaacgcgttaaaaccgaaaacaccgccaaacgaccaaactaaaacgctcgcctacccgccccaacacgtatctatctacctcgcgtactatccgtcccctaatccgcgaattccgaaaaccgctaaaataaaaactaacaccacccaaaaaaaaatcgacccccgcccttcctaccgtccgcgccgcgcctaaccccgcgaaaatcgcgtttcctcccgcctcta

SEQ ID NO: 435 - DNA, 580 bp, Artificial Sequence
  chemically treated genomic DNA (Homo sapiens) CpG-island No: 435
gaggcgagggattgggtattggatttgaaaggggttgtaattttatttttcggtgtttaggaattagtggagaagttagcggcgtaaggattatacgcgcgtttcgcgttttttcgtttttttttagtaagttagttgtcgtttcgtatttggttcgcgttttttattcggtttcgtatttgtttataaagcgttcggggcgtcgcgggcggcgagggttttcgggttatttgcggtcgggttgagtttagcgtttcgttcgttcgtcggtcgtatttttttcgtttttttttatacgcgcgttgttttgttagtgatttagtcgggtatcggcgcgcgcggttcgcggcggttcgggcgcgttggggtcggaggtatcgttaggcgattagattgaggcgttcgtttgttcgttttagtacgtgtttgtttgtttcgcgtgttgttcgttttttagttcgcgggtttcgaggatcgttgaggtggggattggtattatttagagggaaatcggttttcgttttttttgtcgttcgcgtcgcgtttggtttcgcgggggtcgcgttttttttcgtttttg

SEQ ID NO: 436 - DNA, 580 bp, Artificial Sequence
  chemically treated genomic DNA (Homo sapiens) CpG-island No: 436
caaaaacgaaaaaaaacgcgacccccgcgaaaccaaacgcgacgcgaacgacaaaaaaaacgaaaaccgatttccctctaaataataccaatccccacctcaacgatcctcgaaacccgcgaactaaaaaacgaacaacacgcgaaacaaacaaacacgtactaaaacgaacaaacgaacgcctcaatctaatcgcctaacgatacctccgaccccaacgcgcccgaaccgccgcgaaccgcgcgcgccgatacccgactaaatcactaacaaaacaacgcgcgtataaaaaaaaacgaaaaaaatacgaccgacgaacgaacgaaacgctaaactcaacccgaccgcaaataacccgaaaaccctcgccgcccgcgacgccccgaacgctttataaacaaatacgaaaccgaataaaaaacgcgaaccaaatacgaaacgacaactaacttactaaaaaaaaacgaaaaaacgcgaaacgcgcgtataatccttacgccgctaacttctccactaattcctaaacaccgaaaaataaaattacaacccctttcaaatccaatacccaatccctcgcctc

SEQ ID NO: 437 - DNA, 652 bp, Artificial Sequence
  chemically treated genomic DNA (Homo sapiens) CpG-island No: 437
aaagagtcgaatatataagagttttttagttttttttcgtttttttgcggaaagaatcgaaggtagagtacggcgtcgaagtggagtcgttttaagttcgggttttttcggattatttcggtttgcgttcggaagaggagggcgtttttggttttagcgtttcgttttcgcgttgtgttttttgtcggcggcgtggggtagttgtagtagcgttggcggtaggaggcggcggtcgcgtcgacgtcgatttagattggagcgacgtttaaagaaggggtagaatcgttggggagtgcggtttttttttgttgggggatttttagtttttcgcgcgttcggaggaggagaagcggcggcgtcgggaagtaggtgaggattcggttttaattagggagggggcgaaggagcgcgtttgtttttttcgtttttgggtcgcgtttgcgtttgtattcgttttatttgaattaggaagcggtagagtcggaggtttagttttttcggttttttttttgtgtgggtcggggagcgaaggaggggacgagtcgcgagggtcgcggcgcggtttttttcgtcgttaggggtcgaggggttgtcggtgttttgggtaggtttcggggtttggggaatttattatagagatttatttggtttt

SEQ ID NO: 438 - DNA, 652 bp, Artificial Sequence
  chemically treated genomic DNA (Homo sapiens) CpG-island No: 438
aaaaccaaataaatctctataataaattccccaaaccccgaaacctacccaaaacaccgacaacccctcgacccctaacgacgaaaaaaaccgcgccgcgaccctcgcgactcgtcccctccttcgctccccgacccacacaaaaaaaaaaccgaaaaaactaaacctccgactctaccgcttcctaattcaaataaaacgaatacaaacgcaaacgcgacccaaaaacgaaaaaaacaaacgcgctccttcgccccctccctaattaaaaccgaatcctcacctacttcccgacgccgccgcttctcctcctccgaacgcgcgaaaaactaaaaatcccccaacaaaaaaaaaccgcactccccaacgattctaccccttctttaaacgtcgctccaatctaaatcgacgtcgacgcgaccgccgcctcctaccgccaacgctactacaactaccccacgccgccgacaaaaaacacaacgcgaaaacgaaacgctaaaaccaaaaacgccctcctcttccgaacgcaaaccgaaataatccgaaaaaacccgaacttaaaacgactccacttcgacgccgtactctaccttcgattctttccgcaaaaaaacgaaaaaaaactaaaaaactcttatatattcgactcttt

SEQ ID NO: 439 - DNA, 652 bp, Artificial Sequence
  chemically treated genomic DNA (Homo sapiens) CpG-island No: 439
aaagttaagtgggtttttgtgatggattttttaagtttcggggtttatttagggtatcggtagtttttcggtttttaacggcgaaggggatcgcgtcgcggttttcgcggttcgttttttttttcgtttttcggtttatataaagaaagagtcggaggagttgagttttcgattttgtcgttttttggtttaagtgaggcgaatgtaaacgtaggcgcggtttagggacggagaaggtaagcgcgttttttcgttttttttttgattggggtcgggtttttatttgtttttcggcgtcgtcgttttttttttttcggacgcgcggaaggttgggagttttttaataagaagaagtcgtattttttagcgattttgttttttttttaaacgtcgttttagtttgggtcgacgtcgacgcggtcgtcgttttttgtcgttaacgttgttatagttgttttacgtcgtcgatagagggtatagcgcgggggcgaagcgttgaagttaaaggcgtttttttttttcgagcgtaggtcggggtggttcggaagggttcgagtttgaggcggttttatttcggcgtcgtgttttgttttcggtttttttcgtaagggggcggaggaagattgggaagtttttgtgtgttcggtttttt

SEQ ID NO: 440 - DNA, 652 bp, Artificial Sequence
  chemically treated genomic DNA (Homo sapiens) CpG-island No: 440
aaaaaaccgaacacacaaaaacttcccaatcttcctccgcccccttacgaaaaaaaccgaaaacaaaacacgacgccgaaataaaaccgcctcaaactcgaacccttccgaaccaccccgacctacgctcgaaaaaaaaaaacgcctttaacttcaacgcttcgcccccgcgctataccctctatcgacgacgtaaaacaactataacaacgttaacgacaaaaaacgacgaccgcgtcgacgtcgacccaaactaaaacgacgtttaaaaaaaaaacaaaatcgctaaaaaatacgacttcttcttattaaaaaactcccaaccttccgcgcgtccgaaaaaaaaaaaacgacgacgccgaaaaacaaataaaaacccgaccccaatcaaaaaaaaaacgaaaaaacgcgcttaccttctccgtccctaaaccgcgcctacgtttacattcgcctcacttaaaccaaaaaacgacaaaatcgaaaactcaactcctccgactctttctttatataaaccgaaaaacgaaaaaaaaaacgaaccgcgaaaaccgcgacgcgatccccttcgccgttaaaaaccgaaaaactaccgataccctaaataaaccccgaaacttaaaaaatccatcacaaaaacccacttaacttt

SEQ ID NO: 441 - DNA, 869 bp, Artificial Sequence
  chemically treated genomic DNA (Homo sapiens) CpG-island No: 441
agggtgcgagcgggaggttggtgttttgttcgcgatgggtaggggagtcgggtggtcgcggggcgaggagtcgcgagggtcgggtcggcgtgatattatttggcggagtttcggggaagagttttaaaggcgcgcgttttttcgtgtttcgcgtattcgaacgggagtcgcggagagttcgtttttcgttgtcgtcggcgtttcggggaggtaagtgttattcgcggatttcgagtcgcggtcgggtgggggcggttcgcggttgtttcgcgttcgggaagttttggttggggttgcggtcggagggcggcgtttaagtttttttgaaggtttcggagggtagttggagcggcgtagagtttgcgcggggatggcgggggtggtcgcgggtcggggtcgtttgggggcggttatttcgggcggtgcgtggaaaagtaggtattggtgcgcggcgaggggcgtacgttagagttttagtttcgcgttttgcgtatttggcgcgttttggtcgcggtttcggcgagttttagtttgtttcgggtcgcgatttcggtttcgcgtttttttgttcgttcgggttttttgtagttcgttggtttcgcggtcgcgtacggttacgtcggtaggtcgcgttcggcggtcggttaagttagtttcggttttgtcgcgttcgcgtttcgggttatttcgttcggttttttcggcgttgtatttttcgttttttttatttttagtcgttcgttatttttatatttttcggtgtttcggtttcggcgtttgatttagtgtttagtaattaatttggcgttttagaatggttagcgggttggataatgggtgtatttatttttcgggttaatttgaataga

SEQ ID NO: 442 - DNA, 869 bp, Artificial Sequence
  chemically treated genomic DNA (Homo sapiens) CpG-island No: 442
tctattcaaattaacccgaaaaataaatacacccattatccaacccgctaaccattctaaaacgccaaattaattactaaacactaaatcaaacgccgaaaccgaaacaccgaaaaatataaaaataacgaacgactaaaaataaaaaaaacgaaaaatacaacgccgaaaaaaccgaacgaaataacccgaaacgcgaacgcgacaaaaccgaaactaacttaaccgaccgccgaacgcgacctaccgacgtaaccgtacgcgaccgcgaaaccaacgaactacaaaaaacccgaacgaacaaaaaaacgcgaaaccgaaatcgcgacccgaaacaaactaaaactcgccgaaaccgcgaccaaaacgcgccaaatacgcaaaacgcgaaactaaaactctaacgtacgcccctcgccgcgcaccaatacctacttttccacgcaccgcccgaaataaccgcccccaaacgaccccgacccgcgaccacccccgccatccccgcgcaaactctacgccgctccaactaccctccgaaaccttcaaaaaaacttaaacgccgccctccgaccgcaaccccaaccaaaacttcccgaacgcgaaacaaccgcgaaccgcccccacccgaccgcgactcgaaatccgcgaataacacttacctccccgaaacgccgacgacaacgaaaaacgaactctccgcgactcccgttcgaatacgcgaaacacgaaaaaacgcgcgcctttaaaactcttccccgaaactccgccaaataatatcacgccgacccgaccctcgcgactcctcgccccgcgaccacccgactcccctacccatcgcgaacaaaacaccaacctcccgctcgcaccct

SEQ ID NO: 443 - DNA, 869 bp, Artificial Sequence
  chemically treated genomic DNA (Homo sapiens) CpG-island No: 443
tttgtttagattagttcgggggatgaatgtatttattatttagttcgttgattattttgaaacgttaaattaattattaagtattgaattaggcgtcggggtcggggtatcgggaggtgtgaaaatagcgagcggttggagatggggaaagcgaggggtgtagcgtcgagggggtcgggcggggtggttcggggcgcgggcgcggtagggtcggggttggtttggtcggtcgtcgagcgcgatttgtcggcgtgatcgtgcgcgatcgcggggttagcgggttataaaggattcgggcgggtaggaaggcgcggagtcggggtcgcggttcggagtaggttggggttcgtcgggatcgcggttagagcgcgttaagtgcgtaggacgcggggttggggttttggcgtgcgtttttcgtcgcgtattagtgtttatttttttacgtatcgttcgggatggtcgtttttagacggtttcggttcgcggttattttcgttattttcgcgtaggttttacgtcgttttagttgtttttcgaggtttttaagaaaatttgggcgtcgtttttcgatcgtagttttagttagagtttttcgagcgcggggtagtcgcgggtcgtttttattcggtcgcgattcgggattcgcgggtggtatttattttttcgaggcgtcggcggtagcgggaggcgagtttttcgcggttttcgttcgagtgcgcggggtacggaggagcgcgcgtttttaagattttttttcgagatttcgttaggtggtgttacgtcggttcggttttcgcggtttttcgtttcgcggttattcggtttttttgtttatcgcgggtagaatattagtttttcgttcgtatttt

SEQ ID NO: 444 - DNA, 869 bp, Artificial Sequence
  chemically treated genomic DNA (Homo sapiens) CpG-island No: 444
aaaatacgaacgaaaaactaatattctacccgcgataaacaaaaaaaccgaataaccgcgaaacgaaaaaccgcgaaaaccgaaccgacgtaacaccacctaacgaaatctcgaaaaaaaatcttaaaaacgcgcgctcctccgtaccccgcgcactcgaacgaaaaccgcgaaaaactcgcctcccgctaccgccgacgcctcgaaaaaataaataccacccgcgaatcccgaatcgcgaccgaataaaaacgacccgcgactaccccgcgctcgaaaaactctaactaaaactacgatcgaaaaacgacgcccaaattttcttaaaaacctcgaaaaacaactaaaacgacgtaaaacctacgcgaaaataacgaaaataaccgcgaaccgaaaccgtctaaaaacgaccatcccgaacgatacgtaaaaaaataaacactaatacgcgacgaaaaacgcacgccaaaaccccaaccccgcgtcctacgcacttaacgcgctctaaccgcgatcccgacgaaccccaacctactccgaaccgcgaccccgactccgcgccttcctacccgcccgaatcctttataacccgctaaccccgcgatcgcgcacgatcacgccgacaaatcgcgctcgacgaccgaccaaaccaaccccgaccctaccgcgcccgcgccccgaaccaccccgcccgaccccctcgacgctacacccctcgctttccccatctccaaccgctcgctattttcacacctcccgataccccgaccccgacgcctaattcaatacttaataattaatttaacgtttcaaaataatcaacgaactaaataataaatacattcatcccccgaactaatctaaacaaa

SEQ ID NO: 445 - DNA, 704 bp, Artificial Sequence
  chemically treated genomic DNA (Homo sapiens) CpG-island No: 445
ggcgagaaggaggttcggcgcggggcggggcggggacgtttacgtttagttttggtcgtaggcggtcgtattgtttcgatatttagaagtcgcgtcggttttttagcgcgatgaagggttggtcgggaaagcgcgcgcggaattttttgaggaattcgttttcgaagttagttagtacgtcgtttatgtttattagtattcgtagggcgcggtttttcgttaggtttagttcgttcgtcgtttcgcgtcgtttcgcgggaatcgtcgcgttgtagagtcgtcgcgtatattagtcgtttagtcggattatggtttagcgcgttggttcgtcgtgggcgcggggatttgggtcgcgtcgtgttgtcggagtcggttagatattttcgtcgcggaggagaagtttttaacgttggggcgcgcgtggagcgcgggacggggagcggggcggggagcgcggggtgcgggcgcgtaagtatcggttttagagcgaggtcgcggcgcgcgcggtttttaaaggaatacgcgtcggcggaggcggagtttcggggcggggtttcgaggacggatagcggtaagcgtcgcgcgtttttagaaggttcgcgttttcgcgttgtcgatttgcgtttttttcgtggattttgggttcgggttgtttttttttattgtatagattattatggaggagtagtgtaaatcgagaagta

SEQ ID NO: 446 - DNA, 704 bp, Artificial Sequence
  chemically treated genomic DNA (Homo sapiens) CpG-island No: 446
tacttctcgatttacactactcctccataataatctatacaataaaaaaaaacaacccgaacccaaaatccacgaaaaaaacgcaaatcgacaacgcgaaaacgcgaaccttctaaaaacgcgcgacgcttaccgctatccgtcctcgaaaccccgccccgaaactccgcctccgccgacgcgtattcctttaaaaaccgcgcgcgccgcgacctcgctctaaaaccgatacttacgcgcccgcaccccgcgctccccgccccgctccccgtcccgcgctccacgcgcgccccaacgttaaaaacttctcctccgcgacgaaaatatctaaccgactccgacaacacgacgcgacccaaatccccgcgcccacgacgaaccaacgcgctaaaccataatccgactaaacgactaatatacgcgacgactctacaacgcgacgattcccgcgaaacgacgcgaaacgacgaacgaactaaacctaacgaaaaaccgcgccctacgaatactaataaacataaacgacgtactaactaacttcgaaaacgaattcctcaaaaaattccgcgcgcgctttcccgaccaacccttcatcgcgctaaaaaaccgacgcgacttctaaatatcgaaacaatacgaccgcctacgaccaaaactaaacgtaaacgtccccgccccgccccgcgccgaacctccttctcgcc

SEQ ID NO: 447 - DNA, 704 bp, Artificial Sequence
  chemically treated genomic DNA (Homo sapiens) CpG-island No: 447
tgtttttcggtttgtattgtttttttatggtagtttgtgtagtgggagaaggtagttcgggtttagggtttacggagaagacgtaaatcgatagcgcgggagcgcggattttttggaggcgcgcggcgtttatcgttgttcgttttcgaagtttcgtttcggggtttcgttttcgtcggcgcgtgtttttttagggatcgcgcgcgtcgcggtttcgttttggggtcggtatttgcgcgttcgtatttcgcgtttttcgtttcgtttttcgtttcgcgttttacgcgcgttttagcgttgggggtttttttttcgcggcgggaatgtttggtcggtttcggtagtacggcgcggtttaggttttcgcgtttacgacgggttagcgcgttgggttatgattcggttgggcggttggtgtgcgcggcggttttgtagcgcggcggttttcgcggggcggcgcggggcggcgggcgggttgggtttggcgggaggtcgcgttttacgggtgttggtggatatggacggcgtgttggttgatttcgagggcggattttttaggaagtttcgcgcgcgttttttcgattagttttttatcgcgttggaggatcggcgcggtttttgggtgtcggagtagtacggtcgtttgcggttagggttgagcgtgagcgttttcgtttcgtttcgcgtcgggtttttttttcgtt

SEQ ID NO: 448 - DNA, 704 bp, Artificial Sequence
  chemically treated genomic DNA (Homo sapiens) CpG-island No: 448
aacgaaaaaaaaacccgacgcgaaacgaaacgaaaacgctcacgctcaaccctaaccgcaaacgaccgtactactccgacacccaaaaaccgcgccgatcctccaacgcgataaaaaactaatcgaaaaaacgcgcgcgaaacttcctaaaaaatccgccctcgaaatcaaccaacacgccgtccatatccaccaacacccgtaaaacgcgacctcccgccaaacccaacccgcccgccgccccgcgccgccccgcgaaaaccgccgcgctacaaaaccgccgcgcacaccaaccgcccaaccgaatcataacccaacgcgctaacccgtcgtaaacgcgaaaacctaaaccgcgccgtactaccgaaaccgaccaaacattcccgccgcgaaaaaaaaacccccaacgctaaaacgcgcgtaaaacgcgaaacgaaaaacgaaacgaaaaacgcgaaatacgaacgcgcaaataccgaccccaaaacgaaaccgcgacgcgcgcgatccctaaaaaaacacgcgccgacgaaaacgaaaccccgaaacgaaacttcgaaaacgaacaacgataaacgccgcgcgcctccaaaaaatccgcgctcccgcgctatcgatttacgtcttctccgtaaaccctaaacccgaactaccttctcccactacacaaactaccataaaaaaacaatacaaaccgaaaaaca

SEQ ID NO: 449 - DNA, 844 bp, Artificial Sequence
  chemically treated genomic DNA (Homo sapiens) CpG-island No: 449
  unsure (190, 307, 330, 333, 351, 357, 363, 384, 392, 405, 407, 410)
  unsure (428, 458, 460, 492, 495, 525, 535, 581, 601, 652, 677, 688)
  unsure (691, 720, 769, 778, 788)
ttcgtttatttgtgttcgtttacgttttttttttcgatcgtttatatgtgtttgtttcgtttttattttgttcgattattaatttgtattcggtttttttttagtttatcggtgtacgattcgttaatcggtgtttttttcgtttatcggtgttcgtttcgtttatcggtgttcgtttcgtttatttgtnttcgtttcgttttttgttttcgtttcgtttttttgttttcgtttcgtttcgtttgtttatttgtgttcgttttcgtttcgttagtttatttgttttcgtttcgttcgtttatttgtngtgcgtattgtatttcgtggttngtntgtcgggtagggtagttncgtagncggttntcgcggaagtcgggcgggtanggtgtatntttcggaggcggntntgntagcggtttcgtatatanttcgtattgttgttggtattcgggattttnanttagttcggtcggtaggcgtagcggtcggagnttntgttcgtacggggagtcgtggtagttgtangcggaagaangtaggggcgtttttattagttcggtttgtatacgtaggcgttcgtnggtttgttcgtagcgcgttngtcgcggtgttgtattggtacgggcggcggtacgtggacgattattagttngggttcgtagtggtatacgtcggtncgcggggtcgntangcgttcgtgggggtcgtaggcgtacgggnaattcgtagcgggttttttagcggtcggtttggtattggtacgcgtttngtggttggnttcgtattgngtcgtgcgggtggtaggggtagtttttacggtagtcggggttttagtattggttcg

SEQ ID NO: 450 - DNA, 844 bp, Artificial Sequence
  chemically treated genomic DNA (Homo sapiens) CpG-island No: 450
  unsure (57, 67, 76, 125, 154, 157, 168, 193, 244, 264, 310, 320, 350)
  unsure (353, 385, 387, 417, 435, 438, 440, 453, 461, 482, 488, 494)
  unsure (512, 515, 538, 655)
cgaaccaatactaaaaccccgactaccgtaaaaactacccctaccacccgcacgacncaatacgaanccaaccacnaaacgcgtaccaataccaaaccgaccgctaaaaaacccgctacgaattncccgtacgcctacgacccccacgaacgcntancgaccccgcgnaccgacgtataccactacgaacccnaactaataatcgtccacgtaccgccgcccgtaccaatacaacaccgcgacnaacgcgctacgaacaaaccnacgaacgcctacgtatacaaaccgaactaataaaaacgcccctacnttcttccgcntacaactaccacgactccccgtacgaacanaanctccgaccgctacgcctaccgaccgaactaantnaaaatcccgaataccaacaacaatacgaantatatacgaaaccgctancananccgcctccgaaanatacaccntacccgcccgacttccgcganaaccgnctacgnaactaccctacccgacanacnaaccacgaaatacaatacgcacnacaaataaacgaacgaaacgaaaacaaataaactaacgaaacgaaaacgaacacaaataaacaaacgaaacgaaacgaaaacaaaaaaacgaaacgaaaacaaaaaacgaaacgaanacaaataaacgaaacgaacaccgataaacgaaacgaacaccgataaacgaaaaaaacaccgattaacgaatcgtacaccgataaactaaaaaaaaaccgaatacaaattaataatcgaacaaaataaaaacgaaacaaacacatataaacgatcgaaaaaaaaaacgtaaacgaacacaaataaacgaa

SEQ ID NO: 451 - DNA, 844 bp, Artificial Sequence
  chemically treated genomic DNA (Homo sapiens) CpG-island No: 451
  unsure (57, 67, 76, 125, 154, 157, 168, 193, 244, 264, 310, 320, 350)
  unsure (353, 385, 387, 417, 435, 438, 440, 453, 461, 482, 488, 494)
  unsure (512, 515, 538, 655)
cgggttagtattggggtttcgattgtcgtgagagttgtttttgttattcgtacggtntagtgcgagnttagttatngggcgcgtgttagtgttaggtcgatcgttggggagttcgttgcgagttnttcgtgcgtttgcggtttttacgggcgtntgncgatttcgcgnatcggcgtgtgttattgcgaatttnggttggtggtcgtttacgtgtcgtcgttcgtgttagtgtaatatcgcggtnggcgcgttgcgagtaggttnacgggcgtttgcgtgtgtaagtcgggttggtgggggcgtttttgtnttttttcgtntgtaattgttacggtttttcgtgcgagtangantttcggtcgttgcgtttgtcggtcgggttggntnggggtttcgaatgttagtagtagtgcgagntgtgtgcggggtcgttgntangntcgttttcggagngtgtattntgttcgttcggttttcgcggnagtcgnttgcgnagttgttttgttcggtangtnagttacggggtgtagtgcgtatnataggtgagcgggcggggcggggataggtgggttggcggggcgggggcggatataagtgagtaggcggggcggggcggagataggggggcggggcggagatagggggcggggcgaanataggtgggcggggcggatatcggtgggcggggcggatatcggtgggcggggagggtatcggttggcgggtcgtatatcggtgggttgggagggggtcgggtgtaaattagtgatcgggtaaggtgggggcggggtaggtatatgtgagcggtcgggggaagaggcgtaagcggatataggtgagcgaa

SEQ ID NO: 452 - DNA, 844 bp, Artificial Sequence
  chemically treated genomic DNA (Homo sapiens) CpG-island No: 452
  unsure (190, 307, 330, 333, 351, 357, 363, 384, 392, 405, 407, 410)
  unsure (428, 458, 460, 492, 495, 525, 535, 581, 601, 652, 677, 688)
  unsure (691, 720, 769, 778, 788)
ttcgctcacctatatccgcttacgcctcttcccccgaccgctcacatatacctaccccgcccccaccttacccgatcactaatttacacccgaccccctcccaacccaccgatatacgacccgccaaccgataccctccccgcccaccgatatccgccccgcccaccgatatccgccccgcccacctatnttcgccccgccccctatctccgccccgcccccctatctccgccccgccccgcctactcacttatatccgcccccgccccgccaacccacctatccccgccccgcccgctcacctatnatacgcactacaccccgtaactnacntaccgaacaaaacaactncgcaancgactnccgcgaaaaccgaacgaacanaatacacnctccgaaaacgancntancaacgaccccgcacacanctcgcactactactaacattcgaaaccccnanccaacccgaccgacaaacgcaacgaccgaaantcntactcgcacgaaaaaccgtaacaattacanacgaaaaaanacaaaaacgcccccaccaacccgacttacacacgcaaacgcccgtnaacctactcgcaacgcgccnaccgcgatattacactaacacgaacgacgacacgtaaacgaccaccaaccnaaattcgcaataacacacgccgatncgcgaaatcgncanacgcccgtaaaaaccgcaaacgcacgaanaactcgcaacgaactccccaacgatcgacctaacactaacacgcgcccnataactaanctcgcactanaccgtacgaataacaaaaacaactctcacgacaatcgaaaccccaatactaacccg

SEQ ID NO: 453 - DNA, 714 bp, Artificial Sequence
  chemically treated genomic DNA (Homo sapiens) CpG-island No: 453
  unsure (294, 334, 355..356, 363..364, 370, 388, 393, 395, 449, 504)
  unsure (514, 516, 594, 609, 612, 627, 644, 653, 659, 665, 670, 674)
cgtttagcgtttgttacgttcgttttcgtttcgttttagagtttcgtttcgtttttatcgtttcggttttttggcgcgttgttgtaggtcgcggttgtgcgttcggagttcgtttcgttgtcggttcgtgatttttttttaagtgtcgaagtagcgcgcgtttttttgaggaagggtcgtttttagcggcggcggcgtcggttcgcgggagggaggggaggattcgagtaggtcgttattcgttttgttttggtcggggttgcgtttattttgtggtttcgcgcgtagtttttntgcggaggcgttcgtttttttttcgtagtcgtcgtagttntttgtttcgtcggttgcgcgnnatatttnngtagtntggggagattcgggtttntaggntnttcggttttgtcggtttcgtgggtggcgaagggagggttatgatttatcgagtntcggggcgggttttacggtagtttgttttaagagttttagcgttcgtattattangcggtattangnttcggtcgtcgttttcggttcgaaacggcgcgttagattttgtagtttagtgtttagggtttcggttagatggtatantaagtttcgcggttngantgtcgatttcgcggntttttcgagatttttangttaggtantttcgnggcgtncgttntttntgggttttatgttttttagaggtttagggttgcgattttt

SEQ ID NO: 454 - DNA, 714 bp, Artificial Sequence
  chemically treated genomic DNA (Homo sapiens) CpG-island No: 454
  unsure (41, 45, 50, 56, 62, 71, 88, 103, 106, 121, 199, 201, 211)
  unsure (266, 320, 322, 327, 345, 351..352, 359..360, 381, 421)
aaaaatcgcaaccctaaacctctaaaaaacataaaacccanaaanaacgnacgccncgaaantacctaacntaaaaatctcgaaaaanccgcgaaatcgacantcnaaccgcgaaacttantataccatctaaccgaaaccctaaacactaaactacaaaatctaacgcgccgtttcgaaccgaaaacgacgaccgaancntaataccgcntaataatacgaacgctaaaactcttaaaacaaactaccgtaaaacccgccccganactcgataaatcataaccctcccttcgccacccacgaaaccgacaaaaccgaanancctanaaacccgaatctccccanactacnnaaatatnncgcgcaaccgacgaaacaaanaactacgacgactacgaaaaaaaaacgaacgcctccgcanaaaaactacgcgcgaaaccacaaaataaacgcaaccccgaccaaaacaaaacgaataacgacctactcgaatcctcccctccctcccgcgaaccgacgccgccgccgctaaaaacgacccttcctcaaaaaaacgcgcgctacttcgacacttaaaaaaaaatcacgaaccgacaacgaaacgaactccgaacgcacaaccgcgacctacaacaacgcgccaaaaaaccgaaacgataaaaacgaaacgaaactctaaaacgaaacgaaaacgaacgtaacaaacgctaaacg

SEQ ID NO: 455 - DNA, 714 bp, Artificial Sequence
  chemically treated genomic DNA (Homo sapiens) CpG-island No: 455
  unsure (41, 45, 50, 56, 62, 71, 88, 103, 106, 121, 199, 201, 211)
  unsure (266, 320, 322, 327, 345, 351..352, 359..360, 381, 421)
gggggtcgtagttttaagtttttgggagatatggagtttangganggcgngcgttncggggntgtttggtntgggggtttcgggaggntcgcggggtcggtanttnggtcgcggagtttgntgtattatttagtcggggttttgggtattgagttgtaggatttggcgcgtcgtttcgggtcggaggcggcggtcgggntntggtgtcgtntagtggtgcgggcgttggagtttttggaataggttgtcgtggggttcgtttcggnattcggtgagttatggtttttttttcgttatttacggggtcggtagggtcgaangntttgnagattcgggtttttttangttgtnnaggtgtnncgcgtagtcggcggagtaggnagttgcggcggttgcgggaggagaacgagcgttttcgtangggagttgcgcgcggggttatagggtaagcgtagtttcggttagggtagggcgggtgacgatttgttcgggtttttttttttttttcgcgggtcggcgtcgtcgtcgttaagaacggtttttttttagaggagcgcgcgttgtttcggtatttgaagggaggttacggatcgatagcgggacgaatttcgggcgtataatcgcgatttgtagtagcgcgttaggagatcgaggcggtgagggcggggcggggttttggggcggggcgggggcggacgtggtaggcgttgggcg

SEQ ID NO: 456 - DNA, 714 bp, Artificial Sequence
  chemically treated genomic DNA (Homo sapiens) CpG-island No: 456
  unsure (294, 334, 355..356, 363..364, 370, 388, 393, 395, 449, 504)
  unsure (514, 516, 594, 609, 612, 627, 644, 653, 659, 665, 670, 674)
cgcccaacgcctaccacgtccgcccccgccccgccccaaaaccccgccccgccctcaccgcctcgatctcctaacgcgctactacaaatcgcgattatacgcccgaaattcgtcccgctatcgatccgtaacctcccttcaaataccgaaacaacgcgcgctcctctaaaaaaaaaccgttcttaacgacgacgacgccgacccgcgaaaaaaaaaaaaaaacccgaacaaatcgtcacccgccctaccctaaccgaaactacgcttaccctataaccccgcgcgcaactcccntacgaaaacgctcgttctcctcccgcaaccgccgcaactncctactccgccgactacgcgnnacacctnnacaacntaaaaaaacccgaatctncaaancnttcgaccctaccgaccccgtaaataacgaaaaaaaaaccataactcaccgaatnccgaaacgaaccccacgacaacctattccaaaaactccaacgcccgcaccactanacgacaccanancccgaccgccgcctccgacccgaaacgacgcgccaaatcctacaactcaatacccaaaaccccgactaaataatacancaaactccgcgaccnaantaccgaccccgcgancctcccgaaacccccanaccaaacanccccgnaacgcncgccntccntaaactccatatctcccaaaaacttaaaactacgaccccc

SEQ ID NO: 457 - DNA, 639 bp, Artificial Sequence
  chemically treated genomic DNA (Homo sapiens) CpG-island No: 457
  unsure (2, 6, 26, 232, 414, 426)
tnatanttcgattttttttcggtttncggcgtcgttttatattttcgttttattttttttttgtagtttttttttcgatatgtagttcggtagcggggttagagggttaggtatcgggttattcggttttcgataaggaaatatttcggttatattcggagaatttggggagcggcgggatagaaaaatttattaattataggttcgggtttataagaagcgtagtagaaanggcgttcggggatttcggtttgtagtttcgttatatagtgtatttagtttcgttcggtttaaatttttcggttattcggttcgattcgattacgtttttcgtagttcggttttaaacgtttgttacgtattttataggtttttatataagaggtcgtttttttcgtagcgtaatggcggttnagattgtcgttntttcgcgtttttagcgtcgggaagtgcgtaattcgagtttagtagttgatttagtcggcgtcgaggtgtttagatggattagtgagacgattaattagagttgtatattgcgtcgaggaggcgggtttataggcggaaaggttttgaacgtaagggggtgtggtcggggtgaagtttcgttttttttattttcgaggttgtttttggggtttt

SEQ ID NO: 458 - DNA, 639 bp, Artificial Sequence
  chemically treated genomic DNA (Homo sapiens) CpG-island No: 458
  unsure (214, 226, 408, 614, 634, 638)
aaaaccccaaaaacaacctcgaaaataaaaaaaacgaaacttcaccccgaccacacccccttacgttcaaaacctttccgcctataaacccgcctcctcgacgcaatatacaactctaattaatcgtctcactaatccatctaaacacctcgacgccgactaaatcaactactaaactcgaattacgcacttcccgacgctaaaaacgcgaaanaacgacaatctnaaccgccattacgctacgaaaaaaacgacctcttatataaaaacctataaaatacgtaacaaacgtttaaaaccgaactacgaaaaacgtaatcgaatcgaaccgaataaccgaaaaatttaaaccgaacgaaactaaatacactatataacgaaactacaaaccgaaatccccgaacgccntttctactacgcttcttataaacccgaacctataattaataaatttttctatcccgccgctccccaaattctccgaatataaccgaaatatttccttatcgaaaaccgaataacccgatacctaaccctctaaccccgctaccgaactacatatcgaaaaaaaaactacaaaaaaaaaataaaacgaaaatataaaacgacgccgnaaaccgaaaaaaaatcgaantatna

SEQ ID NO: 459 - DNA, 639 bp, Artificial Sequence
  chemically treated genomic DNA (Homo sapiens) CpG-island No: 459
  unsure (214, 226, 408, 614, 634, 638)
gaggttttagaaatagtttcggaaatggaggaggcggggttttatttcgattatatttttttgcgtttaaagttttttcgtttatgggttcgttttttcggcgtagtgtgtaattttaattggtcgttttattaatttatttgagtatttcggcgtcgattggattaattgttgaattcgggttgcgtatttttcggcgttgggaacgcggagnaacggtagtttnggtcgttattgcgttgcggggaaagcggttttttgtgtgagggtttgtggggtgcgtggtaggcgtttaaggtcgggttgcgggaggcgtggtcgggtcgggtcgagtgatcgaagggtttaggtcgggcggggttggatgtattgtgtggcgggattgtaggtcggggttttcggacgttntttttgttgcgttttttgtgggttcgggtttgtggttagtgaatttttttatttcgtcgttttttagatttttcggatatggtcggagtgtttttttatcgagggtcgggtaattcggtgtttggttttttagtttcgttatcggattatatgtcggaggagaagttgtaggagaaaggtgaggcgagagtgtggagcggcgtcgngggtcggaggggggtcgggntgtng

SEQ ID NO: 460 - DNA, 639 bp, Artificial Sequence
  chemically treated genomic DNA (Homo sapiens) CpG-island No: 460
  unsure (2, 6, 26, 232, 414, 426)
cnacancccgacccccctccgacccncgacgccgctccacactctcgcctcacctttctcctacaacttctcctccgacatataatccgataacgaaactaaaaaaccaaacaccgaattacccgaccctcgataaaaaaacactccgaccatatccgaaaaatctaaaaaacgacgaaataaaaaaattcactaaccacaaacccgaacccacaaaaaacgcaacaaaaanaacgtccgaaaaccccgacctacaatcccgccacacaatacatccaaccccgcccgacctaaacccttcgatcactcgacccgacccgaccacgcctcccgcaacccgaccttaaacgcctaccacgcaccccacaaaccctcacacaaaaaaccgctttccccgcaacgcaataacgaccnaaactaccgttnctccgcgttcccaacgccgaaaaatacgcaacccgaattcaacaattaatccaatcgacgccgaaatactcaaataaattaataaaacgaccaattaaaattacacactacgccgaaaaaacgaacccataaacgaaaaaactttaaacgcaaaaaaatataatcgaaataaaaccccgcctcctccatttccgaaactatttctaaaacctc

SEQ ID NO: 461 - DNA, 1157 bp, Artificial Sequence
  chemically treated genomic DNA (Homo sapiens) CpG-island No: 461
  unsure (31, 48, 106, 118, 125, 135, 138, 147, 162, 166, 174, 203)
  unsure (205, 221, 321, 331, 376, 402, 423, 438, 442, 580, 597, 796)
  unsure (814, 816, 893, 901, 1054)
tacggaacggttcgtttcggcgcgtttattnggtcggacggcgtaggnaattgtcgcgttattggtcgtcgtttaggtcgttaggcgttgcggttacgcgaatttnagcgtgggagancgaggangtcggtttanaantcggcggtngcgagttagtcgcgncgantttttatnttcgggcgttttttcggtaattcgttcgntnttttatggtttcgganttttcgcgtttttattttttagttcgtatttgttcgttattttttttttggcggttttttatcgttttatttttttttttttgtttttacgttttttttnttacggtttnttcggcggtcgtttttgttttcgcgttttcgtttcggtcgcgatntttttttttgttgtagtttattcggnttttttcggcgtgtgtcgggnttcgttcggcgtttntttnttgtttttttttattttagtttttttatttcgattttaagaagaaaatattgtcgttcgttgattggttgagcggggttggaaataggcgtcgattaattagtagttagtttttcgttcgtttcgtcgcgagtagaangtcggtttcggtcgganttcggagataaataagagagatgggggacgggaggggtttgggcgttgcgggtcgggtttcggttttgtagtttttaattcgagttatagcgcggtcgggaattttcggcgaatatcgtttcgcggtttttttagcggtttgattttgcgaggttggggtttcggtttcgcgtttcggtttttagcggattttttttangaagtcgtcgggttattnangcgtttttagtcgggttttttcgcggtcgtttcgtcgtttttagttgttttttgcgcgcgggttattacgtttagantgcgtcgngtttcgtacggtggttttattttcgaatttttatttcgttttttttttacgtagcgtcgtcgttttcgtcgtttcgggttttgggttttggtttttcgttttttcgtttcggtggttttcgtttcggcgtattcggggtttgggatttcgganttcggtttagtcgtggcgtttttcgttgatgtatcgattttttttttttttttcggtggcgtttgttcggtttttggaagttggtttttggaaatttgtaagg

SEQ ID NO: 462 - DNA, 1157 bp, Artificial Sequence
  chemically treated genomic DNA (Homo sapiens) CpG-island No: 462
  unsure (104, 257, 265, 342, 344, 362, 561, 578, 716, 720, 735, 756)
  unsure (782, 827, 837, 937, 953, 955, 984, 992, 996, 1011, 1020, 1023)
  unsure (1033, 1040, 1052, 1110, 1127)
ccttacaaatttccaaaaaccaacttccaaaaaccgaacaaacgccaccgaaaaaaaaaaaaaaaatcgatacatcaacgaaaaacgccacgactaaaccgaantccgaaatcccaaaccccgaatacgccgaaacgaaaaccaccgaaacgaaaaaacgaaaaaccaaaacccaaaacccgaaacgacgaaaacgacgacgctacgtaaaaaaaaaacgaaataaaaattcgaaaataaaaccaccgtacgaaacncgacgcantctaaacgtaataacccgcgcgcaaaaaacaactaaaaacgacgaaacgaccgcgaaaaaacccgactaaaaacgcntnaataacccgacgacttcntaaaaaaaatccgctaaaaaccgaaacgcgaaaccgaaaccccaacctcgcaaaatcaaaccgctaaaaaaaccgcgaaacgatattcgccgaaaattcccgaccgcgctataactcgaattaaaaactacaaaaccgaaacccgacccgcaacgcccaaacccctcccgtcccccatctctcttatttatctccgaantccgaccgaaaccgacnttctactcgcgacgaaacgaacgaaaaactaactactaattaatcgacgcctatttccaaccccgctcaaccaatcaacgaacgacaatattttcttcttaaaatcgaaataaaaaaactaaaataaaaaaaaacaanaaanaaacgccgaacgaancccgacacacgccgaaaaaanccgaataaactacaacaaaaaaaaanatcgcgaccgaaacgaaaacgcgaaaacaaaaacgaccgccgaanaaaccgtaanaaaaaaaacgtaaaaacaaaaaaaaaaaaataaaacgataaaaaaccgccaaaaaaaaaataacgaacaaatacgaactaaaaaataaaaacgcgaaaantccgaaaccataaaanancgaacgaattaccgaaaaaacgcccgaanataaaaantcgncgcgactaactcgcnaccgccganttntaaaccgacntcctcgntctcccacgctnaaattcgcgtaaccgcaacgcctaacgacctaaacgacgaccaataacgcgacaattncctacgccgtccgaccnaataaacgcgccgaaacgaaccgttccgta

SEQ ID NO: 463 - DNA, 1157 bp, Artificial Sequence
  chemically treated genomic DNA (Homo sapiens) CpG-island No: 463
  unsure (104, 257, 265, 342, 344, 362, 561, 578, 716, 720, 735, 756)
  unsure (782, 827, 837, 937, 953, 955, 984, 992, 996, 1011, 1020, 1023)
  unsure (1033, 1040, 1052, 1110, 1127)
ttttgtagatttttaagggttaatttttagggatcgggtagacgttatcggggagaggggaaggggtcggtgtattagcggggggcgttacggttggatcgggnttcgggattttaggtttcgaatacgtcgggacgggaattatcggggcgggggagcgaggaattaggatttaaagttcgaggcggcggggacggcggcgttgcgtggggaggaggcggggtggggattcgagagtggaattatcgtgcggagtncggcgtantttgggcgtggtgattcgcgcgtagggggtagttggggacggcggggcggtcgcgggagagttcggttgggggcgtntnggtggttcggcggttttntggggggagttcgttgggggtcgggacgcggagtcggagttttagtttcgtagggttaggtcgttggagaggtcgcggggcgatgttcgtcggggattttcggtcgcgttgtgattcgggttgaaggttgtaaagtcgaggttcggttcgtagcgtttaggtttttttcgttttttattttttttgtttgttttcgagnttcggtcggaatcggtnttttgttcgcggcggggcgggcggggggttggttgttgattggtcgacgtttgtttttagtttcgtttagttaattagcgggcggtagtgttttttttttggggtcggaataaaagggttggaataaaagagggtagnaaanaggcgtcgggcgggnttcgatatacgtcggaggagntcgggtgagttgtagtagggaggggnatcgcggtcggggcgagggcgcgggggtagaagcggtcgtcgaangggtcgtagnggagaaaacgtgggaataagaggagagagatggagcgatgaggggtcgttagggaagagatgacgaatagatgcgggttggggaatggaggcgcgggggnttcgaggttatggaanancgggcgagttgtcgggggaacgttcgagnatgggggntcgncgcggttggttcgtngtcgtcggnttntgaatcggtnttttcgnttttttacgttngggttcgcgtggtcgtagcgtttagcgatttagacggcggttaatggcgcggtagttntttgcgtcgttcggttnaatgagcgcgtcggggcgggtcgtttcgta

SEQ ID NO: 464 - DNA, 1157 bp, Artificial Sequence
  chemically treated genomic DNA (Homo sapiens) CpG-island No: 464
  unsure (31, 48, 106, 118, 125, 135, 138, 147, 162, 166, 174, 203)
  unsure (205, 221, 321, 331, 376, 402, 423, 438, 442, 580, 597, 796)
  unsure (814, 816, 893, 901, 1054)
tacgaaacgacccgccccgacgcgctcattnaaccgaacgacgcaaanaactaccgcgccattaaccgccgtctaaatcgctaaacgctacgaccacgcgaacccnaacgtaaaaaancgaaaanaccgattcanaanccgacgacnacgaaccaaccgcgncgancccccatnctcgaacgttcccccgacaactcgcccgntnttccataacctcgaancccccgcgcctccattccccaacccgcatctattcgtcatctcttccctaacgacccctcatcgctccatctctctcctcttattcccacgttttctccnctacgacccnttcgacgaccgcttctacccccgcgccctcgccccgaccgcgatncccctccctactacaactcacccganctcctccgacgtatatcgaancccgcccgacgcctntttnctaccctcttttattccaacccttttattccgaccccaaaaaaaaaacactaccgcccgctaattaactaaacgaaactaaaaacaaacgtcgaccaatcaacaaccaaccccccgcccgccccgccgcgaacaaaanaccgattccgaccgaanctcgaaaacaaacaaaaaaaataaaaaacgaaaaaaacctaaacgctacgaaccgaacctcgactttacaaccttcaacccgaatcacaacgcgaccgaaaatccccgacgaacatcgccccgcgacctctccaacgacctaaccctacgaaactaaaactccgactccgcgtcccgacccccaacgaactccccccanaaaaccgccgaaccaccnanacgcccccaaccgaactctcccgcgaccgccccgccgtccccaactaccccctacgcgcgaatcaccacgcccaaantacgccgnactccgcacgataattccactctcgaatccccaccccgcctcctccccacgcaacgccgccgtccccgccgcctcgaactttaaatcctaattcctcgctcccccgccccgataattcccgtcccgacgtattcgaaacctaaaatcccgaancccgatccaaccgtaacgccccccgctaatacaccgaccccttcccctctccccgataacgtctacccgatccctaaaaattaacccttaaaaatctacaaaa

SEQ ID NO: 465 - DNA, 981 bp, Artificial Sequence
  chemically treated genomic DNA (Homo sapiens) CpG-island No: 465
  unsure (36, 49, 63, 131, 135, 148, 269, 378, 387, 437, 574, 623, 659)
  unsure (710, 795, 802, 809, 816, 821, 832, 841, 898, 954, 968)
tcgttttcgttgttttcggttttttttcgggtttantttgggttttcgnaggtttcggggcgntttgaggagtcgttcgttcgggttgttttttcgtgttcgtgggtttttttatgtttcggttgttcgtnttantgtttcgtgggtnttcggtttagatgtcgaacgtttcggttgtttttttacgtttcggtcgtttttttacgtttcggtcgttttttcgtgtttcgtgggtttcgttttacgtgtcgttcgtttcggattttttnttattttcgttgggttcgttttaggtatttttcgtttttgttgttttttcgtttattcgggttttgcgtttttcgtcgcgtcgtcgtttcggcggtcgtttttattttnttttttttnttcgttttcgtacggtcgtcggatatttattattttttgagtagtattantgtcgtttcgcggttcggtggttgttcgcggttcgttcggtttttcgttcgttgttcgtcggtcgtttttttcgtggttcggttcggttcggttgtttgtgcgttttcgtcgtgttttgtttcgttttcgtcgtttntcgtcgcggtcgtcgcgtcggtttttgtcgttcgggtttcgtcgttttntcgcgtcgttgtcgacgtcgttcggagtttcggttntcgtagcgtcgcgcgggggcggggcgtttttgcggtaattagagcgttatnacgtcgcggtgcgcgttgacgttacgcggggtcgagtttttttaggttcgttttttcgtttttaagtgggtcgcggcggcgttgntcggttntcgaggntggggtnttcgncggttggggtnagattcggntagaaggcggagtagattagggtgttcgttatcgttttcggtgtgaatcgttacggnatgtacgcgggtgttggttggggggttttttcggttgagggaattgagatttaggnaaaaggttgttttnaaaaaatattaat

SEQ ID NO: 466 - DNA, 981 bp, Artificial Sequence
  chemically treated genomic DNA (Homo sapiens) CpG-island No: 466
  unsure (14, 28, 84, 141, 150, 161, 166, 173, 180, 187, 272, 323, 359)
  unsure (408, 545, 595, 604, 713, 834, 847, 851, 919, 933, 946)
attaatattttttnaaaacaaccttttncctaaatctcaattccctcaaccgaaaaaaccccccaaccaacacccgcgtacatnccgtaacgattcacaccgaaaacgataacgaacaccctaatctactccgccttctanccgaatctnaccccaaccgncgaanaccccancctcganaaccgancaacgccgccgcgacccacttaaaaacgaaaaaacgaacctaaaaaaactcgaccccgcgtaacgtcaacgcgcaccgcgacgtnataacgctctaattaccgcaaaaacgccccgcccccgcgcgacgctacganaaccgaaactccgaacgacgtcgacaacgacgcganaaaacgacgaaacccgaacgacaaaaaccgacgcgacgaccgcgacganaaacgacgaaaacgaaacaaaacacgacgaaaacgcacaaacaaccgaaccgaaccgaaccacgaaaaaaacgaccgacgaacaacgaacgaaaaaccgaacgaaccgcgaacaaccaccgaaccgcgaaacgacantaatactactcaaaaaataataaatatccgacgaccgtacgaaaacgaanaaaaaaaanaaaataaaaacgaccgccgaaacgacgacgcgacgaaaaacgcaaaacccgaataaacgaaaaaacaacaaaaacgaaaaatacctaaaacgaacccaacgaaaataanaaaaaatccgaaacgaacgacacgtaaaacgaaacccacgaaacacgaaaaaacgaccgaaacgtaaaaaaacgaccgaaacgtaaaaaaacaaccgaaacgttcgacatctaaaccgaanacccacgaaacantaanacgaacaaccgaaacataaaaaaacccacgaacacgaaaaaacaacccgaacgaacgactcctcaaancgccccgaaacctncgaaaacccaaantaaacccgaaaaaaaaccgaaaacaacgaaaacga

SEQ ID NO: 467 - DNA, 981 bp, Artificial Sequence
  chemically treated genomic DNA (Homo sapiens) CpG-island No: 467
  unsure (14, 28, 84, 141, 150, 161, 166, 173, 180, 187, 272, 323, 359)
  unsure (408, 545, 595, 604, 713, 834, 847, 851, 919, 933, 946)
attaatattttttngaaataattttttntttgggttttaatttttttaatcggggaggttttttagttagtattcgcgtgtatntcgtggcggtttatatcgaggacggtgacggatattttagtttgtttcgttttttgntcgggtttngttttagtcgncgggngttttantttcggnaatcgantagcgtcgtcgcggtttatttaaggacgggagggcgggtttgggaaggttcggtttcgcgtgacgttagcgcgtatcgcggcgtngtgacgttttggttgtcgtagagacgtttcgttttcgcgcggcgttgcggnaatcggagtttcgggcggcgtcggtagcggcgcgangaggcgacgaggttcgggcggtaggagtcggcgcggcgatcgcggcgangggcggcggggacggagtagagtacgacgaagacgtataggtagtcgggtcgggtcgggttacggggagagcggtcggcgggtagcgggcgggaggtcgggcgggtcgcgggtagttatcgagtcgcgaagcgatantggtgttgtttaaggagtagtgagtgttcggcggtcgtgcggaagcgggngaggagggnagggtggggacggtcgtcggggcgacggcgcggcgagggacgtagggttcggatggacggaggggtagtagggacggagggtgtttgaggcgggtttagcggggatggnaggggattcggggcgggcggtacgtgaggcggggtttacggggtacggaggggcggtcggggcgtggaggggcggtcggggcgtggaggggtagtcggggcgttcggtatttgagtcgggngtttacggggtantggnacgggtagtcggggtatggaggggtttacgggtacggagggataattcgggcggacggttttttaggncgtttcggggtttncggaggtttaagntggattcgaggagaggtcggggatagcgagggcga

SEQ ID NO: 468 - DNA, 981 bp, Artificial Sequence
  chemically treated genomic DNA (Homo sapiens) CpG-island No: 468
  unsure (36, 49, 63, 131, 135, 148, 269, 378, 387, 437, 574, 623, 659)
  unsure (710, 795, 802, 809, 816, 821, 832, 841, 898, 954, 968)
tcgccctcgctatccccgacctctcctcgaatccancttaaacctccgnaaaccccgaaacgncctaaaaaaccgtccgcccgaattatccctccgtacccgtaaacccctccataccccgactacccgtnccantaccccgtaaacncccgactcaaataccgaacgccccgactacccctccacgccccgaccgcccctccacgccccgaccgcccctccgtaccccgtaaaccccgcctcacgtaccgcccgccccgaatcccctnccatccccgctaaacccgcctcaaacaccctccgtccctactacccctccgtccatccgaaccctacgtccctcgccgcgccgtcgccccgacgaccgtccccaccctnccctcctcncccgcttccgcacgaccgccgaacactcactactccttaaacaacaccantatcgcttcgcgactcgataactacccgcgacccgcccgacctcccgcccgctacccgccgaccgctctccccgtaacccgacccgacccgactacctatacgtcttcgtcgtactctactccgtccccgccgcccntcgccgcgatcgccgcgccgactcctaccgcccgaacctcgtcgcctcntcgcgccgctaccgacgccgcccgaaactccgattnccgcaacgccgcgcgaaaacgaaacgtctctacgacaaccaaaacgtcacnacgccgcgatacgcgctaacgtcacgcgaaaccgaaccttcccaaacccgccctcccgtccttaaataaaccgcgacgacgctantcgattnccgaaantaaaacncccgncgactaaaacnaaacccgancaaaaaacgaaacaaactaaaatatccgtcaccgtcctcgatataaaccgccacganatacacgcgaatactaactaaaaaacctccccgattaaaaaaattaaaacccaaanaaaaaattatttcnaaaaaatattaat

SEQ ID NO: 469 - DNA, 606 bp, Artificial Sequence
  chemically treated genomic DNA (Homo sapiens) CpG-island No: 469
gtcgagtaacggtacgaggcgttgtaggtcgtcgggttcgcggttttggtttgtgtcgttggcgtttattagatagcgggcgaagcggttagggtttagcgaggttataagcggttttacgagcgttagcgtgttcgagcgttttatttcgcgttttatttttttgttagtcgttaatatcgttattgcgaggtaggcgtgtagcgaaagtagttcgttttttttggagaaggcgagcgggaagagttattcggttgcgcgtttttttattatgcgtcgttgtatcgtttggttttcgtgtagcgcgtagttgtttagcgttagcgcgtagtggcgtagtagcgcggggttcgtgcggcggtattaatatagtatcgcgtttaggtcgtcggtcgttattagtttttggtatgtttttttcgaatgtttgaatatgtgttttaagatgtttgatttatttcgcgttagttttacgggttcgcgttttttcgttaggtttaggattacgtttagtttaatgcgcgttacgcggtttttgtttagtgaaagtggaaggggatagtggaattgtcgtagtttggggagtttggtttgttcgtttggggt

SEQ ID NO: 470 - DNA, 606 bp, Artificial Sequence
  chemically treated genomic DNA (Homo sapiens) CpG-island No: 470
accccaaacgaacaaaccaaactccccaaactacgacaattccactatccccttccactttcactaaacaaaaaccgcgtaacgcgcattaaactaaacgtaatcctaaacctaacgaaaaaacgcgaacccgtaaaactaacgcgaaataaatcaaacatcttaaaacacatattcaaacattcgaaaaaaacataccaaaaactaataacgaccgacgacctaaacgcgatactatattaataccgccgcacgaaccccgcgctactacgccactacgcgctaacgctaaacaactacgcgctacacgaaaaccaaacgatacaacgacgcataataaaaaaacgcgcaaccgaataactcttcccgctcgccttctccaaaaaaaacgaactactttcgctacacgcctacctcgcaataacgatattaacgactaacaaaaaaataaaacgcgaaataaaacgctcgaacacgctaacgctcgtaaaaccgcttataacctcgctaaaccctaaccgcttcgcccgctatctaataaacgccaacgacacaaaccaaaaccgcgaacccgacgacctacaacgcctcgtaccgttactcgac

SEQ ID NO: 471 - DNA, 606 bp, Artificial Sequence
  chemically treated genomic DNA (Homo sapiens) CpG-island No: 471
gttttaaacgggtaagttaagttttttaagttgcggtaattttattgtttttttttatttttattgggtagagatcgcgtggcgcgtattgggttgggcgtgattttgaatttggcgaaggaacgcgaattcgtagagttggcgcggagtgggttaggtattttggagtatatgtttaagtattcggaggagatatgttagaggttggtggcggtcggcggtttggacgcggtgttgtattggtgtcgtcgtacggatttcgcgttgttgcgttattgcgcgttggcgttgggtaattgcgcgttgtacgggggttaggcggtgtagcgacgtatggtagagaagcgcgtagtcgagtggtttttttcgttcgttttttttaaggaggacgagttgttttcgttgtacgtttgtttcgtagtagcggtgttggcgattaataaggaggtggagcgcgaggtggagcgttcgggtacgttggcgttcgtggagtcgtttgtggtttcgttggattttggtcgtttcgttcgttgtttggtggacgttagcgatataagttagggtcgcgggttcgacgatttgtagcgtttcgtgtcgttgttcgat

SEQ ID NO: 472 - DNA, 606 bp, Artificial Sequence
  chemically treated genomic DNA (Homo sapiens) CpG-island No: 472
atcgaacaacgacacgaaacgctacaaatcgtcgaacccgcgaccctaacttatatcgctaacgtccaccaaacaacgaacgaaacgaccaaaatccaacgaaaccacaaacgactccacgaacgccaacgtacccgaacgctccacctcgcgctccacctccttattaatcgccaacaccgctactacgaaacaaacgtacaacgaaaacaactcgtcctccttaaaaaaaacgaacgaaaaaaaccactcgactacgcgcttctctaccatacgtcgctacaccgcctaacccccgtacaacgcgcaattacccaacgccaacgcgcaataacgcaacaacgcgaaatccgtacgacgacaccaatacaacaccgcgtccaaaccgccgaccgccaccaacctctaacatatctcctccgaatacttaaacatatactccaaaatacctaacccactccgcgccaactctacgaattcgcgttccttcgccaaattcaaaatcacgcccaacccaatacgcgccacgcgatctctacccaataaaaataaaaaaaaacaataaaattaccgcaacttaaaaaacttaacttacccgtttaaaac

SEQ ID NO: 473 - DNA, 672 bp, Artificial Sequence
  chemically treated genomic DNA (Homo sapiens) CpG-island No: 473
atattacgcggcgtttttttaatttcggtttggcgcgtttatcggtttttagttattaggatttgttttagtaggcgcgcggtttgtatacgcgtttttaatttcggcgtttgtagtagtcgtaatagtaggtcgaggtcgttatcgaggcggatggcgtcgtatagattttgggttatttcgcggtttacggtcgtagtagttaggttttttttattagttggaagatttcggttaggtcggcgtttacggttcgcgcgtcgttcgtttgttttagcgcggataaggtttgttgtagtttcggtagcgcgcgttttagggcgttttgtatttcggtgtttgttttcggcgatattttcgcgggttcgggttattcgtagtttattatgggttcgtgttatcgtttttatttggtttaggtatcgttagtcgttcggcgtttcgtcgtgggttcgatatggcgaagaagcgatatagtttgtaggcggagagaagtagcgttaggattatgggcgcggggtcgcgggggatattttcggtttggaggcggggttacgcggagagattcgggttttgggaaaagagggattcgagaggggtcggggaaagaagatggagggggaggaatggagagaagggtattaggtaagggtgtcggttagaagtttgggg

SEQ ID NO: 474 - DNA, 672 bp, Artificial Sequence
  chemically treated genomic DNA (Homo sapiens) CpG-island No: 474
ccccaaacttctaaccgacacccttacctaatacccttctctccattcctccccctccatcttctttccccgacccctctcgaatccctcttttcccaaaacccgaatctctccgcgtaaccccgcctccaaaccgaaaatatcccccgcgaccccgcgcccataatcctaacgctacttctctccgcctacaaactatatcgcttcttcgccatatcgaacccacgacgaaacgccgaacgactaacgatacctaaaccaaataaaaacgataacacgaacccataataaactacgaataacccgaacccgcgaaaatatcgccgaaaacaaacaccgaaatacaaaacgccctaaaacgcgcgctaccgaaactacaacaaaccttatccgcgctaaaacaaacgaacgacgcgcgaaccgtaaacgccgacctaaccgaaatcttccaactaataaaaaaaacctaactactacgaccgtaaaccgcgaaataacccaaaatctatacgacgccatccgcctcgataacgacctcgacctactattacgactactacaaacgccgaaattaaaaacgcgtatacaaaccgcgcgcctactaaaacaaatcctaataactaaaaaccgataaacgcgccaaaccgaaattaaaaaaacgccgcgtaatat

SEQ ID NO: 475 - DNA, 672 bp, Artificial Sequence
  chemically treated genomic DNA (Homo sapiens) CpG-island No: 475
ttttaaatttttgatcggtatttttgtttggtatttttttttttatttttttttttttatttttttttttcgatttttttcgggtttttttttttttaaaattcgggttttttcgcgtggtttcgtttttaggtcggggatgtttttcgcggtttcgcgtttatggttttgacgttgttttttttcgtttataagttgtgtcgttttttcgttatgtcgggtttacggcggggcgtcgagcggttggcggtgtttgggttagatgggggcggtggtacgggtttatggtgggttgcgggtggttcgggttcgcgaaagtgtcgtcgggggtaggtatcgaggtgtaggacgttttggagcgcgcgttgtcggagttgtagtaggttttgttcgcgttgaagtaggcgggcggcgcgcgggtcgtgggcgtcggtttggtcgaggttttttaattggtggaggaggtttggttgttgcggtcgtgggtcgcgaggtagtttagggtttgtgcgacgttattcgtttcgatggcggtttcgatttgttgttgcggttgttgtaggcgtcggagttggagacgcgtgtgtaggtcgcgcgtttgttggagtagattttggtggttgagaatcggtgagcgcgttaggtcggggttgggagagcgtcgcgtggtgt

SEQ ID NO: 476 - DNA, 672 bp, Artificial Sequence
  chemically treated genomic DNA (Homo sapiens) CpG-island No: 476
acaccacgcgacgctctcccaaccccgacctaacgcgctcaccgattctcaaccaccaaaatctactccaacaaacgcgcgacctacacacgcgtctccaactccgacgcctacaacaaccgcaacaacaaatcgaaaccgccatcgaaacgaataacgtcgcacaaaccctaaactacctcgcgacccacgaccgcaacaaccaaacctcctccaccaattaaaaaacctcgaccaaaccgacgcccacgacccgcgcgccgcccgcctacttcaacgcgaacaaaacctactacaactccgacaacgcgcgctccaaaacgtcctacacctcgatacctacccccgacgacactttcgcgaacccgaaccacccgcaacccaccataaacccgtaccaccgcccccatctaacccaaacaccgccaaccgctcgacgccccgccgtaaacccgacataacgaaaaaacgacacaacttataaacgaaaaaaaacaacgtcaaaaccataaacgcgaaaccgcgaaaaacatccccgacctaaaaacgaaaccacgcgaaaaaacccgaattttaaaaaaaaaaaaacccgaaaaaaatcgaaaaaaaaaaataaaaaaaaaaaaataaaaaaaaaaataccaaacaaaaataccgatcaaaaatttaaaa

SEQ ID NO: 477 - DNA, 579 bp, Artificial Sequence
  chemically treated genomic DNA (Homo sapiens) CpG-island No: 477
gcgcggttttaagttcggttcgtagttttcggggtagtcgttttggttttagtttttcgtcggggtttaaagtacgtattaatcgttcgttcgtaagtaaagaggacgttatatttagtcggtttttcggttaggtgattttaattcggattttcgttcgtcgcgcgtcggaagtaacgttaagcgtatcggaagttgttttgagtttcggggtgggattaggcgggttaagagggtcgggacgtcgcgcggggtagtgtgggattggggcggaatcgttcggtcgcgggtcgggttttgtgttagtagtcgggcgggcgttcgggcgggatatggtagtttgtatagttcggcggtttttggtcgtgggtagtcgttggtggtttcggtcgttgattggggttcggtggtaaagtcgttttgtgcggcggtcggagttggagttttttcgttagcgtcgattacgacgacgcggaggtatttttcgtttcggtgagggacggagttagggggcgcgaggaattgggtttggagtttagagagcgtgtttttagttagtgcggaggttaggggttcggg

SEQ ID NO: 478 - DNA, 579 bp, Artificial Sequence
  chemically treated genomic DNA (Homo sapiens) CpG-island No: 478
cccgaacccctaacctccgcactaactaaaaacacgctctctaaactccaaacccaattcctcgcgccccctaactccgtccctcaccgaaacgaaaaatacctccgcgtcgtcgtaatcgacgctaacgaaaaaactccaactccgaccgccgcacaaaacgactttaccaccgaaccccaatcaacgaccgaaaccaccaacgactacccacgaccaaaaaccgccgaactatacaaactaccatatcccgcccgaacgcccgcccgactactaacacaaaacccgacccgcgaccgaacgattccgccccaatcccacactaccccgcgcgacgtcccgaccctcttaacccgcctaatcccaccccgaaactcaaaacaacttccgatacgcttaacgttacttccgacgcgcgacgaacgaaaatccgaattaaaatcacctaaccgaaaaaccgactaaatataacgtcctctttacttacgaacgaacgattaatacgtactttaaaccccgacgaaaaactaaaaccaaaacgactaccccgaaaactacgaaccgaacttaaaaccgcgc

SEQ ID NO: 479 - DNA, 579 bp, Artificial Sequence
  chemically treated genomic DNA (Homo sapiens) CpG-island No: 479
ttcgggtttttggttttcgtattggttaggaatacgttttttgggttttaggtttagtttttcgcgttttttggtttcgttttttatcgggacgagaggtgttttcgcgtcgtcgtggtcgacgttggcgagaaggttttagtttcggtcgtcgtatagagcggttttgttatcgggttttagttagcgatcgggattattagcggttgtttacggttaggggtcgtcgggttgtataggttgttatgtttcgttcgagcgttcgttcggttgttgatatagagttcgattcgcggtcgggcggtttcgttttagttttatattgtttcgcgcggcgtttcggtttttttggttcgtttggttttatttcggagtttagagtaattttcggtgcgtttagcgttattttcggcgcgcggcgggcggaagttcgggttggggttatttgatcggagagtcggttagatatggcgttttttttgtttgcgggcgagcgattggtgcgtgttttgggtttcggcggggagttggagttagagcggttatttcgaaagttgcgggtcgagtttgaggtcgcgt

SEQ ID NO: 480 - DNA, 579 bp, Artificial Sequence
  chemically treated genomic DNA (Homo sapiens) CpG-island No: 480
acgcgacctcaaactcgacccgcaactttcgaaataaccgctctaactccaactccccgccgaaacccaaaacacgcaccaatcgctcgcccgcaaacaaaaaaaacgccatatctaaccgactctccgatcaaataaccccaacccgaacttccgcccgccgcgcgccgaaaataacgctaaacgcaccgaaaattactctaaactccgaaataaaaccaaacgaaccaaaaaaaccgaaacgccgcgcgaaacaatataaaactaaaacgaaaccgcccgaccgcgaatcgaactctatatcaacaaccgaacgaacgctcgaacgaaacataacaacctatacaacccgacgacccctaaccgtaaacaaccgctaataatcccgatcgctaactaaaacccgataacaaaaccgctctatacgacgaccgaaactaaaaccttctcgccaacgtcgaccacgacgacgcgaaaacacctctcgtcccgataaaaaacgaaaccaaaaaacgcgaaaaactaaacctaaaacccaaaaaacgtattcctaaccaatacgaaaaccaaaaacccgaa

SEQ ID NO: 481 - DNA, 502 bp, Artificial Sequence
  chemically treated genomic DNA (Homo sapiens) CpG-island No: 481
atacgaatcgtatatttcgagttgggttgtttcgtgggcgcgcgattcggttttagttgcgggtttcggtcgcgtattcgacgtcgtagtggaggttttcgagtcgtcgttagcgtcgcgacgggtaggggtgttcggttatttgtattaattcgaagatgtggttttttttttcgtattggggtatttcgggggggatacggtgcggggcgatagtggcgtttatgtagtcgtttcggttcgtcgttttttagtaatcgcgtcgttagggtcgtcgcgtcgattgcgttattagtacgcgtcgcggtttcgttttgtaggtttcgcgtcgggtttagatattcgattttcggtcgcgcgggtcgttttcgtttcgattttttcggttgacgcgttttgcggttcgggtaagttttttttttaatttcggtttcgttttttttatttgcgtattttagcgggggatatttttaggtggtttttagttgggttttttcgtatt

SEQ ID NO: 482 - DNA, 502 bp, Artificial Sequence
  chemically treated genomic DNA (Homo sapiens) CpG-island No: 482
aatacgaaaaaacccaactaaaaaccacctaaaaatatcccccgctaaaatacgcaaataaaaaaaacgaaaccgaaattaaaaaaaaaacttacccgaaccgcaaaacgcgtcaaccgaaaaaatcgaaacgaaaacgacccgcgcgaccgaaaatcgaatatctaaacccgacgcgaaacctacaaaacgaaaccgcgacgcgtactaataacgcaatcgacgcgacgaccctaacgacgcgattactaaaaaacgacgaaccgaaacgactacataaacgccactatcgccccgcaccgtatcccccccgaaataccccaatacgaaaaaaaaaaccacatcttcgaattaatacaaataaccgaacacccctacccgtcgcgacgctaacgacgactcgaaaacctccactacgacgtcgaatacgcgaccgaaacccgcaactaaaaccgaatcgcgcgcccacgaaacaacccaactcgaaatatacgattcgtat

SEQ ID NO: 483 - DNA, 502 bp, Artificial Sequence
  chemically treated genomic DNA (Homo sapiens) CpG-island No: 483
gatacgaggaggtttagttggaagttatttgagggtgtttttcgttaagatgcgtaaatgggaaaagcgaggtcggggttggggaaagaatttgttcgagtcgtagagcgcgttagtcggggaggtcggggcgggggcgattcgcgcgatcgaggatcgggtatttgggttcggcgcggagtttgtagggcggggtcgcggcgcgtgttgatgacgtagtcggcgcggcggttttagcgacgcggttattagggagcggcgagtcgagacggttatatggacgttattatcgtttcgtatcgtatttttttcgagatgttttagtacggggaggagaattatattttcgagttgatgtaggtgatcggatatttttgttcgtcgcgacgttggcggcggttcgggagtttttattgcgacgtcgggtgcgcggtcgggattcgtagttggggtcgagtcgcgcgtttacgaagtagtttaattcgggatgtacgattcgtgt

SEQ ID NO: 484 - DNA, 502 bp, Artificial Sequence
  chemically treated genomic DNA (Homo sapiens) CpG-island No: 484
acacgaatcgtacatcccgaattaaactacttcgtaaacgcgcgactcgaccccaactacgaatcccgaccgcgcacccgacgtcgcaataaaaactcccgaaccgccgccaacgtcgcgacgaacaaaaatatccgatcacctacatcaactcgaaaatataattctcctccccgtactaaaacatctcgaaaaaaatacgatacgaaacgataataacgtccatataaccgtctcgactcgccgctccctaataaccgcgtcgctaaaaccgccgcgccgactacgtcatcaacacgcgccgcgaccccgccctacaaactccgcgccgaacccaaatacccgatcctcgatcgcgcgaatcgcccccgccccgacctccccgactaacgcgctctacgactcgaacaaattctttccccaaccccgacctcgcttttcccatttacgcatcttaacgaaaaacaccctcaaataacttccaactaaacctcctcgtatc

SEQ ID NO: 485 - DNA, 695 bp, Artificial Sequence
  chemically treated genomic DNA (Homo sapiens) CpG-island No: 485
ttcggagcggttcgggcggtttgggtcgggatcggggtcgggggaggagttcgtaggtcgtatttggtcggcgaagttttcggtcgtgtttattaggtcgttttggtttatggcgacggcgggaggttcggttcggttcgttcgttcgttcgttggttttcgttcgtcggcgttcgtattcgttgcggtttttataggaagtgttcggcggtcggtttcgtttcgcgtcggttgcggttttagcggttgttacgtaggttaagttttaaaggggtcgcgcgtcgttcgggttcgtttcggtgcgttttaaaggggttacgcgttatttttagtttttcgatttattcgttcgaagttacgttcgtcgcgttcgacgttacgttttttacgttggaggtttcgttcgtcgcgcgtaggttttgcggtttttttcggttcggcggaacgcgttttttttaagggggcggggatttgggggtttggggttagcgcgcgggagggacgtttgagtgtttcgagggcgtcgttcgggcggggaggatttcgcgggttttattgatttacgcggggtggggttaggggtggacgttcgttcgtacgcggtcgttattgattatgtttgggttagggtttaatcgtaggcgttttacgtagggggagcgaggtttagggtttttcggagagtttatggagaa

SEQ ID NO: 486 - DNA, 695 bp, Artificial Sequence
  chemically treated genomic DNA (Homo sapiens) CpG-island No: 486
ttctccataaactctccgaaaaaccctaaacctcgctccccctacgtaaaacgcctacgattaaaccctaacccaaacataatcaataacgaccgcgtacgaacgaacgtccacccctaaccccaccccgcgtaaatcaataaaacccgcgaaatcctccccgcccgaacgacgccctcgaaacactcaaacgtccctcccgcgcgctaaccccaaacccccaaatccccgcccccttaaaaaaaacgcgttccgccgaaccgaaaaaaaccgcaaaacctacgcgcgacgaacgaaacctccaacgtaaaaaacgtaacgtcgaacgcgacgaacgtaacttcgaacgaataaatcgaaaaactaaaaataacgcgtaacccctttaaaacgcaccgaaacgaacccgaacgacgcgcgacccctttaaaacttaacctacgtaacaaccgctaaaaccgcaaccgacgcgaaacgaaaccgaccgccgaacacttcctataaaaaccgcaacgaatacgaacgccgacgaacgaaaaccaacgaacgaacgaacgaaccgaaccgaacctcccgccgtcgccataaaccaaaacgacctaataaacacgaccgaaaacttcgccgaccaaatacgacctacgaactcctcccccgaccccgatcccgacccaaaccgcccgaaccgctccgaa

SEQ ID NO: 487 - DNA, 695 bp, Artificial Sequence
  chemically treated genomic DNA (Homo sapiens) CpG-island No: 487
ttttttatgggtttttcgggggattttgggtttcgttttttttgcgtggggcgtttgcgattggattttggtttaagtatgattagtagcgatcgcgtacgggcgagcgtttatttttggttttatttcgcgtgggttagtgggattcgcgggatttttttcgttcgaacggcgttttcgaggtatttaggcgtttttttcgcgcgttggttttagatttttaggttttcgtttttttaaaagggacgcgtttcgtcgggtcgggagggatcgtagggtttgcgcgcggcgggcggggtttttagcgtgagaggcgtggcgtcgagcgcggcgggcgtggtttcgagcggatgggtcgggaggttggggatggcgcgtggtttttttaagacgtatcggggcgggttcgggcggcgcgcggtttttttaaggtttggtttacgtggtagtcgttggagtcgtagtcgacgcggagcgaggtcggtcgtcgggtattttttgtggaggtcgtagcgggtgcgggcgtcgacgggcgagagttagcgagcgagcgagcgagtcgagtcgagtttttcgtcgtcgttatgggttagaacgatttgatgggtacggtcgaggatttcgtcgattaggtgcggtttgcgggtttttttttcggtttcggtttcgatttaggtcgttcgggtcgtttcgga

SEQ ID NO: 488 - DNA, 695 bp, Artificial Sequence
  chemically treated genomic DNA (Homo sapiens) CpG-island No: 488
tccgaaacgacccgaacgacctaaatcgaaaccgaaaccgaaaaaaaaacccgcaaaccgcacctaatcgacgaaatcctcgaccgtacccatcaaatcgttctaacccataacgacgacgaaaaactcgactcgactcgctcgctcgctcgctaactctcgcccgtcgacgcccgcacccgctacgacctccacaaaaaatacccgacgaccgacctcgctccgcgtcgactacgactccaacgactaccacgtaaaccaaaccttaaaaaaaccgcgcgccgcccgaacccgccccgatacgtcttaaaaaaaccacgcgccatccccaacctcccgacccatccgctcgaaaccacgcccgccgcgctcgacgccacgcctctcacgctaaaaaccccgcccgccgcgcgcaaaccctacgatccctcccgacccgacgaaacgcgtcccttttaaaaaaacgaaaacctaaaaatctaaaaccaacgcgcgaaaaaaacgcctaaatacctcgaaaacgccgttcgaacgaaaaaaatcccgcgaatcccactaacccacgcgaaataaaaccaaaaataaacgctcgcccgtacgcgatcgctactaatcatacttaaaccaaaatccaatcgcaaacgccccacgcaaaaaaaacgaaacccaaaatcccccgaaaaacccataaaaaa

SEQ ID NO: 489 - DNA, 528 bp, Artificial Sequence
  chemically treated genomic DNA (Homo sapiens) CpG-island No: 489
ggggttgttcggggcgcgtttggaggcggggattttcgttttttttattttgttgtcgtttagcgtttgggtcggcggttattcgagatttcggttttttcgggttcggcgttttggtagtataagcgtttgtttaggttagttcgaaatatatttatcgtagggatttcgtttaggaaaagatttcggaagagatttcgtacgcgttgcgtatattttagtacgtacgttttagttttcggaagcgttcgtttttttataatcggttggaaatcggatttttgtttttggtttcgcgtagtttgggcggtttattcgtacgggatttgggtcgtcgttttagttagcggtattcggggttatcgatttcgagtttgattggggtaagtcgaggatttttttaagattcgggatggggatgagagatgcgaacgtcggaagggaattggggggtcgttgtgtgtgtagtattcggtagggtagttgagttgggggtattgggcggtggggttagtgagagtcgggtta

SEQ ID NO: 490 - DNA, 528 bp, Artificial Sequence
  chemically treated genomic DNA (Homo sapiens) CpG-island No: 490
taacccgactctcactaaccccaccgcccaatacccccaactcaactaccctaccgaatactacacacacaacgaccccccaattcccttccgacgttcgcatctctcatccccatcccgaatcttaaaaaaatcctcgacttaccccaatcaaactcgaaatcgataaccccgaataccgctaactaaaacgacgacccaaatcccgtacgaataaaccgcccaaactacgcgaaaccaaaaacaaaaatccgatttccaaccgattataaaaaaacgaacgcttccgaaaactaaaacgtacgtactaaaatatacgcaacgcgtacgaaatctcttccgaaatcttttcctaaacgaaatccctacgataaatatatttcgaactaacctaaacaaacgcttatactaccaaaacgccgaacccgaaaaaaccgaaatctcgaataaccgccgacccaaacgctaaacgacaacaaaataaaaaaaacgaaaatccccgcctccaaacgcgccccgaacaacccc

SEQ ID NO: 491 - DNA, 528 bp, Artificial Sequence
  chemically treated genomic DNA (Homo sapiens) CpG-island No: 491
tagttcggtttttattagttttatcgtttagtgtttttagtttagttgttttatcgggtgttatatatatagcggttttttagttttttttcggcgttcgtattttttatttttatttcggattttggggaggttttcggtttgttttagttaaattcgaggtcgatgatttcggatgtcgttggttaaggcggcggtttaagtttcgtgcgggtgaatcgtttaggttgcgcggaattagaggtagggattcggtttttagtcggttgtggagagacgagcgttttcggggattggagcgtgcgtgttgaggtatgcgtaacgcgtgcggggtttttttcggagtttttttttggacggggtttttgcggtgggtgtgtttcggattggtttgggtaggcgtttgtgttgttagggcgtcgggttcggggaggtcggggtttcgggtggtcgtcggtttaggcgttggacggtagtaggatggggaaggcgaaggttttcgtttttaagcgcgtttcgagtagtttt

SEQ ID NO: 492 - DNA, 528 bp, Artificial Sequence
  chemically treated genomic DNA (Homo sapiens) CpG-island No: 492
aaaactactcgaaacgcgcttaaaaacgaaaaccttcgccttccccatcctactaccgtccaacgcctaaaccgacgaccacccgaaaccccgacctccccgaacccgacgccctaacaacacaaacgcctacccaaaccaatccgaaacacacccaccgcaaaaaccccgtccaaaaaaaaactccgaaaaaaaccccgcacgcgttacgcatacctcaacacgcacgctccaatccccgaaaacgctcgtctctccacaaccgactaaaaaccgaatccctacctctaattccgcgcaacctaaacgattcacccgcacgaaacttaaaccgccgccttaaccaacgacatccgaaatcatcgacctcgaatttaactaaaacaaaccgaaaacctccccaaaatccgaaataaaaataaaaaatacgaacgccgaaaaaaaactaaaaaaccgctatatatataacacccgataaaacaactaaactaaaaacactaaacgataaaactaataaaaaccgaacta

SEQ ID NO: 493 - DNA, 807 bp, Artificial Sequence
  chemically treated genomic DNA (Homo sapiens) CpG-island No: 493
gggcgtacgcgattttttttattgcgtttagttagtagatggcggcgttaggggtcgattcgggtcggaaaaatttttggcgttgcggtattagggcgtcgggtcgttgattcgtcgattttcgtttcgtttttattttcgttttcgttttgtcggtcgttttagcgtaatttttcgtttttcgattagtttcggtttggagtacgacggcgcgttcggtagcggttgcggttttagcggatacgtgatggtttcggaacggcgtcgtttcgcgtcggtttcgtttggtttttttgtagtcgtcggtagttgttgagtttgtttaggtagcggtcgtttcgtgggaggggcgcgcgagtttttagtttagttcgttgggcgcgttagcgttatttttttttacgttcgtttttacgttcgttattgtaggttttttttttttgttttattttttttcgtttaatttagttttttcgtttaatttcgcgtttatcgttttcgttcgtggaggggcgggcgcgcgacgttttgtagttagttcgttggggcgtttcgcgttatttttttttaggttcgtttttatttttttttacgtcggtttttattcggtatttagttttttttcgggtcgtatttgtttatcgtgatttattttttcgtttaatttcgcgtttatagttcggttttatttcgttgcgtttaattttgcgtttattttttcgttttaattcgtgtatttattttttcgttttatttatttgttttattttttgtattttttttcgtgttgttttattgtgcggttat

SEQ ID NO: 494 - DNA, 807 bp, Artificial Sequence
  chemically treated genomic DNA (Homo sapiens) CpG-island No: 494
ataaccgcacaataaaacaacacgaaaaaaaatacaaaaaataaaacaaataaataaaacgaaaaaataaatacacgaattaaaacgaaaaaataaacgcaaaattaaacgcaacgaaataaaaccgaactataaacgcgaaattaaacgaaaaaataaatcacgataaacaaatacgacccgaaaaaaaactaaataccgaataaaaaccgacgtaaaaaaaaataaaaacgaacctaaaaaaaaataacgcgaaacgccccaacgaactaactacaaaacgtcgcgcgcccgcccctccacgaacgaaaacgataaacgcgaaattaaacgaaaaaactaaattaaacgaaaaaaaataaaacaaaaaaaaaaaacctacaataacgaacgtaaaaacgaacgtaaaaaaaaataacgctaacgcgcccaacgaactaaactaaaaactcgcgcgcccctcccacgaaacgaccgctacctaaacaaactcaacaactaccgacgactacaaaaaaaccaaacgaaaccgacgcgaaacgacgccgttccgaaaccatcacgtatccgctaaaaccgcaaccgctaccgaacgcgccgtcgtactccaaaccgaaactaatcgaaaaacgaaaaattacgctaaaacgaccgacaaaacgaaaacgaaaataaaaacgaaacgaaaatcgacgaatcaacgacccgacgccctaataccgcaacgccaaaaatttttccgacccgaatcgacccctaacgccgccatctactaactaaacgcaataaaaaaaatcgcgtacgccc

SEQ ID NO: 495 - DNA, 807 bp, Artificial Sequence
  chemically treated genomic DNA (Homo sapiens) CpG-island No: 495
gtggtcgtatagtgggatagtacggggggaggtgtagggggtggggtaggtgggtgggacgggggggtgggtgtacgggttgggacggaggggtgggcgtaggattgggcgtagcggggtgggatcgaattgtgggcgcggggttggacggaagaatgggttacgatggataggtacgattcgaaggagggttgaatgtcgagtggggatcgacgtagggagaggtggggacggatttagggaggggtggcgcggggcgttttagcgggttggttgtaaggcgtcgcgcgttcgtttttttacggacggaggcggtgggcgcggggttggacggaggggttgggttggacgggaggggatgggataggaaggaagggtttgtaatgacggacgtggggacggacgtagagagaggtggcgttggcgcgtttagcgggttggattggaggttcgcgcgttttttttacggggcggtcgttatttgagtaggtttagtagttgtcggcggttgtagggggattaggcgaggtcggcgcggggcggcgtcgtttcgaagttattacgtgttcgttggggtcgtagtcgttgtcgggcgcgtcgtcgtgttttaggtcgaagttggtcggggggcggggagttgcgttaaggcggtcggtagggcgggggcgggggtgggggcgggacgggggtcggcgagttagcggttcggcgttttagtgtcgtagcgttagaagttttttcgattcgggtcgatttttgacgtcgttatttgttaattgggcgtagtggagagggtcgcgtgcgttt

SEQ ID NO: 496 - DNA, 807 bp, Artificial Sequence
  chemically treated genomic DNA (Homo sapiens) CpG-island No: 496
aaacgcacgcgaccctctccactacgcccaattaacaaataacgacgtcaaaaatcgacccgaatcgaaaaaacttctaacgctacgacactaaaacgccgaaccgctaactcgccgacccccgtcccgcccccacccccgcccccgccctaccgaccgccttaacgcaactccccgccccccgaccaacttcgacctaaaacacgacgacgcgcccgacaacgactacgaccccaacgaacacgtaataacttcgaaacgacgccgccccgcgccgacctcgcctaatccccctacaaccgccgacaactactaaacctactcaaataacgaccgccccgtaaaaaaaacgcgcgaacctccaatccaacccgctaaacgcgccaacgccacctctctctacgtccgtccccacgtccgtcattacaaacccttccttcctatcccatcccctcccgtccaacccaacccctccgtccaaccccgcgcccaccgcctccgtccgtaaaaaaacgaacgcgcgacgccttacaaccaacccgctaaaacgccccgcgccacccctccctaaatccgtccccacctctccctacgtcgatccccactcgacattcaaccctccttcgaatcgtacctatccatcgtaacccattcttccgtccaaccccgcgcccacaattcgatcccaccccgctacgcccaatcctacgcccacccctccgtcccaacccgtacacccacccccccgtcccacccacctaccccaccccctacacctccccccgtactatcccactatacgaccac

SEQ ID NO: 497 - DNA, 1594 bp, Artificial Sequence
  chemically treated genomic DNA (Homo sapiens) CpG-island No: 497
ttcgggttcgggaagaggcggaggtcggcgagggggcggtgttcggggttaatttagtttttttcggtttcgagggttttcgtttcgcgtttttttcgggttttttagtcgcgtttcgggtcggcgtagcgatcgcgttcgtttttttatcggcgttcggttaggaggcgcgaggtttaaggatgcgatttacgacgcgtatattcggttcggtaggttttttgggaaatgaggggttattcgtagggtttcgtagagcgagcgtagcgtcggagttttttttattttaggtcgcgtagatcgcggaatcggcgtattagagtagtgttcgcgggcggcggcggcgcgatttaggttgaggggattttggttaatttcgcgttttttgaggtcgcgtttcggaggttcggggcgtattttttagtcgttcgttcgcgtttcggagttcggtcgttttagttagggcgtttgggtcgtcgtcgttgcgattttcgcgtttagttcgcgcgtcgggtagcgcgaacgtcgttttttcggggttttttcgttcgtcgggcgtttatttgggatatttgcggtcggaagttgatgtttttgaggtcgatggagtcgggggagaggttgtgtagtagttggtatagaaggatttcgtcgcgtagcgtttgcgttaggtcgaagattacggtcgagggttatattattcggtggttgggcggtaggattttgtaatcgatgagttagcggtcgtattgtcgttattgttttatggcgttcgcgggttcgatcggtttagggtagtgttcgagttaaagtgtagcggtcgcggggtatttcgttcgcgcgcgcgcggggtttagggtcggggcggggtttcgcgcgggttgttttaggtttttcgttgcgtcgtcgtgcgtttttttttttttttttttttatttttcgggtttttttcgggtcgtcgttttcgtttacgtgcggtcgcggggcgggtaacgggtagcgcgtcggattttttcgttttatatacgtaagtgtttgcgggtttcgggtcgggttttacgtagttagtcgtcgtagcgttttttaattcgcgtcgtcgggcgtcgtattttgcgttcggggcgtttcgcggtcgtcgcggtttttgtttcgttcgagataaaggttcggcggggtcgttcgtttcgcgcgtttcgggtttgggtcgttcgcgtcgtcgtcgttttgttcgttttattcgtagtttttacgttcggcgttgcgattcgacgattcggcggttcggcggttttacggtttcggggcgttgggggcgtagggggcgcggttacggtcgggcggggtaggggcggggtcggagtattcgtttggtattttttcgtgttttaagcgtcgttttcgtttttttattttttgtttcgttatcgttcgcgaaagttgcggtgggcgggggttgcggcgtaggtttaggttcggtcgattttttttaagggcgttcggattttggggagtttttttttttgggggagcgatttcgttcgtggagtgatggtcgggcgttttttcgggtgtttttggtttttcgtggaggtta

SEQ ID NO: 498 - DNA, 1594 bp, Artificial Sequence
  chemically treated genomic DNA (Homo sapiens) CpG-island No: 498
taacctccacgaaaaaccaaaaacacccgaaaaaacgcccgaccatcactccacgaacgaaatcgctcccccaaaaaaaaaaactccccaaaatccgaacgcccttaaaaaaaatcgaccgaacctaaacctacgccgcaacccccgcccaccgcaactttcgcgaacgataacgaaacaaaaaataaaaaaacgaaaacgacgcttaaaacacgaaaaaataccaaacgaatactccgaccccgcccctaccccgcccgaccgtaaccgcgccccctacgcccccaacgccccgaaaccgtaaaaccgccgaaccgccgaatcgtcgaatcgcaacgccgaacgtaaaaactacgaataaaacgaacaaaacgacgacgacgcgaacgacccaaacccgaaacgcgcgaaacgaacgaccccgccgaacctttatctcgaacgaaacaaaaaccgcgacgaccgcgaaacgccccgaacgcaaaatacgacgcccgacgacgcgaattaaaaaacgctacgacgactaactacgtaaaacccgacccgaaacccgcaaacacttacgtatataaaacgaaaaaatccgacgcgctacccgttacccgccccgcgaccgcacgtaaacgaaaacgacgacccgaaaaaaacccgaaaaataaaaaaaaaaaaaaaaaaaaacgcacgacgacgcaacgaaaaacctaaaacaacccgcgcgaaaccccgccccgaccctaaaccccgcgcgcgcgcgaacgaaataccccgcgaccgctacactttaactcgaacactaccctaaaccgatcgaacccgcgaacgccataaaacaataacgacaatacgaccgctaactcatcgattacaaaatcctaccgcccaaccaccgaataatataaccctcgaccgtaatcttcgacctaacgcaaacgctacgcgacgaaatccttctataccaactactacacaacctctcccccgactccatcgacctcaaaaacatcaacttccgaccgcaaatatcccaaataaacgcccgacgaacgaaaaaaccccgaaaaaacgacgttcgcgctacccgacgcgcgaactaaacgcgaaaatcgcaacgacgacgacccaaacgccctaactaaaacgaccgaactccgaaacgcgaacgaacgactaaaaaatacgccccgaacctccgaaacgcgacctcaaaaaacgcgaaattaaccaaaatcccctcaacctaaatcgcgccgccgccgcccgcgaacactactctaatacgccgattccgcgatctacgcgacctaaaataaaaaaaactccgacgctacgctcgctctacgaaaccctacgaataacccctcatttcccaaaaaacctaccgaaccgaatatacgcgtcgtaaatcgcatccttaaacctcgcgcctcctaaccgaacgccgataaaaaaacgaacgcgatcgctacgccgacccgaaacgcgactaaaaaacccgaaaaaaacgcgaaacgaaaaccctcgaaaccgaaaaaaactaaattaaccccgaacaccgccccctcgccgacctccgcctcttcccgaacccgaa

SEQ ID NO: 499 - DNA, 1594 bp, Artificial Sequence
  chemically treated genomic DNA (Homo sapiens) CpG-island No: 499
tgatttttacggaggattaaaggtattcggggggacgttcggttattattttacgggcgaggtcgtttttttagggagaagggttttttaaagttcgagcgtttttggagaaagtcggtcggatttgggtttgcgtcgtaattttcgtttatcgtaattttcgcgggcggtagcggggtaggaagtgggggggcgggggcggcgtttgggatacggggaggtgttaggcgagtgtttcggtttcgtttttgtttcgttcggtcgtggtcgcgttttttgcgtttttagcgtttcggagtcgtggagtcgtcgagtcgtcgagtcgtcgagtcgtagcgtcgggcgtggggattgcgggtggggcgaataaagcggcggcgacgcgggcggtttaggttcgggacgcgcggagcgagcgatttcgtcgggtttttgtttcgggcggggtaggagtcgcggcggtcgcggggcgtttcgagcgtagaatgcggcgttcggcggcgcggattggggagcgttgcggcgattggttgcgtggagttcggttcggggttcgtaggtatttgcgtgtgtgaagcggggagattcggcgcgttgttcgttgttcgtttcgcggtcgtacgtgggcgggagcggcggttcgagaggagttcgaggagtaggaggaggaagaggaggggacgtacggcggcgtagcgggggatttggggtagttcgcgcgaagtttcgtttcggttttgagtttcgcgcgcgcgcgggcgggatgtttcgcggtcgttgtattttggttcgagtattgttttgagtcggtcgggttcgcgggcgttatggagtagtggcggtagtgcggtcgttggtttatcgattgtaaggttttgtcgtttaattatcgggtggtgtggttttcggtcgtggttttcgatttggcgtaggcgttgcgcgacggggtttttttgtgttagttgttgtataatttttttttcggttttatcgattttaaggatattaattttcggtcgtagatgttttaggtgagcgttcggcgggcgggagggtttcggggaggcggcgttcgcgttgttcgacgcgcggattgaacgcggaggtcgtagcggcggcggtttaggcgttttggttggggcggtcgggtttcgggacgcgggcgggcggttggagggtgcgtttcgggttttcgagacgcgattttaggaggcgcgaagttggttaaagtttttttagtttgggtcgcgtcgtcgtcgttcgcgggtattgttttggtgcgtcggtttcgcggtttgcgcggtttgggatgggggaggtttcggcgttgcgttcgttttgcggggttttgcgagtggttttttattttttagggagtttgtcgagtcgggtgtgcgcgtcgtgggtcgtatttttgggtttcgcgttttttggtcggacgtcggtggaagagcgggcgcggtcgttgcgtcggttcggggcgcggttggagggttcgggaggggcgcggggcgggagttttcggggtcggagggagttgggttggtttcgggtatcgttttttcgtcggttttcgttttttttcggattcgga

SEQ ID NO: 500 - DNA, 1594 bp, Artificial Sequence
  chemically treated genomic DNA (Homo sapiens) CpG-island No: 500
tccgaatccgaaaaaaaacgaaaaccgacgaaaaaacgatacccgaaaccaacccaactccctccgaccccgaaaactcccgccccgcgcccctcccgaaccctccaaccgcgccccgaaccgacgcaacgaccgcgcccgctcttccaccgacgtccgaccaaaaaacgcgaaacccaaaaatacgacccacgacgcgcacacccgactcgacaaactccctaaaaaataaaaaaccactcgcaaaaccccgcaaaacgaacgcaacgccgaaacctcccccatcccaaaccgcgcaaaccgcgaaaccgacgcaccaaaacaatacccgcgaacgacgacgacgcgacccaaactaaaaaaactttaaccaacttcgcgcctcctaaaatcgcgtctcgaaaacccgaaacgcaccctccaaccgcccgcccgcgtcccgaaacccgaccgccccaaccaaaacgcctaaaccgccgccgctacgacctccgcgttcaatccgcgcgtcgaacaacgcgaacgccgcctccccgaaaccctcccgcccgccgaacgctcacctaaaacatctacgaccgaaaattaatatccttaaaatcgataaaaccgaaaaaaaaattatacaacaactaacacaaaaaaaccccgtcgcgcaacgcctacgccaaatcgaaaaccacgaccgaaaaccacaccacccgataattaaacgacaaaaccttacaatcgataaaccaacgaccgcactaccgccactactccataacgcccgcgaacccgaccgactcaaaacaatactcgaaccaaaatacaacgaccgcgaaacatcccgcccgcgcgcgcgcgaaactcaaaaccgaaacgaaacttcgcgcgaactaccccaaatcccccgctacgccgccgtacgtcccctcctcttcctcctcctactcctcgaactcctctcgaaccgccgctcccgcccacgtacgaccgcgaaacgaacaacgaacaacgcgccgaatctccccgcttcacacacgcaaatacctacgaaccccgaaccgaactccacgcaaccaatcgccgcaacgctccccaatccgcgccgccgaacgccgcattctacgctcgaaacgccccgcgaccgccgcgactcctaccccgcccgaaacaaaaacccgacgaaatcgctcgctccgcgcgtcccgaacctaaaccgcccgcgtcgccgccgctttattcgccccacccgcaatccccacgcccgacgctacgactcgacgactcgacgactcgacgactccacgactccgaaacgctaaaaacgcaaaaaacgcgaccacgaccgaacgaaacaaaaacgaaaccgaaacactcgcctaacacctccccgtatcccaaacgccgcccccgcccccccacttcctaccccgctaccgcccgcgaaaattacgataaacgaaaattacgacgcaaacccaaatccgaccgactttctccaaaaacgctcgaactttaaaaaacccttctccctaaaaaaacgacctcgcccgtaaaataataaccgaacgtccccccgaatacctttaatcctccgtaaaaatca

SEQ ID NO: 501 - DNA, 503 bp, Artificial Sequence
  chemically treated genomic DNA (Homo sapiens) CpG-island No: 501
tttgggttcgtcgtatacgtttgtttagtttttgcgttcggttcgttaggtttgcggcgttgttatggagatacggtttagcggtcgtcggtttcgttttgggagtttcgtagtgcgtcgcgtcgttgttcgtattttcgaggttcgcgacgagcggtgattggggcgggcgacgtgggggattcggggatgcgggtagacgatagggggttggaggatggggcgatttagagcgcgcggggtttggggcgcggggatgggggtcgcgggttacgcgacggggattttagggtgcgcgtaggtggcggggacgcgcgatgggggttcgggaagttgaggttgatttagcgtaggtattttaggaggggaggtttttgacgttgcgtagttgggaaggcgttcgggagtgggttgcgatgtttttttgtttgtttttttttgatatcgtttttgtttgggtttaggggttttacgggagttggatgttcggagtagtaaggcgg

SEQ ID NO: 502 - DNA, 503 bp, Artificial Sequence
  chemically treated genomic DNA (Homo sapiens) CpG-island No: 502
ccgccttactactccgaacatccaactcccgtaaaacccctaaacccaaacaaaaacgatatcaaaaaaaaacaaacaaaaaaacatcgcaacccactcccgaacgccttcccaactacgcaacgtcaaaaacctcccctcctaaaatacctacgctaaatcaacctcaacttcccgaacccccatcgcgcgtccccgccacctacgcgcaccctaaaatccccgtcgcgtaacccgcgacccccatccccgcgccccaaaccccgcgcgctctaaatcgccccatcctccaaccccctatcgtctacccgcatccccgaatcccccacgtcgcccgccccaatcaccgctcgtcgcgaacctcgaaaatacgaacaacgacgcgacgcactacgaaactcccaaaacgaaaccgacgaccgctaaaccgtatctccataacaacgccgcaaacctaacgaaccgaacgcaaaaactaaacaaacgtatacgacgaacccaaa

SEQ ID NO: 503 - DNA, 503 bp, Artificial Sequence
  chemically treated genomic DNA (Homo sapiens) CpG-island No: 503
tcgttttgttgtttcgagtatttagttttcgtgaggtttttggatttaaataaaaacgatgttaggagaaaataaatagggaagtatcgtaatttattttcgaacgtttttttagttgcgtagcgttagggatttttttttttgggatgtttgcgttaggttagttttagtttttcgggtttttatcgcgcgttttcgttatttgcgcgtattttggggttttcgtcgcgtggttcgcggtttttattttcgcgttttagatttcgcgcgttttgggtcgttttattttttagttttttatcgtttgttcgtattttcgggttttttacgtcgttcgttttagttatcgttcgtcgcgggtttcggagatgcgggtagcggcgcgacgtattgcggggtttttagggcggggtcggcggtcgttgggtcgtgtttttatggtagcgtcgtaggtttggcgagtcgagcgtagaggttgggtaggcgtgtgcgacgagtttaag

SEQ ID NO: 504 - DNA, 503 bp, Artificial Sequence
  chemically treated genomic DNA (Homo sapiens) CpG-island No: 504
cttaaactcgtcgcacacgcctacccaacctctacgctcgactcgccaaacctacgacgctaccataaaaacacgacccaacgaccgccgaccccgccctaaaaaccccgcaatacgtcgcgccgctacccgcatctccgaaacccgcgacgaacgataactaaaacgaacgacgtaaaaaacccgaaaatacgaacaaacgataaaaaactaaaaaataaaacgacccaaaacgcgcgaaatctaaaacgcgaaaataaaaaccgcgaaccacgcgacgaaaaccccaaaatacgcgcaaataacgaaaacgcgcgataaaaacccgaaaaactaaaactaacctaacgcaaacatcccaaaaaaaaaaatccctaacgctacgcaactaaaaaaacgttcgaaaataaattacgatacttccctatttattttctcctaacatcgtttttatttaaatccaaaaacctcacgaaaactaaatactcgaaacaacaaaacga

SEQ ID NO: 505 - DNA, 844 bp, Artificial Sequence
  chemically treated genomic DNA (Homo sapiens) CpG-island No: 505
gtggtcgttcggtttcggcgttttggggcgggggttttttttcggagggtcggtttcgtcgggtgtgcggttgcgggcggggaagggattgtttttgtagtcgggacgggattttgcgcgcggtcgggtgtcgggcggggggcgtagaggggtggtttcggggatcgcgcgggggtagcgggtgtgcgggtgtttggagcgcggttggagtggcggtgacggttttggtcgtcgtcgttatcgtcgttttgttggtgcggtcgttttttgattatgtgtagcggtagtcgtcgttcggagtcgggagttcgcgagcgttttagttcgggtcggcgttttcgttagtattcgcggtaggagacgaggagtcgcggtaggcgttgttttgagtcgggagtgaacggttgcgcggttgttgggagggtgaatgaagttaggaggaggaggaggagcggcggtcgtcgcggaggaggcgttgcggggattgggatgcgttttggagttttattgttcgtttattttgggtcgggtcggagattttgttattttcgggggcgtcgtcgtttttttttacgtggttttagtgttgcgcgtaggtcggtttcgtagggggtagggaagggggtcggacgggcggagcgagaggtgaggcggtgtcggagcgcggcgtgagtgtgagtgagtgtgtgagtgattgtgtgtgtgtatttgtgcgcgcgcgcgtcgggcggggggcgagggtcgtcgcgacgcggagggggtttttttttggttatttggttgattttgtagcgtttcgatttttttttagtttttcgtttttaggttgtttttttaaatttcg

SEQ ID NO: 506 - DNA, 844 bp, Artificial Sequence
  chemically treated genomic DNA (Homo sapiens) CpG-island No: 506
cgaaatttaaaaaaacaacctaaaaacgaaaaactaaaaaaaaatcgaaacgctacaaaatcaaccaaataaccaaaaaaaaaccccctccgcgtcgcgacgaccctcgccccccgcccgacgcgcgcgcgcacaaatacacacacacaatcactcacacactcactcacactcacgccgcgctccgacaccgcctcacctctcgctccgcccgtccgacccccttccctaccccctacgaaaccgacctacgcgcaacactaaaaccacgtaaaaaaaaacgacgacgcccccgaaaataacaaaatctccgacccgacccaaaataaacgaacaataaaactccaaaacgcatcccaatccccgcaacgcctcctccgcgacgaccgccgctcctcctcctcctcctaacttcattcaccctcccaacaaccgcgcaaccgttcactcccgactcaaaacaacgcctaccgcgactcctcgtctcctaccgcgaatactaacgaaaacgccgacccgaactaaaacgctcgcgaactcccgactccgaacgacgactaccgctacacataatcaaaaaacgaccgcaccaacaaaacgacgataacgacgacgaccaaaaccgtcaccgccactccaaccgcgctccaaacacccgcacacccgctacccccgcgcgatccccgaaaccacccctctacgccccccgcccgacacccgaccgcgcgcaaaatcccgtcccgactacaaaaacaatcccttccccgcccgcaaccgcacacccgacgaaaccgaccctccgaaaaaaaacccccgccccaaaacgccgaaaccgaacgaccac

SEQ ID NO: 507 - DNA, 844 bp, Artificial Sequence
  chemically treated genomic DNA (Homo sapiens) CpG-island No: 507
cggagtttaagaaggtagtttgaaggcggggggttgaagaggggtcggggcgttgtagagttagttaagtagttaaggaagggtttttttcgcgtcgcgacggttttcgtttttcgttcggcgcgcgcgcgtataaatatatatatatagttatttatatatttatttatatttacgtcgcgtttcgatatcgttttatttttcgtttcgttcgttcggtttttttttttgttttttgcgggatcggtttgcgcgtagtattggaattacgtaggaggaggcggcggcgttttcgggagtggtagagttttcggttcggtttagagtgaacgagtagtggggttttagggcgtattttaattttcgtagcgtttttttcgcggcggtcgtcgtttttttttttttttttggttttatttatttttttagtagtcgcgtagtcgtttattttcggtttagggtagcgtttgtcgcggtttttcgttttttgtcgcgggtgttggcgggggcgtcggttcggattggggcgttcgcgggttttcggtttcgggcggcggttgtcgttgtatatgattaggaagcggtcgtattaatagggcggcggtggcggcggcggttagggtcgttatcgttattttagtcgcgttttaggtattcgtatattcgttattttcgcgcggttttcgaggttatttttttgcgtttttcgttcggtattcggtcgcgcgtaaagtttcgtttcggttgtaggagtagtttttttttcgttcgtagtcgtatattcggcgaggtcggtttttcgaggggagattttcgttttagggcgtcgaggtcgggcgattat

SEQ ID NO: 508 - DNA, 844 bp, Artificial Sequence
  chemically treated genomic DNA (Homo sapiens) CpG-island No: 508
ataatcgcccgacctcgacgccctaaaacgaaaatctcccctcgaaaaaccgacctcgccgaatatacgactacgaacgaaaaaaaaactactcctacaaccgaaacgaaactttacgcgcgaccgaataccgaacgaaaaacgcaaaaaaataacctcgaaaaccgcgcgaaaataacgaatatacgaatacctaaaacgcgactaaaataacgataacgaccctaaccgccgccgccaccgccgccctattaatacgaccgcttcctaatcatatacaacgacaaccgccgcccgaaaccgaaaacccgcgaacgccccaatccgaaccgacgcccccgccaacacccgcgacaaaaaacgaaaaaccgcgacaaacgctaccctaaaccgaaaataaacgactacgcgactactaaaaaaataaataaaaccaaaaaaaaaaaaaaaaacgacgaccgccgcgaaaaaaacgctacgaaaattaaaatacgccctaaaaccccactactcgttcactctaaaccgaaccgaaaactctaccactcccgaaaacgccgccgcctcctcctacgtaattccaatactacgcgcaaaccgatcccgcaaaaaacaaaaaaaaaaaccgaacgaacgaaacgaaaaataaaacgatatcgaaacgcgacgtaaatataaataaatatataaataactatatatatatatttatacgcgcgcgcgccgaacgaaaaacgaaaaccgtcgcgacgcgaaaaaaacccttccttaactacttaactaactctacaacgccccgacccctcttcaaccccccgccttcaaactaccttcttaaactccg

SEQ ID NO: 509 - DNA, 512 bp, Artificial Sequence
  chemically treated genomic DNA (Homo sapiens) CpG-island No: 509
gcgcgcgcggagtttggttagatcgcgtatttagcgttgcgtttttttagtcgtgggcgtcgttaggtttaggtttttgcggcggtttttgaaggcgatggtgaggtagcgcgttggcgcgaaggtattttcgaagcgtcgtaggttttcggattggtggttttcgcggatcgtttcgatgtgttgtacgaagattgagaggagggtcgggttagggcggaggatcgggtttgtttttatttttttgttcgttcggcgtttttcggttttttatagatgtgttgcgatggcgtacgcgggatgcgtcgttggaattatacgtttaggtcgtttttttgtagtcggtatagtcgttttttgtgttacgtgcgcgagcggattttgcggagtcgggagtttcgtagtatggcgcgtacgttttcgtttttcgttaggtttggcggggcgggaggattcggggcgttaggtcgtatttgtttagaggtttttttgttttttttcgttaggatttg

SEQ ID NO: 510 - DNA, 512 bp, Artificial Sequence
  chemically treated genomic DNA (Homo sapiens) CpG-island No: 510
caaatcctaacgaaaaaaaacaaaaaaacctctaaacaaatacgacctaacgccccgaatcctcccgccccgccaaacctaacgaaaaacgaaaacgtacgcgccatactacgaaactcccgactccgcaaaatccgctcgcgcacgtaacacaaaaaacgactataccgactacaaaaaaacgacctaaacgtataattccaacgacgcatcccgcgtacgccatcgcaacacatctataaaaaaccgaaaaacgccgaacgaacaaaaaaataaaaacaaacccgatcctccgccctaacccgaccctcctctcaatcttcgtacaacacatcgaaacgatccgcgaaaaccaccaatccgaaaacctacgacgcttcgaaaataccttcgcgccaacgcgctacctcaccatcgccttcaaaaaccgccgcaaaaacctaaacctaacgacgcccacgactaaaaaaacgcaacgctaaatacgcgatctaaccaaactccgcgcgcgc

SEQ ID NO: 511 - DNA, 512 bp, Artificial Sequence
  chemically treated genomic DNA (Homo sapiens) CpG-island No: 511
taggttttagcgggggagggtaggggagtttttgggtaggtacggtttgacgtttcgggttttttcgtttcgttaggtttgacggaggacgaggacgtgcgcgttatgttgcggggttttcggtttcgtaagattcgttcgcgtacgtggtataaggagcggttgtatcggttgtaggaggacggtttgagcgtgtggttttagcggcgtatttcgcgtgcgttatcgtagtatatttgtgagaggtcggggagcgtcgggcggatagggaggtggggataggttcggtttttcgttttgattcggttttttttttagttttcgtgtagtatatcgaggcggttcgcgagggttattagttcgagggtttgcggcgtttcgggggtgttttcgcgttagcgcgttgttttattatcgtttttaagggtcgtcgtaagaatttggatttggcggcgtttacggttgaggaagcgtagcgttgggtgcgcggtttgattaagtttcgcgcgcgt

SEQ ID NO: 512 - DNA, 512 bp, Artificial Sequence
  chemically treated genomic DNA (Homo sapiens) CpG-island No: 512
acgcgcgcgaaacttaatcaaaccgcgcacccaacgctacgcttcctcaaccgtaaacgccgccaaatccaaattcttacgacgacccttaaaaacgataataaaacaacgcgctaacgcgaaaacacccccgaaacgccgcaaaccctcgaactaataaccctcgcgaaccgcctcgatatactacacgaaaactaaaaaaaaaaccgaatcaaaacgaaaaaccgaacctatccccacctccctatccgcccgacgctccccgacctctcacaaatatactacgataacgcacgcgaaatacgccgctaaaaccacacgctcaaaccgtcctcctacaaccgatacaaccgctccttataccacgtacgcgaacgaatcttacgaaaccgaaaaccccgcaacataacgcgcacgtcctcgtcctccgtcaaacctaacgaaacgaaaaaacccgaaacgtcaaaccgtacctacccaaaaactcccctaccctcccccgctaaaaccta

SEQ ID NO: 513 - DNA, 1017 bp, Artificial Sequence
  chemically treated genomic DNA (Homo sapiens) CpG-island No: 513
  unsure (163, 181, 237, 295, 422, 606, 634, 636, 649, 662, 835, 854)
  unsure (992)
ttttcgtcggttttcggattattttttttggaaggaagttttttcgtttttttttttttttttcgttttcgtttcgttggtgtggttgtaggttcgagttggggttattcggcggttagtgtgcgtaggttttttggtcgtcggttagagggcgaaagtattntattcgaggttttttatnttcgcggttgttttggttgcgagtaacgagggaagaggaggtaggcgttttaaaanttgggcgaagatttttattttaatttttaattcgagttttttatcgttagtgcgtttnaatggcgttgttggtcggatggataatcgagttttttggagggatagacgcggtcgttatttttaataaatcgtgaataacgaatgagggaatcgattatttttatgaggtttacgggcgtttagtnaacgtagtatcgattcgttttttcggcgtcggttttatcgttattttcggcgtttttaagttttttttttcgttttttttttttttgtcggagttattgcggatcggagttttagcgttaggtggagtcggggcgttagtgggagtcgggtttagtcgttttggcgttcgttcgattttttcgnttcgcgcggtttagggaggcgtataggntnagcgttaggtagnggcgcgagcgaanaaatgcgggaattagcgttaggtaggagaaaaggcgcgggtttattttatagttcggcgtttcgttttttagtttagtgtggtcgttcgttttcggtcggattattgtgttttagattcggagtttgagtttttatttttagcgggttttcgtttttttttgttcgagttatntcgggggcgtagttttcgnttagagttattcgattttttcgcggcgaggttttttattcggttttatttcgtatttttatttttttttcgcgattgttttttgttaggcgtttaggttggattttggtgcgtcgtttttttgggttagcgtttttgntcgtcgagggggtaaggggagtggg

SEQ ID NO: 514 - DNA, 1017 bp, Artificial Sequence
  chemically treated genomic DNA (Homo sapiens) CpG-island No: 514
  unsure (26, 164, 183, 356, 369, 382, 384, 412, 596, 723, 781, 837)
  unsure (855)
cccactccccttaccccctcgacgancaaaaacgctaacccaaaaaaacgacgcaccaaaatccaacctaaacgcctaacaaaaaacaatcgcgaaaaaaaaataaaaatacgaaataaaaccgaataaaaaacctcgccgcgaaaaaatcgaataactctaancgaaaactacgcccccganataactcgaacaaaaaaaaacgaaaacccgctaaaaataaaaactcaaactccgaatctaaaacacaataatccgaccgaaaacgaacgaccacactaaactaaaaaacgaaacgccgaactataaaataaacccgcgccttttctcctacctaacgctaattcccgcatttnttcgctcgcgccnctacctaacgctnancctatacgcctccctaaaccgcgcgaancgaaaaaatcgaacgaacgccaaaacgactaaacccgactcccactaacgccccgactccacctaacgctaaaactccgatccgcaataactccgacaaaaaaaaaaaaaacgaaaaaaaaaacttaaaaacgccgaaaataacgataaaaccgacgccgaaaaaacgaatcgatactacgttnactaaacgcccgtaaacctcataaaaataatcgattccctcattcgttattcacgatttattaaaaataacgaccgcgtctatccctccaaaaaactcgattatccatccgaccaacaacgccattnaaacgcactaacgataaaaaactcgaattaaaaattaaaataaaaatcttcgcccaanttttaaaacgcctacctcctcttccctcgttactcgcaaccaaaacaaccgcgaanataaaaaacctcgaatanaatactttcgccctctaaccgacgaccaaaaaacctacgcacactaaccgccgaataaccccaactcgaacctacaaccacaccaacgaaacgaaaacgaaaaaaaaaaaaaaaaacgaaaaaacttccttccaaaaaaaataatccgaaaaccgacgaaaa

SEQ ID NO: 515 - DNA, 1017 bp, Artificial Sequence
  chemically treated genomic DNA (Homo sapiens) CpG-island No: 515
  unsure (26, 164, 183, 356, 369, 382, 384, 412, 596, 723, 781, 837)
  unsure (855)
tttattttttttgttttttcggcggntaggggcgttggtttagaaaagcggcgtattaggatttagtttgggcgtttggtagggagtaatcgcgagaggggagtggaggtgcggggtgaggtcgggtggggggtttcgtcgcggggggatcgggtagttttggncggaggttgcgttttcggngtggttcgggtagagaagaacggaggttcgttgaggatgggaatttaggtttcgggtttgggatataataattcggtcgaaggcgagcggttatattggattaggaaacgaggcgtcgggttgtaaggtgggttcgcgtttttttttttgtttggcgttgattttcgtatttnttcgttcgcgttnttgtttggcgttngntttgtgcgtttttttgggtcgcgcgggncgggagagtcgggcgagcgttaagacggttgggttcgatttttattggcgtttcggttttatttggcgttggggtttcggttcgtagtggtttcggtaggaggggagagaacgaggagggaggtttggaaacgtcgggagtagcggtgaggtcgacgtcggggaagcgaatcgatattgcgttnattggacgttcgtgggttttatgaggatggtcgatttttttattcgttatttacgatttattagggatggcggtcgcgtttgtttttttagagagttcgattatttattcggttagtagcgttattnaagcgtattgacggtgggaggttcgagttagaaattaggataggaattttcgtttagnttttggagcgtttgtttttttttttttcgttgttcgtagttaaggtagtcgcgaangtggggggtttcgggtgnaatgttttcgttttttggtcggcgattaggagatttgcgtatattggtcgtcgagtgattttagttcgagtttgtagttatattagcgggacgggggcggggaggaagaggaagggcggagagatttttttttagagggagtggttcgagaatcggcgggag

SEQ ID NO: 516 - DNA, 1017 bp, Artificial Sequence
  chemically treated genomic DNA (Homo sapiens) CpG-island No: 516
  unsure (163, 181, 237, 295, 422, 606, 634, 636, 649, 662, 835, 854)
  unsure (992)
ctcccgccgattctcgaaccactccctctaaaaaaaaatctctccgcccttcctcttcctccccgcccccgtcccgctaatataactacaaactcgaactaaaatcactcgacgaccaatatacgcaaatctcctaatcgccgaccaaaaaacgaaaacattncacccgaaaccccccacnttcgcgactaccttaactacgaacaacgaaaaaaaaaaaaacaaacgctccaaaanctaaacgaaaattcctatcctaatttctaactcgaacctcccaccgtcaatacgcttnaataacgctactaaccgaataaataatcgaactctctaaaaaaacaaacgcgaccgccatccctaataaatcgtaaataacgaataaaaaaatcgaccatcctcataaaacccacgaacgtccaatnaacgcaatatcgattcgcttccccgacgtcgacctcaccgctactcccgacgtttccaaacctccctcctcgttctctcccctcctaccgaaaccactacgaaccgaaaccccaacgccaaataaaaccgaaacgccaataaaaatcgaacccaaccgtcttaacgctcgcccgactctcccgncccgcgcgacccaaaaaaacgcacaaancnaacgccaaacaanaacgcgaacgaanaaatacgaaaatcaacgccaaacaaaaaaaaaaacgcgaacccaccttacaacccgacgcctcgtttcctaatccaatataaccgctcgccttcgaccgaattattatatcccaaacccgaaacctaaattcccatcctcaacgaacctccgttcttctctacccgaaccacnccgaaaacgcaacctccgnccaaaactacccgatccccccgcgacgaaaccccccacccgacctcaccccgcacctccactcccctctcgcgattactccctaccaaacgcccaaactaaatcctaatacgccgcttttctaaaccaacgcccctanccgccgaaaaaacaaaaaaaataaa

SEQ ID NO: 517 - DNA, 570 bp, Artificial Sequence
  chemically treated genomic DNA (Homo sapiens) CpG-island No: 517
  unsure (21, 173, 191, 212, 307, 329, 426, 435)
tcgggcgtcggcgtagttttntttttcgagtttgggtttgtttaatggtttagagggagaggtcgtattttcgatttttggtatttgcgaaattaagcgttcggtcggttggtagaaacgaaattttaatattttttagtttttttcgtttggttttcggaatcggcgagttnaggtttcgcggaaatttngttcggcggtagtcgtttagnggtttcgggatcgttttgatcgtagttcgtagtttcgggtcgggaggtgcgggtcggcgcggtcgggttcgagtaagttagcgtacgcgtttttntcgtttcgttcggtttcggcgngcgtcgcggcggttttataatttttttttggtttcggggacgggcggggcggggcgagcgggcggaaataattttttgtttggtcgtttttgttttnagttttttncgtcgcgggacgcgcgagacgggagaaggtgcgggaagcgggaagtaggagcgggagcgcgcggttttggtacgtatagggcggcggagagggtacgagtagggattgagtatttattgtgtgtttttacgtttt

SEQ ID NO: 518 - DNA, 570 bp, Artificial Sequence
  chemically treated genomic DNA (Homo sapiens) CpG-island No: 518
  unsure (136, 145, 242, 264, 359, 380, 398, 550)
aaaacgtaaaaacacacaataaatactcaatccctactcgtaccctctccgccgccctatacgtaccaaaaccgcgcgctcccgctcctacttcccgcttcccgcaccttctcccgtctcgcgcgtcccgcgacgnaaaaaactnaaaacaaaaacgaccaaacaaaaaattatttccgcccgctcgccccgccccgcccgtccccgaaaccaaaaaaaaattataaaaccgccgcgacgcncgccgaaaccgaacgaaacganaaaaacgcgtacgctaacttactcgaacccgaccgcgccgacccgcacctcccgacccgaaactacgaactacgatcaaaacgatcccgaaaccnctaaacgactaccgccgaacnaaatttccgcgaaacctnaactcgccgattccgaaaaccaaacgaaaaaaactaaaaaatattaaaatttcgtttctaccaaccgaccgaacgcttaatttcgcaaataccaaaaatcgaaaatacgacctctccctctaaaccattaaacaaacccaaactcgaaaaanaaaactacgccgacgcccga

SEQ ID NO: 519 - DNA, 570 bp, Artificial Sequence
  chemically treated genomic DNA (Homo sapiens) CpG-island No: 519
  unsure (136, 145, 242, 264, 359, 380, 398, 550)
aaagcgtgaaggtatatagtaggtgtttaatttttgttcgtgtttttttcgtcgttttatgcgtgttagggtcgcgcgttttcgtttttgtttttcgtttttcgtattttttttcgtttcgcgcgtttcgcggcgnaagggattnggggtagagacgattaaatagaaaattattttcgttcgttcgtttcgtttcgttcgttttcggagttagaaggggattgtggggtcgtcgcggcgtncgtcggagtcgagcggggcggnaaaggcgcgtgcgttggtttgttcgggttcgatcgcgtcggttcgtatttttcggttcggagttgcgggttgcggttagggcgatttcggggttnttaggcggttgtcgtcgggtnaagttttcgcgaagtttnggttcgtcggtttcgggaattaagcgggggaggttggagggtgttgaggtttcgtttttgttagtcgatcgggcgtttggtttcgtaggtgttaggggtcgggggtgcgatttttttttttgggttattagatagatttaggttcggggaangaggttgcgtcgacgttcga

SEQ ID NO: 520 - DNA, 570 bp, Artificial Sequence
  chemically treated genomic DNA (Homo sapiens) CpG-island No: 520
  unsure (21, 173, 191, 212, 307, 329, 426, 435)
tcgaacgtcgacgcaacctcnttccccgaacctaaatctatctaataacccaaaaaaaaaaatcgcacccccgacccctaacacctacgaaaccaaacgcccgatcgactaacaaaaacgaaacctcaacaccctccaacctcccccgcttaattcccgaaaccgacgaaccnaaacttcgcgaaaacttnacccgacgacaaccgcctaanaaccccgaaatcgccctaaccgcaacccgcaactccgaaccgaaaaatacgaaccgacgcgatcgaacccgaacaaaccaacgcacgcgcctttnccgccccgctcgactccgacgnacgccgcgacgaccccacaatccccttctaactccgaaaacgaacgaaacgaaacgaacgaacgaaaataattttctatttaatcgtctctaccccnaatcccttncgccgcgaaacgcgcgaaacgaaaaaaaatacgaaaaacgaaaaacaaaaacgaaaacgcgcgaccctaacacgcataaaacgacgaaaaaaacacgaacaaaaattaaacacctactatataccttcacgcttt

SEQ ID NO: 521 - DNA, 577 bp, Artificial Sequence
  chemically treated genomic DNA (Homo sapiens) CpG-island No: 521
  unsure (257, 282, 284, 480, 515, 559)
cgggagtgcgggtagagggagggttcgggagcgacgatttagagtcgtgaaacgaaaaagaaagtaggtaaagtagtacggagcgaaagagcgaaaagttttttattaagttaggttttgttttttgaatttaagattttattcggcggttggcggcgggcgggtcgggagcgagcgagcggaggcgcgcggttatggttgtcgcggtcgggtaggggggtcgggggggcggcgcgtgagcgggtggcgcggggcgngcgtaagagggcgggcgttcgcgantngtgttattcggcgtttttttcgtcgggttcgggttacgcggcggcggggcggttttaggagtcgggcgagcggcgcggagggggcgagttcggcgtgcgagttttattgttgtgggggggattcgtcggggtatgagggcgagagtatagcggggggggcggttagatagagcgagcgaggaggaggaggaggagnacgcggaggaggaggaaggaggaggtaaagaaaanaagcggcggcggcggagggagaggaggagggggagaggaggggngggtttttcgtttttttt

SEQ ID NO: 522 - DNA, 577 bp, Artificial Sequence
  chemically treated genomic DNA (Homo sapiens) CpG-island No: 522
  unsure (19, 63, 98, 294, 296, 321)
aaaaaaaacgaaaaacccncccctcctctccccctcctcctctccctccgccgccgccgcttnttttctttacctcctccttcctcctcctccgcgtnctcctcctcctcctcctcgctcgctctatctaaccgccccccccgctatactctcgccctcataccccgacgaatcccccccacaacaataaaactcgcacgccgaactcgccccctccgcgccgctcgcccgactcctaaaaccgccccgccgccgcgtaacccgaacccgacgaaaaaaacgccgaataacacnantcgcgaacgcccgccctcttacgcncgccccgcgccacccgctcacgcgccgcccccccgacccccctacccgaccgcgacaaccataaccgcgcgcctccgctcgctcgctcccgacccgcccgccgccaaccgccgaataaaatcttaaattcaaaaaacaaaacctaacttaataaaaaacttttcgctctttcgctccgtactactttacctactttctttttcgtttcacgactctaaatcgtcgctcccgaaccctccctctacccgcactcccg

SEQ ID NO: 523 - DNA, 577 bp, Artificial Sequence
  chemically treated genomic DNA (Homo sapiens) CpG-island No: 523
  unsure (19, 63, 98, 294, 296, 321)
ggagggagcggggggtttntttttttttttttttttttttttttttttcgtcgtcgtcgtttnttttttttgttttttttttttttttttttcgcgtntttttttttttttttttcgttcgttttgtttggtcgtttttttcgttgtgttttcgtttttatgtttcgacgggttttttttataataatgagattcgtacgtcgggttcgtttttttcgcgtcgttcgttcggtttttagggtcgtttcgtcgtcgcgtagttcgagttcggcgggggaggcgtcgagtggtatnantcgcgggcgttcgtttttttgcgtncgtttcgcgttattcgtttacgcgtcgttttttcggtttttttgttcggtcgcggtagttatggtcgcgcgttttcgttcgttcgttttcggttcgttcgtcgttagtcgtcgggtaaagttttaggtttagggaataaagtttggtttggtagggagtttttcgttttttcgtttcgtgttgttttgtttgttttttttttcgttttacggttttgggtcgtcgttttcgagttttttttttgttcgtattttcg

SEQ ID NO: 524 - DNA, 577 bp, Artificial Sequence
  chemically treated genomic DNA (Homo sapiens) CpG-island No: 524
  unsure (257, 282, 284, 480, 515, 559)
cgaaaatacgaacaaaaaaaaaactcgaaaacgacgacccaaaaccgtaaaacgaaaaaaaaaacaaacaaaacaacacgaaacgaaaaaacgaaaaactccctaccaaaccaaactttattccctaaacctaaaactttacccgacgactaacgacgaacgaaccgaaaacgaacgaacgaaaacgcgcgaccataactaccgcgaccgaacaaaaaaaccgaaaaaacgacgcgtaaacgaataacgcgaaacgnacgcaaaaaaacgaacgcccgcgantnataccactcgacgcctcccccgccgaactcgaactacgcgacgacgaaacgaccctaaaaaccgaacgaacgacgcgaaaaaaacgaacccgacgtacgaatctcattattataaaaaaaacccgtcgaaacataaaaacgaaaacacaacgaaaaaaacgaccaaacaaaacgaacgaaaaaaaaaaaaaaaaanacgcgaaaaaaaaaaaaaaaaaaaacaaaaaaaanaaacgacgacgacgaaaaaaaaaaaaaaaaaaaaaaaaaaaaanaaaccccccgctccctcc

SEQ ID NO: 525 - DNA, 1395 bp, Artificial Sequence
  chemically treated genomic DNA (Homo sapiens) CpG-island No: 525
gcgttttaggtttttgtttttggcgtttttgttgttttgtacggtcgtatagtggtttacggtggtcgcgttatttttaaatagcgtggtttttcggtagttgggagatagggatagtatcgtgtttatggtgttgttgcgcgtcgggcgggggttcgcgtttttgcgcgtttagtttgtcggtcggagggataaaatcgtttatcgagtttgcggcggtttcggagaggaggcgggggcgttttcgggaagcgtgttgtttttttggatttgtttggaaaataagatggtttttagcgttaggttgggtttcgcgtcgcgtttttgcgtttttgcgttttttcgtttcgcgtttcggcgtatttcgtcgttttagtttcgggttttattcgcgttttcgcgacgtagtttcgtcgtttttattgtagtattttcgttcgtcgtcgtcgttgcggtttttaggcgtagtcgggaggggttcggtcgtcgacggaggcggtcgaggattttcgtttggatatttcgtacgggcgcgatttcggttttcgttttttagggttaaggacggtcgtttagcgtaggtttattcggtaggcggtagtttttgcgtttcgcgtttttcgtaatgcgcgtcgcggtttcgtcgtcgcggtttcggcgttcggcggcgttcgggggcgttcggcggggatcggttgggttcgcgttcggcggcggcgacggcggcggcggcggcggcggtagttagggagtttttgtttaaggttttgtaggtatcgtagtttcgtttttcgttcggtcgttcgtattttcgtcgtcgtcgtcgcgttttcgttttcgttttcgttttcggcgcgcgttttagcgttttttttcgcggggcgcgcgcgtcgtttacgtttcggtttggtttcgtcggggagtcgcggtcgttggtgtttttagttcgagtcgcgtacggtgcgggtaggacgcggtaacgagcgggaggtatttttacgcgtcgggttttatttaggagtcggatttcgcggttgcggcgggatacgcggcgtcggttcgtttcgtttttcggggtcgtttttttcgtatagttcgtcgttcgtttcgcgtcgtcgtttaatagtagttcggtcgtcggagagttttcggcgttcgcgtaatttaattttgtcgacgcggggcgggcgtcgagtagggcggagtcgagggtcgatttcgttcgcgtttcgtttagatacgtgttgtttttgttttcgtcgcggcgttcgtagttgtcggtcgcgggggtattttcggtcgagtttttgttttggtagcgcgcggttcgttttttttgaggttgtcgttttggtttggtgaggagtttttcgtcgaggttagggttcggagttt

SEQ ID NO: 526 - DNA, 1395 bp, Artificial Sequence
  chemically treated genomic DNA (Homo sapiens) CpG-island No: 526
aaactccgaaccctaacctcgacgaaaaactcctcaccaaaccaaaacgacaacctcaaaaaaaacgaaccgcgcgctaccaaaacaaaaactcgaccgaaaatacccccgcgaccgacaactacgaacgccgcgacgaaaacaaaaacaacacgtatctaaacgaaacgcgaacgaaatcgaccctcgactccgccctactcgacgcccgccccgcgtcgacaaaattaaattacgcgaacgccgaaaactctccgacgaccgaactactattaaacgacgacgcgaaacgaacgacgaactatacgaaaaaaacgaccccgaaaaacgaaacgaaccgacgccgcgtatcccgccgcaaccgcgaaatccgactcctaaataaaacccgacgcgtaaaaatacctcccgctcgttaccgcgtcctacccgcaccgtacgcgactcgaactaaaaacaccaacgaccgcgactccccgacgaaaccaaaccgaaacgtaaacgacgcgcgcgccccgcgaaaaaaaacgctaaaacgcgcgccgaaaacgaaaacgaaaacgaaaacgcgacgacgacgacgaaaatacgaacgaccgaacgaaaaacgaaactacgatacctacaaaaccttaaacaaaaactccctaactaccgccgccgccgccgccgccgtcgccgccgccgaacgcgaacccaaccgatccccgccgaacgcccccgaacgccgccgaacgccgaaaccgcgacgacgaaaccgcgacgcgcattacgaaaaacgcgaaacgcaaaaactaccgcctaccgaataaacctacgctaaacgaccgtccttaaccctaaaaaacgaaaaccgaaatcgcgcccgtacgaaatatccaaacgaaaatcctcgaccgcctccgtcgacgaccgaacccctcccgactacgcctaaaaaccgcaacgacgacgacgaacgaaaatactacaataaaaacgacgaaactacgtcgcgaaaacgcgaataaaacccgaaactaaaacgacgaaatacgccgaaacgcgaaacgaaaaaacgcaaaaacgcaaaaacgcgacgcgaaacccaacctaacgctaaaaaccatcttattttccaaacaaatccaaaaaaacaacacgcttcccgaaaacgcccccgcctcctctccgaaaccgccgcaaactcgataaacgattttatccctccgaccgacaaactaaacgcgcaaaaacgcgaacccccgcccgacgcgcaacaacaccataaacacgatactatccctatctcccaactaccgaaaaaccacgctatttaaaaataacgcgaccaccgtaaaccactatacgaccgtacaaaacaacaaaaacgccaaaaacaaaaacctaaaacgc

SEQ ID NO: 527 - DNA, 1395 bp, Artificial Sequence
  chemically treated genomic DNA (Homo sapiens) CpG-island No: 527
gagtttcggattttggtttcggcggagggttttttattaggttagggcggtagttttagagagggcgggtcgcgcgttgttagggtagggattcggtcgagagtgttttcgcggtcggtagttgcgggcgtcgcggcgggaataaaggtagtacgtgtttgggcgggacgcgggcggggtcggttttcggtttcgttttgttcggcgttcgtttcgcgtcggtagagttgggttgcgcgggcgtcgaggatttttcggcggtcgggttgttgttgggcggcggcgcggagcgggcggcgagttgtgcgggaggggcggtttcgaggggcggggcgggtcgacgtcgcgtgtttcgtcgtagtcgcggagttcggtttttagatggggttcggcgcgtagaggtgtttttcgttcgttgtcgcgttttattcgtatcgtgcgcggttcgagttgaggatattaacggtcgcgatttttcggcgagattaggtcggagcgtggacggcgcgcgcgtttcgcgagggagggcgttgaggcgcgcgtcggaagcgggagcgggagcgggagcgcggcggcggcggcgaaggtgcgggcggtcgagcggggggcggggttgcggtgtttgtagaattttggatagaagttttttagttgtcgtcgtcgtcgtcgtcgtcgtcgtcgtcgtcgagcgcgagtttagtcgattttcgtcgagcgttttcgagcgtcgtcgagcgtcgggatcgcggcggcggggtcgcggcgcgtattgcggagggcgcggagcgtaggagttgtcgtttgtcgggtaagtttgcgttgggcggtcgtttttggttttggggagcggagatcggggtcgcgttcgtgcggggtgtttaggcgggggttttcggtcgttttcgtcggcgatcgggtttttttcggttgcgtttggggatcgtagcggcggcggcgggcgggggtgttgtagtggaggcggcgaggttgcgtcgcgggggcgcgggtagggttcgggattggggcggcggggtgcgtcgaggcgcggggcggaggggcgtaggggcgtaggggcgcggcgcggagtttagtttggcgttaagaattattttgttttttaggtagatttaagggggtagtacgtttttcgggagcgttttcgtttttttttcggggtcgtcgtaggttcggtgagcggttttattttttcggtcggtaggttgggcgcgtaggggcgcgagttttcgttcggcgcgtagtagtattatgggtacggtgttgtttttgttttttagttatcggaaggttacgttgtttgaggatggcgcggttatcgtgggttattatacggtcgtatagaatagtaagaacgttaaggataagaatttgaagcgt

SEQ ID NO: 528 - DNA, 1395 bp, Artificial Sequence
  chemically treated genomic DNA (Homo sapiens) CpG-island No: 528
acgcttcaaattcttatccttaacgttcttactattctatacgaccgtataataacccacgataaccgcgccatcctcaaacaacgtaaccttccgataactaaaaaacaaaaacaacaccgtacccataatactactacgcgccgaacgaaaactcgcgcccctacgcgcccaacctaccgaccgaaaaaataaaaccgctcaccgaacctacgacgaccccgaaaaaaaaacgaaaacgctcccgaaaaacgtactacccccttaaatctacctaaaaaacaaaataattcttaacgccaaactaaactccgcgccgcgcccctacgcccctacgcccctccgccccgcgcctcgacgcaccccgccgccccaatcccgaaccctacccgcgcccccgcgacgcaacctcgccgcctccactacaacacccccgcccgccgccgccgctacgatccccaaacgcaaccgaaaaaaacccgatcgccgacgaaaacgaccgaaaacccccgcctaaacaccccgcacgaacgcgaccccgatctccgctccccaaaaccaaaaacgaccgcccaacgcaaacttacccgacaaacgacaactcctacgctccgcgccctccgcaatacgcgccgcgaccccgccgccgcgatcccgacgctcgacgacgctcgaaaacgctcgacgaaaatcgactaaactcgcgctcgacgacgacgacgacgacgacgacgacgacgacaactaaaaaacttctatccaaaattctacaaacaccgcaaccccgccccccgctcgaccgcccgcaccttcgccgccgccgccgcgctcccgctcccgctcccgcttccgacgcgcgcctcaacgccctccctcgcgaaacgcgcgcgccgtccacgctccgacctaatctcgccgaaaaatcgcgaccgttaatatcctcaactcgaaccgcgcacgatacgaataaaacgcgacaacgaacgaaaaacacctctacgcgccgaaccccatctaaaaaccgaactccgcgactacgacgaaacacgcgacgtcgacccgccccgcccctcgaaaccgcccctcccgcacaactcgccgcccgctccgcgccgccgcccaacaacaacccgaccgccgaaaaatcctcgacgcccgcgcaacccaactctaccgacgcgaaacgaacgccgaacaaaacgaaaccgaaaaccgaccccgcccgcgtcccgcccaaacacgtactacctttattcccgccgcgacgcccgcaactaccgaccgcgaaaacactctcgaccgaatccctaccctaacaacgcgcgacccgccctctctaaaactaccgccctaacctaataaaaaaccctccgccgaaaccaaaatccgaaactc

SEQ ID NO: 529 - DNA, 785 bp, Artificial Sequence
  chemically treated genomic DNA (Homo sapiens) CpG-island No: 529
cgataggattcgcgttttggcgtaggcgtatcggggatgagatgggtcgcgatttatgttagtaaggatgggtgagatagatagaggggttcggaacggagacgtttcgtattggtcgttgtttaacggcggatcggtagtgggtaggattttatggagacgcggtgttaggcgatcgttagtttcgcgtagggggcgtagtgttagcgttttgtcgtagagttgggcggtcgggcggggtacgagagcggcgtcgatgttcgcggcggtaggtacggttgttacgtagcgggtacggacgtcgggcgtaggcgcggtttcggcgcgcgttcggcggtgcggcgtcgcgtttgcgcgggcgtagcgggggcgcgttgcgtcgtcggtcgtcgcgggtcgcgcgcgttgggcgcgcgagtggttaggagttaggcgtttgcggtaggtcgcgttttcgggtcgggtacggttcggacgcgggtcgttgcgggcgtgcgagcgcgggaggcggtgcggtggtcgcgtggtagcgttttttcgggcgtgtcgtcgcgttgcgtttgttggcgagcgagttggtagcgttcgcgagcgggacggtttttgttttcggacgcgtcgtgggcgcggttggtacgggcgcggtatcgaagcgtcggtgagtgtcggcggtggttggtcgtcgttcgcgttcggttgttagagcgcgcgcggtgcgcgtcgtggtggcgcgcgaggcggcgtcgcgcggcgagcgcggcggcgtttgggcgtcgcggttcgcg

SEQ ID NO: 530 - DNA, 785 bp, Artificial Sequence
  chemically treated genomic DNA (Homo sapiens) CpG-island No: 530
cgcgaaccgcgacgcccaaacgccgccgcgctcgccgcgcgacgccgcctcgcgcgccaccacgacgcgcaccgcgcgcgctctaacaaccgaacgcgaacgacgaccaaccaccgccgacactcaccgacgcttcgataccgcgcccgtaccaaccgcgcccacgacgcgtccgaaaacaaaaaccgtcccgctcgcgaacgctaccaactcgctcgccaacaaacgcaacgcgacgacacgcccgaaaaaacgctaccacgcgaccaccgcaccgcctcccgcgctcgcacgcccgcaacgacccgcgtccgaaccgtacccgacccgaaaacgcgacctaccgcaaacgcctaactcctaaccactcgcgcgcccaacgcgcgcgacccgcgacgaccgacgacgcaacgcgcccccgctacgcccgcgcaaacgcgacgccgcaccgccgaacgcgcgccgaaaccgcgcctacgcccgacgtccgtacccgctacgtaacaaccgtacctaccgccgcgaacatcgacgccgctctcgtaccccgcccgaccgcccaactctacgacaaaacgctaacactacgccccctacgcgaaactaacgatcgcctaacaccgcgtctccataaaatcctacccactaccgatccgccgttaaacaacgaccaatacgaaacgtctccgttccgaacccctctatctatctcacccatccttactaacataaatcgcgacccatctcatccccgatacgcctacgccaaaacgcgaatcctatcg

SEQ ID NO: 531 - DNA, 785 bp, Artificial Sequence
  chemically treated genomic DNA (Homo sapiens) CpG-island No: 531
cgcgagtcgcggcgtttagacgtcgtcgcgttcgtcgcgcgacgtcgtttcgcgcgttattacgacgcgtatcgcgcgcgttttggtagtcgaacgcgggcggcggttagttatcgtcgatatttatcggcgtttcgatgtcgcgttcgtgttagtcgcgtttacggcgcgttcgagagtaggggtcgtttcgttcgcggacgttattagttcgttcgttagtaggcgtagcgcgacggtacgttcggaggagcgttgttacgcgattatcgtatcgtttttcgcgttcgtacgttcgtagcggttcgcgttcgaatcgtgttcggttcgggggcgcggtttgtcgtaggcgtttggtttttagttattcgcgcgtttagcgcgcgcggttcgcgacgatcggcggcgtaacgcgttttcgttgcgttcgcgtaggcgcggcgtcgtatcgtcgagcgcgcgtcgaggtcgcgtttgcgttcgacgttcgtgttcgttgcgtggtagtcgtgtttgtcgtcgcgagtatcggcgtcgttttcgtatttcgttcggtcgtttaattttgcgatagggcgttaatattgcgttttttgcgcgggattgacgatcgtttggtatcgcgtttttatggagttttgtttattatcggttcgtcgttgggtagcgattagtacgaggcgttttcgtttcgaatttttttgtttgttttatttatttttattgatatgggtcgcgatttattttattttcgatgcgtttacgttagggcgcgagttttgtcg

SEQ ID NO: 532 - DNA, 785 bp, Artificial Sequence
  chemically treated genomic DNA (Homo sapiens) CpG-island No: 532
cgacaaaactcgcgccctaacgtaaacgcatcgaaaataaaataaatcgcgacccatatcaataaaaataaataaaacaaacaaaaaaattcgaaacgaaaacgcctcgtactaatcgctacccaacgacgaaccgataataaacaaaactccataaaaacgcgataccaaacgatcgtcaatcccgcgcaaaaaacgcaatattaacgccctatcgcaaaattaaacgaccgaacgaaatacgaaaacgacgccgatactcgcgacgacaaacacgactaccacgcaacgaacacgaacgtcgaacgcaaacgcgacctcgacgcgcgctcgacgatacgacgccgcgcctacgcgaacgcaacgaaaacgcgttacgccgccgatcgtcgcgaaccgcgcgcgctaaacgcgcgaataactaaaaaccaaacgcctacgacaaaccgcgcccccgaaccgaacacgattcgaacgcgaaccgctacgaacgtacgaacgcgaaaaacgatacgataatcgcgtaacaacgctcctccgaacgtaccgtcgcgctacgcctactaacgaacgaactaataacgtccgcgaacgaaacgacccctactctcgaacgcgccgtaaacgcgactaacacgaacgcgacatcgaaacgccgataaatatcgacgataactaaccgccgcccgcgttcgactaccaaaacgcgcgcgatacgcgtcgtaataacgcgcgaaacgacgtcgcgcgacgaacgcgacgacgtctaaacgccgcgactcgcg

SEQ ID NO: 533 - DNA, 788 bp, Artificial Sequence
  chemically treated genomic DNA (Homo sapiens) CpG-island No: 533
ttcgtttacggacgcgaagatgtagtttttaattttcgcggttcgagtttcgtagagtttttggtttttttatttacgttggcgggcgtattttttgtttcgttcggtcggggcgtttttcgtagttcgtaattcgtagttttgtaggtttcgtacgttttttttagggtttggagttcgtttttagttttcgttcgtcgtcgcggagtttatcgagtcgtggtcgtttgtcgcgtcggtcgcgtcgttttgttgtagtttcgtagttatggtcgaggcgtttagtcgcgggttatcggtttttcgtcgtagtcgtcgtcggtttagttttttaggattaggtttcgttttcgttttttatttcgtttcgtttcgttttcgttcgtagcgcgcgtcggaggtttggtttatatgtttcgttttcggtatgcgcgcgtacgtaaggcgcgcggttcggggtcgaatagttttgcgtgttttcgcgtacgttcggttgattagacgtcggttacgtgatttcggtttcgtttgtcgttgttggttagttttatagtcggtggaggttgcgggtcgcgttgttagtgttcgggaattgggtttgcgaattttgggagtcgcgtttttgagtttttttcgttttttgtttttaaaattttatttgtaggattgattttcggttttattttttttacgggcgagttaaaattgttttttcgtcgtgggaaattgtcgaatgatcgtggaataaaggattttttattaggttttgtagttatttttaattttaa

SEQ ID NO: 534 - DNA, 788 bp, Artificial Sequence
  chemically treated genomic DNA (Homo sapiens) CpG-island No: 534
ttaaaattaaaaataactacaaaacctaataaaaaatcctttattccacgatcattcgacaatttcccacgacgaaaaaacaattttaactcgcccgtaaaaaaaataaaaccgaaaatcaatcctacaaataaaattttaaaaacaaaaaacgaaaaaaactcaaaaacgcgactcccaaaattcgcaaacccaattcccgaacactaacaacgcgacccgcaacctccaccgactataaaactaaccaacaacgacaaacgaaaccgaaatcacgtaaccgacgtctaatcaaccgaacgtacgcgaaaacacgcaaaactattcgaccccgaaccgcgcgccttacgtacgcgcgcataccgaaaacgaaacatataaaccaaacctccgacgcgcgctacgaacgaaaacgaaacgaaacgaaataaaaaacgaaaacgaaacctaatcctaaaaaactaaaccgacgacgactacgacgaaaaaccgataacccgcgactaaacgcctcgaccataactacgaaactacaacaaaacgacgcgaccgacgcgacaaacgaccacgactcgataaactccgcgacgacgaacgaaaactaaaaacgaactccaaaccctaaaaaaaacgtacgaaacctacaaaactacgaattacgaactacgaaaaacgccccgaccgaacgaaacaaaaaatacgcccgccaacgtaaataaaaaaaccaaaaactctacgaaactcgaaccgcgaaaattaaaaactacatcttcgcgtccgtaaacgaa

SEQ ID NO: 535 - DNA, 788 bp, Artificial Sequence
  chemically treated genomic DNA (Homo sapiens) CpG-island No: 535
ttggagttggaaatggttataaagtttgatgggaaattttttattttacggttattcggtagttttttacggcgggggaatagttttaattcgttcgtggggagggtggagtcggaggttagttttataaatgaggttttgagggtagagagcggagaagatttaggaacgcggtttttaggattcgtaaatttagttttcggatattggtagcgcggttcgtagtttttatcggttgtgaagttgattaatagcgataggcggggtcgggattacgtgatcgacgtttggttagtcgggcgtgcgcgggagtacgtagaattgttcggtttcgggtcgcgcgttttgcgtgcgcgcgtatgtcgggggcggggtatgtgggttaagttttcggcgcgcgttgcgggcgggggcgggacggagcggggtggagggcgggggcggggtttagttttgagaggttgggtcggcggcggttgcggcgggagatcggtgattcgcggttgggcgtttcggttatgattgcggagttgtagtaggacgacgcggtcggcgcggtagacggttacggttcggtgggtttcgcggcggcgagcgggagttgggggcgggttttaggttttgaggggagcgtgcggggtttgtagggttgcgggttgcgggttgcggagggcgtttcggtcgggcgggatagggggtgcgttcgttagcgtgggtgagaaggttaagggttttgcggggttcgggtcgcggagattgaggattgtattttcgcgttcgtgggcgag

SEQ ID NO: 536 - DNA, 788 bp, Artificial Sequence
  chemically treated genomic DNA (Homo sapiens) CpG-island No: 536
ctcgcccacgaacgcgaaaatacaatcctcaatctccgcgacccgaaccccgcaaaacccttaaccttctcacccacgctaacgaacgcaccccctatcccgcccgaccgaaacgccctccgcaacccgcaacccgcaaccctacaaaccccgcacgctcccctcaaaacctaaaacccgcccccaactcccgctcgccgccgcgaaacccaccgaaccgtaaccgtctaccgcgccgaccgcgtcgtcctactacaactccgcaatcataaccgaaacgcccaaccgcgaatcaccgatctcccgccgcaaccgccgccgacccaacctctcaaaactaaaccccgcccccgccctccaccccgctccgtcccgcccccgcccgcaacgcgcgccgaaaacttaacccacataccccgcccccgacatacgcgcgcacgcaaaacgcgcgacccgaaaccgaacaattctacgtactcccgcgcacgcccgactaaccaaacgtcgatcacgtaatcccgaccccgcctatcgctattaatcaacttcacaaccgataaaaactacgaaccgcgctaccaatatccgaaaactaaatttacgaatcctaaaaaccgcgttcctaaatcttctccgctctctaccctcaaaacctcatttataaaactaacctccgactccaccctccccacgaacgaattaaaactattcccccgccgtaaaaaactaccgaataaccgtaaaataaaaaatttcccatcaaactttataaccatttccaactccaa

SEQ ID NO: 537 - DNA, 512 bp, Artificial Sequence
  chemically treated genomic DNA (Homo sapiens) CpG-island No: 537
ttttttcgtttacgttcggcggatttttcgtatcgcgcggtatcgtcgcgggcgtttcggtttatattcgtcggcggtattcgtagcggcgtcgcggcggcggttttatacgcgtttcgtttttcgtacgcgcgtatcgttagtagggtttagcgcggagtattcgtttttcgcggtaggtagcggcgcgcggcgtcgtacgacggtcgcgcgacgcggttcggcgcgcggttttagaggtttcgttttagtacgcgttcggcgtacgtattttcgacgcgtatacgcgttcggttatcggcgagttttttagttttggattcgcggcgtcgtttatcgttcggattaggttagtgagtattagttcgaggcgcgatggttgagcgggatttatcggtattcgggtgttatcgtcggcggtttattaagcgattaggatcggttattcgttattatttcgttgatatttttttgtgggtagtatttttttttattttagatggttttgtagt

SEQ ID NO: 538 - DNA, 512 bp, Artificial Sequence
  chemically treated genomic DNA (Homo sapiens) CpG-island No: 538
actacaaaaccatctaaaataaaaaaaaatactacccacaaaaaaatatcaacgaaataataacgaataaccgatcctaatcgcttaataaaccgccgacgataacacccgaataccgataaatcccgctcaaccatcgcgcctcgaactaatactcactaacctaatccgaacgataaacgacgccgcgaatccaaaactaaaaaactcgccgataaccgaacgcgtatacgcgtcgaaaatacgtacgccgaacgcgtactaaaacgaaacctctaaaaccgcgcgccgaaccgcgtcgcgcgaccgtcgtacgacgccgcgcgccgctacctaccgcgaaaaacgaatactccgcgctaaaccctactaacgatacgcgcgtacgaaaaacgaaacgcgtataaaaccgccgccgcgacgccgctacgaataccgccgacgaatataaaccgaaacgcccgcgacgataccgcgcgatacgaaaaatccgccgaacgtaaacgaaaaaa

SEQ ID NO: 539 - DNA, 512 bp, Artificial Sequence
  chemically treated genomic DNA (Homo sapiens) CpG-island No: 539
gttatagaattatttgaagtagaggggagtgttgtttataaggaagtattagcgaggtggtggcggatggtcggttttggtcgtttggtgagtcgtcgacggtgatattcgggtgtcggtggatttcgtttagttatcgcgtttcgaattagtgtttattggtttagttcgagcggtggacggcgtcgcgaatttagggttggaaggttcgtcggtggtcgggcgcgtgtgcgcgtcgggagtgcgtgcgtcgggcgcgtgttgaggcggggtttttggggtcgcgcgtcgggtcgcgtcgcgcgatcgtcgtgcggcgtcgcgcgtcgttgtttgtcgcggggggcgggtgtttcgcgttgagttttgttggcgatgcgcgcgtgcggggggcgggacgcgtgtggggtcgtcgtcgcggcgtcgttgcgggtgtcgtcggcgggtgtgggtcggggcgttcgcggcggtgtcgcgcggtgcggggggttcgtcgggcgtgggcgggggag

SEQ ID NO: 540 - DNA, 512 bp, Artificial Sequence
  chemically treated genomic DNA (Homo sapiens) CpG-island No: 540
ctcccccgcccacgcccgacgaaccccccgcaccgcgcgacaccgccgcgaacgccccgacccacacccgccgacgacacccgcaacgacgccgcgacgacgaccccacacgcgtcccgccccccgcacgcgcgcatcgccaacaaaactcaacgcgaaacacccgccccccgcgacaaacaacgacgcgcgacgccgcacgacgatcgcgcgacgcgacccgacgcgcgaccccaaaaaccccgcctcaacacgcgcccgacgcacgcactcccgacgcgcacacgcgcccgaccaccgacgaaccttccaaccctaaattcgcgacgccgtccaccgctcgaactaaaccaataaacactaattcgaaacgcgataactaaacgaaatccaccgacacccgaatatcaccgtcgacgactcaccaaacgaccaaaaccgaccatccgccaccacctcgctaatacttccttataaacaacactcccctctacttcaaataattctataac

SEQ ID NO: 541 - DNA, 648 bp, Artificial Sequence
  chemically treated genomic DNA (Homo sapiens) CpG-island No: 541
ggtgaacgggataggtatacgcgtggggtgggatggagtgtttatatatgtggtttgtgatatgtattgaggggacgtggggtatattcggatgaggggtttgtggatatattcgtggcgtatgtgggtatcgttggtgtttcgaggtggggagggagaatgcggagcgcgtgcgtgcggggggcgtttagtgtttttgaatttggcgtgtgggggttggagtttattgggaggcgagggaggtggttaggggagtcgggatcgtgcgtgtggttaggtcggtagcgtttagtaagttttattcgcgggcgtttttcgtgttttttcgtttttgaatttgtttttttttagtcggtttcgtcgcgttcgtcgggtgttttagtgttattaatattcggtcgtcgtcgttagtttggcgcgtatcgtcgttttcgttatcgtcgatagcgcgtatttttcgtgttttcgtttcgtcgttcgagtaggtatgacggcgaattttggttcgtattcggtttttcgcgcgttgttcggagtttttgcgcgcgcgtttttttttgtttaatttcggttcgcgagtttttgtttcggttttagttttttacgggagggcgtttgggtgtttgtttgaggcgtttgggattcggt

SEQ ID NO: 542 - DNA, 648 bp, Artificial Sequence
  chemically treated genomic DNA (Homo sapiens) CpG-island No: 542
accgaatcccaaacgcctcaaacaaacacccaaacgccctcccgtaaaaaactaaaaccgaaacaaaaactcgcgaaccgaaattaaacaaaaaaaaacgcgcgcgcaaaaactccgaacaacgcgcgaaaaaccgaatacgaaccaaaattcgccgtcatacctactcgaacgacgaaacgaaaacacgaaaaatacgcgctatcgacgataacgaaaacgacgatacgcgccaaactaacgacgacgaccgaatattaataacactaaaacacccgacgaacgcgacgaaaccgactaaaaaaaaacaaattcaaaaacgaaaaaacacgaaaaacgcccgcgaataaaacttactaaacgctaccgacctaaccacacgcacgatcccgactcccctaaccacctccctcgcctcccaataaactccaacccccacacgccaaattcaaaaacactaaacgccccccgcacgcacgcgctccgcattctccctccccacctcgaaacaccaacgatacccacatacgccacgaatatatccacaaacccctcatccgaatataccccacgtcccctcaatacatatcacaaaccacatatataaacactccatcccaccccacgcgtatacctatcccgttcacc

SEQ ID NO: 543 - DNA, 648 bp, Artificial Sequence
  chemically treated genomic DNA (Homo sapiens) CpG-island No: 543
gtcgggttttaggcgttttagataggtatttaagcgttttttcgtgggaaattgaggtcgggataggagttcgcgggtcggggttgggtaggagaaggcgcgcgcgtagggatttcgggtagcgcgcgggagatcgggtgcgagttagggttcgtcgttatatttgttcgggcggcggagcggggatacggaggatgcgcgttgtcggcggtggcggaggcggcggtgcgcgttaagttggcggcggcggtcgagtgttggtgatattgggatattcggcgagcgcggcgagatcgattgggagggagtaggtttaggggcggggaagtacggggagcgttcgcgggtggagtttattgggcgttatcggtttggttatacgtacggtttcggtttttttggttatttttttcgttttttaataagttttagtttttatacgttaggtttagggatattggacgtttttcgtacgtacgcgtttcgtattttttttttttatttcgggatattagcgatatttatatgcgttacgaatatgtttatagattttttattcgagtgtattttacgtttttttagtatatattataagttatatatatgaatattttattttattttacgcgtgtatttgtttcgtttatt

SEQ ID NO: 544 - DNA, 648 bp, Artificial Sequence
  chemically treated genomic DNA (Homo sapiens) CpG-island No: 544
aataaacgaaacaaatacacgcgtaaaataaaataaaatattcatatatataacttataatatatactaaaaaaacgtaaaatacactcgaataaaaaatctataaacatattcgtaacgcatataaatatcgctaatatcccgaaataaaaaaaaaaaatacgaaacgcgtacgtacgaaaaacgtccaatatccctaaacctaacgtataaaaactaaaacttattaaaaaacgaaaaaaataaccaaaaaaaccgaaaccgtacgtataaccaaaccgataacgcccaataaactccacccgcgaacgctccccgtacttccccgcccctaaacctactccctcccaatcgatctcgccgcgctcgccgaatatcccaatatcaccaacactcgaccgccgccgccaacttaacgcgcaccgccgcctccgccaccgccgacaacgcgcatcctccgtatccccgctccgccgcccgaacaaatataacgacgaaccctaactcgcacccgatctcccgcgcgctacccgaaatccctacgcgcgcgccttctcctacccaaccccgacccgcgaactcctatcccgacctcaatttcccacgaaaaaacgcttaaatacctatctaaaacgcctaaaacccgac

SEQ ID NO: 545 - DNA, 632 bp, Artificial Sequence
  chemically treated genomic DNA (Homo sapiens) CpG-island No: 545
gacgcgttaattatttacggaggtaagaaattgtagaaagtaaagggaaagggagtttagtgtcgggcggcgttgagtagtttttttagcggttatcgtcgttaatatttttgcgtaggggtttgtatcgtagcgcgtttttagatattaacggttgcgcggtttacgcgcgcgtatgcgttttgattaggggaatttttttttggggattcggaggcgagcgttggaaggcgggatagtggcgatttatacgtagtagttttcggcggcgcgtagttttgattggtggaatttgggagagggggcggggtatcggggaattcgaatgggagaggcgggtttaaggagggagtggaatggtcgcgggcggttcgacgtagtagaggcgacgcgagatggcggtagttttagcggcggcgattttaggtatttgagttcggtttgggtaaggcgggtatcgacgtttggagtttagtgggagttatgtgtcggagtgtggtttaggttttgcgggttgtcgcggagaggcggttatggcgtaggggcggggagagggggacggtgagagtgtggggtcgcgagtcggtcgtttcgtttggtttttgttttttttttgttttttgttttttttt

SEQ ID NO: 546 - DNA, 632 bp, Artificial Sequence
  chemically treated genomic DNA (Homo sapiens) CpG-island No: 546
aaaaaaaaacaaaaaacaaaaaaaaaacaaaaaccaaacgaaacgaccgactcgcgaccccacactctcaccgtccccctctccccgcccctacgccataaccgcctctccgcgacaacccgcaaaacctaaaccacactccgacacataactcccactaaactccaaacgtcgatacccgccttacccaaaccgaactcaaatacctaaaatcgccgccgctaaaactaccgccatctcgcgtcgcctctactacgtcgaaccgcccgcgaccattccactccctccttaaacccgcctctcccattcgaattccccgataccccgccccctctcccaaattccaccaatcaaaactacgcgccgccgaaaactactacgtataaatcgccactatcccgccttccaacgctcgcctccgaatccccaaaaaaaaattcccctaatcaaaacgcatacgcgcgcgtaaaccgcgcaaccgttaatatctaaaaacgcgctacgatacaaacccctacgcaaaaatattaacgacgataaccgctaaaaaaactactcaacgccgcccgacactaaactccctttccctttactttctacaatttcttacctccgtaaataattaacgcgtc

SEQ ID NO: 547 - DNA, 632 bp, Artificial Sequence
  chemically treated genomic DNA (Homo sapiens) CpG-island No: 547
aggggagagtaggaaatagggagaaggtaggagttaggcggggcgatcggttcgcgattttatatttttatcgttttttttttttcgtttttgcgttatggtcgttttttcgcgataattcgtagagtttggattatatttcgatatataatttttattaaattttagacgtcggtattcgttttgtttaggtcgggtttaagtatttgagatcgtcgtcgttgaagttgtcgttatttcgcgtcgtttttgttgcgtcgagtcgttcgcggttattttattttttttttgggttcgttttttttattcgaatttttcggtgtttcgtttttttttttaggttttattaattaagattacgcgtcgtcggaagttgttgcgtgtgggtcgttattatttcgttttttagcgttcgttttcgggtttttaagaaaaggtttttttggttaggacgtatgcgcgcgcgtgggtcgcgtagtcgttgatgtttggaagcgcgttgcgatataaatttttacgtagggatgttggcgacggtggtcgttgggggagttgtttagcgtcgttcggtattgggttttttttttttttattttttgtagttttttgttttcgtgggtggttggcgcgtt

SEQ ID NO: 548 - DNA, 632 bp, Artificial Sequence
  chemically treated genomic DNA (Homo sapiens) CpG-island No: 548
aacgcgccaaccacccacgaaaacaaaaaactacaaaaaataaaaaaaaaaaaaacccaataccgaacgacgctaaacaactcccccaacgaccaccgtcgccaacatccctacgtaaaaatttatatcgcaacgcgcttccaaacatcaacgactacgcgacccacgcgcgcgcatacgtcctaaccaaaaaaaccttttcttaaaaacccgaaaacgaacgctaaaaaacgaaataataacgacccacacgcaacaacttccgacgacgcgtaatcttaattaataaaacctaaaaaaaaaaacgaaacaccgaaaaattcgaataaaaaaaacgaacccaaaaaaaaaataaaataaccgcgaacgactcgacgcaacaaaaacgacgcgaaataacgacaacttcaacgacgacgatctcaaatacttaaacccgacctaaacaaaacgaataccgacgtctaaaatttaataaaaattatatatcgaaatataatccaaactctacgaattatcgcgaaaaaacgaccataacgcaaaaacgaaaaaaaaaaaacgataaaaatataaaatcgcgaaccgatcgccccgcctaactcctaccttctccctatttcctactctcccct

SEQ ID NO: 549 - DNA, 566 bp, Artificial Sequence
  chemically treated genomic DNA (Homo sapiens) CpG-island No: 549
gggcgggatcggggtgtgatcgtttcggggtgggtcgcgagtaaggtaggcgattttattgggcgttattttcggggaacgatttagcgtaggattgtaaatatatcgttggggtggggcggggaggacggtggtttgtaggacgtaaaaagcggaagtcgaagtatgaggtttgcgatcgttaggcgggcgcgcgtttagggattagtttcgtttcgttcgtgttttcggcgcgcgcgtttttttattttttcgttcggtaacgacggcggttttgtgcgcgtgcgcgcgaaataacggtcgttggcggagggagggggagtggaatcgttggcggggggaagaggagagaagtcgttttgtttttcgcgcgtttattatttgcgttatcgttagttaattagtagtcgttttaggggtttcgcgttcggggcgattcgggttgttgggtggttttttcgttttttttttcgttagagtttttttcgcgtttgtttttttcgttggttacgcgcgcgttcgcgttagcgttcgcgttcgttttagttttttgtgtgttttcgcgt

SEQ ID NO: 550 - DNA, 566 bp, Artificial Sequence
  chemically treated genomic DNA (Homo sapiens) CpG-island No: 550
acgcgaaaacacacaaaaaactaaaacgaacgcgaacgctaacgcgaacgcgcgcgtaaccaacgaaaaaaacaaacgcgaaaaaaactctaacgaaaaaaaaaacgaaaaaaccacccaacaacccgaatcgccccgaacgcgaaacccctaaaacgactactaattaactaacgataacgcaaataataaacgcgcgaaaaacaaaacgacttctctcctcttccccccgccaacgattccactccccctccctccgccaacgaccgttatttcgcgcgcacgcgcacaaaaccgccgtcgttaccgaacgaaaaaataaaaaaacgcgcgcgccgaaaacacgaacgaaacgaaactaatccctaaacgcgcgcccgcctaacgatcgcaaacctcatacttcgacttccgctttttacgtcctacaaaccaccgtcctccccgccccaccccaacgatatatttacaatcctacgctaaatcgttccccgaaaataacgcccaataaaatcgcctaccttactcgcgacccaccccgaaacgatcacaccccgatcccgccc

SEQ ID NO: 551 - DNA, 566 bp, Artificial Sequence
  chemically treated genomic DNA (Homo sapiens) CpG-island No: 551
gcgcgaggatatataagaggttggagcgggcgcgagcgttagcgcgagcgcgcgcgtggttagcgggaggggtaggcgcgagagggattttggcgggaggagggacgggggagttatttagtagttcgagtcgtttcgagcgcgagatttttgagacggttgttgattggttgacgatggcgtaggtggtgggcgcgcgggagatagggcggttttttttttttttttttcgttaacgattttatttttttttttttcgttagcggtcgttatttcgcgcgtacgcgtataaggtcgtcgtcgttgtcgagcgggagaatgggggagcgcgcgcgtcgggggtacggacggggcggggttaatttttgagcgcgcgttcgtttaacggtcgtaggttttatgtttcggttttcgttttttgcgttttgtaggttatcgtttttttcgttttattttagcggtgtatttataattttgcgttgagtcgtttttcgaagatggcgtttagtggagtcgtttgttttgttcgcggtttatttcgaggcggttatatttcggtttcgttt

SEQ ID NO: 552 - DNA, 566 bp, Artificial Sequence
  chemically treated genomic DNA (Homo sapiens) CpG-island No: 552
aaacgaaaccgaaatataaccgcctcgaaataaaccgcgaacaaaacaaacgactccactaaacgccatcttcgaaaaacgactcaacgcaaaattataaatacaccgctaaaataaaacgaaaaaaacgataacctacaaaacgcaaaaaacgaaaaccgaaacataaaacctacgaccgttaaacgaacgcgcgctcaaaaattaaccccgccccgtccgtacccccgacgcgcgcgctcccccattctcccgctcgacaacgacgacgaccttatacgcgtacgcgcgaaataacgaccgctaacgaaaaaaaaaaaaataaaatcgttaacgaaaaaaaaaaaaaaaaaaccgccctatctcccgcgcgcccaccacctacgccatcgtcaaccaatcaacaaccgtctcaaaaatctcgcgctcgaaacgactcgaactactaaataactcccccgtccctcctcccgccaaaatccctctcgcgcctacccctcccgctaaccacgcgcgcgctcgcgctaacgctcgcgcccgctccaacctcttatatatcctcgcgc

SEQ ID NO: 553 - DNA, 572 bp, Artificial Sequence
  chemically treated genomic DNA (Homo sapiens) CpG-island No: 553
ttgggagcgttcggggttcgcgaaggaggaggtggtttaggtgttagggcgtatcgtgggaatcggtttcgggggaggcgtggaaacgcggggtttgggattcgattagtttttttcgtgcggatcgtaaaatttcggagttgaaatagttcgttgttcgtagtttttttttgattcgttattttgtatattgttttttattcgttcgggtcgcgggtgggaggagaggtacgtcggggttttggagtttggtcgcgcgttaggtttgtggttttcgtttttttggggttattggggcggttacgttttttcggcgggaggagagaacgcgtgggttcgggtggttgtttcggttttttcgtttttagttcggttatggggtcgcgtagtttttacgtcgcggttattttcgacggggatagtattcggcgagagatcggttgtgagtgcgttcgcgtcggcggttgcggaggggacggggcgaatttaggcgtttggggttagggaaggggttgggttgaaggatggacgaatttataagtttggggttcggggtttttcggagttggaag

SEQ ID NO: 554 - DNA, 572 bp, Artificial Sequence
  chemically treated genomic DNA (Homo sapiens) CpG-island No: 554
cttccaactccgaaaaaccccgaaccccaaacttataaattcgtccatccttcaacccaaccccttccctaaccccaaacgcctaaattcgccccgtcccctccgcaaccgccgacgcgaacgcactcacaaccgatctctcgccgaatactatccccgtcgaaaataaccgcgacgtaaaaactacgcgaccccataaccgaactaaaaacgaaaaaaccgaaacaaccacccgaacccacgcgttctctcctcccgccgaaaaaacgtaaccgccccaataaccccaaaaaaacgaaaaccacaaacctaacgcgcgaccaaactccaaaaccccgacgtacctctcctcccacccgcgacccgaacgaataaaaaacaatatacaaaataacgaatcaaaaaaaaactacgaacaacgaactatttcaactccgaaattttacgatccgcacgaaaaaaactaatcgaatcccaaaccccgcgtttccacgcctcccccgaaaccgattcccacgatacgccctaacacctaaaccacctcctccttcgcgaaccccgaacgctcccaa

SEQ ID NO: 555 - DNA, 572 bp, Artificial Sequence
  chemically treated genomic DNA (Homo sapiens) CpG-island No: 555
tttttagtttcggggagtttcggattttagatttgtaagttcgtttattttttaatttaattttttttttagttttagacgtttgggttcgtttcgtttttttcgtagtcgtcgacgcgggcgtatttatagtcggtttttcgtcgaatattgttttcgtcgggaatgatcgcggcgtgggagttgcgcgattttatggtcgagttggaggcggaagggtcggagtagttattcggatttacgcgtttttttttttcgtcggagaggcgtggtcgttttagtggttttagggggacgaaggttataagtttggcgcgcggttaagttttagaatttcggcgtgtttttttttttattcgcgattcgggcgaatggaaaataatgtgtagggtggcgggttagagggaggttgcgaataacgggttgttttagtttcgagattttgcgattcgtacgggagaggttggtcgagttttaggtttcgcgtttttacgtttttttcggggtcggtttttacggtgcgttttgatatttgagttattttttttttcgcgggtttcgggcgtttttaa

SEQ ID NO: 556 - DNA, 572 bp, Artificial Sequence
  chemically treated genomic DNA (Homo sapiens) CpG-island No: 556
ttaaaaacgcccgaaacccgcgaaaaaaaaaataactcaaatatcaaaacgcaccgtaaaaaccgaccccgaaaaaaacgtaaaaacgcgaaacctaaaactcgaccaacctctcccgtacgaatcgcaaaatctcgaaactaaaacaacccgttattcgcaacctccctctaacccgccaccctacacattattttccattcgcccgaatcgcgaataaaaaaaaaaacacgccgaaattctaaaacttaaccgcgcgccaaacttataaccttcgtccccctaaaaccactaaaacgaccacgcctctccgacgaaaaaaaaaaacgcgtaaatccgaataactactccgacccttccgcctccaactcgaccataaaatcgcgcaactcccacgccgcgatcattcccgacgaaaacaatattcgacgaaaaaccgactataaatacgcccgcgtcgacgactacgaaaaaaacgaaacgaacccaaacgtctaaaactaaaaaaaaaattaaattaaaaaataaacgaacttacaaatctaaaatccgaaactccccgaaactaaaaa

SEQ ID NO: 557 - DNA, 813 bp, Artificial Sequence
  chemically treated genomic DNA (Homo sapiens) CpG-island No: 557
ttcggtttcgcgcgtcgcggtcgttagagtcggcgtaggggaagcgttcgcggtttcgggtgtagtagcggtcgtcgtttttcgcgttttttcggttcgtagttcgcggtttcgcggtttcggggtcggtatttttcgggtttcggtttttcgcgcgtaagatggttgattcggttgcggggtcgtcgtcgagcgagggcgaggagagtatcgtgcgtttcgttcgtaaaggcgtttttcggtagaagaacgtgtatgaggttaagaattataaatttatcgttcgtttttttaagtagtttattttttgtagttattgtatcgattttatttggtgagcgcgcgcgcgtagggtattttttcgggttttcgagggtagcgtcgcgttagggatttttttttcgcgttttttgcgtttttcgcgtttttcgtattttgggatttcgcgttttcggattttcggtttcggattttgttgttcgggattttcggatggatagttttgtcgttgttttgtttttattttggttttagacgggtcgtcgcggggcgttttttgtttttttttgtttttaggcgtttttagagcgtttaggggcggcgtcgcgggagtttttgttttatttgattaggagcgcgcggggtttgtgtttgttttggagggtagcgtttcgggtgtttttcgattcggggttttttattttttcgtttgttttcgggcgcgaggagttttcgttttttattttttgttttcggggggggcggcgttttgggtgtttttttttatttttttgcgggtatgggatatttttt

SEQ ID NO: 558 - DNA, 813 bp, Artificial Sequence
  chemically treated genomic DNA (Homo sapiens) CpG-island No: 558
aaaaaatatcccatacccgcaaaaaaataaaaaaaaacacccaaaacgccgccccccccgaaaacaaaaaataaaaaacgaaaactcctcgcgcccgaaaacaaacgaaaaaataaaaaaccccgaatcgaaaaacacccgaaacgctaccctccaaaacaaacacaaaccccgcgcgctcctaatcaaataaaacaaaaactcccgcgacgccgcccctaaacgctctaaaaacgcctaaaaacaaaaaaaaacaaaaaacgccccgcgacgacccgtctaaaaccaaaataaaaacaaaacaacgacaaaactatccatccgaaaatcccgaacaacaaaatccgaaaccgaaaatccgaaaacgcgaaatcccaaaatacgaaaaacgcgaaaaacgcaaaaaacgcgaaaaaaaaatccctaacgcgacgctaccctcgaaaacccgaaaaaataccctacgcgcgcgcgctcaccaaataaaatcgatacaataactacaaaaaataaactacttaaaaaaacgaacgataaatttataattcttaacctcatacacgttcttctaccgaaaaacgcctttacgaacgaaacgcacgatactctcctcgccctcgctcgacgacgaccccgcaaccgaatcaaccatcttacgcgcgaaaaaccgaaacccgaaaaataccgaccccgaaaccgcgaaaccgcgaactacgaaccgaaaaaacgcgaaaaacgacgaccgctactacacccgaaaccgcgaacgcttcccctacgccgactctaacgaccgcgacgcgcgaaaccgaa

SEQ ID NO: 559 - DNA, 813 bp, Artificial Sequence
  chemically treated genomic DNA (Homo sapiens) CpG-island No: 559
aaaggatgttttatgttcgtagggagatagagaaggatatttagggcgtcgtttttttcggaaataaggggtggggggcgagggtttttcgcgttcggaagtaggcggagagatagggaatttcgggtcggagagtattcgaggcgttgttttttagggtaggtatagatttcgcgcgtttttagttaggtggagtaaaggttttcgcgacgtcgtttttgggcgttttagaggcgtttgagagtaggagagggtaggaggcgtttcgcggcggttcgtttgggattagggtggggatagggtaacggtaggattgtttattcgggagtttcgggtagtagggttcggagtcgggagttcggagacgcggggttttagggtgcggagggcgcggagggcgtagagggcgcggagagggggtttttggcgcggcgttgttttcgggggttcgggaaggtgttttgcgcgcgcgcgtttattagatgaagtcggtgtagtggttgtagaaggtgggttgtttgaagaagcgggcggtgaatttgtggtttttgattttatgtacgtttttttgtcggagggcgtttttgcgggcgaagcgtacggtgtttttttcgttttcgttcggcggcggtttcgtagtcgggttagttattttgcgcgcggggagtcggagttcgagaggtgtcggtttcggggtcgcgggatcgcgggttgcgggtcggggaggcgcgggaggcggcggtcgttgttgtattcggggtcgcgggcgttttttttgcgtcggttttggcggtcgcggcgcgcggagtcggg

SEQ ID NO: 560 - DNA, 813 bp, Artificial Sequence
  chemically treated genomic DNA (Homo sapiens) CpG-island No: 560
cccgactccgcgcgccgcgaccgccaaaaccgacgcaaaaaaaacgcccgcgaccccgaatacaacaacgaccgccgcctcccgcgcctccccgacccgcaacccgcgatcccgcgaccccgaaaccgacacctctcgaactccgactccccgcgcgcaaaataactaacccgactacgaaaccgccgccgaacgaaaacgaaaaaaacaccgtacgcttcgcccgcaaaaacgccctccgacaaaaaaacgtacataaaatcaaaaaccacaaattcaccgcccgcttcttcaaacaacccaccttctacaaccactacaccgacttcatctaataaacgcgcgcgcgcaaaacaccttcccgaacccccgaaaacaacgccgcgccaaaaaccccctctccgcgccctctacgccctccgcgccctccgcaccctaaaaccccgcgtctccgaactcccgactccgaaccctactacccgaaactcccgaataaacaatcctaccgttaccctatccccaccctaatcccaaacgaaccgccgcgaaacgcctcctaccctctcctactctcaaacgcctctaaaacgcccaaaaacgacgtcgcgaaaacctttactccacctaactaaaaacgcgcgaaatctatacctaccctaaaaaacaacgcctcgaatactctccgacccgaaattccctatctctccgcctacttccgaacgcgaaaaaccctcgccccccaccccttatttccgaaaaaaacgacgccctaaatatccttctctatctccctacgaacataaaacatccttt

SEQ ID NO: 561 - DNA, 563 bp, Artificial Sequence
  chemically treated genomic DNA (Homo sapiens) CpG-island No: 561
atcgggttatttatcgtggggagcggttttatcgttgtttggagtgtggtcgggtttttacgtagcgttcggcgttgatttcgtatttgcgcgtttatatcggcgagaaattttatggttgcgtcgattgtggtcgtcgttttagttagagttttgttttttattagtatcggcgcgtgtatagcggcgagattttttttttttgttcggattgtggtcgcgttttcgtttatttttcggatttgcggcgttacgtgcgtatttatatcggcgagaagttttattcgtgttcggattgcgggcgttgttttcgttagagttcggagatggtagtttataggcgtatttatagcggcgagaagttttatttttgttcgtagtgcggtcgtcgttttggttagaagttagtcgtggttaaatattagtgggtttatcggttcggggtcgggggttataggggtcgggtcgtcgggcgtttgtttgtgattttgatttttggttacggagatttggattcgttcgtgggtttttagttgtattcggagatattttaggagtgtggg

SEQ ID NO: 562 - DNA, 563 bp, Artificial Sequence
  chemically treated genomic DNA (Homo sapiens) CpG-island No: 562
cccacactcctaaaatatctccgaatacaactaaaaacccacgaacgaatccaaatctccgtaaccaaaaatcaaaatcacaaacaaacgcccgacgacccgacccctataacccccgaccccgaaccgataaacccactaatatttaaccacgactaacttctaaccaaaacgacgaccgcactacgaacaaaaataaaacttctcgccgctataaatacgcctataaactaccatctccgaactctaacgaaaacaacgcccgcaatccgaacacgaataaaacttctcgccgatataaatacgcacgtaacgccgcaaatccgaaaaataaacgaaaacgcgaccacaatccgaacaaaaaaaaaaaatctcgccgctatacacgcgccgatactaataaaaaacaaaactctaactaaaacgacgaccacaatcgacgcaaccataaaatttctcgccgatataaacgcgcaaatacgaaatcaacgccgaacgctacgtaaaaacccgaccacactccaaacaacgataaaaccgctccccacgataaataacccgat

SEQ ID NO: 563 - DNA, 563 bp, Artificial Sequence
  chemically treated genomic DNA (Homo sapiens) CpG-island No: 563
tttatatttttggaatattttcgggtatagttggaagtttacgggcgggtttaggttttcgtggttaggggttagggttatagatagacgttcggcgattcggtttttgtggttttcggtttcgggtcgatgaatttattggtgtttggttacggttgatttttggttaaagcggcggtcgtattgcgggtaggggtagggtttttcgtcgttgtgggtgcgtttgtgggttgttattttcgagttttggcggaagtagcgttcgtagttcgggtacgggtagggtttttcgtcggtgtgggtgcgtacgtggcgtcgtaggttcgaggggtaggcgaaggcgcggttatagttcgggtaggggaagggggtttcgtcgttgtgtacgcgtcggtgttggtagagggtagagttttggttgaagcggcggttatagtcggcgtagttatagggtttttcgtcggtgtggacgcgtaggtgcgaagttagcgtcgagcgttgcgtgaaggttcggttatattttagatagcggtggggtcgttttttacgatggatggttcggt

SEQ ID NO: 564 - DNA, 563 bp, Artificial Sequence
  chemically treated genomic DNA (Homo sapiens) CpG-island No: 564
accgaaccatccatcgtaaaaaacgaccccaccgctatctaaaatataaccgaaccttcacgcaacgctcgacgctaacttcgcacctacgcgtccacaccgacgaaaaaccctataactacgccgactataaccgccgcttcaaccaaaactctaccctctaccaacaccgacgcgtacacaacgacgaaacccccttcccctacccgaactataaccgcgccttcgcctacccctcgaacctacgacgccacgtacgcacccacaccgacgaaaaaccctacccgtacccgaactacgaacgctacttccgccaaaactcgaaaataacaacccacaaacgcacccacaacgacgaaaaaccctacccctacccgcaatacgaccgccgctttaaccaaaaatcaaccgtaaccaaacaccaataaattcatcgacccgaaaccgaaaaccacaaaaaccgaatcgccgaacgtctatctataaccctaacccctaaccacgaaaacctaaacccgcccgtaaacttccaactatacccgaaaatattccaaaaatataaa

SEQ ID NO: 565 - DNA, 544 bp, Artificial Sequence
  chemically treated genomic DNA (Homo sapiens) CpG-island No: 565
gggcgcgcgtaggtgtcggggagcggagtttttggagggggttttaggtttaaggatttcggcgaggttaaggggagttcgtttcggttttcgaggcgttgtcggagttgattcggaggttcgggaggggagggagcgagatatcgttttcgttggcgtcgggaagcgtcgttttttttcgttgattttggtttcgtttgtcgtttcgtttttggttatacgtatcgacgacgcggggttcgggagatggatagacgggtttttggagggacggagatttagaatataggtatatatattgtttcggtagtttcgcgggtttcggggcgttcggtttttatttatttcgtggtcgggtttttttagtttagggttaatgttaacgagtttttatttttagcggtttttagagaggtcgcggcgcgagtcggcggggggatttggtcgcggacggatattttttgtgcgggggagggtgggggggtgttgggcggtcgttggatagtgtagtttagttcggggtcggggtttagaaggtgggggt

SEQ ID NO: 566 - DNA, 544 bp, Artificial Sequence
  chemically treated genomic DNA (Homo sapiens) CpG-island No: 566
acccccaccttctaaaccccgaccccgaactaaactacactatccaacgaccgcccaacacccccccaccctcccccgcacaaaaaatatccgtccgcgaccaaatccccccgccgactcgcgccgcgacctctctaaaaaccgctaaaaataaaaactcgttaacattaaccctaaactaaaaaaacccgaccacgaaataaataaaaaccgaacgccccgaaacccgcgaaactaccgaaacaatatatatacctatattctaaatctccgtccctccaaaaacccgtctatccatctcccgaaccccgcgtcgtcgatacgtataaccaaaaacgaaacgacaaacgaaaccaaaatcaacgaaaaaaaacgacgcttcccgacgccaacgaaaacgatatctcgctccctcccctcccgaacctccgaatcaactccgacaacgcctcgaaaaccgaaacgaactccccttaacctcgccgaaatccttaaacctaaaaccccctccaaaaactccgctccccgacacctacgcgcgccc

SEQ ID NO: 567 - DNA, 544 bp, Artificial Sequence
  chemically treated genomic DNA (Homo sapiens) CpG-island No: 567
gtttttattttttggatttcggtttcgggttgggttgtattgtttaacggtcgtttagtatttttttattttttttcgtataggaagtgttcgttcgcggttaggttttttcgtcggttcgcgtcgcggtttttttaggagtcgttggaggtggaaattcgttggtattaattttgggttggaggggttcggttacggggtgggtgaggatcggacgtttcggagttcgcggggttatcggggtagtgtgtgtgtttatgttttaggttttcgtttttttagaggttcgtttgtttatttttcgggtttcgcgtcgtcggtgcgtgtggttaagggcgaggcgataagcgagattaaggttagcgagaaggagcgacgtttttcggcgttagcgggggcggtgtttcgtttttttttttttcgggttttcgggttagtttcggtagcgtttcgggaatcgggacggattttttttggtttcgtcgaggtttttgagtttgggattttttttaggaatttcgtttttcggtatttgcgcgcgttt

SEQ ID NO: 568 - DNA, 544 bp, Artificial Sequence
  chemically treated genomic DNA (Homo sapiens) CpG-island No: 568
aaacgcgcgcaaataccgaaaaacgaaattcctaaaaaaaatcccaaactcaaaaacctcgacgaaaccaaaaaaaatccgtcccgattcccgaaacgctaccgaaactaacccgaaaacccgaaaaaaaaaaaaacgaaacaccgcccccgctaacgccgaaaaacgtcgctccttctcgctaaccttaatctcgcttatcgcctcgcccttaaccacacgcaccgacgacgcgaaacccgaaaaataaacaaacgaacctctaaaaaaacgaaaacctaaaacataaacacacacactaccccgataaccccgcgaactccgaaacgtccgatcctcacccaccccgtaaccgaacccctccaacccaaaattaataccaacgaatttccacctccaacgactcctaaaaaaaccgcgacgcgaaccgacgaaaaaacctaaccgcgaacgaacacttcctatacgaaaaaaaataaaaaaatactaaacgaccgttaaacaatacaacccaacccgaaaccgaaatccaaaaaataaaaac

SEQ ID NO: 569 - DNA, 527 bp, Artificial Sequence
  chemically treated genomic DNA (Homo sapiens) CpG-island No: 569
agcgggggtcgggggtcgtcggggtagtcgcgaagttttttattttcgaggtcgcgacgcgcgggggttagtgagggttacggggaggtcgagattttgggagggggcggggtcgcgggtaggggaggggttcggcgcgttggagaggcgcggggttaagacgttcggtttcgggggttcgggttgggtcgtcgagttttttgggcggcgttgagcgggcgggaggcgggggttcgcggttcggggtaatcgaggtcgggtcgcgggatcggtcgttatcgtcgtcgtcgttgtattgggagttcgcggggatggagcgggaggcgttgtcgtggggtttcgagttttaggatgtgtagagttttgacgaaatgaggagtttcgaagggtattttagaggtgaggagggagcgttcgttcgaggagtggatttgcgcgtaggagaaggggttgtggttttagggagggagcgagggttcggggttgggatatttgggattcgaaggaggggtcggcggggattgggg

SEQ ID NO: 570 - DNA, 527 bp, Artificial Sequence
  chemically treated genomic DNA (Homo sapiens) CpG-island No: 570
ccccaatccccgccgacccctccttcgaatcccaaatatcccaaccccgaaccctcgctccctccctaaaaccacaaccccttctcctacgcgcaaatccactcctcgaacgaacgctccctcctcacctctaaaatacccttcgaaactcctcatttcgtcaaaactctacacatcctaaaactcgaaaccccacgacaacgcctcccgctccatccccgcgaactcccaatacaacgacgacgacgataacgaccgatcccgcgacccgacctcgattaccccgaaccgcgaacccccgcctcccgcccgctcaacgccgcccaaaaaactcgacgacccaacccgaacccccgaaaccgaacgtcttaaccccgcgcctctccaacgcgccgaacccctcccctacccgcgaccccgccccctcccaaaatctcgacctccccgtaaccctcactaacccccgcgcgtcgcgacctcgaaaataaaaaacttcgcgactaccccgacgacccccgacccccgct

SEQ ID NO: 571 - DNA, 527 bp, Artificial Sequence
  chemically treated genomic DNA (Homo sapiens) CpG-island No: 571
ttttagttttcgtcggtttttttttcgagttttaggtgttttagtttcgggttttcgttttttttttggagttatagtttttttttttgcgcgtaagtttatttttcggacgggcgttttttttttatttttgaggtatttttcggggttttttatttcgttagaattttgtatattttggggttcgaggttttacggtaacgtttttcgttttattttcgcgggtttttagtgtagcggcggcggcgatggcggtcgatttcgcgattcggtttcggttgtttcgagtcgcgggttttcgtttttcgttcgtttagcgtcgtttaggggattcggcggtttagttcgggttttcgaggtcggacgttttgatttcgcgtttttttagcgcgtcgggttttttttttgttcgcggtttcgtttttttttaaggtttcggttttttcgtggtttttattggttttcgcgcgtcgcggtttcggggatgaggggtttcgcgattatttcggcggttttcggttttcgtt

SEQ ID NO: 572 - DNA, 527 bp, Artificial Sequence
  chemically treated genomic DNA (Homo sapiens) CpG-island No: 572
aacgaaaaccgaaaaccgccgaaataatcgcgaaacccctcatccccgaaaccgcgacgcgcgaaaaccaataaaaaccacgaaaaaaccgaaaccttaaaaaaaaacgaaaccgcgaacaaaaaaaaaacccgacgcgctaaaaaaacgcgaaatcaaaacgtccgacctcgaaaacccgaactaaaccgccgaatcccctaaacgacgctaaacgaacgaaaaacgaaaacccgcgactcgaaacaaccgaaaccgaatcgcgaaatcgaccgccatcgccgccgccgctacactaaaaacccgcgaaaataaaacgaaaaacgttaccgtaaaacctcgaaccccaaaatatacaaaattctaacgaaataaaaaaccccgaaaaatacctcaaaaataaaaaaaaaacgcccgtccgaaaaataaacttacgcgcaaaaaaaaaaactataactccaaaaaaaaaacgaaaacccgaaactaaaacacctaaaactcgaaaaaaaaaccgacgaaaactaaaa

SEQ ID NO: 573 - DNA, 755 bp, Artificial Sequence
  chemically treated genomic DNA (Homo sapiens) CpG-island No: 573
cggtcggcgttgtaggggtttattttttttttttattttgttttcgggatttgtgtaggagttcgatgagtattacggcggcgcggattttcgtttttcggtaatgtttttttttcgcgggttgggatatggcgaggtcgttcgcggtgttcgatttcgttcgttcgcgttttcgtagtttcggtttcgcgcgtttcgtattcggtttttgagttcgcgtttcggttttcggttttcgtttcgtatgggtttcgtttcgtttaggtgcgtttcgggggttaggtgatcgcgcgtttttttttttttttcggcgatttttagcgttttttcggggttcgcggggtagtcgtcgttcgttttttcggcgcgggtattttcgaggttcgttcggggcgcggttcgggtcggcggttttcggttttcgtttagacgcgtcgttcgcgtcgggattcgtttcggtttcgtttttcgcgtttcggtttcggtcgttcggatggtggaggacgcggggtatagggagcgggcgaagcgtaggaggaggcggatagcgttttcgggatttttttgttcggtttttaggcgtttttttcggtttcggttttgttttttttcgttcgttttttttggttttcgttcgtattttcgtcggcggtttcgagttttttttttaggtagaggcggttgtcgtttttttcggttcggtttcggatattttttcgatgttgttattgtttttaaaatagagggagagaaaa

SEQ ID NO: 574 - DNA, 755 bp, Artificial Sequence
  chemically treated genomic DNA (Homo sapiens) CpG-island No: 574
ttttctctccctctattttaaaaacaataacaacatcgaaaaaatatccgaaaccgaaccgaaaaaaacgacaaccgcctctacctaaaaaaaaaactcgaaaccgccgacgaaaatacgaacgaaaaccaaaaaaaacgaacgaaaaaaaacaaaaccgaaaccgaaaaaaacgcctaaaaaccgaacaaaaaaatcccgaaaacgctatccgcctcctcctacgcttcgcccgctccctataccccgcgtcctccaccatccgaacgaccgaaaccgaaacgcgaaaaacgaaaccgaaacgaatcccgacgcgaacgacgcgtctaaacgaaaaccgaaaaccgccgacccgaaccgcgccccgaacgaacctcgaaaatacccgcgccgaaaaaacgaacgacgactaccccgcgaaccccgaaaaaacgctaaaaatcgccgaaaaaaaaaaaaaaacgcgcgatcacctaacccccgaaacgcacctaaacgaaacgaaacccatacgaaacgaaaaccgaaaaccgaaacgcgaactcaaaaaccgaatacgaaacgcgcgaaaccgaaactacgaaaacgcgaacgaacgaaatcgaacaccgcgaacgacctcgccatatcccaacccgcgaaaaaaaaacattaccgaaaaacgaaaatccgcgccgccgtaatactcatcgaactcctacacaaatcccgaaaacaaaataaaaaaaaaaaataaacccctacaacgccgaccg

SEQ ID NO: 575 - DNA, 755 bp, Artificial Sequence
  chemically treated genomic DNA (Homo sapiens) CpG-island No: 575
ttttttttttttttgttttaaaagtagtgatagtatcggggaagtattcggggtcgggtcggggagggcggtagtcgtttttgtttggggagggagttcggggtcgtcggcgggagtgcgggcggggattagaaggagcgggcgaggggaggtagggtcggggtcggggagggcgtttgggagtcgggtaggggggtttcgggagcgttgttcgtttttttttgcgtttcgttcgttttttgtgtttcgcgttttttattattcgggcggtcgaggtcggggcgcgggaggcggggtcggggcgggtttcggcgcgggcggcgcgtttgagcgggagtcgggagtcgtcggttcgggtcgcgtttcgagcgagtttcggaaatgttcgcgtcgggggagcggacggcggttgtttcgcgggtttcgaggagacgttgaaggtcgtcgggagggaggggagagcgcgcggttatttgattttcggggcgtatttaggcggggcggggtttatgcgaggcggaggtcgggggtcggggcgcgggtttaggggtcgggtgcggagcgcgcggagtcggggttgcggggacgcgggcgggcgaggtcgggtatcgcgggcggtttcgttatgttttagttcgcggggaggaggtattgtcgaaaggcggggattcgcgtcgtcgtggtgtttatcggatttttgtataaatttcggaggtagaataaagagaaaaggtaaatttttgtagcgtcggtcg

SEQ ID NO: 576 - DNA, 755 bp, Artificial Sequence
  chemically treated genomic DNA (Homo sapiens) CpG-island No: 576
cgaccgacgctacaaaaatttaccttttctctttattctacctccgaaatttatacaaaaatccgataaacaccacgacgacgcgaatccccgcctttcgacaatacctcctccccgcgaactaaaacataacgaaaccgcccgcgatacccgacctcgcccgcccgcgtccccgcaaccccgactccgcgcgctccgcacccgacccctaaacccgcgccccgacccccgacctccgcctcgcataaaccccgccccgcctaaatacgccccgaaaatcaaataaccgcgcgctctcccctccctcccgacgaccttcaacgtctcctcgaaacccgcgaaacaaccgccgtccgctcccccgacgcgaacatttccgaaactcgctcgaaacgcgacccgaaccgacgactcccgactcccgctcaaacgcgccgcccgcgccgaaacccgccccgaccccgcctcccgcgccccgacctcgaccgcccgaataataaaaaacgcgaaacacaaaaaacgaacgaaacgcaaaaaaaaacgaacaacgctcccgaaacccccctacccgactcccaaacgccctccccgaccccgaccctacctcccctcgcccgctccttctaatccccgcccgcactcccgccgacgaccccgaactccctccccaaacaaaaacgactaccgccctccccgacccgaccccgaatacttccccgatactatcactacttttaaaacaaaaaaaaaaaaaa

SEQ ID NO: 577 - DNA, 533 bp, Artificial Sequence
  chemically treated genomic DNA (Homo sapiens) CpG-island No: 577
tttttcgtcgtgaaagggttaaggtcgacggcggttttcgttacgaaaaagagttttttttcggattttttttttttttcgaaaggaaggatagacggtcgcgttcggtagtttcgtcggaaggaagaggtttttttatttataattgacgatgtgggttggacgagaaaaaaagtaaggagggtttttatggaggggggcggggtcgggcggaaggattcgaaaggaggttgcgaagagattttgtgatttcgcgaaggaggtaaaaagaagggtcggcgcggcgggaggagttacgcgagagttcgagggggcggggcgggcggttacgtgattggcgggcgggaagacgcggcggagaggcgtaaataagttgcggcgtttgggtgtggttggagcgttttgtttttgtttttcgagtcgtttttgtttttcgtttgcgtggcgtttttcgagggtttttttgtgggcggttttagagtagcgattttgttttttaaggagttgttggggttcgcgtgggtgaagggttt

SEQ ID NO: 578 - DNA, 533 bp, Artificial Sequence
  chemically treated genomic DNA (Homo sapiens) CpG-island No: 578
aaacccttcacccacgcgaaccccaacaactccttaaaaaacaaaatcgctactctaaaaccgcccacaaaaaaaccctcgaaaaacgccacgcaaacgaaaaacaaaaacgactcgaaaaacaaaaacaaaacgctccaaccacacccaaacgccgcaacttatttacgcctctccgccgcgtcttcccgcccgccaatcacgtaaccgcccgccccgccccctcgaactctcgcgtaactcctcccgccgcgccgacccttctttttacctccttcgcgaaatcacaaaatctcttcgcaacctcctttcgaatccttccgcccgaccccgcccccctccataaaaaccctccttactttttttctcgtccaacccacatcgtcaattataaataaaaaaacctcttccttccgacgaaactaccgaacgcgaccgtctatccttcctttcgaaaaaaaaaaaaaatccgaaaaaaaactctttttcgtaacgaaaaccgccgtcgaccttaaccctttcacgacgaaaaa

SEQ ID NO: 579 - DNA, 533 bp, Artificial Sequence
  chemically treated genomic DNA (Homo sapiens) CpG-island No: 579
aggttttttatttacgcgggttttagtagttttttgggaaataggatcgttgttttgaggtcgtttatagagagattttcggagggcgttacgtaagcgaagggtagaaacgattcggggggtaggggtagggcgttttaattatatttaggcgtcgtagtttgtttacgttttttcgtcgcgttttttcgttcgttagttacgtgatcgttcgtttcgttttttcgggttttcgcgtggtttttttcgtcgcgtcggtttttttttttgtttttttcgcggagttataagattttttcgtagttttttttcggattttttcgttcggtttcgtttttttttataaaaattttttttattttttttttcgtttaatttatatcgttagttatgagtggaagagtttttttttttcggcggggttgtcgagcgcggtcgtttattttttttttcgagaaggaggggaggttcggagggggattttttttcgtggcggaggtcgtcgtcggttttggtttttttacgacggggga

SEQ ID NO: 580 - DNA, 533 bp, Artificial Sequence
  chemically treated genomic DNA (Homo sapiens) CpG-island No: 580
tcccccgtcgtaaaaaaaccaaaaccgacgacgacctccgccacgaaaaaaaatccccctccgaacctcccctccttctcgaaaaaaaaaataaacgaccgcgctcgacaaccccgccgaaaaaaaaaaactcttccactcataactaacgatataaattaaacgaaaaaaaaaataaaaaaaatttttataaaaaaaaacgaaaccgaacgaaaaaatccgaaaaaaaactacgaaaaaatcttataactccgcgaaaaaaacaaaaaaaaaaaccgacgcgacgaaaaaaaccacgcgaaaacccgaaaaaacgaaacgaacgatcacgtaactaacgaacgaaaaaacgcgacgaaaaaacgtaaacaaactacgacgcctaaatataattaaaacgccctacccctaccccccgaatcgtttctacccttcgcttacgtaacgccctccgaaaatctctctataaacgacctcaaaacaacgatcctatttcccaaaaaactactaaaacccgcgtaaataaaaaacct

SEQ ID NO: 581 - DNA, 916 bp, Artificial Sequence
  chemically treated genomic DNA (Homo sapiens) CpG-island No: 581
gaacgtgtatatttggtgacgtcggcgcgtcgatttagcggttttcgtttggttggggcgaggttggttttaggttttagcggggtggggagtattgagtaggcggttggggcggacggatacgtgagatcggtcgtatatggcgttgggagcgtggcgcgtgcgcgcggcgaagcggagtgacgtgtacgcgttgtttgcggtttcgcgtaggtttcgtgtgcgcgttcggttttggataataggttcggttgtttcgcggggggaatattcgcgtcggttcgcgggagggaggtttgagcgcgttttcgagcgcgttttcgagtttacgcggcggggcgcgtttttcgtatttgcgggcgggttggggcggggtcgcggttgttttcgtttattcgggttcgagttcggggagtcggggcggaatcgagcggcgaggttcgagcggtcggagcgcggcgcggcgtagataatgggagcggcgttggcggttgtcggggcggtttcgagggtcgtagagttttgggttcggcggggatcggaggtcgcgttatgagtttcgtagtcgggcgtatttttgcgcgcgcgcgggtttaggcgagcggtttttgcgagtttcgggtttcgttttggggtcggcgatgtgttatcgaggttgaggatgatggtagattgttaggtgagtgcgcgtcgtttttagtttcgcgtcgcgggtggagggaggatcgtatgttttagtttatatttatcggggggagggagttcggcgtcgcgtttacgttgagcgtgcgtttacgtagtttcgcgtttaatttcgttcgggatagtagggaaattgaggataggagaggggtagggattcgttcggggtatacgaagttggcggagtttagagatgaagggagggtttcggttt

SEQ ID NO: 582 - DNA, 916 bp, Artificial Sequence
  chemically treated genomic DNA (Homo sapiens) CpG-island No: 582
aaaccgaaaccctcccttcatctctaaactccgccaacttcgtataccccgaacgaatccctacccctctcctatcctcaatttccctactatcccgaacgaaattaaacgcgaaactacgtaaacgcacgctcaacgtaaacgcgacgccgaactccctccccccgataaatataaactaaaacatacgatcctccctccacccgcgacgcgaaactaaaaacgacgcgcactcacctaacaatctaccatcatcctcaacctcgataacacatcgccgaccccaaaacgaaacccgaaactcgcaaaaaccgctcgcctaaacccgcgcgcgcgcaaaaatacgcccgactacgaaactcataacgcgacctccgatccccgccgaacccaaaactctacgaccctcgaaaccgccccgacaaccgccaacgccgctcccattatctacgccgcgccgcgctccgaccgctcgaacctcgccgctcgattccgccccgactccccgaactcgaacccgaataaacgaaaacaaccgcgaccccgccccaacccgcccgcaaatacgaaaaacgcgccccgccgcgtaaactcgaaaacgcgctcgaaaacgcgctcaaacctccctcccgcgaaccgacgcgaatattccccccgcgaaacaaccgaacctattatccaaaaccgaacgcgcacacgaaacctacgcgaaaccgcaaacaacgcgtacacgtcactccgcttcgccgcgcgcacgcgccacgctcccaacgccatatacgaccgatctcacgtatccgtccgccccaaccgcctactcaatactccccaccccgctaaaacctaaaaccaacctcgccccaaccaaacgaaaaccgctaaatcgacgcgccgacgtcaccaaatatacacgttc

SEQ ID NO: 583 - DNA, 916 bp, Artificial Sequence
  chemically treated genomic DNA (Homo sapiens) CpG-island No: 583
aggtcggaattttttttttatttttggatttcgttaatttcgtgtgtttcgggcgagtttttgttttttttttgtttttagtttttttattgtttcgggcggggttggacgcggagttgcgtaagcgtacgtttagcgtggacgcggcgtcgggtttttttttttcggtgggtgtgggttggggtatacggttttttttttattcgcgacgcgaggttggggacggcgcgtatttatttggtaatttattattatttttagtttcggtggtatatcgtcggttttagggcgggattcggggttcgtagaggtcgttcgtttgggttcgcgcgcgcgtaggggtgcgttcggttgcggggtttatggcgcggttttcggttttcgtcgggtttaggattttgcggttttcggggtcgtttcggtagtcgttagcgtcgtttttattgtttgcgtcgcgtcgcgtttcggtcgttcgggtttcgtcgttcggtttcgtttcggtttttcgggttcgggttcgggtgggcggggatagtcgcggtttcgttttagttcgttcgtaggtgcgaggggcgcgtttcgtcgcgtgagttcggggacgcgttcgggggcgcgtttaggtttttttttcgcgggtcgacgcgggtgtttttttcgcggggtagtcgggtttgttgtttaaggtcgggcgcgtatacggggtttgcgcgggatcgtagatagcgcgtgtacgttatttcgtttcgtcgcgcgtacgcgttacgtttttagcgttatgtgcggtcgattttacgtgttcgttcgttttagtcgtttgtttagtattttttatttcgttaggatttagggttaatttcgttttagttaggcgggggtcgttgagtcggcgcgtcggcgttattaaatatatacgttt

SEQ ID NO: 584 - DNA, 916 bp, Artificial Sequence
  chemically treated genomic DNA (Homo sapiens) CpG-island No: 584
aaacgtatatatttaataacgccgacgcgccgactcaacgacccccgcctaactaaaacgaaattaaccctaaatcctaacgaaataaaaaatactaaacaaacgactaaaacgaacgaacacgtaaaatcgaccgcacataacgctaaaaacgtaacgcgtacgcgcgacgaaacgaaataacgtacacgcgctatctacgatcccgcgcaaaccccgtatacgcgcccgaccttaaacaacaaacccgactaccccgcgaaaaaaacacccgcgtcgacccgcgaaaaaaaaacctaaacgcgcccccgaacgcgtccccgaactcacgcgacgaaacgcgcccctcgcacctacgaacgaactaaaacgaaaccgcgactatccccgcccacccgaacccgaacccgaaaaaccgaaacgaaaccgaacgacgaaacccgaacgaccgaaacgcgacgcgacgcaaacaataaaaacgacgctaacgactaccgaaacgaccccgaaaaccgcaaaatcctaaacccgacgaaaaccgaaaaccgcgccataaaccccgcaaccgaacgcacccctacgcgcgcgcgaacccaaacgaacgacctctacgaaccccgaatcccgccctaaaaccgacgatataccaccgaaactaaaaataataataaattaccaaataaatacgcgccgtccccaacctcgcgtcgcgaataaaaaaaaaaccgtataccccaacccacacccaccgaaaaaaaaaaacccgacgccgcgtccacgctaaacgtacgcttacgcaactccgcgtccaaccccgcccgaaacaataaaaaaactaaaaacaaaaaaaaaacaaaaactcgcccgaaacacacgaaattaacgaaatccaaaaataaaaaaaaaattccgacct

SEQ ID NO: 585 - DNA, 915 bp, Artificial Sequence
  chemically treated genomic DNA (Homo sapiens) CpG-island No: 585
gaacgtgtatatttggtgacgtcggcgcgtcgatttagcggttttcgtttggttggggcgaggttggttttaggttttagcggggtggggagtattgagtaggcggttggggcggacggatacgtgagatcggtcgtatatggcgttgggagcggtggcgcggtgcgcggcgaagcggagtgacgtgtacgcgttgtttgcggtttcgcgtaggtttcgtgtgcgcgttcggttttggataataggttcggttgtttcgcggggggaatattcgcgtcggttcgcgggagggaggtttgagcgcgttttcgagcgcgttttcgagtttacgcggcggggcgcgtttttcgtatttgcgggcgggttggggcggggtcgcggttgttttcgttttaatcggttcgagttcggggagtcggggcggaatcgagcggcgaggttcgagcggtcggagcgcggcgcggcgtagataatgggagcggcgttggcggttggggttcggggttcgagggtcgtagagttttgggttcggcggggatcggaggtcgcgttatgagtttcgtagtcgggcgtatttttgcgcgcgcgcgggtttaggcgagcggtttttgcgagtttcgggtttcgttttggggtcggcgatgtgttatcgaggttgaggatgatggtagattgttaggtgagtgcgcgtcgtttttagtttcgcgtcgcgggtggagggaggatcgtatgttttagtttatatttatcggggggagggagttcggcgtcgcgtttacgttgagcgtgcgttttaacggttcgcgtttaatttcgttcgggatagtagggaaattgaggataggagaggggtagggattcgttcggggtatacgaagttggcggagtttagagatgaagggagggtttcgtttt

SEQ ID NO: 586 - DNA, 915 bp, Artificial Sequence
  chemically treated genomic DNA (Homo sapiens) CpG-island No: 586
aaaacgaaaccctcccttcatctctaaactccgccaacttcgtataccccgaacgaatccctacccctctcctatcctcaatttccctactatcccgaacgaaattaaacgcgaaccgttaaaacgcacgctcaacgtaaacgcgacgccgaactccctccccccgataaatataaactaaaacatacgatcctccctccacccgcgacgcgaaactaaaaacgacgcgcactcacctaacaatctaccatcatcctcaacctcgataacacatcgccgaccccaaaacgaaacccgaaactcgcaaaaaccgctcgcctaaacccgcgcgcgcgcaaaaatacgcccgactacgaaactcataacgcgacctccgatccccgccgaacccaaaactctacgaccctcgaaccccgaaccccaaccgccaacgccgctcccattatctacgccgcgccgcgctccgaccgctcgaacctcgccgctcgattccgccccgactccccgaactcgaaccgattaaaacgaaaacaaccgcgaccccgccccaacccgcccgcaaatacgaaaaacgcgccccgccgcgtaaactcgaaaacgcgctcgaaaacgcgctcaaacctccctcccgcgaaccgacgcgaatattccccccgcgaaacaaccgaacctattatccaaaaccgaacgcgcacacgaaacctacgcgaaaccgcaaacaacgcgtacacgtcactccgcttcgccgcgcaccgcgccaccgctcccaacgccatatacgaccgatctcacgtatccgtccgccccaaccgcctactcaatactccccaccccgctaaaacctaaaaccaacctcgccccaaccaaacgaaaaccgctaaatcgacgcgccgacgtcaccaaatatacacgttc

SEQ ID NO: 587 - DNA, 915 bp, Artificial Sequence
  chemically treated genomic DNA (Homo sapiens) CpG-island No: 587
gaggcggaattttttttttatttttggatttcgttaatttcgtgtgtttcgggcgagtttttgttttttttttgtttttagtttttttattgtttcgggcggggttggacgcggatcgttaaagcgtacgtttagcgtggacgcggcgtcgggtttttttttttcggtgggtgtgggttggggtatacggttttttttttattcgcgacgcgaggttggggacggcgcgtatttatttggtaatttattattatttttagtttcggtggtatatcgtcggttttagggcgggattcggggttcgtagaggtcgttcgtttgggttcgcgcgcgcgtaggggtgcgttcggttgcggggtttatggcgcggttttcggttttcgtcgggtttaggattttgcggttttcgggtttcgggttttagtcgttagcgtcgtttttattgtttgcgtcgcgtcgcgtttcggtcgttcgggtttcgtcgttcggtttcgtttcggtttttcgggttcgggtcggttggggcggggatagtcgcggtttcgttttagttcgttcgtaggtgcgaggggcgcgtttcgtcgcgtgagttcggggacgcgttcgggggcgcgtttaggtttttttttcgcgggtcgacgcgggtgtttttttcgcggggtagtcgggtttgttgtttaaggtcgggcgcgtatacggggtttgcgcgggatcgtagatagcgcgtgtacgttatttcgtttcgtcgcgtatcgcgttatcgtttttagcgttatgtgcggtcgattttacgtgttcgttcgttttagtcgtttgtttagtattttttatttcgttaggatttagggttaatttcgttttagttaggcgggggtcgttgagtcggcgcgtcggcgttattaaatatatacgttt

SEQ ID NO: 588 - DNA, 915 bp, Artificial Sequence
  chemically treated genomic DNA (Homo sapiens) CpG-island No: 588
aaacgtatatatttaataacgccgacgcgccgactcaacgacccccgcctaactaaaacgaaattaaccctaaatcctaacgaaataaaaaatactaaacaaacgactaaaacgaacgaacacgtaaaatcgaccgcacataacgctaaaaacgataacgcgatacgcgacgaaacgaaataacgtacacgcgctatctacgatcccgcgcaaaccccgtatacgcgcccgaccttaaacaacaaacccgactaccccgcgaaaaaaacacccgcgtcgacccgcgaaaaaaaaacctaaacgcgcccccgaacgcgtccccgaactcacgcgacgaaacgcgcccctcgcacctacgaacgaactaaaacgaaaccgcgactatccccgccccaaccgacccgaacccgaaaaaccgaaacgaaaccgaacgacgaaacccgaacgaccgaaacgcgacgcgacgcaaacaataaaaacgacgctaacgactaaaacccgaaacccgaaaaccgcaaaatcctaaacccgacgaaaaccgaaaaccgcgccataaaccccgcaaccgaacgcacccctacgcgcgcgcgaacccaaacgaacgacctctacgaaccccgaatcccgccctaaaaccgacgatataccaccgaaactaaaaataataataaattaccaaataaatacgcgccgtccccaacctcgcgtcgcgaataaaaaaaaaaccgtataccccaacccacacccaccgaaaaaaaaaaacccgacgccgcgtccacgctaaacgtacgctttaacgatccgcgtccaaccccgcccgaaacaataaaaaaactaaaaacaaaaaaaaaacaaaaactcgcccgaaacacacgaaattaacgaaatccaaaaataaaaaaaaaattccgcctc

SEQ ID NO: 589 - DNA, 502 bp, Artificial Sequence
  chemically treated genomic DNA (Homo sapiens) CpG-island No: 589
tttattttcgaacgtttttttagttgcgtagcgttagtgatttttttttttgggatgtttgcgttaggttagttttagtttttcgggtttttatcgcgcgttttcgttatttgcgcgtattttggggttttcgtcgcgtggttcgcggtttttattttcgcgttttagatttcgcgcgttttgggtcgttttattttttagttttttattgtttgttcgtattttcgggttttttacgtcgttcgttttagttatcgttcgtcgtgggtttcggagatgcgggtagcggcgcgacgtattgcggggtttttagggcggggttaggggtcgttgggtcgtgtttttatggtagcgtcgtaggtttggcgagtcgagcgtagaggttgggtaggcgtgtgcgacgagtttaagttatcgatcgtttcgcgaggaggggttgggttcgtttcgaataggaattggaagaggaggaggaggggttggaggaggaggggttggagga

SEQ ID NO: 590 - DNA, 502 bp, Artificial Sequence
  chemically treated genomic DNA (Homo sapiens) CpG-island No: 590
tcctccaacccctcctcctccaacccctcctcctcctcttccaattcctattcgaaacgaacccaacccctcctcgcgaaacgatcgataacttaaactcgtcgcacacgcctacccaacctctacgctcgactcgccaaacctacgacgctaccataaaaacacgacccaacgacccctaaccccgccctaaaaaccccgcaatacgtcgcgccgctacccgcatctccgaaacccacgacgaacgataactaaaacgaacgacgtaaaaaacccgaaaatacgaacaaacaataaaaaactaaaaaataaaacgacccaaaacgcgcgaaatctaaaacgcgaaaataaaaaccgcgaaccacgcgacgaaaaccccaaaatacgcgcaaataacgaaaacgcgcgataaaaacccgaaaaactaaaactaacctaacgcaaacatcccaaaaaaaaaaatcactaacgctacgcaactaaaaaaacgttcgaaaataaa

SEQ ID NO: 591 - DNA, 502 bp, Artificial Sequence
  chemically treated genomic DNA (Homo sapiens) CpG-island No: 591
ttttttagtttttttttttttagtttttttttttttttttttagtttttattcggggcgggtttagttttttttcgcggagcgatcgatggtttgggttcgtcgtatacgtttgtttagtttttgcgttcggttcgttaggtttgcggcgttgttatggagatacggtttagcggtttttggtttcgttttgggagtttcgtagtgcgtcgcgtcgttgttcgtattttcgaggtttacgacgagcggtgattggggcgggcgacgtgggggattcggggatgcgggtagataatagggggttggaggatggggcgatttagagcgcgcggggtttggggcgcggggatgggggtcgcgggttacgcgacggggattttagggtgcgcgtaggtggcggggacgcgcgatgggggttcgggaagttgaggttgatttagcgtaggtattttaggaggggaggttattgacgttgcgtagttgggaaggcgttcgggagtggg

SEQ ID NO: 592 - DNA, 502 bp, Artificial Sequence
  chemically treated genomic DNA (Homo sapiens) CpG-island No: 592
cccactcccgaacgccttcccaactacgcaacgtcaataacctcccctcctaaaatacctacgctaaatcaacctcaacttcccgaacccccatcgcgcgtccccgccacctacgcgcaccctaaaatccccgtcgcgtaacccgcgacccccatccccgcgccccaaaccccgcgcgctctaaatcgccccatcctccaaccccctattatctacccgcatccccgaatcccccacgtcgcccgccccaatcaccgctcgtcgtaaacctcgaaaatacgaacaacgacgcgacgcactacgaaactcccaaaacgaaaccaaaaaccgctaaaccgtatctccataacaacgccgcaaacctaacgaaccgaacgcaaaaactaaacaaacgtatacgacgaacccaaaccatcgatcgctccgcgaaaaaaaactaaacccgccccgaataaaaactaaaaaaaaaaaaaaaaaaactaaaaaaaaaaaaactaaaaaa

SEQ ID NO: 593 - DNA, 776 bp, Artificial Sequence
  chemically treated genomic DNA (Homo sapiens) CpG-island No: 593
  unsure (724)
ggtgcgggtcggcgtcgtagtttagtgcgcggtcgtaaggggtaggtgcgaggtcggttgttattcgggagtttcgcgttgtttttttttgcgtagttagggtttatttgggtcgttttcgtttcgtatttttgcgcgtttcgtttttatttttagttcggttttttattttgtttattcgagcgtttttttagttttttcgcgtcgcgttcgggtcgtttggtcggttttgcgggtcgtggcgcgacggcgtcgttatggtaatcgggcggcgggttgggcggtgttttcgggatcggaagtggcgtacgcggttttcggggttgtttcgtacgtgttaggttttcgcggttgcggttacgttcgggatcgggttttgttagtttcgggttcgtacgtgggcgaatcgcggttatcgtgagttcggtttcgcgattttttttcggggtttttatgatcgggggtgcgtgggatttgcggtttgcgggggtggagggtcgggagttttttcgggtttgtttcgagggtcgcgggattcgtttttgcgagtttcgattgcgtacggaaggatttggggtcggttaggtttgggggatgggacgggtttcgaggagagcgggtgttaggggcgagattcgtcgttttttttcggtttggtttcgcgttttttgattttttcgttttacgttttttattttgttttttatttttttttttgtttcgnttttcgttttgttcgggtttaggaggttattagatgttagattcggttcggg

SEQ ID NO: 594 - DNA, 776 bp, Artificial Sequence
  chemically treated genomic DNA (Homo sapiens) CpG-island No: 594
  unsure (53)
cccgaaccgaatctaacatctaataacctcctaaacccgaacaaaacgaaaancgaaacaaaaaaaaaaataaaaaacaaaataaaaaacgtaaaacgaaaaaatcaaaaaacgcgaaaccaaaccgaaaaaaaacgacgaatctcgcccctaacacccgctctcctcgaaacccgtcccatcccccaaacctaaccgaccccaaatccttccgtacgcaatcgaaactcgcaaaaacgaatcccgcgaccctcgaaacaaacccgaaaaaactcccgaccctccacccccgcaaaccgcaaatcccacgcacccccgatcataaaaaccccgaaaaaaaatcgcgaaaccgaactcacgataaccgcgattcgcccacgtacgaacccgaaactaacaaaacccgatcccgaacgtaaccgcaaccgcgaaaacctaacacgtacgaaacaaccccgaaaaccgcgtacgccacttccgatcccgaaaacaccgcccaacccgccgcccgattaccataacgacgccgtcgcgccacgacccgcaaaaccgaccaaacgacccgaacgcgacgcgaaaaaactaaaaaaacgctcgaataaacaaaataaaaaaccgaactaaaaataaaaacgaaacgcgcaaaaatacgaaacgaaaacgacccaaataaaccctaactacgcaaaaaaaaacaacgcgaaactcccgaataacaaccgacctcgcacctaccccttacgaccgcgcactaaactacgacgccgacccgcacc

SEQ ID NO: 595 - DNA, 776 bp, Artificial Sequence
  chemically treated genomic DNA (Homo sapiens) CpG-island No: 595
  unsure (53)
ttcgaatcgggtttgatatttagtggttttttgggttcgggtagggcgagggncggggtagggaagaaggtggagggtagaatgggaggcgtggagcgagaaaattaggaagcgcgggattaagtcggggaagggcggcgggtttcgtttttggtattcgtttttttcggggttcgttttattttttaggtttggtcgattttaggttttttcgtgcgtagtcggggttcgtaaggacgaatttcgcggttttcgaggtaggttcgggggagttttcggttttttattttcgtaggtcgtagattttacgtattttcgattatgggggtttcggagggaggtcgcgaggtcgggtttacggtggtcgcggttcgtttacgtgcgggttcggagttggtagggttcggtttcgagcgtggtcgtaatcgcggggatttggtacgtgcggggtagtttcgggggtcgcgtacgttattttcggtttcggagatatcgtttagttcgtcgttcggttgttatggcgacgtcgtcgcgttacggttcgtagaatcggttaagcgattcgggcgcggcgcggggaggttgaagggacgttcgggtaggtaaggtaggaggtcgggttgggggtgggagcggagcgcgtaggggtgcggggcgggggcggtttaggtgagttttgattgcgtagggagggatagcgcggggttttcgagtagtagtcggtttcgtatttgttttttgcggtcgcgtattggattgcggcgtcgattcgtatt

SEQ ID NO: 596 - DNA, 776 bp, Artificial Sequence
  chemically treated genomic DNA (Homo sapiens) CpG-island No: 596
  unsure (724)
aatacgaatcgacgccgcaatccaatacgcgaccgcaaaaaacaaatacgaaaccgactactactcgaaaaccccgcgctatccctccctacgcaatcaaaactcacctaaaccgcccccgccccgcacccctacgcgctccgctcccacccccaacccgacctcctaccttacctacccgaacgtcccttcaacctccccgcgccgcgcccgaatcgcttaaccgattctacgaaccgtaacgcgacgacgtcgccataacaaccgaacgacgaactaaacgatatctccgaaaccgaaaataacgtacgcgacccccgaaactaccccgcacgtaccaaatccccgcgattacgaccacgctcgaaaccgaaccctaccaactccgaacccgcacgtaaacgaaccgcgaccaccgtaaacccgacctcgcgacctccctccgaaacccccataatcgaaaatacgtaaaatctacgacctacgaaaataaaaaaccgaaaactcccccgaacctacctcgaaaaccgcgaaattcgtccttacgaaccccgactacgcacgaaaaaacctaaaatcgaccaaacctaaaaaataaaacgaaccccgaaaaaaacgaataccaaaaacgaaacccgccgcccttccccgacttaatcccgcgcttcctaattttctcgctccacgcctcccattctaccctccaccttcttccctaccccgnccctcgccctacccgaacccaaaaaaccactaaatatcaaacccgattcgaa

SEQ ID NO: 597 - DNA, 842 bp, Artificial Sequence
  chemically treated genomic DNA (Homo sapiens) CpG-island No: 597
  unsure (4, 6, 32, 36, 54, 116, 243, 269, 271, 289, 301, 369, 421)
  unsure (423, 504, 512..513, 525)
ggtntncgcgtttttgttcggggcgggttagngaantttcggttcgcgtcgttnggggattttggagcggaggaggaagcgcggcggggcgggggcgggggtgtgtcgggttttantaattcgtagggcggtcgcggcgtaggagaaggggtagagtcgagtatcgcgtatcgcgttatgggggtcgtttcgggtcgtcgggggtcggggttgttgttgtcgttgtcgttgttgttgttgttngtcgtcgtagttcgttttggcgttgngnatttcgggttgtagtttngaaatttttttngttgacgaggtcggggcgtagtttttcgcgtagagttataattttagcgtcgaataggtgttgttttnagagcgtggtcgttagttgggcgtacgatattaatattatcgcggagaatgntnaaggttaggtggcgttcgggttcgggcgggggcggggcgggtcgcggcggttaattatagtacgcggtcggtttgtggggncgggtagnntggcgttttcgnattcgaattttatttcgatttcggattttcgtttcgatagttagtcgcggggttcgagcgtcgggttgcgcgtacggtttgcgtttttagtatgtacgagttggatggatgagggtggttgtttttaggtcgcgttcgttttcgtcgaaggtgttgggtttggttttggggttttcgcgttttcgggtagttgtttttttattttcggacgttgtcgttgttatcgttatcgtattgtattgtttatttattttttattcgttcggttttttttttggttttaatttttgttttattatttttatgaggtagatttt

SEQ ID NO: 598 - DNA, 842 bp, Artificial Sequence
  chemically treated genomic DNA (Homo sapiens) CpG-island No: 598
  unsure (318, 330..331, 339, 420, 422, 474, 542, 554, 572, 574, 600)
  unsure (727, 789, 807, 811, 837, 839)
aaaatctacctcataaaaataataaaacaaaaattaaaaccaaaaaaaaaaccgaacgaataaaaaataaataaacaatacaatacgataacgataacaacgacaacgtccgaaaataaaaaaacaactacccgaaaacgcgaaaaccccaaaaccaaacccaacaccttcgacgaaaacgaacgcgacctaaaaacaaccaccctcatccatccaactcgtacatactaaaaacgcaaaccgtacgcgcaacccgacgctcgaaccccgcgactaactatcgaaacgaaaatccgaaatcgaaataaaattcgaatncgaaaacgccannctacccgnccccacaaaccgaccgcgtactataattaaccgccgcgacccgccccgcccccgcccgaacccgaacgccacctaaccttnancattctccgcgataatattaatatcgtacgcccaactaacgaccacgctctnaaaacaacacctattcgacgctaaaattataactctacgcgaaaaactacgccccgacctcgtcaacnaaaaaaatttcnaaactacaacccgaaatncncaacgccaaaacgaactacgacgacnaacaacaacaacaacgacaacgacaacaacaaccccgacccccgacgacccgaaacgacccccataacgcgatacgcgatactcgactctaccccttctcctacgccgcgaccgccctacgaattantaaaacccgacacacccccgcccccgccccgccgcgcttcctcctccgctccaaaatccccnaacgacgcgaaccgaaanttcnctaacccgccccgaacaaaaacgcgnanacc

SEQ ID NO: 599 - DNA, 842 bp, Artificial Sequence
  chemically treated genomic DNA (Homo sapiens) CpG-island No: 599
  unsure (318, 330..331, 339, 420, 422, 474, 542, 554, 572, 574, 600)
  unsure (727, 789, 807, 811, 837, 839)
ggaatttgttttatgggaatggtggagtagaaattgggattagaaaagaggtcgggcgagtggagggtggatggatagtgtagtgcggtgacggtgatagcgatagcgttcggaggtgagaaggtagttgttcgagagcgcgggggttttagagttaagtttagtattttcggcgaaggcgggcgcggtttgggagtagttatttttatttatttaattcgtgtatgttgggagcgtaggtcgtgcgcgtagttcggcgttcgggtttcgcggttgattgtcggggcgagggttcggggtcggggtggggttcgggtncgggggcgttannttgttcgnttttataagtcggtcgcgtgttgtgattggtcgtcgcggttcgtttcgttttcgttcgggttcgggcgttatttggttttngntatttttcgcggtgatgttggtgtcgtgcgtttagttggcggttacgttttnggaatagtatttgttcggcgttggagttgtagttttgcgcgaagagttgcgtttcggtttcgttagtnagaaaagttttngggttgtagttcggggtntntaacgttagggcgggttgcggcggtnagtagtaatagtagcggtagcggtagtagtagtttcggttttcggcggttcgaggcggtttttatgacgcggtgcgcggtgttcggttttgtttttttttttgcgtcgcggtcgttttgcgggttantaaaattcgatatattttcgttttcgtttcgtcgcgttttttttttcgttttaaagtttttnagcggcgcgggtcgaggntttnttggttcgtttcgggtaggggcgcgngngtt

SEQ ID NO: 600 - DNA, 842 bp, Artificial Sequence
  chemically treated genomic DNA (Homo sapiens) CpG-island No: 600
  unsure (4, 6, 32, 36, 54, 116, 243, 269, 271, 289, 301, 369, 421)
  unsure (423, 504, 512..513, 525)
aacncncgcgcccctacccgaaacgaaccaanaaancctcgacccgcgccgctnaaaaactttaaaacgaaaaaaaaaacgcgacgaaacgaaaacgaaaatatatcgaattttantaacccgcaaaacgaccgcgacgcaaaaaaaaaaacaaaaccgaacaccgcgcaccgcgtcataaaaaccgcctcgaaccgccgaaaaccgaaactactactaccgctaccgctactattactactnaccgccgcaacccgccctaacgttananaccccgaactacaacccnaaaacttttctnactaacgaaaccgaaacgcaactcttcgcgcaaaactacaactccaacgccgaacaaatactattccnaaaacgtaaccgccaactaaacgcacgacaccaacatcaccgcgaaaaatancnaaaaccaaataacgcccgaacccgaacgaaaacgaaacgaaccgcgacgaccaatcacaacacgcgaccgacttataaaancgaacaanntaacgcccccgnacccgaaccccaccccgaccccgaaccctcgccccgacaatcaaccgcgaaacccgaacgccgaactacgcgcacgacctacgctcccaacatacacgaattaaataaataaaaataactactcccaaaccgcgcccgccttcgccgaaaatactaaacttaactctaaaacccccgcgctctcgaacaactaccttctcacctccgaacgctatcgctatcaccgtcaccgcactacactatccatccaccctccactcgcccgacctcttttctaatcccaatttctactccaccattcccataaaacaaattcc

SEQ ID NO: 601 - DNA, 816 bp, Artificial Sequence
  chemically treated genomic DNA (Homo sapiens) CpG-island No: 601
tacgattaaagcgggggtttttagcgtttggggtcgttttgtttcggtttagtcgcgtatttggatttttaaggtagtttttttttcggcgtttcgttgtttcgcggtttcgtagtatcgtttagttcgcgttagattcgtttttagtcgtagggaattatttatcgtgcgtcggtttttgggttgaaaggtttttgattacgggttatgtaatagcgttattaacgagcgggacggatagagcgatttttttcgattttcggaggaagcggaacgttatcggaaatcgcggggagggttaaaggagattcggttttcgaggtttatggcgatgttggttttagtattcggacgagttatgcggtttttgggtggttaattttggcgttttttgtttcgcggattcgagttttggggtttagtcgaggggattgcgagagttttgttgaggtagttttgcgcgcggtaagcggaggcgtggcgtgtttcggggcgttttggttattgtttgggaattcggttttttagtattgcgaggtcgttattttcgtggtcgtagaagggtttcggagattttacgcgtttttcgaagttcggggtgagtgtatatttggaatttttttggtgttcgtcgcggttgtcggttagtttagcggttatattttatttggtcgtaattttagatattatttcgttttttttaaagttgtttttagtttgcgcgttttatttgggttatggaattttattttatatttttcgtgttttgcgggtagttttagttttttatagagaatttgagattttatatttttt

SEQ ID NO: 602 - DNA, 816 bp, Artificial Sequence
  chemically treated genomic DNA (Homo sapiens) CpG-island No: 602
aaaaaatataaaatctcaaattctctataaaaaactaaaactacccgcaaaacacgaaaaatataaaataaaattccataacccaaataaaacgcgcaaactaaaaacaactttaaaaaaaacgaaataatatctaaaattacgaccaaataaaatataaccgctaaactaaccgacaaccgcgacgaacaccaaaaaaattccaaatatacactcaccccgaacttcgaaaaacgcgtaaaatctccgaaacccttctacgaccacgaaaataacgacctcgcaatactaaaaaaccgaattcccaaacaataaccaaaacgccccgaaacacgccacgcctccgcttaccgcgcgcaaaactacctcaacaaaactctcgcaatcccctcgactaaaccccaaaactcgaatccgcgaaacaaaaaacgccaaaattaaccacccaaaaaccgcataactcgtccgaatactaaaaccaacatcgccataaacctcgaaaaccgaatctcctttaaccctccccgcgatttccgataacgttccgcttcctccgaaaatcgaaaaaaatcgctctatccgtcccgctcgttaataacgctattacataacccgtaatcaaaaacctttcaacccaaaaaccgacgcacgataaataattccctacgactaaaaacgaatctaacgcgaactaaacgatactacgaaaccgcgaaacaacgaaacgccgaaaaaaaaactaccttaaaaatccaaatacgcgactaaaccgaaacaaaacgaccccaaacgctaaaaacccccgctttaatcgta

SEQ ID NO: 603 - DNA, 816 bp, Artificial Sequence
  chemically treated genomic DNA (Homo sapiens) CpG-island No: 603
agagggtgtaaagttttaagttttttgtggagaattgggattattcgtaaggtacgggaaatgtaggatgaaattttatgatttaggtaaggcgcgtaagttaaggataattttaggggaggcggagtagtgtttgaggttacgattaagtgggatgtggtcgttgggttggtcgatagtcgcgacgagtattagaagggttttaggtgtgtatttatttcgggtttcgaggggcgcgtggagttttcggggtttttttgcgattacgggggtggcggtttcgtagtgttgaggggtcgggtttttaggtaatagttagggcgtttcgaggtacgttacgttttcgtttgtcgcgcgtagaattgttttagtaagattttcgtagttttttcggttgggttttaaaattcgagttcgcgaggtaagaagcgttaaagttggttatttagaggtcgtataattcgttcgggtattaggattagtatcgttatgagtttcggagatcgggttttttttgatttttttcgcgattttcggtagcgtttcgtttttttcggaagtcggaaggagtcgttttgttcgtttcgttcgttggtggcgttgttatatagttcgtagttagaggttttttagtttaggggtcggcgtacggtaggtagttttttgcggttggaggcgggtttggcgcgggttgggcggtgttgcggggtcgcgggatagcggagcgtcgggaagggggttgttttaggggtttaggtgcgcggttgggtcgaggtaaggcggttttaagcgttgggggttttcgttttggtcgtg

SEQ ID NO: 604 - DNA, 816 bp, Artificial Sequence
  chemically treated genomic DNA (Homo sapiens) CpG-island No: 604
cacgaccaaaacgaaaacccccaacgcttaaaaccgccttacctcgacccaaccgcgcacctaaacccctaaaacaacccccttcccgacgctccgctatcccgcgaccccgcaacaccgcccaacccgcgccaaacccgcctccaaccgcaaaaaactacctaccgtacgccgacccctaaactaaaaaacctctaactacgaactatataacaacgccaccaacgaacgaaacgaacaaaacgactccttccgacttccgaaaaaaacgaaacgctaccgaaaatcgcgaaaaaaatcaaaaaaaacccgatctccgaaactcataacgatactaatcctaatacccgaacgaattatacgacctctaaataaccaactttaacgcttcttacctcgcgaactcgaattttaaaacccaaccgaaaaaactacgaaaatcttactaaaacaattctacgcgcgacaaacgaaaacgtaacgtacctcgaaacgccctaactattacctaaaaacccgacccctcaacactacgaaaccgccacccccgtaatcgcaaaaaaaccccgaaaactccacgcgcccctcgaaacccgaaataaatacacacctaaaacccttctaatactcgtcgcgactatcgaccaacccaacgaccacatcccacttaatcgtaacctcaaacactactccgcctcccctaaaattatccttaacttacgcgccttacctaaatcataaaatttcatcctacatttcccgtaccttacgaataatcccaattctccacaaaaaacttaaaactttacaccctct

SEQ ID NO: 605 - DNA, 633 bp, Artificial Sequence
  chemically treated genomic DNA (Homo sapiens) CpG-island No: 605
  unsure (549, 572, 576)
gattcgttggtttcgtgggtcggtttcgagggattagaaggcggtttaggcggaggattttaaggatcgggtgttggaggaggagtttacgttaatttttaggggttcggggcggggagcgtaggattcgcggtgtaggggtagggatttagtcggaattttcggggagggggagggatttagtcgatttcgagggcgggcgtgagggggaggttcggggagttagaggagggcgggagcgagtttagagtttcggggcgggggttagcgcggattttaggagggaaggcgggggtgaggggaggtttcgagggacgtttagtagtcgggagggtcggatttttggtttcgcgcgttagggtcggttcgtttcgcgtttattttagttcgagagtgatgattcgtcggcggagtagtcgtagtattttcgcgcgttatcgcgtcgtcgtttttttcgttttttgtcgagagagcggcgtatatttttcgttcgtatttttcgttcgtattcgtttgttcgttcgtttttcggagaatggggggattggnagatggtgggaagaggcgggagnggantagacggatagatggacgtagcgggttagggtagggtggagatattttttcggattt

SEQ ID NO: 606 - DNA, 633 bp, Artificial Sequence
  chemically treated genomic DNA (Homo sapiens) CpG-island No: 606
  unsure (58, 62, 85)
aaatccgaaaaaatatctccaccctaccctaacccgctacgtccatctatccgtctantccnctcccgcctcttcccaccatctnccaatccccccattctccgaaaaacgaacgaacaaacgaatacgaacgaaaaatacgaacgaaaaatatacgccgctctctcgacaaaaaacgaaaaaaacgacgacgcgataacgcgcgaaaatactacgactactccgccgacgaatcatcactctcgaactaaaataaacgcgaaacgaaccgaccctaacgcgcgaaaccaaaaatccgaccctcccgactactaaacgtccctcgaaacctcccctcacccccgccttccctcctaaaatccgcgctaacccccgccccgaaactctaaactcgctcccgccctcctctaactccccgaacctccccctcacgcccgccctcgaaatcgactaaatccctccccctccccgaaaattccgactaaatccctacccctacaccgcgaatcctacgctccccgccccgaacccctaaaaattaacgtaaactcctcctccaacacccgatccttaaaatcctccgcctaaaccgccttctaatccctcgaaaccgacccacgaaaccaacgaatc

SEQ ID NO: 607 - DNA, 633 bp, Artificial Sequence
  chemically treated genomic DNA (Homo sapiens) CpG-island No: 607
  unsure (58, 62, 85)
agattcgggggaatgtttttattttgttttggttcgttacgtttatttgttcgtttgntttnttttcgtttttttttattatttnttaatttttttatttttcggagggcgggcgggtaggcgggtgcgagcggggggtgcgagcggggggtgtgcgtcgttttttcggtagggggcgggggaggcggcggcgcggtgacgcgcggggatgttgcggttgtttcgtcggcggattattattttcgggttgggatggacgcggggcgggtcggttttggcgcgcggagttaggagttcggttttttcggttgttgagcgtttttcgaagtttttttttattttcgtttttttttttaggattcgcgttgattttcgtttcggggttttggattcgttttcgtttttttttgatttttcggattttttttttacgttcgttttcgggatcgattagattttttttttttttcgaggatttcggttggatttttgtttttgtatcgcggattttgcgtttttcgtttcgggtttttggggattaacgtggattttttttttagtattcgatttttaggatttttcgtttggatcgttttttggtttttcgaagtcggtttacggaattagcggatt

SEQ ID NO: 608 - DNA, 633 bp, Artificial Sequence
  chemically treated genomic DNA (Homo sapiens) CpG-island No: 608
  unsure (549, 572, 576)
aatccgctaattccgtaaaccgacttcgaaaaaccaaaaaacgatccaaacgaaaaatcctaaaaatcgaatactaaaaaaaaaatccacgttaatccccaaaaacccgaaacgaaaaacgcaaaatccgcgatacaaaaacaaaaatccaaccgaaatcctcgaaaaaaaaaaaaaatctaatcgatcccgaaaacgaacgtaaaaaaaaaatccgaaaaatcaaaaaaaaacgaaaacgaatccaaaaccccgaaacgaaaatcaacgcgaatcctaaaaaaaaaaacgaaaataaaaaaaaacttcgaaaaacgctcaacaaccgaaaaaaccgaactcctaactccgcgcgccaaaaccgacccgccccgcgtccatcccaacccgaaaataataatccgccgacgaaacaaccgcaacatccccgcgcgtcaccgcgccgccgcctcccccgccccctaccgaaaaaacgacgcacaccccccgctcgcaccccccgctcgcacccgcctacccgcccgccctccgaaaaataaaaaaattaanaaataataaaaaaaaacgaaaanaaancaaacgaacaaataaacgtaacgaaccaaaacaaaataaaaacattcccccgaatct

SEQ ID NO: 609 - DNA, 602 bp, Artificial Sequence
  chemically treated genomic DNA (Homo sapiens) CpG-island No: 609
  unsure (177, 225, 246, 258, 261, 393, 419, 441, 514, 520)
gtcggttcgttggtttttgagtcggtttttttttatatggtgttcggtggcggtatcgagcggtcgtgcgttttcgtttggtagttttgttttgttcgttagagttggcgtttaaagcggtaatattagcgtcgttgttgtaggttacgcggcggtttaggcgttattgttcggttnggtggtcgggattcgggcggcggcgtttaattttttgcggacgttgtntgtattgggcgtgcgagcggnttgtttgcgttnttnatttggcgcggttagaaaatgcgggcgtttgttgtttcgggttgttagacgagttcggtcgagtgttcgaggtcgggacgttgttttattattttttgaacggtcgatagtttcgtacgggggacgattttnttgcgttgttcggagaattggttcgntttcgcggggattcggttcggntttttcgtgtcgcggtggaggaggttaaagtggttcgtaaggggggcggtttggcgggcgtgggggcggggtnttattnaaagacgttgtttttattagtggaaagtgtttttgtgggcgagcgggacgtggggggttttgttcgtttttcgttaggggga

SEQ ID NO: 610 - DNA, 602 bp, Artificial Sequence
  chemically treated genomic DNA (Homo sapiens) CpG-island No: 610
  unsure (83, 89, 162, 184, 210, 342, 345, 357, 378, 426)
tccccctaacgaaaaacgaacaaaaccccccacgtcccgctcgcccacaaaaacactttccactaataaaaacaacgtctttnaataanaccccgcccccacgcccgccaaaccgccccccttacgaaccactttaacctcctccaccgcgacacgaaaaanccgaaccgaatccccgcgaaancgaaccaattctccgaacaacgcaanaaaatcgtcccccgtacgaaactatcgaccgttcaaaaaataataaaacaacgtcccgacctcgaacactcgaccgaactcgtctaacaacccgaaacaacaaacgcccgcattttctaaccgcgccaaatnaanaacgcaaacaanccgctcgcacgcccaatacanacaacgtccgcaaaaaattaaacgccgccgcccgaatcccgaccaccnaaccgaacaataacgcctaaaccgccgcgtaacctacaacaacgacgctaatattaccgctttaaacgccaactctaacgaacaaaacaaaactaccaaacgaaaacgcacgaccgctcgataccgccaccgaacaccatataaaaaaaaaccgactcaaaaaccaacgaaccgac

SEQ ID NO: 611 - DNA, 602 bp, Artificial Sequence
  chemically treated genomic DNA (Homo sapiens) CpG-island No: 611
  unsure (83, 89, 162, 184, 210, 342, 345, 357, 378, 426)
tttttttggcgaggggcgagtagggttttttacgtttcgttcgtttatagaggtattttttattggtaggaatagcgtttttnaatggngtttcgtttttacgttcgttaaatcgttttttttgcgggttattttggttttttttatcgcggtacggagggntcgggtcgggttttcgcggagncgggttaatttttcgagtagcgtagngaagtcgtttttcgtacggagttgtcggtcgtttagaaaatagtgaggtaacgtttcggtttcgagtattcggtcgagttcgtttagtagttcgaggtagtaggcgttcgtattttttggtcgcgttaggtnagnagcgtaggtagntcgttcgtacgtttagtatangtagcgttcgtaggaggttaggcgtcgtcgttcgggtttcggttattnagtcgggtagtagcgtttgggtcgtcgcgtggtttgtagtagcggcgttggtattgtcgttttgagcgttagttttggcgggtaaaatagagttgttaggcggaggcgtacggtcgttcggtgtcgttatcgggtattatgtagaaggaagtcgatttagaggttagcggatcggt

SEQ ID NO: 612 - DNA, 602 bp, Artificial Sequence
  chemically treated genomic DNA (Homo sapiens) CpG-island No: 612
  unsure (177, 225, 246, 258, 261, 393, 419, 441, 514, 520)
accgatccgctaacctctaaatcgacttccttctacataatacccgataacgacaccgaacgaccgtacgcctccgcctaacaactctattttacccgccaaaactaacgctcaaaacgacaataccaacgccgctactacaaaccacgcgacgacccaaacgctactacccgactnaataaccgaaacccgaacgacgacgcctaacctcctacgaacgctacntatactaaacgtacgaacganctacctacgctnctnacctaacgcgaccaaaaaatacgaacgcctactacctcgaactactaaacgaactcgaccgaatactcgaaaccgaaacgttacctcactattttctaaacgaccgacaactccgtacgaaaaacgacttcnctacgctactcgaaaaattaacccgnctccgcgaaaacccgacccganccctccgtaccgcgataaaaaaaaccaaaataacccgcaaaaaaaacgatttaacgaacgtaaaaacgaaacnccattnaaaaacgctattcctaccaataaaaaatacctctataaacgaacgaaacgtaaaaaaccctactcgcccctcgccaaaaaaa

SEQ ID NO: 613 - DNA, 664 bp, Artificial Sequence
  chemically treated genomic DNA (Homo sapiens) CpG-island No: 613
tcggaatacgttagtggagcggaagatggcggcggcggcggcggtcgttgtagtcgggattttagttgggttgaggcggaggagtcgtcgtttttgatttcgttttggtttcggtgcgcgcggttgagcgcgtgcgaggtttcgcgcgtcgggtaggggcggcggcggttattgcgcgtcgttttgaggagcgttttagcggcggcgcgattgcggttgaggagagagtcggtttcgggttttcgcgtttttttgttttttcggtttttcgttttttcgggggggcggcggcggcgatgttttcggttttttcgtacgggcggttggtggttcgcgtcgtgttcggcggtttttcgtagatcgattttagggtcggcggcggcggcggcggcgattacggattggtgacggtcggttgcggtttcgggaaggattttcgtaagggtttttttaagaagggcgcgtgttacggggacgacgcgtgtttcgtggttcggtatcgtttcgcggacgtgttcggtgagttttcgattcggtttttttgttttagtttcggattcgtttttcggggatttttcgcgcggggtttttttagtttttttcggcggcgaaaggagttagagcgtttatatggagggagcgtttattatgcgttaggcgtcgt

SEQ ID NO: 614 - DNA, 664 bp, Artificial Sequence
  chemically treated genomic DNA (Homo sapiens) CpG-island No: 614
acgacgcctaacgcataataaacgctccctccatataaacgctctaactcctttcgccgccgaaaaaaactaaaaaaaccccgcgcgaaaaatccccgaaaaacgaatccgaaactaaaacaaaaaaaccgaatcgaaaactcaccgaacacgtccgcgaaacgataccgaaccacgaaacacgcgtcgtccccgtaacacgcgcccttcttaaaaaaacccttacgaaaatccttcccgaaaccgcaaccgaccgtcaccaatccgtaatcgccgccgccgccgccgccgaccctaaaatcgatctacgaaaaaccgccgaacacgacgcgaaccaccaaccgcccgtacgaaaaaaccgaaaacatcgccgccgccgcccccccgaaaaaacgaaaaaccgaaaaaacaaaaaaacgcgaaaacccgaaaccgactctctcctcaaccgcaatcgcgccgccgctaaaacgctcctcaaaacgacgcgcaataaccgccgccgcccctacccgacgcgcgaaacctcgcacgcgctcaaccgcgcgcaccgaaaccaaaacgaaatcaaaaacgacgactcctccgcctcaacccaactaaaatcccgactacaacgaccgccgccgccgccgccatcttccgctccactaacgtattccga

SEQ ID NO: 615 - DNA, 664 bp, Artificial Sequence
  chemically treated genomic DNA (Homo sapiens) CpG-island No: 615
acggcgtttggcgtatagtaagcgttttttttatgtgagcgttttggtttttttcgtcgtcgggaggaattggggaagtttcgcgcggggagttttcgggaggcggattcgaggttggggtaagggaatcgggtcggggatttatcgagtacgttcgcggaacggtgtcgggttacgaagtacgcgtcgttttcgtagtacgcgttttttttgaggaggtttttacggaagtttttttcgaagtcgtagtcggtcgttattagttcgtagtcgtcgtcgtcgtcgtcgtcggttttggggtcggtttgcgagaggtcgtcgagtacggcgcgggttattagtcgttcgtacgagaggatcgagaatatcgtcgtcgtcgttttttcgaggaggcggggggtcgggggagtaggaggacgcggaggttcggagtcggttttttttttagtcgtagtcgcgtcgtcgttggggcgttttttagggcggcgcgtagtggtcgtcgtcgtttttgttcgacgcgcggggtttcgtacgcgtttagtcgcgcgtatcggagttagagcgaggttagaagcggcggttttttcgttttagtttaattgaagtttcggttgtagcggtcgtcgtcgtcgtcgttatttttcgttttattagcgtgtttcgg

SEQ ID NO: 616 - DNA, 664 bp, Artificial Sequence
  chemically treated genomic DNA (Homo sapiens) CpG-island No: 616
ccgaaacacgctaataaaacgaaaaataacgacgacgacgacgaccgctacaaccgaaacttcaattaaactaaaacgaaaaaaccgccgcttctaacctcgctctaactccgatacgcgcgactaaacgcgtacgaaaccccgcgcgtcgaacaaaaacgacgacgaccactacgcgccgccctaaaaaacgccccaacgacgacgcgactacgactaaaaaaaaaaccgactccgaacctccgcgtcctcctactcccccgaccccccgcctcctcgaaaaaacgacgacgacgatattctcgatcctctcgtacgaacgactaataacccgcgccgtactcgacgacctctcgcaaaccgaccccaaaaccgacgacgacgacgacgacgactacgaactaataacgaccgactacgacttcgaaaaaaacttccgtaaaaacctcctcaaaaaaaacgcgtactacgaaaacgacgcgtacttcgtaacccgacaccgttccgcgaacgtactcgataaatccccgacccgattcccttaccccaacctcgaatccgcctcccgaaaactccccgcgcgaaacttccccaattcctcccgacgacgaaaaaaaccaaaacgctcacataaaaaaaacgcttactatacgccaaacgccgt

SEQ ID NO: 617 - DNA, 731 bp, Artificial Sequence
  chemically treated genomic DNA (Homo sapiens) CpG-island No: 617
ttcgttagtatcgttattacgatgatgacgtcgcgtattatttgttggaaaaaggagttaatatcgagtagtattagatcgttatcgattagcgtaattattagtatattaagtaatgtatcgaatagggaatcgcgatcgtcggaaagtgtcgtatcgtcgattacgatcgcggcgatgacgttaaattttagatcgtttgcggtatttgcgttattagaatcgaggcgcgtcgttaataaaatgtcggttatcgtcgttaataatttcgaaagggtaaagataagaatgcgtattcgacgaacgttgatgtcgtataattgcgtcgtcgtagtattatcgttaacggtaaaaatcgagcgttcgaagcggttttgcggttgatgaatataaatagcgtaaataatataattatgattagcgcggatatcggtatatcgagaaattgttcgtttagttagtttagtatttcgtttttattaatcggtattggtagtgcgttcgttataaatagttttatttcgcgtagggcgttttatagttttagtgtggtaacgaaatttggtatattaaatacgtcgcgtagatttcggttagcgtttttattagcgcgtttaatagtaatattagtaggtacgttatcgttagcggaattttaaattgtagtaaaaattgttaggtatatcgagataaaagttatattcggttacgttgatatttattttattgag

SEQ ID NO: 618 - DNA, 731 bp, Artificial Sequence
  chemically treated genomic DNA (Homo sapiens) CpG-island No: 618
ctcaataaaataaatatcaacgtaaccgaatataacttttatctcgatatacctaacaatttttactacaatttaaaattccgctaacgataacgtacctactaatattactattaaacgcgctaataaaaacgctaaccgaaatctacgcgacgtatttaatataccaaatttcgttaccacactaaaactataaaacgccctacgcgaaataaaactatttataacgaacgcactaccaataccgattaataaaaacgaaatactaaactaactaaacgaacaatttctcgatataccgatatccgcgctaatcataattatattatttacgctatttatattcatcaaccgcaaaaccgcttcgaacgctcgatttttaccgttaacgataatactacgacgacgcaattatacgacatcaacgttcgtcgaatacgcattcttatctttaccctttcgaaattattaacgacgataaccgacattttattaacgacgcgcctcgattctaataacgcaaataccgcaaacgatctaaaatttaacgtcatcgccgcgatcgtaatcgacgatacgacactttccgacgatcgcgattccctattcgatacattacttaatatactaataattacgctaatcgataacgatctaatactactcgatattaactcctttttccaacaaataatacgcgacgtcatcatcgtaataacgatactaacgaa

SEQ ID NO: 619 - DNA, 731 bp, Artificial Sequence
  chemically treated genomic DNA (Homo sapiens) CpG-island No: 619
tttagtgaaatgaatgttagcgtggtcgaatgtggtttttgtttcggtgtgtttggtaatttttgttgtaatttgaagtttcgttggcggtggcgtgtttgttggtgttgttgttaggcgcgttgatgggaacgttggtcggggtttgcgcggcgtgtttaatgtattaagtttcgttgttatattggggttgtggagcgttttgcgcggaatggggttgtttatgacgaacgtattgttagtgtcgattgatgaaaacgaggtgttggattggttgggcggataatttttcggtgtgtcggtattcgcgttgattatgattgtgttgtttgcgttgtttgtgtttattagtcgtaaaatcgtttcgggcgttcggtttttgtcgttggcggtaatgttacggcggcgtagttgtgcggtattaacgttcgtcgggtgcgtatttttatttttattttttcgggattattagcggcggtgatcggtattttgttggcggcgcgtttcggttttggtaacgtaggtgtcgtaaacggtttggagtttgacgttatcgtcgcggtcgtggtcggcggtacggtatttttcggcggtcgcggttttttgttcggtatattgtttggtgtgttggtgattacgttaatcggtaacggtttggtgttgttcggtattaatttttttttttagtaggtggtacgcggcgttattatcgtggtggcggtgttggcgaa

SEQ ID NO: 620 - DNA, 731 bp, Artificial Sequence
  chemically treated genomic DNA (Homo sapiens) CpG-island No: 620
ttcgccaacaccgccaccacgataataacgccgcgtaccacctactaaaaaaaaaaattaataccgaacaacaccaaaccgttaccgattaacgtaatcaccaacacaccaaacaatataccgaacaaaaaaccgcgaccgccgaaaaataccgtaccgccgaccacgaccgcgacgataacgtcaaactccaaaccgtttacgacacctacgttaccaaaaccgaaacgcgccgccaacaaaataccgatcaccgccgctaataatcccgaaaaaataaaaataaaaatacgcacccgacgaacgttaataccgcacaactacgccgccgtaacattaccgccaacgacaaaaaccgaacgcccgaaacgattttacgactaataaacacaaacaacgcaaacaacacaatcataatcaacgcgaataccgacacaccgaaaaattatccgcccaaccaatccaacacctcgttttcatcaatcgacactaacaatacgttcgtcataaacaaccccattccgcgcaaaacgctccacaaccccaatataacaacgaaacttaatacattaaacacgccgcgcaaaccccgaccaacgttcccatcaacgcgcctaacaacaacaccaacaaacacgccaccgccaacgaaacttcaaattacaacaaaaattaccaaacacaccgaaacaaaaaccacattcgaccacgctaacattcatttcactaaa

SEQ ID NO: 621 - DNA, 793 bp, Artificial Sequence
  chemically treated genomic DNA (Homo sapiens) CpG-island No: 621
  unsure (713..714, 748)
tttgaataaattggcgtcggtgatgacgttgattcgttttgatgtcgacgtttttgtcgaaaaggtagtttgatatgtacgtttatttttattgttttttttattcgtcgttggtggggtatgtcgattcggcgtaagaggtgttcgatgaggttaatggcgtgattgttagcgttcgcgagcgtattgcggtatttttttttgaattggtggtgttgtttgcgttagattattataacggttttttttatgacgtgatgttatcgttttgtttaggcgttggagcgacggtaattggtgatttcggtagtgcggtaggagagttgttcgtgtttgtggagttggcggaggtttgtgcgtatgtcgttatgaagagcgggatcgattttgtcgttttttattgtatgtaggtggattacgggttcgtttagtcgttggagtttttgttcggtgggttggataaggtgttagttttgtttgtgtttattaacggtgtcgttacgtcgttgttcggtttttagcgtattcgtatgttgggtgaagtattggacgttttattagtatttttaataaacgcgtgttgtttttgggtttcggtgggtttttttattagtcgtcggtgttcgaattggcgaaagcgatgtttatatgcgcgatcgtttgttggggagcggaaagatttattcgttagtgagcgcgaattgcgttaagtnngggtgattagcgtcgttgtagaagtttgttgagngattagagaacgttttatcggtttaatttcgatttggggtaatta

SEQ ID NO: 622 - DNA, 793 bp, Artificial Sequence
  chemically treated genomic DNA (Homo sapiens) CpG-island No: 622
  unsure (46, 80..)
taattaccccaaatcgaaattaaaccgataaaacgttctctaatcnctcaacaaacttctacaacgacgctaatcacccnnacttaacgcaattcgcgctcactaacgaataaatctttccgctccccaacaaacgatcgcgcatataaacatcgctttcgccaattcgaacaccgacgactaataaaaaaacccaccgaaacccaaaaacaacacgcgtttattaaaaatactaataaaacgtccaatacttcacccaacatacgaatacgctaaaaaccgaacaacgacgtaacgacaccgttaataaacacaaacaaaactaacaccttatccaacccaccgaacaaaaactccaacgactaaacgaacccgtaatccacctacatacaataaaaaacgacaaaatcgatcccgctcttcataacgacatacgcacaaacctccgccaactccacaaacacgaacaactctcctaccgcactaccgaaatcaccaattaccgtcgctccaacgcctaaacaaaacgataacatcacgtcataaaaaaaaccgttataataatctaacgcaaacaacaccaccaattcaaaaaaaaataccgcaatacgctcgcgaacgctaacaatcacgccattaacctcatcgaacacctcttacgccgaatcgacataccccaccaacgacgaataaaaaaaacaataaaaataaacgtacatatcaaactaccttttcgacaaaaacgtcgacatcaaaacgaatcaacgtcatcaccgacgccaatttattcaaa

SEQ ID NO: 623 - DNA, 793 bp, Artificial Sequence
  chemically treated genomic DNA (Homo sapiens) CpG-island No: 623
  unsure (46, 80..)
tggttattttaaatcggggttgagtcgatgaagcgttttttgattntttaataaatttttatagcggcgttaattatttnngtttaacgtaattcgcgtttattggcgggtaaattttttcgttttttaatagacggtcgcgtatatgggtatcgttttcgttagttcgggtatcggcggttgatgggaaagtttatcggaatttaggaatagtacgcgtttattgagagtgttggtgaaacgtttaatgttttatttaatatgcgggtacgttggaaatcgggtagcggcgtggcgatatcgttgatgaatataggtagaattggtattttatttagtttatcgagtaggaattttagcggttgggcgaattcgtggtttatttgtatatagtaagaaacggtaagatcgatttcgttttttatgacggtatgcgtataggttttcgttagttttataggtacgggtagtttttttgtcgtattgtcgaaattattaattgtcgtcgttttaacgtttaaatagaacggtggtattacgttatagaaaaagtcgttgtagtgatttggcgtaaatagtattattagtttaggggagaatgtcgtaatacgttcgcgggcgttggtaattacgttattgattttatcgagtattttttgcgtcgggtcgatatattttattagcggcgagtgggaaagatagtgaagataagcgtgtatattaggttattttttcgatagaaacgtcggtattagggcgggttagcgttattatcgacgttagtttatttagg

SEQ ID NO: 624 - DNA, 793 bp, Artificial Sequence
  chemically treated genomic DNA (Homo sapiens) CpG-island No: 624
  unsure (713..714, 748)
cctaaataaactaacgtcgataataacgctaacccgccctaataccgacgtttctatcgaaaaaataacctaatatacacgcttatcttcactatctttcccactcgccgctaataaaatatatcgacccgacgcaaaaaatactcgataaaatcaataacgtaattaccaacgcccgcgaacgtattacgacattctcccctaaactaataatactatttacgccaaatcactacaacgactttttctataacgtaataccaccgttctatttaaacgttaaaacgacgacaattaataatttcgacaatacgacaaaaaaactacccgtacctataaaactaacgaaaacctatacgcataccgtcataaaaaacgaaatcgatcttaccgtttcttactatatacaaataaaccacgaattcgcccaaccgctaaaattcctactcgataaactaaataaaataccaattctacctatattcatcaacgatatcgccacgccgctacccgatttccaacgtacccgcatattaaataaaacattaaacgtttcaccaacactctcaataaacgcgtactattcctaaattccgataaactttcccatcaaccgccgatacccgaactaacgaaaacgatacccatatacgcgaccgtctattaaaaaacgaaaaaatttacccgccaataaacgcgaattacgttaaacnnaaataattaacgccgctataaaaatttattaaanaatcaaaaaacgcttcatcgactcaaccccgatttaaaataacca

SEQ ID NO: 625 - DNA, 622 bp, Artificial Sequence
  chemically treated genomic DNA (Homo sapiens) CpG-island No: 625
  unsure (595)
ttatcgtcgttggcgtaatttatagcgcggtagatattttttttgtttggttgttggcgggcgttatcggtttcggtaaaacggaggtttattttagcgtattggaaaacgtgttcgtttagggtaaataggcgttggtgatggtgtcggaaatcggtttgatatcgtaaattatcgttcgttttcgtgaacgttttaatgttttcgtggaagttttgtatttcggtttgaacgatagcgagcgtttttcggcgtggttgaaacgaaaaatggtgaggcggcgattgtgatcggtattcgtttcgcgttgtttacgtcgtttaaaaatttcggcgtgattgttattgatgaagagtacgatagtttttataagtagtaggaaggttggcgttattatgttcgcgatttggcggtgtatcgtgcgtatagcgagtaaatttcgattatttttggtttcgtaacgttcgcgttggaaacgttatgtaacgtttagtagaaaaaatatcgtttgttgcgtttgattcgtcgggtagggaatgcgcgttcggtaatttaatatgtgttggatttaatataaaggggggtttttttaaanggggaaaaaaaaagggggggggttttt

SEQ ID NO: 626 - DNA, 622 bp, Artificial Sequence
  chemically treated genomic DNA (Homo sapiens) CpG-island No: 626
  unsure (28)
aaaaaccccccccctttttttttccccntttaaaaaaacccccctttatattaaatccaacacatattaaattaccgaacgcgcattccctacccgacgaatcaaacgcaacaaacgatattttttctactaaacgttacataacgtttccaacgcgaacgttacgaaaccaaaaataatcgaaatttactcgctatacgcacgatacaccgccaaatcgcgaacataataacgccaaccttcctactacttataaaaactatcgtactcttcatcaataacaatcacgccgaaatttttaaacgacgtaaacaacgcgaaacgaataccgatcacaatcgccgcctcaccatttttcgtttcaaccacgccgaaaaacgctcgctatcgttcaaaccgaaatacaaaacttccacgaaaacattaaaacgttcacgaaaacgaacgataatttacgatatcaaaccgatttccgacaccatcaccaacgcctatttaccctaaacgaacacgttttccaatacgctaaaataaacctccgttttaccgaaaccgataacgcccgccaacaaccaaacaaaaaaaatatctaccgcgctataaattacgccaacgacgataa

SEQ ID NO: 627 - DNA, 622 bp, Artificial Sequence
  chemically treated genomic DNA (Homo sapiens) CpG-island No: 627
  unsure (28)
aaaaattttttttttttttttttttttntttgggaaaatttttttttatgttaaatttagtatatgttgaattgtcggacgcgtattttttgttcgacgggttaggcgtagtaggcggtattttttttgttggacgttgtataacgtttttagcgcgggcgttgcggagttaagaataatcgggatttgttcgttgtgcgtacgatatatcgttaggtcgcgggtatgatagcgttagtttttttgttgtttgtaggagttgtcgtgttttttattaatgataattacgtcgagatttttaaacggcgtaaatagcgcggagcgggtgtcgattataatcgtcgttttattatttttcgttttagttacgtcgaaagacgttcgttgtcgtttaggtcggaatgtagaatttttacgggggtattaaaacgtttacgaaaacgggcgatagtttgcggtgttaggtcgattttcggtattattattagcgtttgtttgttttgagcgagtacgttttttagtacgttgagataaattttcgttttatcggaatcggtaacgttcgttagtagttaggtagaaaaagtatttgtcgcgttatgaattgcgttaacggcggtgg

SEQ ID NO: 628 - DNA, 622 bp, Artificial Sequence
  chemically treated genomic DNA (Homo sapiens) CpG-island No: 628
  unsure (595)
ccaccgccgttaacgcaattcataacgcgacaaatactttttctacctaactactaacgaacgttaccgattccgataaaacgaaaatttatctcaacgtactaaaaaacgtactcgctcaaaacaaacaaacgctaataataataccgaaaatcgacctaacaccgcaaactatcgcccgttttcgtaaacgttttaatacccccgtaaaaattctacattccgacctaaacgacaacgaacgtctttcgacgtaactaaaacgaaaaataataaaacgacgattataatcgacacccgctccgcgctatttacgccgtttaaaaatctcgacgtaattatcattaataaaaaacacgacaactcctacaaacaacaaaaaaactaacgctatcatacccgcgacctaacgatatatcgtacgcacaacgaacaaatcccgattattcttaactccgcaacgcccgcgctaaaaacgttatacaacgtccaacaaaaaaaataccgcctactacgcctaacccgtcgaacaaaaaatacgcgtccgacaattcaacatatactaaatttaacataaaaaaaaattttcccaaanaaaaaaaaaaaaaaaaaaaaaattttt

SEQ ID NO: 629 - DNA, 816 bp, Artificial Sequence
  chemically treated genomic DNA (Homo sapiens) CpG-island No: 629
tgtttgcgcgtttttaggtttcgttttttatgttaataagcgttcgttttttttgggagtaagtcgtcgtaaattgcgagttttcgttttttacgttaatgacgttcgtttttttcgggtatattttttcgatgtttgcgagtttcgtttcgtatgttaacgagttttttatttttagtttttcgtcgtagtttgcgggtttcgttttttataataatgagtatttatttttttttaaacgtttttagtcgcggtatgagggtttcgtttattatgttaatgagtattcgttttttttcgggcgcgtttcgtcgtagtttgaaagtttcgttttttatgttaatatgtttttttttttataaggtagcgcgtcggttcggacgcggtcggttatcgagttttttgtgagggttgtgagttgcgtttgacggtggtattatgagtagtttaggtggggcgttcggggcgttcgttagttttgcgtcgttcgcgtaggaagagggtatgacgtggtggtatcgttggttgtgtcgtttgtttggggtgttgggggtagtttgtgagtatttagtcggggagaggggtcggtttcgtcgcgtatgcgtttttcgttttgttttgtttcgtttcgtttcggcggttttaggggaaaggattcgttgggggtcgggggtttgtcgggcgtttttcggggcggaggaatggcggggtcgtcgggagtcggcgttttggggttgttatggttattcgttcgggtttgggcgttttggtatttcgggttgggttgggttggcgtttttgggaatattttcggag

SEQ ID NO: 630 - DNA, 816 bp, Artificial Sequence
  chemically treated genomic DNA (Homo sapiens) CpG-island No: 630
ctccgaaaatattcccaaaaacgccaacccaacccaacccgaaataccaaaacgcccaaacccgaacgaataaccataacaaccccaaaacgccgactcccgacgaccccgccattcctccgccccgaaaaacgcccgacaaacccccgacccccaacgaatcctttcccctaaaaccgccgaaacgaaacgaaacaaaacaaaacgaaaaacgcatacgcgacgaaaccgacccctctccccgactaaatactcacaaactacccccaacaccccaaacaaacgacacaaccaacgataccaccacgtcataccctcttcctacgcgaacgacgcaaaactaacgaacgccccgaacgccccacctaaactactcataataccaccgtcaaacgcaactcacaaccctcacaaaaaactcgataaccgaccgcgtccgaaccgacgcgctaccttataaaaaaaaaaacatattaacataaaaaacgaaactttcaaactacgacgaaacgcgcccgaaaaaaaacgaatactcattaacataataaacgaaaccctcataccgcgactaaaaacgtttaaaaaaaaataaatactcattattataaaaaacgaaacccgcaaactacgacgaaaaactaaaaataaaaaactcgttaacatacgaaacgaaactcgcaaacatcgaaaaaatatacccgaaaaaaacgaacgtcattaacgtaaaaaacgaaaactcgcaatttacgacgacttactcccaaaaaaaacgaacgcttattaacataaaaaacgaaacctaaaaacgcgcaaaca

SEQ ID NO: 631 - DNA, 816 bp, Artificial Sequence
  chemically treated genomic DNA (Homo sapiens) CpG-island No: 631
tttcgggaatgtttttagaagcgttagtttagtttagttcggggtattaaggcgtttaggttcgagcgggtaattatggtaattttaggacgtcggttttcggcggtttcgttattttttcgtttcgggaggcgttcggtagattttcgatttttagcgggtttttttttttggggtcgtcggggcggggcggggtagggtagggcgaggagcgtatgcgcggcggggtcggttttttttttcgattggatatttatagattgtttttagtattttagataggcgatatagttagcggtattattacgttatgttttttttttgcgcgggcggcgtagagttggcggacgtttcgggcgttttatttgagttgtttatggtgttatcgttaggcgtagtttatagtttttataaagggttcggtagtcggtcgcgttcgagtcggcgcgttgttttgtgggagagggagtatattagtatagggggcggggtttttaggttgcggcgaggcgcgttcgaagggaggcgggtgtttattaatatagtgagcgggatttttatgtcgcgattaggggcgtttgaggggaggtaggtgtttattattgtagggggcgggattcgtaggttgcggcgaggagttgggggtggggagttcgttagtatacggggcggggttcgtaggtatcggagaggtgtgttcgaggggggcgggcgttattagcgtagggggcgggggttcgtagtttgcggcgatttgtttttaaaggaggcgggcgtttattagtatagggggcggggtttggaggcgcgtagata

SEQ ID NO: 632 - DNA, 816 bp, Artificial Sequence
  chemically treated genomic DNA (Homo sapiens) CpG-island No: 632
tatctacgcgcctccaaaccccgccccctatactaataaacgcccgcctcctttaaaaacaaatcgccgcaaactacgaacccccgccccctacgctaataacgcccgcccccctcgaacacacctctccgatacctacgaaccccgccccgtatactaacgaactccccacccccaactcctcgccgcaacctacgaatcccgccccctacaataataaacacctacctcccctcaaacgcccctaatcgcgacataaaaatcccgctcactatattaataaacacccgcctcccttcgaacgcgcctcgccgcaacctaaaaaccccgccccctatactaatatactccctctcccacaaaacaacgcgccgactcgaacgcgaccgactaccgaaccctttataaaaactataaactacgcctaacgataacaccataaacaactcaaataaaacgcccgaaacgtccgccaactctacgccgcccgcgcaaaaaaaaaacataacgtaataataccgctaactatatcgcctatctaaaatactaaaaacaatctataaatatccaatcgaaaaaaaaaaccgaccccgccgcgcatacgctcctcgccctaccctaccccgccccgccccgacgaccccaaaaaaaaaaacccgctaaaaatcgaaaatctaccgaacgcctcccgaaacgaaaaaataacgaaaccgccgaaaaccgacgtcctaaaattaccataattacccgctcgaacctaaacgccttaataccccgaactaaactaaactaacgcttctaaaaacattcccgaaa

SEQ ID NO: 633 - DNA, 1320 bp, Artificial Sequence
  chemically treated genomic DNA (Homo sapiens) CpG-island No: 633
ggtcgcgttcgtagttcgggtagggcgtcgtttttttcgttcgtttttttttacgcgggggttcgggggcggattgacgcggcggcgtttattttggtttttatgcggtttttcgaggtcggaggaaggtggcggagcgggagggagagagcgaggagcgcgcggagagggaggacggcggagggggaggagtaagcggaggggtgggggtggggtcgaggagtcgagcgtcgaggaggatttcgagggagattgggggcggagtagtcggcgacggagaggcgcggaggacgcggggtcgggggaggcggagtagcgggagtgggtggaaaagtagaggcggcgggaggagcgggagttttcgtgggagattcgggaggagtagtcggcgtgggtggagtcgtcggcgtgggaggagtcgcggggtttgggtgagaacggggcgggacggtcggaggcggggtttgcgaacgttttgtttttgttcgttcgggtcgcgtcgaggaacgaagatggtcgggcgcgtcgcgggaacggaggggcggtcggtagcggcggcggcggcggcggcggttttcgggttgtgatttcgcgcgcggcggttattcgggttatttgaacggagtgggcggcgcgggtagcggtttgttagggcgggcgggcggacgtcggtgtacgggcgtcgggcggaggatgcgttaggagcggcgggcggtttttcgcggtcgttttcgcgtttcgggcgtcgggttttagtgttggcggaggaggcggcgcgcgcggggcggtcgggcggcggcggggttcgcgtcgttatgttttggttgagcggcggtcggcggcgacggcggggatagtcgcgcgaggtttcgcgggagtcgtcgttttttgcgtagttttagcgggaatcgcgtcgtcggcgtttttcgtcgcggtttttacgtttttagtttttttcgcgtcgtcgtcgcgggttcgggagagcgtcgagttgtcgttgttcgtcggttgggaggaggcgcgagattacgacggtcgcgttttttatattgattataatacgcgttagacgtcgtggatcgattttcgcgatcggtaagcgggtcggttgggggcgttagattcggcgcgggcgttacgattcgggtcgtcggtcggcgttatcgcggatgcgttggggatacgtttcgtttagcgcggggtcgtcgtcgagagttttcgggttcgggtagagttcggagcgtttttattttcggaattaggggattttttggagtgtttcggtttaggttacgatcgaggcgtttttattttttgggt

SEQ ID NO: 634 - DNA, 1320 bp, Artificial Sequence
  chemically treated genomic DNA (Homo sapiens) CpG-island No: 634
acccaaaaaataaaaacgcctcgatcgtaacctaaaccgaaacactccaaaaaatcccctaattccgaaaataaaaacgctccgaactctacccgaacccgaaaactctcgacgacgaccccgcgctaaacgaaacgtatccccaacgcatccgcgataacgccgaccgacgacccgaatcgtaacgcccgcgccgaatctaacgcccccaaccgacccgcttaccgatcgcgaaaatcgatccacgacgtctaacgcgtattataatcaatataaaaaacgcgaccgtcgtaatctcgcgcctcctcccaaccgacgaacaacgacaactcgacgctctcccgaacccgcgacgacgacgcgaaaaaaactaaaaacgtaaaaaccgcgacgaaaaacgccgacgacgcgattcccgctaaaactacgcaaaaaacgacgactcccgcgaaacctcgcgcgactatccccgccgtcgccgccgaccgccgctcaaccaaaacataacgacgcgaaccccgccgccgcccgaccgccccgcgcgcgccgcctcctccgccaacactaaaacccgacgcccgaaacgcgaaaacgaccgcgaaaaaccgcccgccgctcctaacgcatcctccgcccgacgcccgtacaccgacgtccgcccgcccgccctaacaaaccgctacccgcgccgcccactccgttcaaataacccgaataaccgccgcgcgcgaaatcacaacccgaaaaccgccgccgccgccgccgccgctaccgaccgcccctccgttcccgcgacgcgcccgaccatcttcgttcctcgacgcgacccgaacgaacaaaaacaaaacgttcgcaaaccccgcctccgaccgtcccgccccgttctcacccaaaccccgcgactcctcccacgccgacgactccacccacgccgactactcctcccgaatctcccacgaaaactcccgctcctcccgccgcctctacttttccacccactcccgctactccgcctcccccgaccccgcgtcctccgcgcctctccgtcgccgactactccgcccccaatctccctcgaaatcctcctcgacgctcgactcctcgaccccacccccacccctccgcttactcctccccctccgccgtcctccctctccgcgcgctcctcgctctctccctcccgctccgccaccttcctccgacctcgaaaaaccgcataaaaaccaaaataaacgccgccgcgtcaatccgcccccgaacccccgcgtaaaaaaaaacgaacgaaaaaaacgacgccctacccgaactacgaacgcgacc

SEQ ID NO: 635 - DNA, 1320 bp, Artificial Sequence
  chemically treated genomic DNA (Homo sapiens) CpG-island No: 635
gtttaagggatgggggcgtttcgatcgtagtttggatcggagtattttagggagttttttggtttcggggatggaggcgtttcgagttttgttcgggttcgggggttttcggcggcggtttcgcgttgggcggggcgtgtttttagcgtattcgcggtggcgtcggtcggcggttcgggtcgtagcgttcgcgtcgggtttggcgtttttagtcggttcgtttatcggtcgcgggggtcgatttacgacgtttggcgcgtgttgtggttaatgtaaaagacgcgatcgtcgtagtttcgcgtttttttttagtcggcgggtagcggtagttcggcgttttttcgggttcgcggcggcggcgcggaaggagttgggggcgtggggatcgcggcggggggcgtcggcggcgcggttttcgttggggttgcgtagaaggcggcggttttcgcggggtttcgcgcggttgttttcgtcgtcgtcgtcggtcgtcgtttagttaaggtatgacggcgcgggtttcgtcgtcgttcggtcgtttcgcgcgcgtcgtttttttcgttagtattaaggttcggcgttcggggcgcgggggcggtcgcggggagtcgttcgtcgtttttggcgtatttttcgttcggcgttcgtgtatcggcgttcgttcgttcgttttagtaagtcgttgttcgcgtcgtttatttcgtttaggtagttcgggtggtcgtcgcgcgcgaagttatagttcgggagtcgtcgtcgtcgtcgtcgtcgttgtcggtcgttttttcgttttcgcggcgcgttcggttattttcgtttttcggcgcggttcgggcgagtaggggtagggcgttcgtaggtttcgttttcggtcgtttcgtttcgtttttatttaggtttcgcggttttttttacgtcggcggttttatttacgtcggttgtttttttcgaattttttacggaggttttcgtttttttcgtcgtttttgtttttttatttattttcgttgtttcgtttttttcggtttcgcgtttttcgcgttttttcgtcgtcggttgtttcgtttttagtttttttcggggtttttttcggcgttcggtttttcgattttatttttattttttcgtttgttttttttttttcgtcgtttttttttttcgcgcgtttttcgttttttttttttcgtttcgttattttttttcggtttcgggaaatcgtatggaggttaggatgggcgtcgtcgcgttagttcgttttcgggttttcgcgtagaggaaggcgggcggggaggacgacgttttattcggattgcgggcgcggtt

SEQ ID NO: 636 - DNA, 1320 bp, Artificial Sequence
  chemically treated genomic DNA (Homo sapiens) CpG-island No: 636
aaccgcgcccgcaatccgaataaaacgtcgtcctccccgcccgccttcctctacgcgaaaacccgaaaacgaactaacgcgacgacgcccatcctaacctccatacgatttcccgaaaccgaaaaaaaataacgaaacgaaaaaaaaaaaacgaaaaacgcgcgaaaaaaaaaaacgacgaaaaaaaaaaaacaaacgaaaaaataaaaataaaatcgaaaaaccgaacgccgaaaaaaaccccgaaaaaaactaaaaacgaaacaaccgacgacgaaaaaacgcgaaaaacgcgaaaccgaaaaaaacgaaacaacgaaaataaataaaaaaacaaaaacgacgaaaaaaacgaaaacctccgtaaaaaattcgaaaaaaacaaccgacgtaaataaaaccgccgacgtaaaaaaaaccgcgaaacctaaataaaaacgaaacgaaacgaccgaaaacgaaacctacgaacgccctacccctactcgcccgaaccgcgccgaaaaacgaaaataaccgaacgcgccgcgaaaacgaaaaaacgaccgacaacgacgacgacgacgacgacgactcccgaactataacttcgcgcgcgacgaccacccgaactacctaaacgaaataaacgacgcgaacaacgacttactaaaacgaacgaacgaacgccgatacacgaacgccgaacgaaaaatacgccaaaaacgacgaacgactccccgcgaccgcccccgcgccccgaacgccgaaccttaatactaacgaaaaaaacgacgcgcgcgaaacgaccgaacgacgacgaaacccgcgccgtcataccttaactaaacgacgaccgacgacgacgacgaaaacaaccgcgcgaaaccccgcgaaaaccgccgccttctacgcaaccccaacgaaaaccgcgccgccgacgccccccgccgcgatccccacgcccccaactccttccgcgccgccgccgcgaacccgaaaaaacgccgaactaccgctacccgccgactaaaaaaaaacgcgaaactacgacgatcgcgtcttttacattaaccacaacacgcgccaaacgtcgtaaatcgacccccgcgaccgataaacgaaccgactaaaaacgccaaacccgacgcgaacgctacgacccgaaccgccgaccgacgccaccgcgaatacgctaaaaacacgccccgcccaacgcgaaaccgccgccgaaaacccccgaacccgaacaaaactcgaaacgcctccatccccgaaaccaaaaaactccctaaaatactccgatccaaactacgatcgaaacgcccccatcccttaaac

SEQ ID NO: 637 - DNA, 662 bp, Artificial Sequence
  chemically treated genomic DNA (Homo sapiens) CpG-island No: 637
tcggggatgataacgtgtttgttttatgtcgcggtttttagttgtttaggtttcgttttttgtgagtgtgtaagtgtgtgatgttgtcgcggtcgtcgtcgtcgtttgtgtagtcgttgtcgtcgtcgtcgtcgtcgtcgtcgtcgtcgtcgtcgtcgtcgtcgttgtcgtttcggttgtcgcgtcgcgtcgttgtttttgtttcggtcgttttcgtcgtcgttgtcgtcgtcggttcgtagttagttaggcgggcggtttagttcgtttgagttcgtagcggttgtcgtcgtagcgtcgggtcgttgggtgcgcgggttatcgcggatcgagcggattcgagtgggcgattaggcgtttgttcgtttagtgttattgtcgtcgttttttcgtcggagtataggattagatatttttagcgttcgttgttgttgtcgatgcggttcggatatttttagttgggcgggagggttggagagtcgggggtcgtcgagaatcgttagcgagttgtgtcgagagtcgcgtcgattcgttgcgattagggataggcgttcgttcgtcgtcgtcgtttggtcgttatggatttattcgatttttttagagattgggatttggagtagtagtggtaggtgttgatttttgtttttttttttgatgagcga

SEQ ID NO: 638 - DNA, 662 bp, Artificial Sequence
  chemically treated genomic DNA (Homo sapiens) CpG-island No: 638
tcgctcatcaaaaaaaaaaacaaaaatcaacacctaccactactactccaaatcccaatctctaaaaaaatcgaataaatccataacgaccaaacgacgacgacgaacgaacgcctatccctaatcgcaacgaatcgacgcgactctcgacacaactcgctaacgattctcgacgacccccgactctccaaccctcccgcccaactaaaaatatccgaaccgcatcgacaacaacaacgaacgctaaaaatatctaatcctatactccgacgaaaaaacgacgacaataacactaaacgaacaaacgcctaatcgcccactcgaatccgctcgatccgcgataacccgcgcacccaacgacccgacgctacgacgacaaccgctacgaactcaaacgaactaaaccgcccgcctaactaactacgaaccgacgacgacaacgacgacgaaaacgaccgaaacaaaaacaacgacgcgacgcgacaaccgaaacgacaacgacgacgacgacgacgacgacgacgacgacgacgacgacgacgacaacgactacacaaacgacgacgacgaccgcgacaacatcacacacttacacactcacaaaaaacgaaacctaaacaactaaaaaccgcgacataaaacaaacacgttatcatccccga

SEQ ID NO: 639 - DNA, 662 bp, Artificial Sequence
  chemically treated genomic DNA (Homo sapiens) CpG-island No: 639
tcgtttattaaaggagaaggtaaaaattaatatttattattgttgttttaagttttagtttttgaaaaagtcgaatagatttatagcggttaggcggcggcggcgggcgggcgtttgtttttgatcgtagcgggtcggcgcggttttcggtatagttcgttggcggttttcggcggttttcggttttttagttttttcgtttagttaaaagtgttcgggtcgtatcggtagtagtagcgggcgttggaggtgtttggttttgtgtttcggcgaggaagcggcggtagtggtattgggcgggtaagcgtttggtcgtttattcgggttcgttcggttcgcggtagttcgcgtatttagcgattcgacgttgcggcggtagtcgttgcgggtttaggcgggttgggtcgttcgtttggttggttgcgggtcggcggcggtagcggcggcgggggcggtcggggtagaggtagcggcgcggcgcggtagtcggggcggtagcggcggcggcggcggcggcggcggcggcggcggcggcggcggcggtagcggttgtataggcggcggcggcggtcgcggtagtattatatatttatatatttatagggggcggagtttggatagttagaagtcgcgatatggagtaggtacgttattattttcgg

SEQ ID NO: 640 - DNA, 662 bp, Artificial Sequence
  chemically treated genomic DNA (Homo sapiens) CpG-island No: 640
ccgaaaataataacgtacctactccatatcgcgacttctaactatccaaactccgccccctataaatatataaatatataatactaccgcgaccgccgccgccgcctatacaaccgctaccgccgccgccgccgccgccgccgccgccgccgccgccgccgccgctaccgccccgactaccgcgccgcgccgctacctctaccccgaccgcccccgccgccgctaccgccgccgacccgcaaccaaccaaacgaacgacccaacccgcctaaacccgcaacgactaccgccgcaacgtcgaatcgctaaatacgcgaactaccgcgaaccgaacgaacccgaataaacgaccaaacgcttacccgcccaataccactaccgccgcttcctcgccgaaacacaaaaccaaacacctccaacgcccgctactactaccgatacgacccgaacacttttaactaaacgaaaaaactaaaaaaccgaaaaccgccgaaaaccgccaacgaactataccgaaaaccgcgccgacccgctacgatcaaaaacaaacgcccgcccgccgccgccgcctaaccgctataaatctattcgactttttcaaaaactaaaacttaaaacaacaataataaatattaatttttaccttctcctttaataaacga

SEQ ID NO: 641 - DNA, 633 bp, Artificial Sequence
  chemically treated genomic DNA (Homo sapiens) CpG-island No: 641
agtcgtcggtggttttttaagcgttttttttcggtagtttttgtttatagaaattttagtatacgtcgttgggcgtttagtcgtcgttgtaaagatagttttttagcgtcgcggtaacgttaggcgttttttttttcgcgttttcgcgtatcgtttatatagagtcggcgtttttttgtcgtttagtaatcgtcggcgtaggggcggagttttttggagggcggggtttgcgtttattcgttgttcgggcgcgacgcgttgcggtttagcgacgcggtttttagaatcgggtgattgaattaaattttcgtcgtatcgagtttgtagtacggtcgttattcgtatcgttgtttgtttgcggttggagaaattaaggttttatcgggttttcgtagttatttttttatagtgggcgtggtcgaggtcggggtgattttgtcggagttttcgttgttagcgatatgtttaaggtgagagcgtggagtcgagttatagttgttatcgttttttttcggtcgttcgagtttttttcgcgtttttttggggtttttttgtagttaggtttggtttatttcgaggtttttttcgttattgggtcggttgcgtttcggtttcgcggtttatttattggtt

SEQ ID NO: 642 - DNA, 633 bp, Artificial Sequence
  chemically treated genomic DNA (Homo sapiens) CpG-island No: 642
aaccaataaataaaccgcgaaaccgaaacgcaaccgacccaataacgaaaaaaacctcgaaataaaccaaacctaactacaaaaaaaccccaaaaaaacgcgaaaaaaactcgaacgaccgaaaaaaaacgataacaactataactcgactccacgctctcaccttaaacatatcgctaacaacgaaaactccgacaaaatcaccccgacctcgaccacgcccactataaaaaaataactacgaaaacccgataaaaccttaatttctccaaccgcaaacaaacaacgatacgaataacgaccgtactacaaactcgatacgacgaaaatttaattcaatcacccgattctaaaaaccgcgtcgctaaaccgcaacgcgtcgcgcccgaacaacgaataaacgcaaaccccgccctccaaaaaactccgcccctacgccgacgattactaaacgacaaaaaaacgccgactctatataaacgatacgcgaaaacgcgaaaaaaaaaacgcctaacgttaccgcgacgctaaaaaactatctttacaacgacgactaaacgcccaacgacgtatactaaaatttctataaacaaaaactaccgaaaaaaaacgcttaaaaaaccaccgacgact

SEQ ID NO: 643 - DNA, 633 bp, Artificial Sequence
  chemically treated genomic DNA (Homo sapiens) CpG-island No: 643
gattagtgaatgaatcgcggggtcgggacgtagtcggtttagtggcgggaaaagtttcggggtgagttaggtttggttgtagagaggttttaagagagcgcggggagggttcgggcggtcgggagggggcggtgatagttgtgattcgattttacgtttttattttgaatatgtcgttggtagcggaggtttcggtagggttatttcggtttcggttacgtttattatagagaggtgattacggaggttcggtagggttttgatttttttaatcgtaagtaggtagcggtgcgggtgacggtcgtattgtaaattcggtgcggcgaaggtttagtttaattattcggttttagaagtcgcgtcgttgagtcgtagcgcgtcgcgttcgggtagcgggtgaacgtaaatttcgttttttaggaggtttcgtttttgcgtcggcggttgttaggcggtaagaaagcgtcggttttgtgtggacggtacgcggaggcgcgaggagggaggcgtttggcgttgtcgcggcgttgggaaattgtttttgtagcggcgattgggcgtttagcggcgtgtattgggatttttgtgagtagaggttgtcgagagggggcgtttggagggttatcggcggtt

SEQ ID NO: 644 - DNA, 633 bp, Artificial Sequence
  chemically treated genomic DNA (Homo sapiens) CpG-island No: 644
aaccgccgataaccctccaaacgccccctctcgacaacctctactcacaaaaatcccaatacacgccgctaaacgcccaatcgccgctacaaaaacaatttcccaacgccgcgacaacgccaaacgcctccctcctcgcgcctccgcgtaccgtccacacaaaaccgacgctttcttaccgcctaacaaccgccgacgcaaaaacgaaacctcctaaaaaacgaaatttacgttcacccgctacccgaacgcgacgcgctacgactcaacgacgcgacttctaaaaccgaataattaaactaaaccttcgccgcaccgaatttacaatacgaccgtcacccgcaccgctacctacttacgattaaaaaaatcaaaaccctaccgaacctccgtaatcacctctctataataaacgtaaccgaaaccgaaataaccctaccgaaacctccgctaccaacgacatattcaaaataaaaacgtaaaatcgaatcacaactatcaccgccccctcccgaccgcccgaaccctccccgcgctctcttaaaacctctctacaaccaaacctaactcaccccgaaacttttcccgccactaaaccgactacgtcccgaccccgcgattcattcactaatc

SEQ ID NO: 645 - DNA, 602 bp, Artificial Sequence
  chemically treated genomic DNA (Homo sapiens) CpG-island No: 645
attattttgttttttatcgaggttttttcgattattttgttttttatcgaggtttttttgattattttgttttttatcgagttttttttgattattcggttttttatcgatgttttttcgattattttgttttttatcgaggttttttcgattattcggttttttatcgagttttttttgattagtcggttttttatcgagtttttttcgattattttgtattttatcgaggttttttagattattcggtattttatcgaggttttttcgattattcggttttttatcgaggttttttcgattattcggtattttatcgagtttttttcgattattcggttttttattaaggttttttcgattattcggttttttatcgagtttttttcgattattcggttttttatcgaggttttttcgattattcggttttttatcgaggttttttcgattattatgttttttatcgaggtttttttgattattcggttttttatcgagttttttttgattattcggttttttattaaggttttttcgattattcggttttttatcgaggttttttcgattattttatttttatcgatgaagatattatt

SEQ ID NO: 646 - DNA, 602 bp, Artificial Sequence
  chemically treated genomic DNA (Homo sapiens) CpG-island No: 646
aataatatcttcatcgataaaaataaaataatcgaaaaaacctcgataaaaaaccgaataatcgaaaaaaccttaataaaaaaccgaataatcaaaaaaaactcgataaaaaaccgaataatcaaaaaaacctcgataaaaaacataataatcgaaaaaacctcgataaaaaaccgaataatcgaaaaaacctcgataaaaaaccgaataatcgaaaaaaactcgataaaaaaccgaataatcgaaaaaaccttaataaaaaaccgaataatcgaaaaaaactcgataaaataccgaataatcgaaaaaacctcgataaaaaaccgaataatcgaaaaaacctcgataaaataccgaataatctaaaaaacctcgataaaatacaaaataatcgaaaaaaactcgataaaaaaccgactaatcaaaaaaaactcgataaaaaaccgaataatcgaaaaaacctcgataaaaaacaaaataatcgaaaaaacatcgataaaaaaccgaataatcaaaaaaaactcgataaaaaacaaaataatcaaaaaaacctcgataaaaaacaaaataatcgaaaaaacctcgataaaaaacaaaataat

SEQ ID NO: 647 - DNA, 602 bp, Artificial Sequence
  chemically treated genomic DNA (Homo sapiens) CpG-island No: 647
ggtagtatttttatcgatgggaatagggtggtcggggaagtttcgatgggaggtcgggtggtcggggaagttttgatgagaggtcgggtggttagggaaggttcgatgagaggtcgggtggttagggaagtttcgatgggaggtatggtggtcggggaagtttcgatgagaggtcgggtggtcggggaagtttcgatgggaggtcgggtggtcggggaaggttcgatgagaggtcgggtggtcggggaagttttgatgagaggtcgggtggtcggggaaggttcgatgagatgtcgggtggtcggggaagtttcgatgagaggtcgggtggtcggggaagtttcgatgggatgtcgggtggtttgggaagtttcgatgggatgtagggtggtcggggaaggttcgatgggaggtcggttggttagggaaggttcgatgagaggtcgggtggtcggggaagtttcgatgggaggtagggtggtcggggaagtatcgatgagaggtcgggtggttagggaaggttcgatgagaggtagggtggttagggaagtttcgatgagaggtagggtggtcggggaagtttcgatgggaggtagggtggt

SEQ ID NO: 648 - DNA, 602 bp, Artificial Sequence
  chemically treated genomic DNA (Homo sapiens) CpG-island No: 648
accaccctacctcccatcgaaacttccccgaccaccctacctctcatcgaaacttccctaaccaccctacctctcatcgaaccttccctaaccacccgacctctcatcgatacttccccgaccaccctacctcccatcgaaacttccccgaccacccgacctctcatcgaaccttccctaaccaaccgacctcccatcgaaccttccccgaccaccctacatcccatcgaaacttcccaaaccacccgacatcccatcgaaacttccccgaccacccgacctctcatcgaaacttccccgaccacccgacatctcatcgaaccttccccgaccacccgacctctcatcaaaacttccccgaccacccgacctctcatcgaaccttccccgaccacccgacctcccatcgaaacttccccgaccacccgacctctcatcgaaacttccccgaccaccatacctcccatcgaaacttccctaaccacccgacctctcatcgaaccttccctaaccacccgacctctcatcaaaacttccccgaccacccgacctcccatcgaaacttccccgaccaccctattcccatcgataaaaatactacc

SEQ ID NO: 649 - DNA, 682 bp, Artificial Sequence
  chemically treated genomic DNA (Homo sapiens) CpG-island No: 649
tttacgtcgatgggtttatggtgaaataaaaaatagtgtttacggttgcgtttcgtatttttgcgtcggttagggcgggttttgattcgggtttgaggttcgttttatttttattcgatcgtttgcgtttacgggcgaggggtcgcgttcgattttaagtcgggttttattttaggagatcgggatcgcgatggtagcggtagaggtttcgtatggtcggaagttattttttaaagcgttgggtcggtagcggtgggatttagggtcggttacgggttttttgacgttattgggcgcgacgtttcgcgtcgggattattgtttttagaaggtcgcgcgcgggttttcgttagttaggtgggtgttaggttttggtcgtggcgaaagagtcggcggagtcggagattcgttttcggagacgtcgtttcgcgattttcgcgcgggcgggatcgggcggtcggtattatgattttgttttatttcgggaattgtttcgtttttgtttattttttttattttattatttataagtgtagcggtttgtgagtgcgggaagggcgcggggcggagagggcgcggggttcgggtcgatttttatttttcgtttttttaggttcgagtataacgttttttggaaatgcgtttaggttggagttatttatttttttgtttaattttgtaag

SEQ ID NO: 650 - DNA, 682 bp, Artificial Sequence
  chemically treated genomic DNA (Homo sapiens) CpG-island No: 650
cttacaaaattaaacaaaaaaataaataactccaacctaaacgcatttccaaaaaacgttatactcgaacctaaaaaaacgaaaaataaaaatcgacccgaaccccgcgccctctccgccccgcgcccttcccgcactcacaaaccgctacacttataaataataaaataaaaaaaataaacaaaaacgaaacaattcccgaaataaaacaaaatcataataccgaccgcccgatcccgcccgcgcgaaaatcgcgaaacgacgtctccgaaaacgaatctccgactccgccgactctttcgccacgaccaaaacctaacacccacctaactaacgaaaacccgcgcgcgaccttctaaaaacaataatcccgacgcgaaacgtcgcgcccaataacgtcaaaaaacccgtaaccgaccctaaatcccaccgctaccgacccaacgctttaaaaaataacttccgaccatacgaaacctctaccgctaccatcgcgatcccgatctcctaaaataaaacccgacttaaaatcgaacgcgacccctcgcccgtaaacgcaaacgatcgaataaaaataaaacgaacctcaaacccgaatcaaaacccgccctaaccgacgcaaaaatacgaaacgcaaccgtaaacactattttttatttcaccataaacccatcgacgtaaa

SEQ ID NO: 651 - DNA, 682 bp, Artificial Sequence
  chemically treated genomic DNA (Homo sapiens) CpG-island No: 651
tttgtagagttggataaagaggtaggtgattttagtttggacgtatttttagaaggcgttgtattcggatttggagaagcgggaggtgagggtcggttcgggtttcgcgtttttttcgtttcgcgtttttttcgtatttataggtcgttgtatttgtaggtgatgaagtaggggaagtaggtaagagcgaagtagttttcgaagtgaaatagggttatgatgtcggtcgttcggtttcgttcgcgcggggatcgcgaggcggcgttttcgggagcgggttttcggtttcgtcggttttttcgttacggttagggtttggtatttatttgattggcgggggttcgcgcgcgattttttgggagtagtagtttcggcgcggggcgtcgcgtttagtgacgttagagagttcgtggtcggttttgggttttatcgttgtcggtttagcgttttggggagtgattttcggttatgcggggtttttatcgttgttatcgcggtttcggttttttgaagtggaattcggtttggagtcgagcgcgatttttcgttcgtgggcgtaggcgatcgagtaagggtggggcgggttttaaattcggattagaattcgttttgatcggcgtagagatacgggacgtagtcgtgagtattgttttttattttattatggatttatcggcgtggg

SEQ ID NO: 652 - DNA, 682 bp, Artificial Sequence
  chemically treated genomic DNA (Homo sapiens) CpG-island No: 652
cccacgccgataaatccataataaaataaaaaacaatactcacgactacgtcccgtatctctacgccgatcaaaacgaattctaatccgaatttaaaacccgccccacccttactcgatcgcctacgcccacgaacgaaaaatcgcgctcgactccaaaccgaattccacttcaaaaaaccgaaaccgcgataacaacgataaaaaccccgcataaccgaaaatcactccccaaaacgctaaaccgacaacgataaaacccaaaaccgaccacgaactctctaacgtcactaaacgcgacgccccgcgccgaaactactactcccaaaaaatcgcgcgcgaacccccgccaatcaaataaataccaaaccctaaccgtaacgaaaaaaccgacgaaaccgaaaacccgctcccgaaaacgccgcctcgcgatccccgcgcgaacgaaaccgaacgaccgacatcataaccctatttcacttcgaaaactacttcgctcttacctacttcccctacttcatcacctacaaatacaacgacctataaatacgaaaaaaacgcgaaacgaaaaaaacgcgaaacccgaaccgaccctcacctcccgcttctccaaatccgaatacaacgccttctaaaaatacgtccaaactaaaatcacctacctctttatccaactctacaaa

SEQ ID NO: 653 - DNA, 510 bp, Artificial Sequence
  chemically treated genomic DNA (Homo sapiens) CpG-island No: 653
gggtgcgggcgcggtttagtttttttttatttggttgcggttggcggtggggtttgggtcgacgttggtgcggtttggatggataggacgttttcgggggatagcgcggacgttacggtagtcggatttacgttaggcggtaggcggtagcgacggtggaattcgcgcgcgacgaattcgtgtttattttggaggggagggaggtttgagcggtttcgttttttcggttcggcggcgagcgtattcgttttagtttcgttttacgtcgcggtttatcgggcgtttttcgtggcgcgcgtgtatttttacgtgttcgtttattattttgatagtaatttttttcggcgagaagtgttttacgtttagtagtatcgaaaagtggtcggggttcgtcggtatttgagcgtagcgggcgcgggcgggattgttattgggttgggttaggttttaggatttatttagggagattttattttcgtcggtttcgtgtcgcggtttattttggttttt

SEQ ID NO: 654 - DNA, 510 bp, Artificial Sequence
  chemically treated genomic DNA (Homo sapiens) CpG-island No: 654
aaaaaccaaaataaaccgcgacacgaaaccgacgaaaataaaatctccctaaataaatcctaaaacctaacccaacccaataacaatcccgcccgcgcccgctacgctcaaataccgacgaaccccgaccacttttcgatactactaaacgtaaaacacttctcgccgaaaaaaattactatcaaaataataaacgaacacgtaaaaatacacgcgcgccacgaaaaacgcccgataaaccgcgacgtaaaacgaaactaaaacgaatacgctcgccgccgaaccgaaaaaacgaaaccgctcaaacctccctcccctccaaaataaacacgaattcgtcgcgcgcgaattccaccgtcgctaccgcctaccgcctaacgtaaatccgactaccgtaacgtccgcgctatcccccgaaaacgtcctatccatccaaaccgcaccaacgtcgacccaaaccccaccgccaaccgcaaccaaataaaaaaaaactaaaccgcgcccgcaccc

SEQ ID NO: 655 - DNA, 510 bp, Artificial Sequence
  chemically treated genomic DNA (Homo sapiens) CpG-island No: 655
ggaggttagagtgagtcgcggtacggaatcgacgggggtggggtttttttgggtgggttttggagtttggtttagtttaatgatagtttcgttcgcgttcgttgcgtttaggtgtcgacggatttcggttatttttcggtgttgttagacgtgaagtatttttcgtcggaggaaattgttgttaaggtggtgggcgaatacgtggaggtgtacgcgcgttacgaggagcgttcggtgagtcgcggcgtggggcggggttggagcgggtacgttcgtcgtcgggtcggaggggcggggtcgtttaagttttttttttttttaggatgagtacggattcgtcgcgcgcgagttttatcgtcgttatcgtttgtcgtttggcgtggattcggttgtcgtgacgttcgcgttgtttttcgagggcgttttgtttatttaggtcgtattagcgtcggtttaggttttatcgttagtcgtagttaagtaggagggggttgggtcgcgttcgtattt

SEQ ID NO: 656 - DNA, 510 bp, Artificial Sequence
  chemically treated genomic DNA (Homo sapiens) CpG-island No: 656
aaatacgaacgcgacccaaccccctcctacttaactacgactaacgataaaacctaaaccgacgctaatacgacctaaataaacaaaacgccctcgaaaaacaacgcgaacgtcacgacaaccgaatccacgccaaacgacaaacgataacgacgataaaactcgcgcgcgacgaatccgtactcatcctaaaaaaaaaaaaaacttaaacgaccccgcccctccgacccgacgacgaacgtacccgctccaaccccgccccacgccgcgactcaccgaacgctcctcgtaacgcgcgtacacctccacgtattcgcccaccaccttaacaacaatttcctccgacgaaaaatacttcacgtctaacaacaccgaaaaataaccgaaatccgtcgacacctaaacgcaacgaacgcgaacgaaactatcattaaactaaaccaaactccaaaacccacccaaaaaaaccccacccccgtcgattccgtaccgcgactcactctaacctcc

SEQ ID NO: 657 - DNA, 570 bp, Artificial Sequence
  chemically treated genomic DNA (Homo sapiens) CpG-island No: 657
cgttgttaaatttcgaggggcgggatcgaggatatagagtcggggcggagtttaaggtgaaattaatgagaagttttcgggtgggcggggtatcggtttaaggttaagggcggagttaatgagaagtagcgtcgcgttttcgttgtttttcgttttcgtggggcgcgcgtcggagttacgggtagtcgttaggggcggggtttgtagtcgttcgcgcgcggttcgcgtttttttttttgtgtcgttatggcggcggtagcggcgacgagaacggcgagcgaggggtcgagcgcggtcggggtttgaggaggttacgcgattatggtggtaagggttttacgcggtcgttagtttgttcgttcggatgttagtttgttcgtgcgtagtttcgtttcgcgcgtttcgttttcggtttcgttcgatttcgcggtttgtgttttagtcgtggtttttttcgttttgcggttttatttcgggttttagttcgtatttcgatttcgttttttaagcgcgtattttcgttttttacgttttggatggggtgatagggatttagggtttgggttggga

SEQ ID NO: 658 - DNA, 570 bp, Artificial Sequence
  chemically treated genomic DNA (Homo sapiens) CpG-island No: 658
tcccaacccaaaccctaaatccctatcaccccatccaaaacgtaaaaaacgaaaatacgcgcttaaaaaacgaaatcgaaatacgaactaaaacccgaaataaaaccgcaaaacgaaaaaaaccacgactaaaacacaaaccgcgaaatcgaacgaaaccgaaaacgaaacgcgcgaaacgaaactacgcacgaacaaactaacatccgaacgaacaaactaacgaccgcgtaaaacccttaccaccataatcgcgtaacctcctcaaaccccgaccgcgctcgacccctcgctcgccgttctcgtcgccgctaccgccgccataacgacacaaaaaaaaaaacgcgaaccgcgcgcgaacgactacaaaccccgcccctaacgactacccgtaactccgacgcgcgccccacgaaaacgaaaaacaacgaaaacgcgacgctacttctcattaactccgcccttaaccttaaaccgataccccgcccacccgaaaacttctcattaatttcaccttaaactccgccccgactctatatcctcgatcccgcccctcgaaatttaacaacg

SEQ ID NO: 659 - DNA, 570 bp, Artificial Sequence
  chemically treated genomic DNA (Homo sapiens) CpG-island No: 659
ttttagtttaggttttaggtttttgttattttatttagggcgtggaagacggggatgcgcgtttagggggcggggtcgaggtacgggttgggattcgggatggggtcgtaggacgggagggattacggttgaagtataggtcgcgggatcgggcggggtcgggggcggggcgcgcggggcggggttgcgtacggatagattgatattcggacggataggttgacggtcgcgtgggatttttattattatggtcgcgtagtttttttaggtttcggtcgcgttcgatttttcgttcgtcgttttcgtcgtcgttgtcgtcgttatggcgatataaaggggagggcgcgagtcgcgcgcgggcggttgtagatttcgtttttaacggttgttcgtggtttcggcgcgcgttttacgggggcggggggtagcgggaacgcggcgttgttttttattggtttcgtttttggttttaggtcgatgtttcgtttattcggaggttttttattggttttattttgggtttcgtttcggttttgtgttttcggtttcgtttttcgaagtttgatagcg

SEQ ID NO: 660 - DNA, 570 bp, Artificial Sequence
  chemically treated genomic DNA (Homo sapiens) CpG-island No: 660
cgctatcaaacttcgaaaaacgaaaccgaaaacacaaaaccgaaacgaaacccaaaataaaaccaataaaaaacctccgaataaacgaaacatcgacctaaaaccaaaaacgaaaccaataaaaaacaacgccgcgttcccgctaccccccgcccccgtaaaacgcgcgccgaaaccacgaacaaccgttaaaaacgaaatctacaaccgcccgcgcgcgactcgcgccctcccctttatatcgccataacgacgacaacgacgacgaaaacgacgaacgaaaaatcgaacgcgaccgaaacctaaaaaaactacgcgaccataataataaaaatcccacgcgaccgtcaacctatccgtccgaatatcaatctatccgtacgcaaccccgccccgcgcgccccgcccccgaccccgcccgatcccgcgacctatacttcaaccgtaatccctcccgtcctacgaccccatcccgaatcccaacccgtacctcgaccccgccccctaaacgcgcatccccgtcttccacgccctaaataaaataacaaaaacctaaaacctaaactaaaa

SEQ ID NO: 661 - DNA, 979 bp, Artificial Sequence
  chemically treated genomic DNA (Homo sapiens) CpG-island No: 661
gtggtttcgatttggttagtcgtttgttgaagcgggggagcggggagtaggggtatgcgaattcggttttttttattatgatgaagacggagttacgggggttcgggggtttttttcggagcgttttttcgtatcgtagcgtttacgaggcgggtatttaggcgttgaagtcgttcgacgcgttcgggttcgacgaggtatttaagggggtttattataagaaatatggttttaacgtttatcgtattaaaagtatgtttttgtagatgggtacgacggcggggttttcgggcgaggcgggcggcggcgcgggtttggtcgaggttttacgggcgttcgagcgcggcgtgcgtttgtcgttgtcgcgggttagtagtttgaacgagaacgtggattatagcgttttgttgaagttgggtattagcgtgtcggagcgcgtgagtcgtttcgattttaagttcgcgtttttcgcgtagtttgcgtcgtcgtcgtattcgtcgtttcggttgtaggagacgcggaagttgttcgaacggagcgttttagcgcgtaggcggcgataaggagcgcggcgcggcggttgttgaggtaggagcgcgtcggtttgtaggatcggaagttggacgtcgtggtgcgttttaacggtagtatcgaggcgttggataagttggacgttgacgtcgtgttttttacggttagttagtttagcgtcgttttcgagaaggtcgattcgaggatcggtttttatcgcgggttcgggttttttagggtcgtaggggttttttaggttaattcgaagttggttagtaagcggtttcgggtgttttagttttcgtcgtcgtcgtcgttcgtttcgtcgggggatgtttcggtcgagaaagagcgatgtttcgtagggtagtagttttcgtagtatcgagtggtttttgttcggtcgttttttaagtttcgggaggtgcgtaagattaagtcggtggag

SEQ ID NO: 662 - DNA, 979 bp, Artificial Sequence
  chemically treated genomic DNA (Homo sapiens) CpG-island No: 662
ctccaccgacttaatcttacgcacctcccgaaacttaaaaaacgaccgaacaaaaaccactcgatactacgaaaactactaccctacgaaacatcgctctttctcgaccgaaacatcccccgacgaaacgaacgacgacgacgacgaaaactaaaacacccgaaaccgcttactaaccaacttcgaattaacctaaaaaacccctacgaccctaaaaaacccgaacccgcgataaaaaccgatcctcgaatcgaccttctcgaaaacgacgctaaactaactaaccgtaaaaaacacgacgtcaacgtccaacttatccaacgcctcgatactaccgttaaaacgcaccacgacgtccaacttccgatcctacaaaccgacgcgctcctacctcaacaaccgccgcgccgcgctccttatcgccgcctacgcgctaaaacgctccgttcgaacaacttccgcgtctcctacaaccgaaacgacgaatacgacgacgacgcaaactacgcgaaaaacgcgaacttaaaatcgaaacgactcacgcgctccgacacgctaatacccaacttcaacaaaacgctataatccacgttctcgttcaaactactaacccgcgacaacgacaaacgcacgccgcgctcgaacgcccgtaaaacctcgaccaaacccgcgccgccgcccgcctcgcccgaaaaccccgccgtcgtacccatctacaaaaacatacttttaatacgataaacgttaaaaccatatttcttataataaacccccttaaatacctcgtcgaacccgaacgcgtcgaacgacttcaacgcctaaatacccgcctcgtaaacgctacgatacgaaaaaacgctccgaaaaaaacccccgaacccccgtaactccgtcttcatcataataaaaaaaaccgaattcgcatacccctactccccgctcccccgcttcaacaaacgactaaccaaatcgaaaccac

SEQ ID NO: 663 - DNA, 979 bp, Artificial Sequence
  chemically treated genomic DNA (Homo sapiens) CpG-island No: 663
ttttatcggtttaattttgcgtatttttcggggtttggggggcggtcgggtaggggttattcggtgttgcgggggttgttgttttgcggggtatcgttttttttcggtcggggtatttttcgacggggcgggcggcggcggcggcgggggttggaatattcgggatcgtttgttgattagtttcgagttgatttggggaatttttgcggttttggggagttcgggttcgcggtggaggtcggttttcgagtcggttttttcgaagacggcgttgagttggttgatcgtgggggatacggcgttagcgtttagtttgtttagcgtttcggtgttgtcgttgaagcgtattacgacgtttagttttcggttttgtaggtcggcgcgtttttgttttagtagtcgtcgcgtcgcgttttttgtcgtcgtttgcgcgttggggcgtttcgttcgaatagttttcgcgttttttgtagtcgggacggcgggtgcggcggcggcgtaggttgcgcggagggcgcgggtttggagtcgaagcggtttacgcgtttcgatacgttggtgtttagttttagtagggcgttgtggtttacgttttcgtttaggttgttggttcgcggtagcgataggcgtacgtcgcgttcggacgttcgtggggtttcggttaggttcgcgtcgtcgttcgtttcgttcgagggtttcgtcgtcgtgtttatttgtaggaatatatttttgatgcggtggacgttggagttatattttttgtggtgggtttttttgggtgtttcgtcgggttcgggcgcgtcgggcggttttagcgtttggatgttcgtttcgtaggcgttgcggtgcggggaggcgtttcggaggggattttcgggttttcgtggtttcgtttttattatggtggggggagtcgggttcgtatgtttttgtttttcgttttttcgttttaataggcggttggttaagtcgggattat

SEQ ID NO: 664 - DNA, 979 bp, Artificial Sequence
  chemically treated genomic DNA (Homo sapiens) CpG-island No: 664
ataatcccgacttaaccaaccgcctattaaaacgaaaaaacgaaaaacaaaaacatacgaacccgactccccccaccataataaaaacgaaaccacgaaaacccgaaaatcccctccgaaacgcctccccgcaccgcaacgcctacgaaacgaacatccaaacgctaaaaccgcccgacgcgcccgaacccgacgaaacacccaaaaaaacccaccacaaaaaatataactccaacgtccaccgcatcaaaaatatattcctacaaataaacacgacgacgaaaccctcgaacgaaacgaacgacgacgcgaacctaaccgaaaccccacgaacgtccgaacgcgacgtacgcctatcgctaccgcgaaccaacaacctaaacgaaaacgtaaaccacaacgccctactaaaactaaacaccaacgtatcgaaacgcgtaaaccgcttcgactccaaacccgcgccctccgcgcaacctacgccgccgccgcacccgccgtcccgactacaaaaaacgcgaaaactattcgaacgaaacgccccaacgcgcaaacgacgacaaaaaacgcgacgcgacgactactaaaacaaaaacgcgccgacctacaaaaccgaaaactaaacgtcgtaatacgcttcaacgacaacaccgaaacgctaaacaaactaaacgctaacgccgtatcccccacgatcaaccaactcaacgccgtcttcgaaaaaaccgactcgaaaaccgacctccaccgcgaacccgaactccccaaaaccgcaaaaattccccaaatcaactcgaaactaatcaacaaacgatcccgaatattccaacccccgccgccgccgccgcccgccccgtcgaaaaataccccgaccgaaaaaaaacgataccccgcaaaacaacaacccccgcaacaccgaataacccctacccgaccgccccccaaaccccgaaaaatacgcaaaattaaaccgataaaa

SEQ ID NO: 665 - DNA, 578 bp, Artificial Sequence
  chemically treated genomic DNA (Homo sapiens) CpG-island No: 665
ggagtcggaggtcgagtcggcgttcggggaggtgatttaggtcgaggttacggtttacgcggttttggagaatggtagtatcgtggtaattgtagttagtttcgcgttcgaggagttaaaggtttaagcggtttcggagaaggaggcggcggcggtagcgtcgttagagaggggggtgggtaatggtcgggtttcggacgtggtttttgaggaggtagatgaatttaagaaggaggatttttcggaggcggatttggtggacgtgagcgtttatagtgggttcggggaggattttgcgggtagtgttttggaggaggacgacgaagacgacgaggaggatggggagtttttttacgagttcgagtcggggtgcgtggagatttcggggttgtcggaggaggaggatttagtttcgagtcggaagatttattttagtacggcgtttatttaagtaagtgagttttttcgttttgttttcgcgtcgtttttgttacgtgtacgcggtcgttttcgttcgttagttagttagtcgggtttggtaggttgagttagtttttgttatttagttttttttttag

SEQ ID NO: 666 - DNA, 578 bp, Artificial Sequence
  chemically treated genomic DNA (Homo sapiens) CpG-island No: 666
ctaaaaaaaaaactaaataacaaaaactaactcaacctaccaaacccgactaactaactaacgaacgaaaacgaccgcgtacacgtaacaaaaacgacgcgaaaacaaaacgaaaaaactcacttacttaaataaacgccgtactaaaataaatcttccgactcgaaactaaatcctcctcctccgacaaccccgaaatctccacgcaccccgactcgaactcgtaaaaaaactccccatcctcctcgtcgtcttcgtcgtcctcctccaaaacactacccgcaaaatcctccccgaacccactataaacgctcacgtccaccaaatccgcctccgaaaaatcctccttcttaaattcatctacctcctcaaaaaccacgtccgaaacccgaccattacccacccccctctctaacgacgctaccgccgccgcctccttctccgaaaccgcttaaacctttaactcctcgaacgcgaaactaactacaattaccacgatactaccattctccaaaaccgcgtaaaccgtaacctcgacctaaatcacctccccgaacgccgactcgacctccgactcc

SEQ ID NO: 667 - DNA, 578 bp, Artificial Sequence
  chemically treated genomic DNA (Homo sapiens) CpG-island No: 667
ttgggaagggggttgggtggtaggggttgatttagtttgttaaattcggttggttggttggcgagcgggggcggtcgcgtgtacgtggtaggggcggcgcgggggtagggcgggggggtttatttatttggatgggcgtcgtgttgaaatggatttttcggttcggggttgggtttttttttttcgatagtttcgggatttttacgtatttcgattcgggttcgtaggggggttttttatttttttcgtcgttttcgtcgtttttttttagggtattgttcgtagagtttttttcgagtttattgtaggcgtttacgtttattaagttcgttttcgagaagtttttttttttggatttatttatttttttaggggttacgttcggggttcggttattgtttatttttttttttggcggcgttatcgtcgtcgttttttttttcggggtcgtttgggtttttggtttttcgggcgcggggttggttgtagttgttacggtgttgttattttttagggtcgcgtggatcgtaatttcggtttggattattttttcgggcgtcgattcggttttcgatttt

SEQ ID NO: 668 - DNA, 578 bp, Artificial Sequence
  chemically treated genomic DNA (Homo sapiens) CpG-island No: 668
aaaatcgaaaaccgaatcgacgcccgaaaaaataatccaaaccgaaattacgatccacgcgaccctaaaaaataacaacaccgtaacaactacaaccaaccccgcgcccgaaaaaccaaaaacccaaacgaccccgaaaaaaaaaacgacgacgataacgccgccaaaaaaaaaaataaacaataaccgaaccccgaacgtaacccctaaaaaaataaataaatccaaaaaaaaaaacttctcgaaaacgaacttaataaacgtaaacgcctacaataaactcgaaaaaaactctacgaacaataccctaaaaaaaaacgacgaaaacgacgaaaaaaataaaaaacccccctacgaacccgaatcgaaatacgtaaaaatcccgaaactatcgaaaaaaaaaaacccaaccccgaaccgaaaaatccatttcaacacgacgcccatccaaataaataaacccccccgccctacccccgcgccgcccctaccacgtacacgcgaccgcccccgctcgccaaccaaccaaccgaatttaacaaactaaatcaacccctaccacccaacccccttcccaa

SEQ ID NO: 669 - DNA, 763 bp, Artificial Sequence
  chemically treated genomic DNA (Homo sapiens) CpG-island No: 669
cgtttcggagtcgtttttattcgcgtagatttcggtgcgtcgcgtttttcgcgggtagagaagtagttgtaatttcgtttttcggttttagtcgtttttttttcgtcgttttttttcgttttcgttttttcgttttttttcgttttttgttttttgggcgttcggttttttcgttacgcgttttttatttcgacgtttttttttcggagattttcgcggatttttgtcgacgcgacgtcgcgcgaatcggttttgttaggcgggggtttcgcgttcggttaggtttggcgggcggtaggggcggggagggaggtggcgttcgtttttcgtttttttttttttttttttttttgttatatatatatatacgtatacgtatacgtatatatatacggagtattttttcgttaggttttttggtttagtttcgttcgcgttttttgtttttagcgaatttgttttttttttttatatttttcgttttttatttttttcggttttgggatttttttcgtcgattttatttttattttcgggatggagcggttcgagttcgttcggagtttttcgcggtcggggtgacggtttttttattttttttttgttcggttttcgtttcgagtattatgggtttgaggggttttcggggcgttagacgttgaagatgatcgatgtcggaggtgaggggtcgggcgttttggggtggatcgggaattggggttagggttattcgggttcgcggtgggattttgagtggggttgg

SEQ ID NO: 670 - DNA, 763 bp, Artificial Sequence
  chemically treated genomic DNA (Homo sapiens) CpG-island No: 670
ccaaccccactcaaaatcccaccgcgaacccgaataaccctaaccccaattcccgatccaccccaaaacgcccgacccctcacctccgacatcgatcatcttcaacgtctaacgccccgaaaacccctcaaacccataatactcgaaacgaaaaccgaacaaaaaaaaaataaaaaaaccgtcaccccgaccgcgaaaaactccgaacgaactcgaaccgctccatcccgaaaataaaaataaaatcgacgaaaaaaatcccaaaaccgaaaaaaataaaaaacgaaaaatataaaaaaaaaaaacaaattcgctaaaaacaaaaaacgcgaacgaaactaaaccaaaaaacctaacgaaaaaatactccgtatatatatacgtatacgtatacgtatatatatatataacaaaaaaaaaaaaaaaaaaaaaaacgaaaaacgaacgccacctccctccccgcccctaccgcccgccaaacctaaccgaacgcgaaacccccgcctaacaaaaccgattcgcgcgacgtcgcgtcgacaaaaatccgcgaaaatctccgaaaaaaaaacgtcgaaataaaaaacgcgtaacgaaaaaaccgaacgcccaaaaaacaaaaaacgaaaaaaaacgaaaaaacgaaaacgaaaaaaaacgacgaaaaaaaaacgactaaaaccgaaaaacgaaattacaactacttctctacccgcgaaaaacgcgacgcaccgaaatctacgcgaataaaaacgactccgaaacg

SEQ ID NO: 671 - DNA, 763 bp, Artificial Sequence
  chemically treated genomic DNA (Homo sapiens) CpG-island No: 671
ttaattttatttagggttttatcgcgggttcgagtggttttagttttagttttcggtttattttagggcgttcggttttttattttcggtatcggttatttttagcgtttggcgtttcgggaattttttaggtttatggtgttcgaggcgggggtcgggtaggagaggggtggggggatcgttatttcggtcgcggggggtttcgggcgggttcgagtcgttttatttcgggggtgggggtgaggtcggcgggaagggttttagagtcgggggagatggagggcgggggatgtggggagagggaataggttcgttggaagtaggaggcgcgggcggggttggattaggagatttgacgggaggatgtttcgtgtgtgtgtgcgtgtgcgtgtgcgtgtgtgtgtgtgtgatagagagagagagagagagaagagcgaagagcgagcgttattttttttttcgtttttgtcgttcgttaggtttggtcggacgcggggttttcgtttggtagggtcgattcgcgcggcgtcgcgtcggtaggggttcgcgggggttttcggggaaggggcgtcggggtggggggcgcgtggcggagaagtcgggcgtttaggagataaagagcgggagggagcgagggggcgggggcgggggagggcggcggggaggaggcggttggggtcggggagcggagttgtagttatttttttgttcgcgggagacgcggcgtatcggagtttgcgcgggtgggagcggtttcggggcg

SEQ ID NO: 672 - DNA, 763 bp, Artificial Sequence
  chemically treated genomic DNA (Homo sapiens) CpG-island No: 672
cgccccgaaaccgctcccacccgcgcaaactccgatacgccgcgtctcccgcgaacaaaaaaataactacaactccgctccccgaccccaaccgcctcctccccgccgccctcccccgcccccgccccctcgctccctcccgctctttatctcctaaacgcccgacttctccgccacgcgccccccaccccgacgccccttccccgaaaacccccgcgaacccctaccgacgcgacgccgcgcgaatcgaccctaccaaacgaaaaccccgcgtccgaccaaacctaacgaacgacaaaaacgaaaaaaaaaataacgctcgctcttcgctcttctctctctctctctctctatcacacacacacacacgcacacgcacacgcacacacacacgaaacatcctcccgtcaaatctcctaatccaaccccgcccgcgcctcctacttccaacgaacctattccctctccccacatcccccgccctccatctcccccgactctaaaacccttcccgccgacctcacccccacccccgaaataaaacgactcgaacccgcccgaaaccccccgcgaccgaaataacgatccccccacccctctcctacccgacccccgcctcgaacaccataaacctaaaaaattcccgaaacgccaaacgctaaaaataaccgataccgaaaataaaaaaccgaacgccctaaaataaaccgaaaactaaaactaaaaccactcgaacccgcgataaaaccctaaataaaattaa

SEQ ID NO: 673 - DNA, 825 bp, Artificial Sequence
  chemically treated genomic DNA (Homo sapiens) CpG-island No: 673
tattttttcgtttttattttatattttttagttttatttataggtagcgttgttgtcgttttgtttgtcgatggagggcgatcgagtagtcgaagaggttgttcgggttttcggttttttttattattaggaatcgggtatttaggttgaaggcggagacgacgtagtcgtcggtcgttattattaaggcgagcgtatagagtattaggcgtggggcgcggggcgcgcggttggggtcggggtttatggttgttagcggaagcggggtttcggcgagagcgcgtgagggcgcggagttgggcgtgaggatttgtttatttgtttttcgcgtcgtcggaggatattggaattcgtcggtcgttgcgtttcgtagcgttgatcggtttcgtgtttttagttttagttagttttatagttgcgttttcggatttttttttaagattcgtgggtttatttttttgtttttttagcggtcgggtcgtcgtcgtttttgtttcgggtaatcggtttttagtttgtttcggtcgcgtttttttggtcgcgttgtcgttttcgatttcggtttcgcggcggatttggtaagcgtatcggtcgatcgtaaggaggataggagggaggggtttttcggcgcgcgtttcgtttttttacgtttagtttcgtatttttttattttgcgagtttagttcgggttgcgtttttttttcggggaaagagaaaaagatttcggttcggtcgtttttttttaaaggggtagtatcgtttttttttttttattttttttattttagtttcgtttttttttttaaatatttgtcggtaattttt

SEQ ID NO: 674 - DNA, 825 bp, Artificial Sequence
  chemically treated genomic DNA (Homo sapiens) CpG-island No: 674
aaaaattaccgacaaatatttaaaaaaaaaaacgaaactaaaataaaaaaaataaaaaaaaaaaaacgatactacccctttaaaaaaaaacgaccgaaccgaaatctttttctctttccccgaaaaaaaaacgcaacccgaactaaactcgcaaaataaaaaaatacgaaactaaacgtaaaaaaacgaaacgcgcgccgaaaaacccctccctcctatcctccttacgatcgaccgatacgcttaccaaatccgccgcgaaaccgaaatcgaaaacgacaacgcgaccaaaaaaacgcgaccgaaacaaactaaaaaccgattacccgaaacaaaaacgacgacgacccgaccgctaaaaaaacaaaaaaataaacccacgaatcttaaaaaaaaatccgaaaacgcaactataaaactaactaaaactaaaaacacgaaaccgatcaacgctacgaaacgcaacgaccgacgaattccaatatcctccgacgacgcgaaaaacaaataaacaaatcctcacgcccaactccgcgccctcacgcgctctcgccgaaaccccgcttccgctaacaaccataaaccccgaccccaaccgcgcgccccgcgccccacgcctaatactctatacgctcgccttaataataacgaccgacgactacgtcgtctccgccttcaacctaaatacccgattcctaataataaaaaaaaccgaaaacccgaacaacctcttcgactactcgatcgccctccatcgacaaacaaaacgacaacaacgctacctataaataaaactaaaaaatataaaataaaaacgaaaaaata

SEQ ID NO: 675 - DNA, 825 bp, Artificial Sequence
  chemically treated genomic DNA (Homo sapiens) CpG-island No: 675
gggggttgtcgataggtgtttgggggagaaggcggagttggggtagggaggatgaggagggaggggcggtgttgtttttttaagaggaggcggtcgagtcgggattttttttttttttttcggaaggaaagcgtagttcgggttgggttcgtaaggtggggaggtgcgggattgggcgtggggaggcggggcgcgcgtcgggggattttttttttttgttttttttgcggtcgatcggtgcgtttgttagattcgtcgcgaagtcgggatcgaaggcgatagcgcggttaagggggcgcggtcgggataagttgggggtcggttgttcggggtagggacggcggcgattcggtcgttggggaggtaggaagatagatttacggattttaggaagggattcgagagcgtagttgtgaaattggttggggttgggggtacgaaatcgattagcgttacggagcgtagcggtcggcgggttttagtgtttttcggcggcgcggggagtaggtgaataggtttttacgtttagtttcgcgtttttacgcgttttcgtcgggatttcgttttcgttggtagttatgggtttcggttttagtcgcgcgtttcgcgttttacgtttgatgttttgtgcgttcgttttgatggtggcggtcggcggttgcgtcgttttcgtttttaatttggatattcgatttttggtagtgaaggaggtcgggaattcgggtagttttttcggttattcggtcgttttttatcggtagatagagcggtagtagcgttatttgtaagtgaagttggagggtgtggggtgggagcgagagagtg

SEQ ID NO: 676 - DNA, 825 bp, Artificial Sequence
  chemically treated genomic DNA (Homo sapiens) CpG-island No: 676
cactctctcgctcccaccccacaccctccaacttcacttacaaataacgctactaccgctctatctaccgataaaaaacgaccgaataaccgaaaaaactacccgaattcccgacctccttcactaccaaaaatcgaatatccaaattaaaaacgaaaacgacgcaaccgccgaccgccaccatcaaaacgaacgcacaaaacatcaaacgtaaaacgcgaaacgcgcgactaaaaccgaaacccataactaccaacgaaaacgaaatcccgacgaaaacgcgtaaaaacgcgaaactaaacgtaaaaacctattcacctactccccgcgccgccgaaaaacactaaaacccgccgaccgctacgctccgtaacgctaatcgatttcgtacccccaaccccaaccaatttcacaactacgctctcgaatcccttcctaaaatccgtaaatctatcttcctacctccccaacgaccgaatcgccgccgtccctaccccgaacaaccgacccccaacttatcccgaccgcgcccccttaaccgcgctatcgccttcgatcccgacttcgcgacgaatctaacaaacgcaccgatcgaccgcaaaaaaaacaaaaaaaaaaaatcccccgacgcgcgccccgcctccccacgcccaatcccgcacctccccaccttacgaacccaacccgaactacgctttccttccgaaaaaaaaaaaaaaaatcccgactcgaccgcctcctcttaaaaaaacaacaccgcccctccctcctcatcctccctaccccaactccgccttctcccccaaacacctatcgacaaccccc

SEQ ID NO: 677 - DNA, 1454 bp, Artificial Sequence
  chemically treated genomic DNA (Homo sapiens) CpG-island No: 677
gaaacggtttcggcgttcgggcggcggcggtggtcgtttgcggtagtttagttgaaacgtagcggaaattgtagttagttacggggttgcgggaggtaaggtaggaaggtggcgttgtcgtcgagcgtttggagttcgagcgtttattatggcggtaagggtaatggtcgttacggggagcgagtacgttttttcgcgcgtatacgtcgtcgcgtcgggttttcggggttcgttatcggcgtcgttgtcgtcgtcgttcgtttttttatttttttttacgggttgtagcggaattttttttttagatatcgtttttaagatggcggttttttttttcggtaattttttttatcgttttttgtagtaggcgtcgagtcgtcgttattttgtttttcgttttttttttttttttatcgatatttatatagcgaaaatcggttcggtcggtttgcggtttttattttacgtttgtagttttcgttttttcgttaggttttatttcggcgcggtgttttaggtcggtcgcggagtcgattcggggtttttcgatcgttttcggtataatcgggcgatttttttttaattttcgttcgtttacggagcgcgttttcgtcgtcgttcggggtagtcgggttttttttcgggtttaattgcggttttttcggggtttgttcggcgtcgcgcgttacgtcgttcggtttagcgcgggagggcgttttgcgggtcgtcgattaggtcgagattaggtcgttgtgcgcgtattaggtttcgcggtcgcggcggtattcgggatttatcggacggacgtgcgggcggtcggcgacggtggcgggtgttgtaggtcggtttttttttggagtattgggtcgggtttcggttggtggggcgggcggagggagggaggaggggtcgagttcggagttgataaaaagcggtttagtttttcggtacgggttcgtcgttagtacgttacgttatcgttcgggagagagatttaggaaaatgcggaagggtagataggttttttttttcgttcggtgggtttttttggtatttcgtgtcggcgtcgttttcgtttcgcgatcggggagtttagtggtttcgttgcggcggggttttcggcggtcggagttttcgtgatagcgttttttttttttttatttttttcgcgttttcgttcgtcgtcgttatatacgcgtcgttgtcgtcgtcgtttcggtcgtaaagttcgcgcggggtcgcggtcggtcgatttcgcggagaggtaggcggttcggtcgttttttattatgtttcgtgggtcgcggtcgtttttcgggggtttttttggagatttatcgtttttcgcgtcggttttggtcgaggttttagttcgagttgtttgtaggtttttagattttcgttcgtagtaaatgtgttttttttattttcgtggttggggaggaagataaatt

SEQ ID NO: 678 - DNA, 1454 bp, Artificial Sequence
  chemically treated genomic DNA (Homo sapiens) CpG-island No: 678
aatttatcttcctccccaaccacgaaaataaaaaaaacacatttactacgaacgaaaatctaaaaacctacaaacaactcgaactaaaacctcgaccaaaaccgacgcgaaaaacgataaatctccaaaaaaacccccgaaaaacgaccgcgacccacgaaacataataaaaaacgaccgaaccgcctacctctccgcgaaatcgaccgaccgcgaccccgcgcgaactttacgaccgaaacgacgacgacaacgacgcgtatataacgacgacgaacgaaaacgcgaaaaaaataaaaaaaaaaaaaacgctatcacgaaaactccgaccgccgaaaaccccgccgcaacgaaaccactaaactccccgatcgcgaaacgaaaacgacgccgacacgaaataccaaaaaaacccaccgaacgaaaaaaaaaacctatctacccttccgcattttcctaaatctctctcccgaacgataacgtaacgtactaacgacgaacccgtaccgaaaaactaaaccgctttttatcaactccgaactcgacccctcctccctccctccgcccgccccaccaaccgaaacccgacccaatactccaaaaaaaaaccgacctacaacacccgccaccgtcgccgaccgcccgcacgtccgtccgataaatcccgaataccgccgcgaccgcgaaacctaatacgcgcacaacgacctaatctcgacctaatcgacgacccgcaaaacgccctcccgcgctaaaccgaacgacgtaacgcgcgacgccgaacaaaccccgaaaaaaccgcaattaaacccgaaaaaaaacccgactaccccgaacgacgacgaaaacgcgctccgtaaacgaacgaaaattaaaaaaaaatcgcccgattataccgaaaacgatcgaaaaaccccgaatcgactccgcgaccgacctaaaacaccgcgccgaaataaaacctaacgaaaaaacgaaaactacaaacgtaaaataaaaaccgcaaaccgaccgaaccgattttcgctatataaatatcgataaaaaaaaaaaaaaaacgaaaaacaaaataacgacgactcgacgcctactacaaaaaacgataaaaaaaattaccgaaaaaaaaaaccgccatcttaaaaacgatatctaaaaaaaaaattccgctacaacccgtaaaaaaaaataaaaaaacgaacgacgacgacaacgacgccgataacgaaccccgaaaacccgacgcgacgacgtatacgcgcgaaaaaacgtactcgctccccgtaacgaccattacccttaccgccataataaacgctcgaactccaaacgctcgacgacaacgccaccttcctaccttacctcccgcaaccccgtaactaactacaatttccgctacgtttcaactaaactaccgcaaacgaccaccgccgccgcccgaacgccgaaaccgtttc

SEQ ID NO: 679 - DNA, 1454 bp, Artificial Sequence
  chemically treated genomic DNA (Homo sapiens) CpG-island No: 679
aatttatttttttttttagttacggggatgaagaaaatatatttattgcgggcgggggtttgagggtttgtaaataattcgagttggagtttcggttaggatcggcgcgagaggcggtaggtttttagggaggttttcggggggcggtcgcggtttacgggatatggtggggggcggtcgggtcgtttgttttttcgcggggtcggtcgatcgcggtttcgcgcgggttttacggtcgaggcggcggcggtagcggcgcgtgtgtggcggcggcgggcgggagcgcggaggaggtggaaagaaggggggcgttgttacggagatttcggtcgtcggagatttcgtcgtagcgaggttattgggtttttcggtcgcggggcgggagcggcgtcgatacggggtgttaggaggatttatcgggcggaggagggggtttgtttattttttcgtatttttttgggtttttttttcgggcggtgacgtgacgtgttgacggcgggttcgtgtcggggagttgggtcgttttttgttagtttcgagttcggtttttttttttttttttcgttcgttttattagtcggagttcggtttagtgttttagagaaaggtcggtttgtagtattcgttatcgtcgtcggtcgttcgtacgttcgttcggtgagtttcgggtgtcgtcgcggtcgcggggtttagtgcgcgtatagcggtttggtttcggtttggtcggcggttcgtaaggcgttttttcgcgttaggtcgggcggcgtggcgcgcggcgtcgagtaggtttcgaggaggtcgtagttaggttcggggaggagttcggttgtttcgagcggcggcggaggcgcgtttcgtaagcgggcgggggttgggggagggtcgttcggttgtgtcggaggcggtcgaggggtttcgggtcggtttcgcggtcgatttggggtatcgcgtcggggtgaggtttggcgaggaggcgaaggttgtaggcgtgaggtgaaggtcgtaggtcggtcgggtcgattttcgttatgtaaatatcggtgagggggggggagggacgggggataagatggcggcggttcggcgtttgttgtaggggacgatagagggggttgtcgggagggggagtcgttattttggaggcggtgtttggagagaaaatttcgttatagttcgtgagggggggtgggagagcgggcggcggcggtagcggcgtcggtgacgggtttcggaggttcggcgcggcggcgtgtgcgcgcggaggggcgtgttcgtttttcgtggcggttattgtttttgtcgttatgatgagcgttcgggttttaggcgttcggcggtagcgttatttttttgttttgtttttcgtagtttcgtgattggttgtagttttcgttgcgttttagttgagttgtcgtaggcggttatcgtcgtcgttcggacgtcgggatcgtttt

SEQ ID NO: 680 - DNA, 1454 bp, Artificial Sequence
  chemically treated genomic DNA (Homo sapiens) CpG-island No: 680
aaaacgatcccgacgtccgaacgacgacgataaccgcctacgacaactcaactaaaacgcaacgaaaactacaaccaatcacgaaactacgaaaaacaaaacaaaaaaataacgctaccgccgaacgcctaaaacccgaacgctcatcataacgacaaaaacaataaccgccacgaaaaacgaacacgcccctccgcgcgcacacgccgccgcgccgaacctccgaaacccgtcaccgacgccgctaccgccgccgcccgctctcccaccccccctcacgaactataacgaaattttctctccaaacaccgcctccaaaataacgactccccctcccgacaaccccctctatcgtcccctacaacaaacgccgaaccgccgccatcttatcccccgtccctccccccccctcaccgatatttacataacgaaaatcgacccgaccgacctacgaccttcacctcacgcctacaaccttcgcctcctcgccaaacctcaccccgacgcgataccccaaatcgaccgcgaaaccgacccgaaacccctcgaccgcctccgacacaaccgaacgaccctcccccaacccccgcccgcttacgaaacgcgcctccgccgccgctcgaaacaaccgaactcctccccgaacctaactacgacctcctcgaaacctactcgacgccgcgcgccacgccgcccgacctaacgcgaaaaaacgccttacgaaccgccgaccaaaccgaaaccaaaccgctatacgcgcactaaaccccgcgaccgcgacgacacccgaaactcaccgaacgaacgtacgaacgaccgacgacgataacgaatactacaaaccgacctttctctaaaacactaaaccgaactccgactaataaaacgaacgaaaaaaaaaaaaaaaaaccgaactcgaaactaacaaaaaacgacccaactccccgacacgaacccgccgtcaacacgtcacgtcaccgcccgaaaaaaaaacccaaaaaaatacgaaaaaataaacaaaccccctcctccgcccgataaatcctcctaacaccccgtatcgacgccgctcccgccccgcgaccgaaaaacccaataacctcgctacgacgaaatctccgacgaccgaaatctccgtaacaacgccccccttctttccacctcctccgcgctcccgcccgccgccgccacacacgcgccgctaccgccgccgcctcgaccgtaaaacccgcgcgaaaccgcgatcgaccgaccccgcgaaaaaacaaacgacccgaccgccccccaccatatcccgtaaaccgcgaccgccccccgaaaacctccctaaaaacctaccgcctctcgcgccgatcctaaccgaaactccaactcgaattatttacaaaccctcaaacccccgcccgcaataaatatattttcttcatccccgtaactaaaaaaaaaaataaatt

SEQ ID NO: 681 - DNA, 672 bp, Artificial Sequence
  chemically treated genomic DNA (Homo sapiens) CpG-island No: 681
tttagtcgggtaatttgatcgcgttagttgtattattgattcggatatcgttttgtgagaagtagttagcgtatagggcgttaaggtcggttttcgtttcgttagtgagaacggtcgaaatgtgttcgttttggtatcgtttggttttgagttagttttcgtatcggtttcggttggtattgttttagtttgcgtaaatttcgtcggttggtggttcggtaatcggcgagatttttttttgatcgacggtttagttcggtgtagggtttagtggcgtattcgtttcgttttagattttattattagggtacgtagtttgtttcgttttagggtgattcgtcgtttattaggcggttggtattcgacgttgcgtattagcgagattaagttcgttatcgtcgttgtgtcgttaattattaattcggatcgtttgcgggcggcgtcggttttttgtttgtcgtcgatagtcgtcgttcgttgtttagatgatcggttaatgtttgaagtgttgtttttacggcgttcgtaagtgtgacgatttattgttcgttacgcgtacggttgtcgtgtttgatggtcgttataggtgcgttttgtcgttttttgatttggcgtttacgttgtttttcgttgtatcgttttggtttttgtttcgggtcgtttttgcgtttt

SEQ ID NO: 682 - DNA, 672 bp, Artificial Sequence
  chemically treated genomic DNA (Homo sapiens) CpG-island No: 682
aaaacgcaaaaacgacccgaaacaaaaaccaaaacgatacaacgaaaaacaacgtaaacgccaaatcaaaaaacgacaaaacgcacctataacgaccatcaaacacgacaaccgtacgcgtaacgaacaataaatcgtcacacttacgaacgccgtaaaaacaacacttcaaacattaaccgatcatctaaacaacgaacgacgactatcgacgacaaacaaaaaaccgacgccgcccgcaaacgatccgaattaataattaacgacacaacgacgataacgaacttaatctcgctaatacgcaacgtcgaataccaaccgcctaataaacgacgaatcaccctaaaacgaaacaaactacgtaccctaataataaaatctaaaacgaaacgaatacgccactaaaccctacaccgaactaaaccgtcgatcaaaaaaaaatctcgccgattaccgaaccaccaaccgacgaaatttacgcaaactaaaacaataccaaccgaaaccgatacgaaaactaactcaaaaccaaacgataccaaaacgaacacatttcgaccgttctcactaacgaaacgaaaaccgaccttaacgccctatacgctaactacttctcacaaaacgatatccgaatcaataatacaactaacgcgatcaaattacccgactaaa

SEQ ID NO: 683 - DNA, 672 bp, Artificial Sequence
  chemically treated genomic DNA (Homo sapiens) CpG-island No: 683
aaaacgtagaaacggttcgaagtagagattaggacgatgtaacgaggaatagcgtagacgttaggttaaaggacgatagaacgtatttgtagcgattattaagtacggtagtcgtacgcgtgacgagtaatggatcgttatatttgcgagcgtcgtagagatagtattttaggtattagtcgattatttgagtagcggacgacgattgtcgacggtaagtagagaatcggcgtcgttcgtaagcgattcgagttagtgattgacggtataacggcgatagcgaatttgatttcgttgatgcgtaacgtcgagtgttaatcgtttgatagacggcgagttattttgagacggagtagattacgtgttttaatagtggagtttggaacgaaacgggtacgttattgaattttatatcggattaagtcgtcgattaagaagagatttcgtcgattatcgaattattagtcgacgggatttacgtaggttggagtaatgttagtcgagatcgatgcgggaattgatttagggttaggcggtgttagggcgaatatatttcggtcgtttttattggcgaaacggaaatcgattttggcgttttatgcgttagttgttttttatagggcgatgttcgagttaataatgtagttggcgcgattaggttattcggttgga

SEQ ID NO: 684 - DNA, 672 bp, Artificial Sequence
  chemically treated genomic DNA (Homo sapiens) CpG-island No: 684
tccaaccgaataacctaatcgcgccaactacattattaactcgaacatcgccctataaaaaacaactaacgcataaaacgccaaaatcgatttccgtttcgccaataaaaacgaccgaaatatattcgccctaacaccgcctaaccctaaatcaattcccgcatcgatctcgactaacattactccaacctacgtaaatcccgtcgactaataattcgataatcgacgaaatctcttcttaatcgacgacttaatccgatataaaattcaataacgtacccgtttcgttccaaactccactattaaaacacgtaatctactccgtctcaaaataactcgccgtctatcaaacgattaacactcgacgttacgcatcaacgaaatcaaattcgctatcgccgttataccgtcaatcactaactcgaatcgcttacgaacgacgccgattctctacttaccgtcgacaatcgtcgtccgctactcaaataatcgactaatacctaaaatactatctctacgacgctcgcaaatataacgatccattactcgtcacgcgtacgactaccgtacttaataatcgctacaaatacgttctatcgtcctttaacctaacgtctacgctattcctcgttacatcgtcctaatctctacttcgaaccgtttctacgtttt

SEQ ID NO: 685 - DNA, 509 bp, Artificial Sequence
  chemically treated genomic DNA (Homo sapiens) CpG-island No: 685
tttcgcgcgttgttcgttattttttaatcgtattttggtattttgttttttttaagtttcgttcgtttcgtttttttttatttaattagttaattttatcggattatagttgttttaacgaagggttttttttttgtttagttattcgttcgggaaatcgcgcgcgggatttagtttcggttcgtttttcgtaggtggagagcgcggggatttcgtacgggtcgtttttttcgggtgttttttttatacgtatatttagtgttttagcgcgtagttcgagcgtttcggggtcgggtgcgagcgtagtttttcgcggagttagaaggggaagagaagtgagaaaaagcgtttattaaatggattaaggtcgcgagcgtatattttattttaaagcgtttttgtttagagcgacgcggggttacgagtttttttgttattatttgaggagcgtttcgtttttttggttttttgttcgtagttatatttttgggaaaagttcgtttttttgt

SEQ ID NO: 686 - DNA, 509 bp, Artificial Sequence
  chemically treated genomic DNA (Homo sapiens) CpG-island No: 686
acaaaaaaacgaacttttcccaaaaatataactacgaacaaaaaaccaaaaaaacgaaacgctcctcaaataataacaaaaaaactcgtaaccccgcgtcgctctaaacaaaaacgctttaaaataaaatatacgctcgcgaccttaatccatttaataaacgctttttctcacttctcttccccttctaactccgcgaaaaactacgctcgcacccgaccccgaaacgctcgaactacgcgctaaaacactaaatatacgtataaaaaaaacacccgaaaaaaacgacccgtacgaaatccccgcgctctccacctacgaaaaacgaaccgaaactaaatcccgcgcgcgatttcccgaacgaataactaaacaaaaaaaaaacccttcgttaaaacaactataatccgataaaattaactaattaaataaaaaaaaacgaaacgaacgaaacttaaaaaaaacaaaataccaaaatacgattaaaaaataacgaacaacgcgcgaaa

SEQ ID NO: 687 - DNA, 509 bp, Artificial Sequence
  chemically treated genomic DNA (Homo sapiens) CpG-island No: 687
gtagaggggcgggttttttttagggatatagttacggatagagggttaaggggacggagcgttttttaagtggtggtagggaggttcgtggtttcgcgtcgttttggataggggcgttttggggtgagatgtgcgttcgcggttttgatttatttagtggacgtttttttttattttttttttttttttggtttcgcgggagattgcgttcgtattcggtttcggagcgttcgagttgcgcgttgggatattgggtatacgtgtggaggggatattcggagagggcggttcgtgcgggattttcgcgttttttatttgcgaggggcgggtcggagttgggtttcgcgcgcggtttttcgagcgggtggttgggtaagaagggagtttttcgttggggtagttgtgattcggtagagttgattggttgggtgggaggggacggagcgggcgggatttgagaaaagtaaagtattagagtgcggttgaggggtagcgggtagcgcgcggga

SEQ ID NO: 688 - DNA, 509 bp, Artificial Sequence
  chemically treated genomic DNA (Homo sapiens) CpG-island No: 688
tcccgcgcgctacccgctacccctcaaccgcactctaatactttacttttctcaaatcccgcccgctccgtcccctcccacccaaccaatcaactctaccgaatcacaactaccccaacgaaaaactcccttcttacccaaccacccgctcgaaaaaccgcgcgcgaaacccaactccgacccgcccctcgcaaataaaaaacgcgaaaatcccgcacgaaccgccctctccgaatatcccctccacacgtatacccaatatcccaacgcgcaactcgaacgctccgaaaccgaatacgaacgcaatctcccgcgaaaccaaaaaaaaaaaaaaaataaaaaaaaacgtccactaaataaatcaaaaccgcgaacgcacatctcaccccaaaacgcccctatccaaaacgacgcgaaaccacgaacctccctaccaccacttaaaaaacgctccgtccccttaaccctctatccgtaactatatccctaaaaaaaacccgcccctctac

SEQ ID NO: 689 - DNA, 503 bp, Artificial Sequence
  chemically treated genomic DNA (Homo sapiens) CpG-island No: 689
atttcggcgtttttcgaaagttataaaagaggggtacggaaattttaagttcgtcgtgttaattcggagaacgtaaattcgaggtagagcgtgcgtcgtgcggggatgtgggtgtcgaggatttcgaagcgttcggtttttttcgcgatttttattttttttagattttggttagatatttatttagtttacgtttagagggcgggggttatttcgatttatttcggaagtcgttaattttagaaattttttttgttaggttcgcgaaacgaaggtatttcgttatttcggcggggtaagttcggattttattagggtaggttcgggaggttatttagggtagacgattcgaggtagagcgttttaaaattttgtcgtcgtacgtttagttagagcgtcgagcgcgtttgtttttttttcgttattttttagttttttattcgtcgattaaatttttgggggattatatttttaagttttgggagtttcgggtaaagtttttt

SEQ ID NO: 690 - DNA, 503 bp, Artificial Sequence
  chemically treated genomic DNA (Homo sapiens) CpG-island No: 690
aaaaaactttacccgaaactcccaaaacttaaaaatataatcccccaaaaatttaatcgacgaataaaaaactaaaaaataacgaaaaaaaaacaaacgcgctcgacgctctaactaaacgtacgacgacaaaattttaaaacgctctacctcgaatcgtctaccctaaataacctcccgaacctaccctaataaaatccgaacttaccccgccgaaataacgaaataccttcgtttcgcgaacctaacaaaaaaaatttctaaaattaacgacttccgaaataaatcgaaataacccccgccctctaaacgtaaactaaataaatatctaaccaaaatctaaaaaaaataaaaatcgcgaaaaaaaccgaacgcttcgaaatcctcgacacccacatccccgcacgacgcacgctctacctcgaatttacgttctccgaattaacacgacgaacttaaaatttccgtacccctcttttataactttcgaaaaacgccgaaat

SEQ ID NO: 691 - DNA, 503 bp, Artificial Sequence
  chemically treated genomic DNA (Homo sapiens) CpG-island No: 691
gggagattttattcggaatttttaaggtttggagatgtgattttttaaaagtttagtcggcgaatgggagattgaagggtgacgggaagggggtaggcgcgttcggcgttttgattgggcgtgcggcggtaggattttaaagcgttttgtttcggatcgtttgttttgggtgatttttcggatttgttttggtggaattcggatttgtttcgtcgagatgacgaggtattttcgtttcgcgaatttaataggagggatttttgaagttagcggttttcgggatgagtcggggtaattttcgttttttgagcgtgggttggatggatgtttaattaggatttagggaggatgggggtcgcgggggaagtcgggcgtttcggggttttcgatatttatattttcgtacggcgtacgttttgtttcgagtttgcgtttttcgagttagtacggcgagtttgggattttcgtgttttttttttgtggttttcgagaaacgtcggagt

SEQ ID NO: 692 - DNA, 503 bp, Artificial Sequence
  chemically treated genomic DNA (Homo sapiens) CpG-island No: 692
actccgacgtttctcgaaaaccacaaaaaaaaaacacgaaaatcccaaactcgccgtactaactcgaaaaacgcaaactcgaaacaaaacgtacgccgtacgaaaatataaatatcgaaaaccccgaaacgcccgacttcccccgcgacccccatcctccctaaatcctaattaaacatccatccaacccacgctcaaaaaacgaaaattaccccgactcatcccgaaaaccgctaacttcaaaaatccctcctattaaattcgcgaaacgaaaatacctcgtcatctcgacgaaacaaatccgaattccaccaaaacaaatccgaaaaatcacccaaaacaaacgatccgaaacaaaacgctttaaaatcctaccgccgcacgcccaatcaaaacgccgaacgcgcctacccccttcccgtcacccttcaatctcccattcgccgactaaacttttaaaaaatcacatctccaaaccttaaaaattccgaataaaatctccc

SEQ ID NO: 693 - DNA, 645 bp, Artificial Sequence
  chemically treated genomic DNA (Homo sapiens) CpG-island No: 693
aagtcgcgcggtttttttgtaaagtttgtttggcgtcgcgcggcggtttcgttatttgtttcgtttcgcggttttggcgattgtttttttatttttcgttttcgagggtttgagggacgcgtgtaatagagtttttagggttcgaggtattatatagcgcggttcgttgcgggtattgcgtaggaaggggtatgggtggttatcgggacggttattttattgagatgatttaaggagtcgtagacgcggggtaggaaatttcgggggagtcgtgttcgggttttgtagggaaatttcgggatttttttcgtatgtcgtatgcggaaatttgtcgggttcgacgtgtatagtttagcgtttttttttattagttattgtttaggtttttcgattttgtattcgtcggaatgagagaaagtagtttttcgtcgtttagttttcgggtagttgtttcggtcgggttttgcgttggtgagaaagttttatttagaggcggtcgcgcgtaattgtaggcggcgttttaggttcgggcgagttagggagagcggggcgcggggggagagggggtagtttaggagataaggaggatggagaaggacgggagagatttcgaaaaggtaagttttagattttcgttcggtattt

SEQ ID NO: 694 - DNA, 645 bp, Artificial Sequence
  chemically treated genomic DNA (Homo sapiens) CpG-island No: 694
aaataccgaacgaaaatctaaaacttaccttttcgaaatctctcccgtccttctccatcctccttatctcctaaactaccccctctccccccgcgccccgctctccctaactcgcccgaacctaaaacgccgcctacaattacgcgcgaccgcctctaaataaaactttctcaccaacgcaaaacccgaccgaaacaactacccgaaaactaaacgacgaaaaactactttctctcattccgacgaatacaaaatcgaaaaacctaaacaataactaataaaaaaaaacgctaaactatacacgtcgaacccgacaaatttccgcatacgacatacgaaaaaaatcccgaaatttccctacaaaacccgaacacgactcccccgaaatttcctaccccgcgtctacgactccttaaatcatctcaataaaataaccgtcccgataaccacccataccccttcctacgcaatacccgcaacgaaccgcgctatataatacctcgaaccctaaaaactctattacacgcgtccctcaaaccctcgaaaacgaaaaataaaaaaacaatcgccaaaaccgcgaaacgaaacaaataacgaaaccgccgcgcgacgccaaacaaactttacaaaaaaaccgcgcgactt

SEQ ID NO: 695 - DNA, 645 bp, Artificial Sequence
  chemically treated genomic DNA (Homo sapiens) CpG-island No: 695
agatgtcgaacgggggtttagagtttgttttttcggggtttttttcgtttttttttattttttttattttttgggttgtttttttttttttcgcgtttcgttttttttggttcgttcgggtttagggcgtcgtttgtagttgcgcgcggtcgtttttagatggaatttttttattaacgtaaggttcggtcggagtagttattcgggagttgggcggcgaggggttatttttttttatttcggcgggtgtaggatcggggggtttgggtagtaattagtggggaggagcgttggattgtgtacgtcgagttcggtaggttttcgtatgcggtatgcgaagggaatttcgaggtttttttgtagaattcgagtacggttttttcggagttttttgtttcgcgtttgcggttttttgaattattttaataaaatgatcgtttcggtagttatttatgtttttttttgcgtagtgttcgtagcggatcgcgttgtgtggtatttcgagttttggggattttgttgtacgcgttttttagattttcgggggcggggagtggggagataatcgttagagtcgcggggcgggataaatggcggaatcgtcgcgcggcgttaggtaaattttgtaagggaatcgcgcggttt

SEQ ID NO: 696 - DNA, 645 bp, Artificial Sequence
  chemically treated genomic DNA (Homo sapiens) CpG-island No: 696
aaaccgcgcgattcccttacaaaatttacctaacgccgcgcgacgattccgccatttatcccgccccgcgactctaacgattatctccccactccccgcccccgaaaatctaaaaaacgcgtacaacaaaatccccaaaactcgaaataccacacaacgcgatccgctacgaacactacgcaaaaaaaaacataaataactaccgaaacgatcattttattaaaataattcaaaaaaccgcaaacgcgaaacaaaaaactccgaaaaaaccgtactcgaattctacaaaaaaacctcgaaattcccttcgcataccgcatacgaaaacctaccgaactcgacgtacacaatccaacgctcctccccactaattactacccaaaccccccgatcctacacccgccgaaataaaaaaaaataacccctcgccgcccaactcccgaataactactccgaccgaaccttacgttaataaaaaaattccatctaaaaacgaccgcgcgcaactacaaacgacgccctaaacccgaacgaaccaaaaaaaacgaaacgcgaaaaaaaaaaaaacaacccaaaaaataaaaaaaataaaaaaaaacgaaaaaaaccccgaaaaaacaaactctaaacccccgttcgacatct

SEQ ID NO: 697 - DNA, 619 bp, Artificial Sequence
  chemically treated genomic DNA (Homo sapiens) CpG-island No: 697
gaagttgcgttcgtgtcgagtttagcgtgtcgttgttttttattttcgtcggggatggaagtacgtaagcgtagatttcgagcggtcgggcgtagggttcgtttttttcgagtttcggtttcgtttttttttttcgtttttatttttacgagtttcgtttttttttcgtttagagcgcgtgcgtatcgtttttagagcgtcgttttagggaggtcgggagtcgcggcgcggagggaggatttagtttttcgttttcgcgtttcgtcggaggttttaggttacggttcgtcgttatttatcgagttcgggataaaataagttcgtcgggttggaaattgcgacgaggggagtaggcgcgtttttcgaattttttttcggagtttgcggatgattatagatttgcgttcgaagattggcggtacgtcgagaatcgtatacgttttttttttttttatgagcgtagtcgcgcgcggaggattttgtacgtatgcgtagtcgtttttttgtgacgtgattcgttgtttcgtgggaaatgtagtttttatttggtatatcgtttcggtttttggcggaattttaatttaattaattaaagtgtttgtgcgtttttagcgttttt

SEQ ID NO: 698 - DNA, 619 bp, Artificial Sequence
  chemically treated genomic DNA (Homo sapiens) CpG-island No: 698
aaaaacgctaaaaacgcacaaacactttaattaattaaattaaaattccgccaaaaaccgaaacgatataccaaataaaaactacatttcccacgaaacaacgaatcacgtcacaaaaaaacgactacgcatacgtacaaaatcctccgcgcgcgactacgctcataaaaaaaaaaaaaacgtatacgattctcgacgtaccgccaatcttcgaacgcaaatctataatcatccgcaaactccgaaaaaaaattcgaaaaacgcgcctactcccctcgtcgcaatttccaacccgacgaacttattttatcccgaactcgataaataacgacgaaccgtaacctaaaacctccgacgaaacgcgaaaacgaaaaactaaatcctccctccgcgccgcgactcccgacctccctaaaacgacgctctaaaaacgatacgcacgcgctctaaacgaaaaaaaaacgaaactcgtaaaaataaaaacgaaaaaaaaaaacgaaaccgaaactcgaaaaaaacgaaccctacgcccgaccgctcgaaatctacgcttacgtacttccatccccgacgaaaataaaaaacaacgacacgctaaactcgacacgaacgcaacttc

SEQ ID NO: 699 - DNA, 619 bp, Artificial Sequence
  chemically treated genomic DNA (Homo sapiens) CpG-island No: 699
gaaaacgttgaaaacgtataagtattttggttggttaaattagggtttcgttaagagtcggagcggtgtgttaagtgaaaattatattttttacggggtagcgggttacgttatagaggaacgattacgtatgcgtgtaaggtttttcgcgcgcgattacgtttataaaaggaaaaaaagcgtgtgcggttttcgacgtgtcgttaattttcgaacgtaggtttgtgattattcgtagatttcgaaaaagggttcgaggaacgcgtttgtttttttcgtcgtagtttttagttcgacgagtttgttttgtttcggattcggtaggtggcgacgggtcgtggtttgagattttcggcgaaacgcgggagcgaagggttgagtttttttttcgcgtcgcggttttcgatttttttgaggcggcgttttaggggcggtgcgtacgcgttttgggcgggaggggggcggggttcgtgggggtgggggcgggagaggagggcggggtcggggttcggggagggcgggttttgcgttcggtcgttcgaggtttgcgtttgcgtgtttttattttcggcgagggtgggaaatagcgatacgttgggttcggtacggacgtagtttt

SEQ ID NO: 700 - DNA, 619 bp, Artificial Sequence
  chemically treated genomic DNA (Homo sapiens) CpG-island No: 700
aaaactacgtccgtaccgaacccaacgtatcgctatttcccaccctcgccgaaaataaaaacacgcaaacgcaaacctcgaacgaccgaacgcaaaacccgccctccccgaaccccgaccccgccctcctctcccgcccccacccccacgaaccccgcccccctcccgcccaaaacgcgtacgcaccgcccctaaaacgccgcctcaaaaaaatcgaaaaccgcgacgcgaaaaaaaaactcaacccttcgctcccgcgtttcgccgaaaatctcaaaccacgacccgtcgccacctaccgaatccgaaacaaaacaaactcgtcgaactaaaaactacgacgaaaaaaacaaacgcgttcctcgaaccctttttcgaaatctacgaataatcacaaacctacgttcgaaaattaacgacacgtcgaaaaccgcacacgctttttttccttttataaacgtaatcgcgcgcgaaaaaccttacacgcatacgtaatcgttcctctataacgtaacccgctaccccgtaaaaaatataattttcacttaacacaccgctccgactcttaacgaaaccctaatttaaccaaccaaaatacttatacgttttcaacgttttc

SEQ ID NO: 701 - DNA, 695 bp, Artificial Sequence
  chemically treated genomic DNA (Homo sapiens) CpG-island No: 701
aggtttattttatcgaagagttagacgcgcggtttatggggtggtcgggtgggcgttcggtattgtagaaatttagtttagcgagaaagcggacgttcgggggttgcgagtttttattggcggttcgagttaggtttcgtttatttcggtttcgggggcggtcgggttcgggtcgcgggaggggtcgttttagggggcgtttagtcgttcgagatcgtttcgacgtggtttagggcgcgagcgtacgtttttcgggtttaaagagcgagtttatttcgttttacgtcgttatcgtcggcggtgttttcgcgatattcgaaaaatgtgttatttttaaagggttttcgcgcgtgtttagcgttcgcgggtcgggttaaggtgttggagttcggtcgttcggtcggcgtaggaatacgttcgagcgaggtcggtttcgcgtattggaggtataggagcgtttaggtacgggggttcgcgtagatcgtagtcgtttaaggtttcgtttcgtttggtttcgtttcgcgttcgttttttaaaggtcgttttttttagtaggtcgcggcgatggcgtttatttggcgtagtattaagttacgtacggcgatttgagattttagtcgtttttttcgtaggggcggcggtttcgggagcgttttttaggtggtatgtgggaggttttttgtttgttggttttt

SEQ ID NO: 702 - DNA, 695 bp, Artificial Sequence
  chemically treated genomic DNA (Homo sapiens) CpG-island No: 702
aaaaaccaacaaacaaaaaacctcccacataccacctaaaaaacgctcccgaaaccgccgcccctacgaaaaaaacgactaaaatctcaaatcgccgtacgtaacttaatactacgccaaataaacgccatcgccgcgacctactaaaaaaaacgacctttaaaaaacgaacgcgaaacgaaaccaaacgaaacgaaaccttaaacgactacgatctacgcgaacccccgtacctaaacgctcctatacctccaatacgcgaaaccgacctcgctcgaacgtattcctacgccgaccgaacgaccgaactccaacaccttaacccgacccgcgaacgctaaacacgcgcgaaaaccctttaaaaataacacatttttcgaatatcgcgaaaacaccgccgacgataacgacgtaaaacgaaataaactcgctctttaaacccgaaaaacgtacgctcgcgccctaaaccacgtcgaaacgatctcgaacgactaaacgccccctaaaacgacccctcccgcgacccgaacccgaccgcccccgaaaccgaaataaacgaaacctaactcgaaccgccaataaaaactcgcaacccccgaacgtccgctttctcgctaaactaaatttctacaataccgaacgcccacccgaccaccccataaaccgcgcgtctaactcttcgataaaataaacct

SEQ ID NO: 703 - DNA, 695 bp, Artificial Sequence
  chemically treated genomic DNA (Homo sapiens) CpG-island No: 703
gaagattagtaggtaggaagttttttatatgttatttaaggggcgttttcggaatcgtcgtttttgcgggaggagcggttggggttttagatcgtcgtgcgtgatttggtgttgcgttaggtgggcgttatcgtcgcggtttgttgggggaggcggtttttgaggagcgggcgcgaggcggggttaggcggggcggggttttgggcggttgcggtttgcgcggattttcgtgtttaggcgtttttgtgtttttagtgcgcggagtcggtttcgttcgggcgtgtttttgcgtcgatcggacggtcggattttagtattttggttcggttcgcgaacgttgagtacgcgcggaaattttttaaaggtagtatatttttcgggtgtcgcgggggtatcgtcggcggtggcgacgtggggcggaatgggttcgttttttgggttcgggaggcgtgcgttcgcgttttgggttacgtcggggcggtttcgggcggttgagcgttttttggagcgatttttttcgcggttcgggttcggtcgttttcgaagtcggggtgagcggggtttggttcgggtcgttagtgaggattcgtagttttcgggcgttcgttttttcgttgggttgggtttttgtagtgtcgggcgtttattcggttattttatgagtcgcgcgtttggtttttcggtggagtgagttt

SEQ ID NO: 704 - DNA, 695 bp, Artificial Sequence
  chemically treated genomic DNA (Homo sapiens) CpG-island No: 704
aaactcactccaccgaaaaaccaaacgcgcgactcataaaataaccgaataaacgcccgacactacaaaaacccaacccaacgaaaaaacgaacgcccgaaaactacgaatcctcactaacgacccgaaccaaaccccgctcaccccgacttcgaaaacgaccgaacccgaaccgcgaaaaaaatcgctccaaaaaacgctcaaccgcccgaaaccgccccgacgtaacccaaaacgcgaacgcacgcctcccgaacccaaaaaacgaacccattccgccccacgtcgccaccgccgacgatacccccgcgacacccgaaaaatatactacctttaaaaaatttccgcgcgtactcaacgttcgcgaaccgaaccaaaatactaaaatccgaccgtccgatcgacgcaaaaacacgcccgaacgaaaccgactccgcgcactaaaaacacaaaaacgcctaaacacgaaaatccgcgcaaaccgcaaccgcccaaaaccccgccccgcctaaccccgcctcgcgcccgctcctcaaaaaccgcctcccccaacaaaccgcgacgataacgcccacctaacgcaacaccaaatcacgcacgacgatctaaaaccccaaccgctcctcccgcaaaaacgacgattccgaaaacgccccttaaataacatataaaaaacttcctacctactaatcttc

SEQ ID NO: 705 - DNA, 649 bp, Artificial Sequence
  chemically treated genomic DNA (Homo sapiens) CpG-island No: 705
cggagagtttcgggtttacggaacgtttcgggggtgcgaagtcgggttcggttgggatttcggcgtcgttttcggttcgcgtttatattagtttcgcgttcgtttcgggaattcggttatcgtcgttttcgtcgcggttttcgtcgcgtttttcggggttcgggataagtcgggttcgtagttcgcgtcgttcgtcgttatttttttgttttagcggattcgaatgcgagttcggagtcgcggtttcggatttagtcgttttcgcgcgggcggtatttaattcgttgttgttcgggacgcgggcgtttggagtcgggagtcgggagtcgcggtatttttttcgtttttcgttatcgttttcgtcgtttaattcgttgcgcgtcggagcgtttcgtttcggtttcgtttcgcgtttcgcgtttcgcgttcggtggcgttagtcgcgggttcgtggaggtgcgagaaatgggcgtacgatttggtttcgttgcggttttgcgcggggattggggattaaagattacggaagaggtgaaggtagaaagcgttcgaggagcgttgtatttcgtagaattttaattaagtcggagaaattcgtgtatagattagattaaatgttaggttttttgaatttgaattttttgaaaga

SEQ ID NO: 706 - DNA, 649 bp, Artificial Sequence
  chemically treated genomic DNA (Homo sapiens) CpG-island No: 706
tctttcaaaaaattcaaattcaaaaaacctaacatttaatctaatctatacacgaatttctccgacttaattaaaattctacgaaatacaacgctcctcgaacgctttctaccttcacctcttccgtaatctttaatccccaatccccgcgcaaaaccgcaacgaaaccaaatcgtacgcccatttctcgcacctccacgaacccgcgactaacgccaccgaacgcgaaacgcgaaacgcgaaacgaaaccgaaacgaaacgctccgacgcgcaacgaattaaacgacgaaaacgataacgaaaaacgaaaaaaataccgcgactcccgactcccgactccaaacgcccgcgtcccgaacaacaacgaattaaataccgcccgcgcgaaaacgactaaatccgaaaccgcgactccgaactcgcattcgaatccgctaaaacaaaaaaataacgacgaacgacgcgaactacgaacccgacttatcccgaaccccgaaaaacgcgacgaaaaccgcgacgaaaacgacgataaccgaattcccgaaacgaacgcgaaactaatataaacgcgaaccgaaaacgacgccgaaatcccaaccgaacccgacttcgcacccccgaaacgttccgtaaacccgaaactctccg

SEQ ID NO: 707 - DNA, 649 bp, Artificial Sequence
  chemically treated genomic DNA (Homo sapiens) CpG-island No: 707
ttttttagagaatttagatttaggaggtttgatatttaatttggtttgtgtacggattttttcggtttggttggggttttgcggaatgtaacgtttttcgggcgttttttgtttttatttttttcgtggtttttgatttttagttttcgcgtagggtcgtagcggagttaggtcgtgcgtttatttttcgtatttttacgagttcgcggttggcgttatcgggcgcgggacgcggggcgcggggcgggatcgaggcggggcgtttcggcgcgtagcgggttaagcggcgagggcggtggcgaggggcggagggagtgtcgcggttttcggttttcggttttaggcgttcgcgtttcggatagtagcgggttaagtgtcgttcgcgcggagacggttgagttcggagtcgcggtttcgagttcgtattcggattcgttagagtaggaagatggcgacggacggcgcgagttgcgagttcgatttgtttcgggtttcggaggacgcggcgggggtcgcggcggaggcggcggtaatcgagttttcggggcgggcgcggggttagtgtagacgcgggtcgggggcggcgtcggggttttagtcggattcgatttcgtattttcggggcgtttcgtaagttcgggatttttcg

SEQ ID NO: 708 - DNA, 649 bp, Artificial Sequence
  chemically treated genomic DNA (Homo sapiens) CpG-island No: 708
cgaaaaatcccgaacttacgaaacgccccgaaaatacgaaatcgaatccgactaaaaccccgacgccgcccccgacccgcgtctacactaaccccgcgcccgccccgaaaactcgattaccgccgcctccgccgcgacccccgccgcgtcctccgaaacccgaaacaaatcgaactcgcaactcgcgccgtccgtcgccatcttcctactctaacgaatccgaatacgaactcgaaaccgcgactccgaactcaaccgtctccgcgcgaacgacacttaacccgctactatccgaaacgcgaacgcctaaaaccgaaaaccgaaaaccgcgacactccctccgcccctcgccaccgccctcgccgcttaacccgctacgcgccgaaacgccccgcctcgatcccgccccgcgccccgcgtcccgcgcccgataacgccaaccgcgaactcgtaaaaatacgaaaaataaacgcacgacctaactccgctacgaccctacgcgaaaactaaaaatcaaaaaccacgaaaaaaataaaaacaaaaaacgcccgaaaaacgttacattccgcaaaaccccaaccaaaccgaaaaaatccgtacacaaaccaaattaaatatcaaacctcctaaatctaaattctctaaaaaa

SEQ ID NO: 709 - DNA, 565 bp, Artificial Sequence
  chemically treated genomic DNA (Homo sapiens) CpG-island No: 709
gggagcgaggatgtagattttgaaattggtgttgttgggttgaggcggaggtaggggagttgtagcgcgcgaggtttcgtgagtgtgttttttgcgcgttgagaggcggggggaggcggaggattaggaggaggaggaggaggaggaggagggggagaatgttcggagtcgtcgtcgttgtcgtcgtcgtcgtcgtcgcgatgttttcggtttaggaggttgttaagttgtattatattaattatgtgcggaattcgcgggttatcggcgtgttgtgggttatttttattatttgttttgttatcgttaacgtggtgtgttttatttagttttattggataggcgacggcgtggatatttcgtaagtcggttatttcgggtttttttattattgtatcggtaacggtttttttcgggagttgatttgtaggggtagttttacggatttttttacgttgttttcgggcgtttttaaagtcgtttttttttttatcggtttttttatgatgtttattattgtttgtattatttgttttatttttttttttttttgtaatacggttat

SEQ ID NO: 710 - DNA, 565 bp, Artificial Sequence
  chemically treated genomic DNA (Homo sapiens) CpG-island No: 710
ataaccgtattacaaaaaaaaaaaaaaataaaacaaataatacaaacaataataaacatcataaaaaaaccgataaaaaaaaaaacgactttaaaaacgcccgaaaacaacgtaaaaaaatccgtaaaactacccctacaaatcaactcccgaaaaaaaccgttaccgatacaataataaaaaaacccgaaataaccgacttacgaaatatccacgccgtcgcctatccaataaaactaaataaaacacaccacgttaacgataacaaaacaaataataaaaataacccacaacacgccgataacccgcgaattccgcacataattaatataatacaacttaacaacctcctaaaccgaaaacatcgcgacgacgacgacgacgacaacgacgacgactccgaacattctccccctcctcctcctcctcctcctcctcctaatcctccgcctccccccgcctctcaacgcgcaaaaaacacactcacgaaacctcgcgcgctacaactcccctacctccgcctcaacccaacaacaccaatttcaaaatctacatcctcgctccc

SEQ ID NO: 711 - DNA, 565 bp, Artificial Sequence
  chemically treated genomic DNA (Homo sapiens) CpG-island No: 711
gtggtcgtgttgtagaagaagaagagggtaaagtaaatgatgtaggtaatgatgagtattatggagaggtcgataaagaaggaggcggttttgaaggcgttcgagggtagcgtggagaagttcgtgaagttgtttttgtaggttagttttcgggagaagtcgttgtcgatgtagtagtggaagagttcgaaatagtcggtttgcggggtgtttacgtcgtcgtttatttagtagggttggatgaagtatattacgttgacgatggtaaagtagatggtgaagatggtttatagtacgtcgatggttcgcgagtttcgtatatagttggtgtggtatagtttggtagttttttgagtcgggagtatcgcggcggcggcggcggcggtagcggcggcggtttcgggtattttttttttttttttttttttttttttttttttggtttttcgttttttttcgttttttagcgcgtaggagatatatttacggagtttcgcgcgttgtaatttttttgttttcgttttagtttagtagtattagttttagagtttgtattttcgttttt

SEQ ID NO: 712 - DNA, 565 bp, Artificial Sequence
  chemically treated genomic DNA (Homo sapiens) CpG-island No: 712
aaaaacgaaaatacaaactctaaaactaatactactaaactaaaacgaaaacaaaaaaattacaacgcgcgaaactccgtaaatatatctcctacgcgctaaaaaacgaaaaaaaacgaaaaaccaaaaaaaaaaaaaaaaaaaaaaaaaaaaaaaaaatacccgaaaccgccgccgctaccgccgccgccgccgccgcgatactcccgactcaaaaaactaccaaactataccacaccaactatatacgaaactcgcgaaccatcgacgtactataaaccatcttcaccatctactttaccatcgtcaacgtaatatacttcatccaaccctactaaataaacgacgacgtaaacaccccgcaaaccgactatttcgaactcttccactactacatcgacaacgacttctcccgaaaactaacctacaaaaacaacttcacgaacttctccacgctaccctcgaacgccttcaaaaccgcctccttctttatcgacctctccataatactcatcattacctacatcatttactttaccctcttcttcttctacaacacgaccac

SEQ ID NO: 713 - DNA, 690 bp, Artificial Sequence
  chemically treated genomic DNA (Homo sapiens) CpG-island No: 713
tcggcgtcgttgagcgagttagcgttgcgtagtacgaagcgggtcgtttttattttgacgtttattcggtttggcggggattgtggttggtttgaggggcgaaggttgttcggagtagagtttggtttcgagggggcgcggcgcgttcgggcgaggattgtaggtgcgttggttggtttgtgcgtttcggtttgggttggggtttgagggtgtcgcggagtgaagagtttgggtagagtcggagatgtagtggttcgagatttaagtttaagtttttttattagtcgtcgtcgttcgaggttttatttgttttttcgtatttttttttcgagttttaaataggaggagttattggaatttggaaacgcgttttgaattttaggtcgcgttaattagattagagaaagaattatgggtttcgtttttttagtcgcggttattatagaatggtttggtacggtgattacggagtgttttggtatcggtgttcgcggttgtgacggaaaaagggtgggaagaatagggaagaggaagtagaaataggtatttggggtaacgtgggtttaagattagttttttgggacggggtttcgagtcgcgtgggttggggtttcgtttaggttcgtttttgtttataattcggaggttgttttaatgttaagtatttttggttataaattgtttttaaga

SEQ ID NO: 714 - DNA, 690 bp, Artificial Sequence
  chemically treated genomic DNA (Homo sapiens) CpG-island No: 714
tcttaaaaacaatttataaccaaaaatacttaacattaaaacaacctccgaattataaacaaaaacgaacctaaacgaaaccccaacccacgcgactcgaaaccccgtcccaaaaaactaatcttaaacccacgttaccccaaatacctatttctacttcctcttccctattcttcccaccctttttccgtcacaaccgcgaacaccgataccaaaacactccgtaatcaccgtaccaaaccattctataataaccgcgactaaaaaaacgaaacccataattctttctctaatctaattaacgcgacctaaaattcaaaacgcgtttccaaattccaataactcctcctatttaaaactcgaaaaaaaaatacgaaaaaacaaataaaacctcgaacgacgacgactaataaaaaaacttaaacttaaatctcgaaccactacatctccgactctacccaaactcttcactccgcgacaccctcaaaccccaacccaaaccgaaacgcacaaaccaaccaacgcacctacaatcctcgcccgaacgcgccgcgccccctcgaaaccaaactctactccgaacaaccttcgcccctcaaaccaaccacaatccccgccaaaccgaataaacgtcaaaataaaaacgacccgcttcgtactacgcaacgctaactcgctcaacgacgccga

SEQ ID NO: 715 - DNA, 690 bp, Artificial Sequence
  chemically treated genomic DNA (Homo sapiens) CpG-island No: 715
ttttggaaatagtttgtggttaggagtatttgatattgagatagttttcgagttgtaaataagggcgagtttgggcgggattttagtttacgcgattcggagtttcgttttaagaggttaattttaagtttacgttgttttagatatttgtttttgtttttttttttttgttttttttatttttttttcgttatagtcgcgggtatcggtgttagggtatttcgtggttatcgtgttaggttattttgtgatgatcgcggttggaggggcggagtttatagttttttttttgatttgattggcgcgatttggagtttaggacgcgtttttaagttttagtgattttttttgtttgggattcggggggagagtgcggggagataaataaaatttcgggcggcggcggttggtgggaagatttgaatttgaatttcgaattattgtattttcgattttgtttagattttttatttcgcggtatttttaaattttagtttaggtcggggcgtataagttagttagcgtatttgtagttttcgttcggacgcgtcgcgttttttcggaattaggttttgtttcgagtagttttcgttttttaagttagttatagttttcgttaggtcgggtgggcgttaagatgaaggcggttcgtttcgtgttgcgtagcgttggttcgtttaacggcgtcgg

SEQ ID NO: 716 - DNA, 690 bp, Artificial Sequence
  chemically treated genomic DNA (Homo sapiens) CpG-island No: 716
ccgacgccgttaaacgaaccaacgctacgcaacacgaaacgaaccgccttcatcttaacgcccacccgacctaacgaaaactataactaacttaaaaaacgaaaactactcgaaacaaaacctaattccgaaaaaacgcgacgcgtccgaacgaaaactacaaatacgctaactaacttatacgccccgacctaaactaaaatttaaaaataccgcgaaataaaaaatctaaacaaaatcgaaaatacaataattcgaaattcaaattcaaatcttcccaccaaccgccgccgcccgaaattttatttatctccccgcactctccccccgaatcccaaacaaaaaaaatcactaaaacttaaaaacgcgtcctaaactccaaatcgcgccaatcaaatcaaaaaaaaaactataaactccgcccctccaaccgcgatcatcacaaaataacctaacacgataaccacgaaataccctaacaccgatacccgcgactataacgaaaaaaaaataaaaaaaacaaaaaaaaaaaaacaaaaacaaatatctaaaacaacgtaaacttaaaattaacctcttaaaacgaaactccgaatcgcgtaaactaaaatcccgcccaaactcgcccttatttacaactcgaaaactatctcaatatcaaatactcctaaccacaaactatttccaaaa

SEQ ID NO: 717 - DNA, 1131 bp, Artificial Sequence
  chemically treated genomic DNA (Homo sapiens) CpG-island No: 717
tattttacgttagtttcgttggtagttgtatggttggtgttaggaacgcggcgggggcgtaggtcgaggggagcgggcgttgggggggtcgggggtagcgcgttatttattaatgcgattgaaatttttcgataaagtttttcgtaatttttttattttgtcgattttttcggtcggttgcggtttaatgaggttatatatttgggcgacgcggagtttcgataatttttttaaattggtttaggtatagtttagataacggcgagggcgcgcgtcgcggggaaagcggcgtttttttttttattattttttcggcgggtcgggaagcgacgcgtaggtttagggaggcgagtagtaggtaggcggaggacggtaggtttcgtttcggtttgggtcgtagttgggcgggcgggggcggtttacgtggtgtcgggggcggtcgcgttcgtcgtcgtcgtggtggtttcgcgtcgcgtcgtcgtcgttcggtttatttttttttttttgtaacggagagaagcgcggtcggtagggggagtggtgcggtcgaaggaggaggcggggcgggtcgggtataaggtgcgggagtcgtttggcgtcgagtgcgcggggcgagggcgagtgggtcggcgggagaagtttttagtttagagttgcgggcgtagcgtagaaggagtcgcggcgcggaatcgttagtttgatagtttttgttgtttttttgttgtcgtcgttacgtttttttttcgacgaaggtttttgggcgcgggattttagtacgatttcggtttttcgttcgtttttcgcgtttttcgcggttttttgtgtttggttcgcgtttcggcggcgttttttttcggtcgcgtttttttcggtcgttttcgcgtttttttttcgtttcgttcgcgcgcgggaggattacgaagggatcggggtgggagcgggtagcgtttggggatagcgtgttgggttgtggggaggttatcgaaaggaaacgggtcgagtttagttgtttgagcggttttttttttttacgagcgtgtgtgaaaaagcgcggagttcggtggagggtagttgttaggattgttttttggattgggtgcggtaaggttttagggatgtatttagatgtag

SEQ ID NO: 718 - DNA, 1131 bp, Artificial Sequence
  chemically treated genomic DNA (Homo sapiens) CpG-island No: 718
ctacatctaaatacatccctaaaaccttaccgcacccaatccaaaaaacaatcctaacaactaccctccaccgaactccgcgctttttcacacacgctcgtaaaaaaaaaaaaccgctcaaacaactaaactcgacccgtttcctttcgataacctccccacaacccaacacgctatccccaaacgctacccgctcccaccccgatcccttcgtaatcctcccgcgcgcgaacgaaacgaaaaaaaaacgcgaaaacgaccgaaaaaaacgcgaccgaaaaaaaacgccgccgaaacgcgaaccaaacacaaaaaaccgcgaaaaacgcgaaaaacgaacgaaaaaccgaaatcgtactaaaatcccgcgcccaaaaaccttcgtcgaaaaaaaaacgtaacgacgacaacaaaaaaacaacaaaaactatcaaactaacgattccgcgccgcgactccttctacgctacgcccgcaactctaaactaaaaacttctcccgccgacccactcgccctcgccccgcgcactcgacgccaaacgactcccgcaccttatacccgacccgccccgcctcctccttcgaccgcaccactccccctaccgaccgcgcttctctccgttacaaaaaaaaaaaaataaaccgaacgacgacgacgcgacgcgaaaccaccacgacgacgacgaacgcgaccgcccccgacaccacgtaaaccgcccccgcccgcccaactacgacccaaaccgaaacgaaacctaccgtcctccgcctacctactactcgcctccctaaacctacgcgtcgcttcccgacccgccgaaaaaataataaaaaaaaaaacgccgctttccccgcgacgcgcgccctcgccgttatctaaactatacctaaaccaatttaaaaaaattatcgaaactccgcgtcgcccaaatatataacctcattaaaccgcaaccgaccgaaaaaatcgacaaaataaaaaaattacgaaaaactttatcgaaaaatttcaatcgcattaataaataacgcgctacccccgacccccccaacgcccgctcccctcgacctacgcccccgccgcgttcctaacaccaaccatacaactaccaacgaaactaacgtaaaata

SEQ ID NO: 719 - DNA, 1131 bp, Artificial Sequence
  chemically treated genomic DNA (Homo sapiens) CpG-island No: 719
ttatatttgaatgtatttttaaggttttatcgtatttagtttaggaggtagttttggtagttgttttttatcgaatttcgcgtttttttatatacgttcgtggaaggagaaaatcgtttaaataattggattcggttcgttttttttcggtaatttttttatagtttaatacgttgtttttagacgttgttcgtttttatttcggttttttcgtgattttttcgcgcgcgggcggggcgggggaggagcgcgggggcggtcgggaggggcgcggtcgggagggggcgtcgtcggggcgcgagttagatatagagggtcgcggaggacgcgggaggcgagcggggagtcgaggtcgtgttaggatttcgcgtttaggggttttcgtcgagggaggggcgtggcggcggtagtaggagggtagtaggagttgttaggttggcggtttcgcgtcgcggttttttttgcgttgcgttcgtaattttgggttgagaatttttttcgtcggtttattcgttttcgtttcgcgtattcggcgttaggcgattttcgtattttgtattcggttcgtttcgttttttttttcggtcgtattattttttttgtcggtcgcgttttttttcgttataaaggagggaaaatgagtcgggcggcggcggcgcggcgcggggttattacggcggcggcgagcgcggtcgttttcggtattacgtaaatcgttttcgttcgtttagttgcggtttaggtcggagcggagtttgtcgtttttcgtttgtttgttgttcgtttttttagatttgcgcgtcgtttttcggttcgtcgaggaggtggtggaggaggaggcgtcgtttttttcgcggcgcgcgttttcgtcgttgtttgagttgtgtttggattagtttggggaagttgtcggggtttcgcgtcgtttagatgtgtgattttattgagtcgtagtcggtcgagaagatcggtaagatgaagaagttgcggagaattttgtcggagagttttagtcgtattggtgagtagcgcgttgttttcggtttttttagcgttcgtttttttcggtttgcgttttcgtcgcgtttttggtattagttatgtagttgttagcggggttggcgtggggtg

SEQ ID NO: 720 - DNA, 1131 bp, Artificial Sequence
  chemically treated genomic DNA (Homo sapiens) CpG-island No: 720
caccccacgccaaccccgctaacaactacataactaataccaaaaacgcgacgaaaacgcaaaccgaaaaaaacgaacgctaaaaaaaccgaaaacaacgcgctactcaccaatacgactaaaactctccgacaaaattctccgcaacttcttcatcttaccgatcttctcgaccgactacgactcaataaaatcacacatctaaacgacgcgaaaccccgacaacttccccaaactaatccaaacacaactcaaacaacgacgaaaacgcgcgccgcgaaaaaaacgacgcctcctcctccaccacctcctcgacgaaccgaaaaacgacgcgcaaatctaaaaaaacgaacaacaaacaaacgaaaaacgacaaactccgctccgacctaaaccgcaactaaacgaacgaaaacgatttacgtaataccgaaaacgaccgcgctcgccgccgccgtaataaccccgcgccgcgccgccgccgcccgactcattttccctcctttataacgaaaaaaaacgcgaccgacaaaaaaaataatacgaccgaaaaaaaaaacgaaacgaaccgaatacaaaatacgaaaatcgcctaacgccgaatacgcgaaacgaaaacgaataaaccgacgaaaaaaattctcaacccaaaattacgaacgcaacgcaaaaaaaaccgcgacgcgaaaccgccaacctaacaactcctactaccctcctactaccgccgccacgcccctccctcgacgaaaacccctaaacgcgaaatcctaacacgacctcgactccccgctcgcctcccgcgtcctccgcgaccctctatatctaactcgcgccccgacgacgccccctcccgaccgcgcccctcccgaccgcccccgcgctcctcccccgccccgcccgcgcgcgaaaaaatcacgaaaaaaccgaaataaaaacgaacaacgtctaaaaacaacgtattaaactataaaaaaattaccgaaaaaaaacgaaccgaatccaattatttaaacgattttctccttccacgaacgtatataaaaaaacgcgaaattcgataaaaaacaactaccaaaactacctcctaaactaaatacgataaaaccttaaaaatacattcaaatataa

SEQ ID NO: 721 - DNA, 659 bp, Artificial Sequence
  chemically treated genomic DNA (Homo sapiens) CpG-island No: 721
tttttaggcgtcggggtttttttcgagcgtggcgatttcgtagatatggtgttaagagttagggtgggcggcggggcgggtgggagagcggcggcgttgggggcgagggtattatgcgatcgcgggcgtcgggattatagcgcgtcgggaaggaggtcgaggcggtaggaaaaaagtcgaagatatttggggggatcgaggggttaagcgacggagggaggaatagaatatagtttcgcgttggtttcgagtattgggacgcgcggggagagtaggaggtcgggcggggaggttcggggcggggcgcgttattcgtagttttcggagttcggttaattcggcgtttagtgtacggtcgtattatggggtttcgttatttcgaggggatttatgattacgtggggtatttcggtaggtatgggggaggggtttcgcggcgttacgcgggaggcggcgtcgaggggtttgttttttttcgttgcggcggggttttcgcgcggcgttcgcgattcgaaaatatttttattttttttttatttcgcgtagtcgggatacgggcgtttagacgtcggtttttagttgggttttttttttaggtttttggtagcgggatttggtatggtgagtagaggcgttgggttcgttcggagtgcgtttgt

SEQ ID NO: 722 - DNA, 659 bp, Artificial Sequence
  chemically treated genomic DNA (Homo sapiens) CpG-island No: 722
acaaacgcactccgaacgaacccaacgcctctactcaccataccaaatcccgctaccaaaaacctaaaaaaaaaacccaactaaaaaccgacgtctaaacgcccgtatcccgactacgcgaaataaaaaaaaaataaaaatattttcgaatcgcgaacgccgcgcgaaaaccccgccgcaacgaaaaaaaacaaacccctcgacgccgcctcccgcgtaacgccgcgaaacccctcccccatacctaccgaaataccccacgtaatcataaatcccctcgaaataacgaaaccccataatacgaccgtacactaaacgccgaattaaccgaactccgaaaactacgaataacgcgccccgccccgaacctccccgcccgacctcctactctccccgcgcgtcccaatactcgaaaccaacgcgaaactatattctattcctccctccgtcgcttaacccctcgatccccccaaatatcttcgacttttttcctaccgcctcgacctccttcccgacgcgctataatcccgacgcccgcgatcgcataataccctcgcccccaacgccgccgctctcccacccgccccgccgcccaccctaactcttaacaccatatctacgaaatcgccacgctcgaaaaaaaccccgacgcctaaaaa

SEQ ID NO: 723 - DNA, 659 bp, Artificial Sequence
  chemically treated genomic DNA (Homo sapiens) CpG-island No: 723
ataggcgtatttcgagcgagtttagcgtttttgtttattatgttaggtttcgttgttagaggtttagaggagaagtttagttaggggtcggcgtttggacgttcgtgtttcgattgcgcggggtgaggaggaagtggagatgttttcggatcgcgagcgtcgcgcgagaatttcgtcgtaacggaaagaaatagatttttcggcgtcgtttttcgcgtggcgtcgcggggttttttttttatatttgtcgaagtgttttacgtggttataaattttttcgaagtggcgggattttatggtgcggtcgtgtattgggcgtcgagttagtcgagtttcggggattgcgggtagcgcgtttcgtttcgaattttttcgttcggttttttgtttttttcgcgcgttttagtgttcgggattagcgcgaggttgtattttgttttttttttcgtcgtttggtttttcggtttttttaagtattttcggttttttttttgtcgtttcggtttttttttcggcgcgttgtggtttcggcgttcgcggtcgtatggtgttttcgtttttagcgtcgtcgtttttttattcgtttcgtcgtttattttggtttttggtattatgtttgcggggtcgttacgttcgagggaagtttcgacgtttgggaa

SEQ ID NO: 724 - DNA, 659 bp, Artificial Sequence
  chemically treated genomic DNA (Homo sapiens) CpG-island No: 724
ttcccaaacgtcgaaacttccctcgaacgtaacgaccccgcaaacataataccaaaaaccaaaataaacgacgaaacgaataaaaaaacgacgacgctaaaaacgaaaacaccatacgaccgcgaacgccgaaaccacaacgcgccgaaaaaaaaaccgaaacgacaaaaaaaaaaccgaaaatacttaaaaaaaccgaaaaaccaaacgacgaaaaaaaaaacaaaatacaacctcgcgctaatcccgaacactaaaacgcgcgaaaaaaacaaaaaaccgaacgaaaaaattcgaaacgaaacgcgctacccgcaatccccgaaactcgactaactcgacgcccaatacacgaccgcaccataaaatcccgccacttcgaaaaaatttataaccacgtaaaacacttcgacaaatataaaaaaaaaaccccgcgacgccacgcgaaaaacgacgccgaaaaatctatttctttccgttacgacgaaattctcgcgcgacgctcgcgatccgaaaacatctccacttcctcctcaccccgcgcaatcgaaacacgaacgtccaaacgccgacccctaactaaacttctcctctaaacctctaacaacgaaacctaacataataaacaaaaacgctaaactcgctcgaaatacgcctat

SEQ ID NO: 725 - DNA, 582 bp, Artificial Sequence
  chemically treated genomic DNA (Homo sapiens) CpG-island No: 725
gggcgttatgcgtgtttagagtagaagcgtttagtttcgggagcgtttcgttacggtcgtcggcgtttcgtcgcgttttcgtttttcgttcgcgtttgcgacgagtggcgagattcgttgataaagttttaaacgatgggtttagcgagcgataaaggttagttcggatcgtttcgtttatagtttaattttttaggcgtagcgagcgtttgtagttcgaaagttttgcgcgtttttcgcgcgtttcgttcgttttgttttttttcgggcgtagtcgagggagggggtgttgcgtttggcgggggtggggagaaacgcggggttttagatacgggtgtatgaaatgatggtaagagatgtttggggatgaggtgaggcggggaagggggaatatcgttgtatggttacgagtatacgcgaatataggaatttttagggaagttttaggttaaagagtattcgtgggttttcggagcgtgcgtttcggattgtcgaggttattcgttggtaaataagtttttgagcgtgtaatgtgaggaaacgaggaagggggttaggggataaggagattattatgtatgg

SEQ ID NO: 726 - DNA, 582 bp, Artificial Sequence
  chemically treated genomic DNA (Homo sapiens) CpG-island No: 726
ccatacataataatctccttatcccctaacccccttcctcgtttcctcacattacacgctcaaaaacttatttaccaacgaataacctcgacaatccgaaacgcacgctccgaaaacccacgaatactctttaacctaaaacttccctaaaaattcctatattcgcgtatactcgtaaccatacaacgatattcccccttccccgcctcacctcatccccaaacatctcttaccatcatttcatacacccgtatctaaaaccccgcgtttctccccacccccgccaaacgcaacaccccctccctcgactacgcccgaaaaaaaacaaaacgaacgaaacgcgcgaaaaacgcgcaaaactttcgaactacaaacgctcgctacgcctaaaaaattaaactataaacgaaacgatccgaactaacctttatcgctcgctaaacccatcgtttaaaactttatcaacgaatctcgccactcgtcgcaaacgcgaacgaaaaacgaaaacgcgacgaaacgccgacgaccgtaacgaaacgctcccgaaactaaacgcttctactctaaacacgcataacgccc

SEQ ID NO: 727 - DNA, 582 bp, Artificial Sequence
  chemically treated genomic DNA (Homo sapiens) CpG-island No: 727
ttatgtatagtaatttttttattttttggttttttttttcgtttttttatattgtacgtttagggatttgtttgttagcggatggtttcggtaattcggaacgtacgtttcgagagtttacggatgttttttggtttggagtttttttaaaggtttttgtattcgcgtgtgttcgtaattatgtagcgatgttttttttttttcgttttattttatttttagatattttttgttattattttatgtattcgtgtttaaaatttcgcgtttttttttattttcgttaggcgtagtattttttttttcggttgcgttcggaggggagtagagcggacggggcgcgcgggaggcgcgtagagttttcgggttgtaggcgttcgttgcgtttggggaattgggttgtgggcgaggcggttcgggttggtttttatcgttcgttgggtttatcgtttgaaattttattagcgagtttcgttattcgtcgtagacgcgagcggggggcgggggcgcggcgaggcgtcggcggtcgtgacgaggcgttttcggagttgagcgtttttgttttgggtacgtatggcgttt

SEQ ID NO: 728 - DNA, 582 bp, Artificial Sequence
  chemically treated genomic DNA (Homo sapiens) CpG-island No: 728
aaacgccatacgtacccaaaacaaaaacgctcaactccgaaaacgcctcgtcacgaccgccgacgcctcgccgcgcccccgccccccgctcgcgtctacgacgaataacgaaactcgctaataaaatttcaaacgataaacccaacgaacgataaaaaccaacccgaaccgcctcgcccacaacccaattccccaaacgcaacgaacgcctacaacccgaaaactctacgcgcctcccgcgcgccccgtccgctctactcccctccgaacgcaaccgaaaaaaaaaatactacgcctaacgaaaataaaaaaaaacgcgaaattttaaacacgaatacataaaataataacaaaaaatatctaaaaataaaataaaacgaaaaaaaaaaaacatcgctacataattacgaacacacgcgaatacaaaaacctttaaaaaaactccaaaccaaaaaacatccgtaaactctcgaaacgtacgttccgaattaccgaaaccatccgctaacaaacaaatccctaaacgtacaatataaaaaaacgaaaaaaaaaaccaaaaaataaaaaaattactatacataa

SEQ ID NO: 729 - DNA, 518 bp, Artificial Sequence
  chemically treated genomic DNA (Homo sapiens) CpG-island No: 729
ggcggcgacgaataagttgtatgtttatggagttacggaaagagggaatagcggagggggtgcggcgggggtgatagtaggggggtgtgcgggttggggtgaaagaggggggtgttgaggtaaggtcggaaggtgggagcgagggaagggaggggcggaggcgggagggggagattggaggaagtgcgaaggggggttggtgaggttgggttcggaggggaggcgagagggagagaatgggggagagtttgcgagaagattagtagagagggggagggattagagtgaggggagagaagcgagtgggggaggagaggcgaaggaaagggagagagcggaggagcgagtagataaaaagatgggtataaggtgaggaagataggtagagggggaaagcgcgagcgagttatacgagagggggttacggagggaggagttaggtagatggggaacgggagagtgagatatacggggtgagggaagagtagtatggaaggagagtagagggataagagagg

SEQ ID NO: 730 - DNA, 518 bp, Artificial Sequence
  chemically treated genomic DNA (Homo sapiens) CpG-island No: 730
cctctcttatccctctactctccttccatactactcttccctcaccccgtatatctcactctcccgttccccatctacctaactcctccctccgtaaccccctctcgtataactcgctcgcgctttccccctctacctatcttcctcaccttatacccatctttttatctactcgctcctccgctctctccctttccttcgcctctcctcccccactcgcttctctcccctcactctaatccctccccctctctactaatcttctcgcaaactctcccccattctctccctctcgcctcccctccgaacccaacctcaccaaccccccttcgcacttcctccaatctccccctcccgcctccgcccctcccttccctcgctcccaccttccgaccttacctcaacacccccctctttcaccccaacccgcacacccccctactatcacccccgccgcaccccctccgctattccctctttccgtaactccataaacatacaacttattcgtcgccgcc

SEQ ID NO: 731 - DNA, 518 bp, Artificial Sequence
  chemically treated genomic DNA (Homo sapiens) CpG-island No: 731
ttttttttgtttttttattttttttttatattattttttttttatttcgtgtgttttattttttcgttttttatttgtttggttttttttttcgtgattttttttcgtgtgattcgttcgcgttttttttttttgtttgttttttttattttatgtttatttttttatttgttcgttttttcgttttttttttttttttcgtttttttttttttattcgtttttttttttttattttagtttttttttttttttattagttttttcgtaaatttttttttattttttttttttcgtttttttttcggatttaattttattagttttttttcgtattttttttaatttttttttttcgttttcgttttttttttttttcgtttttatttttcggttttgttttaatattttttttttttattttaattcgtatatttttttgttattattttcgtcgtatttttttcgttatttttttttttcgtggttttatggatatgtagtttgttcgtcgtcgtt

SEQ ID NO: 732 - DNA, 518 bp, Artificial Sequence
  chemically treated genomic DNA (Homo sapiens) CpG-island No: 732
aacgacgacgaacaaactacatatccataaaaccacgaaaaaaaaaaataacgaaaaaaatacgacgaaaataataacaaaaaaatatacgaattaaaataaaaaaaaaaaatattaaaacaaaaccgaaaaataaaaacgaaaaaaaaaaaaaacgaaaacgaaaaaaaaaaattaaaaaaaatacgaaaaaaaactaataaaattaaatccgaaaaaaaaacgaaaaaaaaaaaataaaaaaaaatttacgaaaaaactaataaaaaaaaaaaaaaactaaaataaaaaaaaaaaaacgaataaaaaaaaaaaaacgaaaaaaaaaaaaaaaacgaaaaaacgaacaaataaaaaaataaacataaaataaaaaaaacaaacaaaaaaaaaaaacgcgaacgaatcacacgaaaaaaaatcacgaaaaaaaaaaccaaacaaataaaaaacgaaaaaataaaacacacgaaataaaaaaaaaataatataaaaaaaaaataaaaaaacaaaaaaaa

SEQ ID NO: 733 - DNA, 899 bp, Artificial Sequence
  chemically treated genomic DNA (Homo sapiens) CpG-island No: 733
cggagcgtcggtagtatttggagcggttagggttattttgtcgtcgtcgttttcgcggttttcgtcgtcgttgttttcgtcgcggttcgtgcgcgcgggcgttagtgtagttaggagcgcgtgcgttaggcggaagggcgcgaaggttcggtgcgtttagttgtgtttttcgatgatcgcgtagtacgaggttagtattcggttgatgagaatggtgttttgggtcgtgagcggcgcgtaggcgttcgcggttttttcgtttagggttacgttgtgtatagcggcgggtaggagtcggcggttttcgttacgttcggttattacgtatacgcgttggttcgggcgtacgcggttggcgaatagcgttcgaggttttagtgcgttttcggaaggcggtttcgagttcgaggacgtttcgggtttttcggtggtcgagtcgttgtgcggcgttataaagagtaggtgcgcggcggtgagtagtaggcgttcgcgcggttttcgcgtttcgattacgtagaagatttttttggcgtcgtcgtcgcggtttaggaaagtgaggaagtcgttgtagagtagtcggttttggtcgttcgtcgttagtacgcggttttcggggtttaggttttttattagtttggtgtcgttttgttttaggtgtatcgtggtcgagttcgggaagtagtttttcgatttggtcgttatcgagttttttgcgggtgaggagaagggaaagaagagaggatagggtattgagtttcgagagggaggcgcgtttcggggaggagggcgtacgtttggtgttcgcgtttttaggttaggggtgcgtaaggcgcggggcggggcgattgattttaggcgggtttcgtatatattttttttttttaattttattgttttag

SEQ ID NO: 734 - DNA, 899 bp, Artificial Sequence
  chemically treated genomic DNA (Homo sapiens) CpG-island No: 734
ctaaaacaataaaattaaaaaaaaaaaatatatacgaaacccgcctaaaatcaatcgccccgccccgcgccttacgcacccctaacctaaaaacgcgaacaccaaacgtacgccctcctccccgaaacgcgcctccctctcgaaactcaataccctatcctctcttctttcccttctcctcacccgcaaaaaactcgataacgaccaaatcgaaaaactacttcccgaactcgaccacgatacacctaaaacaaaacgacaccaaactaataaaaaacctaaaccccgaaaaccgcgtactaacgacgaacgaccaaaaccgactactctacaacgacttcctcactttcctaaaccgcgacgacgacgccaaaaaaatcttctacgtaatcgaaacgcgaaaaccgcgcgaacgcctactactcaccgccgcgcacctactctttataacgccgcacaacgactcgaccaccgaaaaacccgaaacgtcctcgaactcgaaaccgccttccgaaaacgcactaaaacctcgaacgctattcgccaaccgcgtacgcccgaaccaacgcgtatacgtaataaccgaacgtaacgaaaaccgccgactcctacccgccgctatacacaacgtaaccctaaacgaaaaaaccgcgaacgcctacgcgccgctcacgacccaaaacaccattctcatcaaccgaatactaacctcgtactacgcgatcatcgaaaaacacaactaaacgcaccgaaccttcgcgcccttccgcctaacgcacgcgctcctaactacactaacgcccgcgcgcacgaaccgcgacgaaaacaacgacgacgaaaaccgcgaaaacgacgacgacaaaataaccctaaccgctccaaatactaccgacgctccg

SEQ ID NO: 735 - DNA, 899 bp, Artificial Sequence
  chemically treated genomic DNA (Homo sapiens) CpG-island No: 735
ttggggtagtggggttgggggagggaggtgtgtgcgggattcgtttggaattaatcgtttcgtttcgcgttttgcgtatttttggtttaggagcgcgggtattaagcgtgcgttttttttttcgagacgcgtttttttttcggaatttaatgttttgttttttttttttttttttttttttattcgtagagaattcggtggcggttaaatcgggaggttgtttttcgggttcggttacggtgtatttggagtagggcggtattaagttggtgaaggatttgagtttcggggatcgcgtgttggcggcggacgattagggtcggttgttttatagcgatttttttatttttttggatcgcgacgacggcgttaagaaggttttttacgtgatcgagacgcgggagtcgcgcgagcgtttgttgtttatcgtcgcgtatttgttttttgtggcgtcgtataacgattcggttatcggggagttcgaggcgttttcgggttcggggtcgtttttcgggggcgtattggggtttcgggcgttgttcgttagtcgcgtgcgttcgggttagcgcgtgtacgtggtggtcgagcgtgacggggatcgtcggtttttgttcgtcgttgtgtatagcgtgattttaagcgaggaggtcgcgggcgtttacgcgtcgtttacggtttagggtattatttttattaatcgggtgttggtttcgtgttacgcggttatcgaggagtatagttgggcgtatcgggttttcgcgttttttcgtttggcgtacgcgtttttggttgtattggcgttcgcgcgtacggatcgcggcggggatagcggcggcggggatcgcgggggcggcggcggtagagtagttttaatcgttttaggtgttgtcgacgtttcg

SEQ ID NO: 736 - DNA, 899 bp, Artificial Sequence
  chemically treated genomic DNA (Homo sapiens) CpG-island No: 736
cgaaacgtcgacaacacctaaaacgattaaaactactctaccgccgccgcccccgcgatccccgccgccgctatccccgccgcgatccgtacgcgcgaacgccaatacaaccaaaaacgcgtacgccaaacgaaaaaacgcgaaaacccgatacgcccaactatactcctcgataaccgcgtaacacgaaaccaacacccgattaataaaaataataccctaaaccgtaaacgacgcgtaaacgcccgcgacctcctcgcttaaaatcacgctatacacaacgacgaacaaaaaccgacgatccccgtcacgctcgaccaccacgtacacgcgctaacccgaacgcacgcgactaacgaacaacgcccgaaaccccaatacgcccccgaaaaacgaccccgaacccgaaaacgcctcgaactccccgataaccgaatcgttatacgacgccacaaaaaacaaatacgcgacgataaacaacaaacgctcgcgcgactcccgcgtctcgatcacgtaaaaaaccttcttaacgccgtcgtcgcgatccaaaaaaataaaaaaatcgctataaaacaaccgaccctaatcgtccgccgccaacacgcgatccccgaaactcaaatccttcaccaacttaataccgccctactccaaatacaccgtaaccgaacccgaaaaacaacctcccgatttaaccgccaccgaattctctacgaataaaaaaaaaaaaaaaaaaaaaaaacaaaacattaaattccgaaaaaaaaacgcgtctcgaaaaaaaaaacgcacgcttaatacccgcgctcctaaaccaaaaatacgcaaaacgcgaaacgaaacgattaattccaaacgaatcccgcacacacctccctcccccaaccccactaccccaa

SEQ ID NO: 737 - DNA, 647 bp, Artificial Sequence
  chemically treated genomic DNA (Homo sapiens) CpG-island No: 737
cgaggtcgagttgtatttgtcgtttaagttgcggcgtttgtacggttcgggcgggggtcgttttttttagggtgcggtagcggcggcggcggcggcggcggcggcggcggtagcggtcgttacggttacggcgggtttacgcggggaggttttttcgtcgttatcgttaatcgcgcggttcggggaacggtcggacggcgtaggggtcgtcgcggtagtcgcggtcgcggtcgtcgcggtttgggatacgtttaagattagttaggcgtcgtaggtgagtattagtcgtagtaagtcgtatcgcgagaacggggcgtttttcgtgtcgtcgtcgttcgcgttggacgagttgggcggttcggggggcgttacgtattcggaggagcgtttcggcgtggtcggcggttcgggtagcgtttcggttgcgggtggtggtatcggtatcgaggacgacgaggaggagttgttggaggacgaagaagatgaggacgaggaagaggaattgttggaggacgacgaggaggagttgttggaggacgacgttcgcgcgttgtttaaggagtttcggcgttgttttgtggtcgttattggcgtcgtggtcgtagtagttgtcgttgtagtggttatagagggcggggagttgttat

SEQ ID NO: 738 - DNA, 647 bp, Artificial Sequence
  chemically treated genomic DNA (Homo sapiens) CpG-island No: 738
ataacaactccccgccctctataaccactacaacgacaactactacgaccacgacgccaataacgaccacaaaacaacgccgaaactccttaaacaacgcgcgaacgtcgtcctccaacaactcctcctcgtcgtcctccaacaattcctcttcctcgtcctcatcttcttcgtcctccaacaactcctcctcgtcgtcctcgataccgataccaccacccgcaaccgaaacgctacccgaaccgccgaccacgccgaaacgctcctccgaatacgtaacgccccccgaaccgcccaactcgtccaacgcgaacgacgacgacacgaaaaacgccccgttctcgcgatacgacttactacgactaatactcacctacgacgcctaactaatcttaaacgtatcccaaaccgcgacgaccgcgaccgcgactaccgcgacgacccctacgccgtccgaccgttccccgaaccgcgcgattaacgataacgacgaaaaaacctccccgcgtaaacccgccgtaaccgtaacgaccgctaccgccgccgccgccgccgccgccgccgccgctaccgcaccctaaaaaaaacgacccccgcccgaaccgtacaaacgccgcaacttaaacgacaaatacaactcgacctcg

SEQ ID NO: 739 - DNA, 647 bp, Artificial Sequence
  chemically treated genomic DNA (Homo sapiens) CpG-island No: 739
gtgatagtttttcgttttttgtggttattgtagcggtagttgttgcggttacggcgttagtggcggttataggatagcgtcggggttttttgagtagcgcgcgggcgtcgttttttagtagttttttttcgtcgttttttagtagtttttttttttcgtttttatttttttcgttttttagtagttttttttcgtcgttttcggtgtcggtgttattattcgtagtcggggcgttgttcgggtcgtcggttacgtcgaggcgttttttcgggtgcgtgacgtttttcgggtcgtttagttcgtttagcgcgggcggcggcggtacgaagggcgtttcgttttcgcggtacgatttgttgcggttgatgtttatttgcggcgtttggttgattttgagcgtgttttaggtcgcggcggtcgcggtcgcggttgtcgcggcggtttttgcgtcgttcggtcgtttttcgggtcgcgcggttggcggtggcggcggaggggttttttcgcgtggattcgtcgtggtcgtggcggtcgttgtcgtcgtcgtcgtcgtcgtcgtcgtcgtcgttgtcgtattttgaaggaggcggttttcgttcgggtcgtataggcgtcgtagtttgggcggtaggtgtagttcggtttcg

SEQ ID NO: 740 - DNA, 647 bp, Artificial Sequence
  chemically treated genomic DNA (Homo sapiens) CpG-island No: 740
cgaaaccgaactacacctaccgcccaaactacgacgcctatacgacccgaacgaaaaccgcctccttcaaaatacgacaacgacgacgacgacgacgacgacgacgacgacaacgaccgccacgaccacgacgaatccacgcgaaaaaacccctccgccgccaccgccaaccgcgcgacccgaaaaacgaccgaacgacgcaaaaaccgccgcgacaaccgcgaccgcgaccgccgcgacctaaaacacgctcaaaatcaaccaaacgccgcaaataaacatcaaccgcaacaaatcgtaccgcgaaaacgaaacgcccttcgtaccgccgccgcccgcgctaaacgaactaaacgacccgaaaaacgtcacgcacccgaaaaaacgcctcgacgtaaccgacgacccgaacaacgccccgactacgaataataacaccgacaccgaaaacgacgaaaaaaaactactaaaaaacgaaaaaaataaaaacgaaaaaaaaaaactactaaaaaacgacgaaaaaaaactactaaaaaacgacgcccgcgcgctactcaaaaaaccccgacgctatcctataaccgccactaacgccgtaaccgcaacaactaccgctacaataaccacaaaaaacgaaaaactatcac

SEQ ID NO: 741 - DNA, 817 bp, Artificial Sequence
  chemically treated genomic DNA (Homo sapiens) CpG-island No: 741
tggatgcgcggatagtcgttgttggttttttggatgtcgacggatttgtattgtcggtagaatttcgcgaggtcgtttagttttaggtagtagttgaattaattcgcgaggggatcgagttcggggtgggcgaagaattttagtatgagattttcgcgttggaggattatttagtcggcgtttcggaaaacgatttcgaagtttaattttttatagaaggcggcggtggaatcgaaatttcgtgatggtaggttgggcgtcgtttggtcggttatttcgaattttagagtttcgtttagaagaattcgttaagaaggcgatagaaggcgatgcgttgcgaatcgggagcggcgatatcgtaaagtacgaggaagcggttagtttattcgtcgttaagttttttagtaatattacgggtagttaacgttatgttttgatagcggttcgttatatttagtcggttatagtcgatgaatttagaaaagcggttattttttattatgatattcggtaagtaggtatcgttatgggttacgacgagattttcgtcgtcgggtatgcgcgttttgagtttggcgaatagttcggtggcgcgagtttttgatgtttttcgtttagattattttgatcgataagatcggtttttattcgagtacgtgttcgttcgatgcgatgtttcgtttggtggtcgaatgggtaggtagtcggattaagcgtatgtagtcgtcgtattgtattagttatgatggatattttttcggtaggagtaagttgagatgataggagattttgtttcggtattcgtttaatagtagtt

SEQ ID NO: 742 - DNA, 817 bp, Artificial Sequence
  chemically treated genomic DNA (Homo sapiens) CpG-island No: 742
aactactattaaacgaataccgaaacaaaatctcctatcatctcaacttactcctaccgaaaaaatatccatcataactaatacaatacgacgactacatacgcttaatccgactacctacccattcgaccaccaaacgaaacatcgcatcgaacgaacacgtactcgaataaaaaccgatcttatcgatcaaaataatctaaacgaaaaacatcaaaaactcgcgccaccgaactattcgccaaactcaaaacgcgcatacccgacgacgaaaatctcgtcgtaacccataacgatacctacttaccgaatatcataataaaaaataaccgcttttctaaattcatcgactataaccgactaaatataacgaaccgctatcaaaacataacgttaactacccgtaatattactaaaaaacttaacgacgaataaactaaccgcttcctcgtactttacgatatcgccgctcccgattcgcaacgcatcgccttctatcgccttcttaacgaattcttctaaacgaaactctaaaattcgaaataaccgaccaaacgacgcccaacctaccatcacgaaatttcgattccaccgccgccttctataaaaaattaaacttcgaaatcgttttccgaaacgccgactaaataatcctccaacgcgaaaatctcatactaaaattcttcgcccaccccgaactcgatcccctcgcgaattaattcaactactacctaaaactaaacgacctcgcgaaattctaccgacaatacaaatccgtcgacatccaaaaaaccaacaacgactatccgcgcatcca

SEQ ID NO: 743 - DNA, 817 bp, Artificial Sequence
  chemically treated genomic DNA (Homo sapiens) CpG-island No: 743
ggttgttattgggcgaatgtcggggtaggattttttgttattttaatttgtttttgtcgagaaagtatttattatggttgatgtaatgcggcggttgtatacgtttgattcggttatttgtttattcgattattaagcgaaatatcgtatcgagcgagtacgtattcggatggaagtcggttttgtcgattaggatgatttggacgaagagtattaggggttcgcgttatcgaattgttcgttaggtttaaggcgcgtatgttcgacggcgaggatttcgtcgtgatttatggcgatgtttgtttgtcgaatattatggtggaaaatggtcgtttttttggatttatcgattgtggtcggttgggtgtggcggatcgttattaggatatagcgttggttattcgtgatattgttgaagagtttggcggcgaatgggttgatcgttttttcgtgttttacggtatcgtcgttttcgattcgtagcgtatcgttttttatcgtttttttgacgagtttttttgagcgggattttggggttcgaaatgatcgattaagcgacgtttaatttgttattacgagatttcgattttatcgtcgttttttatgaaaggttgggtttcggaatcgtttttcgggacgtcggttggatgattttttagcgcggggattttatgttggagtttttcgtttatttcgggttcgattttttcgcgagttggtttagttgttgtttgaggttggacgatttcgcggagttttatcggtagtgtaaattcgtcggtatttaggaaattagtagcggttattcgcgtattta

SEQ ID NO: 744 - DNA, 817 bp, Artificial Sequence
  chemically treated genomic DNA (Homo sapiens) CpG-island No: 744
taaatacgcgaataaccgctactaatttcctaaataccgacgaatttacactaccgataaaactccgcgaaatcgtccaacctcaaacaacaactaaaccaactcgcgaaaaaatcgaacccgaaataaacgaaaaactccaacataaaatccccgcgctaaaaaatcatccaaccgacgtcccgaaaaacgattccgaaacccaacctttcataaaaaacgacgataaaatcgaaatctcgtaataacaaattaaacgtcgcttaatcgatcatttcgaaccccaaaatcccgctcaaaaaaactcgtcaaaaaaacgataaaaaacgatacgctacgaatcgaaaacgacgataccgtaaaacacgaaaaaacgatcaacccattcgccgccaaactcttcaacaatatcacgaataaccaacgctatatcctaataacgatccgccacacccaaccgaccacaatcgataaatccaaaaaaacgaccattttccaccataatattcgacaaacaaacatcgccataaatcacgacgaaatcctcgccgtcgaacatacgcgccttaaacctaacgaacaattcgataacgcgaacccctaatactcttcgtccaaatcatcctaatcgacaaaaccgacttccatccgaatacgtactcgctcgatacgatatttcgcttaataatcgaataaacaaataaccgaatcaaacgtatacaaccgccgcattacatcaaccataataaatactttctcgacaaaaacaaattaaaataacaaaaaatcctaccccgacattcgcccaataacaacc

SEQ ID NO: 745 - DNA, 800 bp, Artificial Sequence
  chemically treated genomic DNA (Homo sapiens) CpG-island No: 745
tttatcgcggtattggttaggttgggtcggacgaacgaggcggcgtcggcggtgcggggggtggtgggtgggttttcggttcgttgggggcggagcgcgggtcggtttatttggcgggtttttcggcgatgagcgcgtcggtcgttcgttcggttttcggggttgaggttgcggggggaaggtggggaattaaacgcgcgttaacgcgggcgcgggttcggggtagatttcgttcgggtcggttttgttcgtattttttttaagcgaattcggtagtttcgtttgttcggttggttttggagttttgagttcgtgggtgtcgcgattcggtttgagatacggcgggggcggggcgggcgttcggagtcgcggtgagttagggtttcgcgttcgtcgatttatttttgtcgtttcggttcgggagcgcgatttgtaatgtaaagttatttcgtttttagtattttaatttgttttaggattcgttagtattagagattttaacggttcgacggtcgttttttttttttcgtttatttttttttcgtcggcggttgagtcgcgaggggaagttttgtaatttcggataaataaacgtcggttttgtacgggtttgaaaaattttgggggaaatgaagagtgagcgaaatcgaagttatcgttcgggtttggcgttcggtttcgcgggtttttgggggcgcgattcgtcgggtttgtttatttcgtttttttatttcggttttcggtttttttttttttttgtttttcggttgttattttataggtcgagggcgtttagtagt

SEQ ID NO: 746 - DNA, 800 bp, Artificial Sequence
  chemically treated genomic DNA (Homo sapiens) CpG-island No: 746
actactaaacgccctcgacctataaaataacaaccgaaaaacaaaaaaaaaaaaaaaccgaaaaccgaaataaaaaaacgaaataaacaaacccgacgaatcgcgcccccaaaaacccgcgaaaccgaacgccaaacccgaacgataacttcgatttcgctcactcttcatttcccccaaaatttttcaaacccgtacaaaaccgacgtttatttatccgaaattacaaaacttcccctcgcgactcaaccgccgacgaaaaaaaaataaacgaaaaaaaaaaaacgaccgtcgaaccgttaaaatctctaatactaacgaatcctaaaacaaattaaaatactaaaaacgaaataactttacattacaaatcgcgctcccgaaccgaaacgacaaaaataaatcgacgaacgcgaaaccctaactcaccgcgactccgaacgcccgccccgcccccgccgtatctcaaaccgaatcgcgacacccacgaactcaaaactccaaaaccaaccgaacaaacgaaactaccgaattcgcttaaaaaaaatacgaacaaaaccgacccgaacgaaatctaccccgaacccgcgcccgcgttaacgcgcgtttaattccccaccttccccccgcaacctcaaccccgaaaaccgaacgaacgaccgacgcgctcatcgccgaaaaacccgccaaataaaccgacccgcgctccgcccccaacgaaccgaaaacccacccaccaccccccgcaccgccgacgccgcctcgttcgtccgacccaacctaaccaataccgcgataaa

SEQ ID NO: 747 - DNA, 800 bp, Artificial Sequence
  chemically treated genomic DNA (Homo sapiens) CpG-island No: 747
gttattgagcgttttcgatttatgaggtaatagtcgggaggtagggaggagggagggtcgggggtcggggtggagggacggggtgggtaggttcggcgggtcgcgtttttaggagttcgcggagtcgagcgttaggttcgagcgatggtttcgatttcgtttattttttattttttttaaagttttttaagttcgtgtaagatcggcgtttgtttgttcgggattgtaaaattttttttcgcggtttagtcgtcgacgagggaggggtagacgaggggaggggagcggtcgtcgggtcgttgaggtttttagtgttggcggattttggggtagattggggtgttggaggcggggtgattttgtattgtaaatcgcgttttcgggtcggggcggtagaaatgagtcggcgggcgcggagttttgatttatcgcggtttcgagcgttcgtttcgttttcgtcgtgttttagatcgagtcgcggtatttacggatttaagattttaaaattaatcgagtaaacgaaattgtcgagttcgtttgggggaggtgcgggtagggtcggttcgggcggggtttgtttcgggttcgcgttcgcgttgacgcgcgtttggttttttatttttttttcgtagttttagtttcggaagtcgagcgagcggtcggcgcgtttatcgtcggggagttcgttaggtggatcggttcgcgtttcgtttttagcgagtcggggatttatttattatttttcgtatcgtcgacgtcgtttcgttcgttcggtttagtttgattaatgtcgcggtgga

SEQ ID NO: 748 - DNA, 800 bp, Artificial Sequence
  chemically treated genomic DNA (Homo sapiens) CpG-island No: 748
tccaccgcgacattaatcaaactaaaccgaacgaacgaaacgacgtcgacgatacgaaaaataataaataaatccccgactcgctaaaaacgaaacgcgaaccgatccacctaacgaactccccgacgataaacgcgccgaccgctcgctcgacttccgaaactaaaactacgaaaaaaaaataaaaaaccaaacgcgcgtcaacgcgaacgcgaacccgaaacaaaccccgcccgaaccgaccctacccgcacctcccccaaacgaactcgacaatttcgtttactcgattaattttaaaatcttaaatccgtaaataccgcgactcgatctaaaacacgacgaaaacgaaacgaacgctcgaaaccgcgataaatcaaaactccgcgcccgccgactcatttctaccgccccgacccgaaaacgcgatttacaatacaaaatcaccccgcctccaacaccccaatctaccccaaaatccgccaacactaaaaacctcaacgacccgacgaccgctcccctcccctcgtctacccctccctcgtcgacgactaaaccgcgaaaaaaaattttacaatcccgaacaaacaaacgccgatcttacacgaacttaaaaaactttaaaaaaaataaaaaataaacgaaatcgaaaccatcgctcgaacctaacgctcgactccgcgaactcctaaaaacgcgacccgccgaacctacccaccccgtccctccaccccgacccccgaccctccctcctccctacctcccgactattacctcataaatcgaaaacgctcaataac

SEQ ID NO: 749 - DNA, 1629 bp, Artificial Sequence
  chemically treated genomic DNA (Homo sapiens) CpG-island No: 749
tagttcgcgtttcgtaggatttagcgcgttttcgtagtcgttgtcgttcgacgagtaggcggaacgcggggagtcgggtttcgagttgttttcgcggttcggggacgaagaagcgcgggagggcgaggcggcgatcggggtggtttttggcggttcgcggggcgtagacggtcgtacggtttgcggttttagttttttcgttagcgcgttgcgtacggcgtcgtgttcggttagtaggcgttgtagcgcgcggatgtattttacggttgagcgtagcgtttttattttgtttagttttttgttggcgtcgtcgtgcggtacgtgttgtcgtagcgtttggaagtttaagtttattagttttacgcggttgcgttcgcgtttattgcgtcgcgttacggtcgttgcgtcgttttcggtttttgcggtggtcggtcgtcgtcgtcggttgtagcgtaatagtttcggggacgcgggttttcgtcgggtagcgtagtcgatagggacggggggcgtagggggcgcggatttgggtagtgtgtcgtcgtttatcgcgtttgtatttattcgttcgttttaggtttcggcgcgtcgtaggaaggtgtaggtagaggaatcggaggcgacggggaaaattgtggcgttttaagggggtttttggtacggcgtcgttaggtaattttttagggtacgcgttttaggtcgtttggagttcggggataggaggtttagtggtggtaggtcgtacgcgttagggagcgtgggacgttcgtgtttcgcgcgtgcggtcggatttttttaggttttcgtaggcgcggcgtaggcggttggtttttaaatgtatagataattttttttcgcgtcgtcgtcgtcgttttttttacgttttttttttttcgtttcgttttttcgttacgtttcgttttttttttcgcgcgattatattttgtaaggtttaaagcgtgcgtatgtttttttagtttatttttcggacgtagtttatagatttttagtgcgtttaattggcgaaatttgcgagttttcggtgcgttttttgttttcggtaggtgtttagtgcgtttttaaagtaaggtacgtaggttttgggttgagttttttcgtatttttattttaatttcgcgcgtagtttcgttagttttaagagtcgttagattttcgtacgcgtagcgcgcgttgtgggagggaaggcgcggttttggcgataatacggttgttcgggaggcgcgtaagattttcgggggtagtacgcgtcgcgtagtttatatttacgttttatttttttggggtcgaggaggcgggggttagggttttagttaatcgtgggttattcgtttggttaatcgcgtagggcgcggttttacgttcggttttattgaggaagcgcgtacgcgtggcgcgtggtttacggggagtatcgttaataaagttgggtttttgttgggtttcgttttgtttttcgttttcgcgattgggttgggcgcgttgttttttagcgtagttatgtttcgagcgcgtttttatttgtgcgttaatttattgggaatgggggtggattgcgttttatttggggcggggtggggtttaaggagtggtcgagattgaggcggggtg

SEQ ID NO: 750 - DNA, 1629 bp, Artificial Sequence
  chemically treated genomic DNA (Homo sapiens) CpG-island No: 750
caccccgcctcaatctcgaccactccttaaaccccaccccgccccaaataaaacgcaatccacccccattcccaataaattaacgcacaaataaaaacgcgctcgaaacataactacgctaaaaaacaacgcgcccaacccaatcgcgaaaacgaaaaacaaaacgaaacccaacaaaaacccaactttattaacgatactccccgtaaaccacgcgccacgcgtacgcgcttcctcaataaaaccgaacgtaaaaccgcgccctacgcgattaaccaaacgaataacccacgattaactaaaaccctaacccccgcctcctcgaccccaaaaaaataaaacgtaaatataaactacgcgacgcgtactacccccgaaaatcttacgcgcctcccgaacaaccgtattatcgccaaaaccgcgccttccctcccacaacgcgcgctacgcgtacgaaaatctaacgactcttaaaactaacgaaactacgcgcgaaattaaaataaaaatacgaaaaaactcaacccaaaacctacgtaccttactttaaaaacgcactaaacacctaccgaaaacaaaaaacgcaccgaaaactcgcaaatttcgccaattaaacgcactaaaaatctataaactacgtccgaaaaataaactaaaaaaacatacgcacgctttaaaccttacaaaatataatcgcgcgaaaaaaaaaacgaaacgtaacgaaaaaacgaaacgaaaaaaaaaaaacgtaaaaaaaacgacgacgacgacgcgaaaaaaaattatctatacatttaaaaaccaaccgcctacgccgcgcctacgaaaacctaaaaaaatccgaccgcacgcgcgaaacacgaacgtcccacgctccctaacgcgtacgacctaccaccactaaacctcctatccccgaactccaaacgacctaaaacgcgtaccctaaaaaattacctaacgacgccgtaccaaaaacccccttaaaacgccacaattttccccgtcgcctccgattcctctacctacaccttcctacgacgcgccgaaacctaaaacgaacgaataaatacaaacgcgataaacgacgacacactacccaaatccgcgccccctacgccccccgtccctatcgactacgctacccgacgaaaacccgcgtccccgaaactattacgctacaaccgacgacgacgaccgaccaccgcaaaaaccgaaaacgacgcaacgaccgtaacgcgacgcaataaacgcgaacgcaaccgcgtaaaactaataaacttaaacttccaaacgctacgacaacacgtaccgcacgacgacgccaacaaaaaactaaacaaaataaaaacgctacgctcaaccgtaaaatacatccgcgcgctacaacgcctactaaccgaacacgacgccgtacgcaacgcgctaacgaaaaaactaaaaccgcaaaccgtacgaccgtctacgccccgcgaaccgccaaaaaccaccccgatcgccgcctcgccctcccgcgcttcttcgtccccgaaccgcgaaaacaactcgaaacccgactccccgcgttccgcctactcgtcgaacgacaacgactacgaaaacgcgctaaatcctacgaaacgcgaacta

SEQ ID NO: 751 - DNA, 1629 bp, Artificial Sequence
  chemically treated genomic DNA (Homo sapiens) CpG-island No: 751
tatttcgttttagtttcgattattttttaagttttatttcgttttaggtaaggcgtagtttatttttatttttagtagattaacgtataggtgggggcgcgttcgggatatagttgcgttaggggatagcgcgtttagtttagtcgcgggggcgaggagtagggcggggtttagtaggaatttagttttgttagcgatgtttttcgtgagttacgcgttacgcgtacgcgtttttttaatggggtcgggcgtggagtcgcgttttgcgcgattggttaaacgggtggtttacgattggttgagattttggttttcgttttttcggttttaggagggtggggcgtgggtgtgggttgcgcggcgcgtgttgttttcggggattttgcgcgtttttcgaatagtcgtgttgtcgttagggtcgcgtttttttttttatagcgcgcgttgcgcgtgcgaaggtttggcggtttttgggattggcggggttgcgcgcggggttagggtgggggtacgggaaggtttaatttaggatttgcgtattttgttttgggggcgtattaagtatttgtcgggagtagggggcgtatcgggaattcgtagatttcgttagttgggcgtattggggatttgtggattgcgttcgggggatgggttagggggatatgcgtacgttttgggttttatagaatgtgatcgcgcgagggggagggcgaagcgtggcgggagggcgaggcgaaggaaggagggcgtgagaaaggcgacggcggcggcgcggaggagggttatttatatatttaaaaattagtcgtttgcgtcgcgtttgcggagatttgggagagttcggtcgtacgcgcgggatacgagcgttttacgttttttggcgcgtacggtttgttattattaggttttttattttcgggttttagacgatttaggacgcgtgttttggggagttgtttggcggcgtcgtgttagaagtttttttggggcgttatagtttttttcgtcgttttcggtttttttgtttgtatttttttgcggcgcgtcgggatttggagcgggcgggtggatgtaggcgcgatggacggcggtatattgtttaggttcgcgttttttgcgtttttcgtttttgtcggttgcgttgttcggcggagattcgcgttttcggaattgttgcgttgtagtcggcggcggcgatcggttatcgtagagatcggaggcggcgtagcggtcgtagcgcggcgtaatgagcgcgagcgtaatcgcgtgaagttggtgaatttgggtttttaggcgttgcggtagtacgtgtcgtacggcggcgttagtaagaagttgagtaaggtggagacgttgcgtttagtcgtggagtatattcgcgcgttgtagcgtttgttggtcgagtacgacgtcgtgcgtaacgcgttggcgggagggttgaggtcgtaggtcgtgcggtcgtttgcgtttcgcgggtcgttagggattatttcggtcgtcgtttcgttttttcgcgttttttcgttttcgggtcgcgggggtagttcggagttcggtttttcgcgtttcgtttattcgtcggacgatagcggttgcgaaggcgcgttgagttttgcggagcgcgagtta

SEQ ID NO: 752 - DNA, 1629 bp, Artificial Sequence
  chemically treated genomic DNA (Homo sapiens) CpG-island No: 752
taactcgcgctccgcaaaactcaacgcgccttcgcaaccgctatcgtccgacgaataaacgaaacgcgaaaaaccgaactccgaactacccccgcgacccgaaaacgaaaaaacgcgaaaaaacgaaacgacgaccgaaataatccctaacgacccgcgaaacgcaaacgaccgcacgacctacgacctcaaccctcccgccaacgcgttacgcacgacgtcgtactcgaccaacaaacgctacaacgcgcgaatatactccacgactaaacgcaacgtctccaccttactcaacttcttactaacgccgccgtacgacacgtactaccgcaacgcctaaaaacccaaattcaccaacttcacgcgattacgctcgcgctcattacgccgcgctacgaccgctacgccgcctccgatctctacgataaccgatcgccgccgccgactacaacgcaacaattccgaaaacgcgaatctccgccgaacaacgcaaccgacaaaaacgaaaaacgcaaaaaacgcgaacctaaacaatataccgccgtccatcgcgcctacatccacccgcccgctccaaatcccgacgcgccgcaaaaaaatacaaacaaaaaaaccgaaaacgacgaaaaaaactataacgccccaaaaaaacttctaacacgacgccgccaaacaactccccaaaacacgcgtcctaaatcgtctaaaacccgaaaataaaaaacctaataataacaaaccgtacgcgccaaaaaacgtaaaacgctcgtatcccgcgcgtacgaccgaactctcccaaatctccgcaaacgcgacgcaaacgactaatttttaaatatataaataaccctcctccgcgccgccgccgtcgcctttctcacgccctccttccttcgcctcgccctcccgccacgcttcgccctccccctcgcgcgatcacattctataaaacccaaaacgtacgcatatccccctaacccatcccccgaacgcaatccacaaatccccaatacgcccaactaacgaaatctacgaattcccgatacgccccctactcccgacaaatacttaatacgcccccaaaacaaaatacgcaaatcctaaattaaaccttcccgtacccccaccctaaccccgcgcgcaaccccgccaatcccaaaaaccgccaaaccttcgcacgcgcaacgcgcgctataaaaaaaaaaacgcgaccctaacgacaacacgactattcgaaaaacgcgcaaaatccccgaaaacaacacgcgccgcgcaacccacacccacgccccaccctcctaaaaccgaaaaaacgaaaaccaaaatctcaaccaatcgtaaaccacccgtttaaccaatcgcgcaaaacgcgactccacgcccgaccccattaaaaaaacgcgtacgcgtaacgcgtaactcacgaaaaacatcgctaacaaaactaaattcctactaaaccccgccctactcctcgcccccgcgactaaactaaacgcgctatcccctaacgcaactatatcccgaacgcgcccccacctatacgttaatctactaaaaataaaaataaactacgccttacctaaaacgaaataaaacttaaaaaataatcgaaactaaaacgaaata

SEQ ID NO: 753 - DNA, 668 bp, Artificial Sequence
  chemically treated genomic DNA (Homo sapiens) CpG-island No: 753
gttattcgtagtatttttaaaaataatttttcgttttagtatatttatagaggcgtgttattcgtagtatttttaaaaataatttttcgttttatttatagaggcgtgttattcgtagtatttttaaaaataattttttattttattcgtagaggtgtgtttttcgtagtatttttaaaaataatttttcgttttagtatatttatagaggcgtgttattcgtagtatttttaaaaataatttttcgttttagtatatttagaggcgtgttattcgtagtatttttaaaaataatttttcgttttagtatatttagaggcgtgttattcgtagtatttttaaaaataatttttcgttttagtatatttatagaggcgtgttattcgtagtatttttaaaaataatttttcgttttagtatatttagaggcgtgttttttttagtatttttaaaaataatttttcgttttagtatatttatagaggcgtgttattcgtagtatttttaaaaataattttttattttagtatatttatagaggcgtgttattcgtagtatttttaaaaataatttttcgttttagtatatttatagaggcgtgttttttttagtatttttaaaaataatttttcgttttagtatttttatagaggcgtgttattcgtagt

SEQ ID NO: 754 - DNA, 668 bp, Artificial Sequence
  chemically treated genomic DNA (Homo sapiens) CpG-island No: 754
actacgaataacacgcctctataaaaatactaaaacgaaaaattatttttaaaaatactaaaaaaaacacgcctctataaatatactaaaacgaaaaattatttttaaaaatactacgaataacacgcctctataaatatactaaaataaaaaattatttttaaaaatactacgaataacacgcctctataaatatactaaaacgaaaaattatttttaaaaatactaaaaaaaacacgcctctaaatatactaaaacgaaaaattatttttaaaaatactacgaataacacgcctctataaatatactaaaacgaaaaattatttttaaaaatactacgaataacacgcctctaaatatactaaaacgaaaaattatttttaaaaatactacgaataacacgcctctaaatatactaaaacgaaaaattatttttaaaaatactacgaataacacgcctctataaatatactaaaacgaaaaattatttttaaaaatactacgaaaaacacacctctacgaataaaataaaaaattatttttaaaaatactacgaataacacgcctctataaataaaacgaaaaattatttttaaaaatactacgaataacacgcctctataaatatactaaaacgaaaaattatttttaaaaatactacgaataac

SEQ ID NO: 755 - DNA, 668 bp, Artificial Sequence
  chemically treated genomic DNA (Homo sapiens) CpG-island No: 755
gttgcgggtggtacgtttttgtgaaaatattaaagcggggagttgtttttgggggtgttgagggaggtacgtttttgtgaatatattaaagcggggagttgtttttgggggtgttgcgggtggtacgtttttgtgaatatattgaagtagggagttgtttttgggggtgttgcgggtggtacgtttttgtgaatatattgaagcggggagttgtttttgggggtgttgagggaggtacgtttttgaatatattaaagcggggagttgtttttgggggtgttgcgggtggtacgtttttgtgaatatattaaagcggggagttgtttttgggggtgttgcgggtggtacgtttttgaatatattaaagcggggagttgtttttgggggtgttgcgggtggtacgtttttgaatatattaaagcggggagttgtttttgggggtgttgcgggtggtacgtttttgtgaatatattaaagcggggagttgtttttgggggtgttgcgggaggtatatttttgcgaataaagtggggagttgtttttgggggtgttgcgggtggtacgtttttgtgaataaagcggggagttgtttttgggggtgttgcgggtggtacgtttttgtgaatatattgaagcggggagttgtttttgggggtgttgcgggtggt

SEQ ID NO: 756 - DNA, 668 bp, Artificial Sequence
  chemically treated genomic DNA (Homo sapiens) CpG-island No: 756
accacccgcaacacccccaaaaacaactccccgcttcaatatattcacaaaaacgtaccacccgcaacacccccaaaaacaactccccgctttattcacaaaaacgtaccacccgcaacacccccaaaaacaactccccactttattcgcaaaaatatacctcccgcaacacccccaaaaacaactccccgctttaatatattcacaaaaacgtaccacccgcaacacccccaaaaacaactccccgctttaatatattcaaaaacgtaccacccgcaacacccccaaaaacaactccccgctttaatatattcaaaaacgtaccacccgcaacacccccaaaaacaactccccgctttaatatattcacaaaaacgtaccacccgcaacacccccaaaaacaactccccgctttaatatattcaaaaacgtacctccctcaacacccccaaaaacaactccccgcttcaatatattcacaaaaacgtaccacccgcaacacccccaaaaacaactccctacttcaatatattcacaaaaacgtaccacccgcaacacccccaaaaacaactccccgctttaatatattcacaaaaacgtacctccctcaacacccccaaaaacaactccccgctttaatattttcacaaaaacgtaccacccgcaac

SEQ ID NO: 757 - DNA, 1012 bp, Artificial Sequence
  chemically treated genomic DNA (Homo sapiens) CpG-island No: 757
ggtcgaaacgcgttaagttgggggtaggtgtagcgattttatatttttcggttgcgcgttttggcggtaggaggcggggtcgggggcggggcgtgagttggtcgggggcggggtttatggaggggcgggatcgcggcgttttataagtattgcggagcgtaggcgcgcgttcggttagagagcgagcgcgtaacggcggcgacggcggcgattttatcgtatattttgttaggttttcggcgtttagggcgtacggcgcgttttcgtgtcggcggtttttgcgtttattttttggcgttttcgttcggtcggttcgttaggtttttttgtcggttattagttaggtttcgcgtcggttcgttcgtcgtttaggatcggttcgcgtttcgtaggtcgttcgtcgttcgcgtcgttatgggagtggagggttgtattaagtgtattaagtatttgtttttcgtttttaatttcgttttttgggtaagggttgcgtcgggggtcggggcgggagggggtaggtatatattttacgttgggtaggtttcgcggtagcgtgttaggtttcgcgggcgtagcgcgggtcgcgaagttgtggggttatttgtgggttttaggagcggggtggggggtcgttcggggttatcgcgtttttcgatattggggttgagggttgcgagtcgagtttcggggtttttgtgttcgggggtttatttttgcggtcgggtcggggtttttgggggtcgtcgggtagttttcgttgtggtggtgatgggtgcggtggtcgcgggtcgggattcgagtattcggtcgttttttagttaaggaggggtttgcgcgggtttttggtcgcggatttcggattgttgtttcgcggggacgaggggggggttcgcgggcgggatttttggcgtttcgtttttatgagtttattaagagtcgtcgtttttggatggtggggcgggggcgtatattttgtcggaggttgggggcgattcgttttatttttttttta

SEQ ID NO: 758 - DNA, 1012 bp, Artificial Sequence
  chemically treated genomic DNA (Homo sapiens) CpG-island No: 758
taaaaaaaaaataaaacgaatcgcccccaacctccgacaaaatatacgcccccgccccaccatccaaaaacgacgactcttaataaactcataaaaacgaaacgccaaaaatcccgcccgcgaacccccccctcgtccccgcgaaacaacaatccgaaatccgcgaccaaaaacccgcgcaaacccctccttaactaaaaaacgaccgaatactcgaatcccgacccgcgaccaccgcacccatcaccaccacaacgaaaactacccgacgacccccaaaaaccccgacccgaccgcaaaaataaacccccgaacacaaaaaccccgaaactcgactcgcaaccctcaaccccaatatcgaaaaacgcgataaccccgaacgaccccccaccccgctcctaaaacccacaaataaccccacaacttcgcgacccgcgctacgcccgcgaaacctaacacgctaccgcgaaacctacccaacgtaaaatatatacctaccccctcccgccccgacccccgacgcaacccttacccaaaaaacgaaattaaaaacgaaaaacaaatacttaatacacttaatacaaccctccactcccataacgacgcgaacgacgaacgacctacgaaacgcgaaccgatcctaaacgacgaacgaaccgacgcgaaacctaactaataaccgacaaaaaaacctaacgaaccgaccgaacgaaaacgccaaaaaataaacgcaaaaaccgccgacacgaaaacgcgccgtacgccctaaacgccgaaaacctaacaaaatatacgataaaatcgccgccgtcgccgccgttacgcgctcgctctctaaccgaacgcgcgcctacgctccgcaatacttataaaacgccgcgatcccgcccctccataaaccccgcccccgaccaactcacgccccgcccccgaccccgcctcctaccgccaaaacgcgcaaccgaaaaatataaaatcgctacacctacccccaacttaacgcgtttcgacc

SEQ ID NO: 759 - DNA, 1012 bp, Artificial Sequence
  chemically treated genomic DNA (Homo sapiens) CpG-island No: 759
tggggaaagagtgaggcggatcgtttttaattttcggtaaagtgtgcgttttcgttttattatttaggggcggcggtttttgatgagtttatgggggcggggcgttaggagtttcgttcgcgagtttttttttcgttttcgcgaagtagtagttcggaattcgcggttagggattcgcgtaggtttttttttagttgaggggcggtcgggtattcgggtttcgattcgcgattatcgtatttattattattatagcgggaattgttcggcggtttttagaagtttcggttcggtcgtagaggtgggttttcgagtatagaggtttcgaaattcggttcgtagtttttagttttaatgtcggggggcgcggtggtttcgggcgattttttatttcgtttttggagtttataggtggttttataatttcgcggttcgcgttgcgttcgcggggtttagtacgttgtcgcgggatttgtttaacgtggagtgtgtgtttgttttttttcgtttcggttttcggcgtagtttttatttagaagacgaaattgaagacgaagagtaggtatttgatgtatttggtgtagttttttatttttatggcggcgcgggcggcgggcggtttgcggggcgcgggtcggttttgggcggcgggcgggtcggcgcggggtttggttggtggtcggtaaaggggtttggcgggtcgatcgggcgggggcgttaagaaatgggcgtaggggtcgtcggtacgggggcgcgtcgtgcgttttgggcgtcggaggtttggtaggatgtgcggtggggtcgtcgtcgtcgtcgtcgttgcgcgttcgttttttggtcgggcgcgcgtttgcgtttcgtagtatttatagggcgtcgcggtttcgtttttttataggtttcgttttcggttagtttacgtttcgttttcggtttcgttttttgtcgttagggcgcgtagtcgaggggtatggggtcgttgtatttatttttaatttggcgcgtttcggtt

SEQ ID NO: 760 - DNA, 1012 bp, Artificial Sequence
  chemically treated genomic DNA (Homo sapiens) CpG-island No: 760
aaccgaaacgcgccaaattaaaaataaatacaacgaccccatacccctcgactacgcgccctaacgacaaaaaacgaaaccgaaaacgaaacgtaaactaaccgaaaacgaaacctataaaaaaacgaaaccgcgacgccctataaatactacgaaacgcaaacgcgcgcccgaccaaaaaacgaacgcgcaacgacgacgacgacgacgaccccaccgcacatcctaccaaacctccgacgcccaaaacgcacgacgcgcccccgtaccgacgacccctacgcccatttcttaacgcccccgcccgatcgacccgccaaacccctttaccgaccaccaaccaaaccccgcgccgacccgcccgccgcccaaaaccgacccgcgccccgcaaaccgcccgccgcccgcgccgccataaaaataaaaaactacaccaaatacatcaaatacctactcttcgtcttcaatttcgtcttctaaataaaaactacgccgaaaaccgaaacgaaaaaaaacaaacacacactccacgttaaacaaatcccgcgacaacgtactaaaccccgcgaacgcaacgcgaaccgcgaaattataaaaccacctataaactccaaaaacgaaataaaaaatcgcccgaaaccaccgcgccccccgacattaaaactaaaaactacgaaccgaatttcgaaacctctatactcgaaaacccacctctacgaccgaaccgaaacttctaaaaaccgccgaacaattcccgctataataataataaatacgataatcgcgaatcgaaacccgaatacccgaccgcccctcaactaaaaaaaaacctacgcgaatccctaaccgcgaattccgaactactacttcgcgaaaacgaaaaaaaaactcgcgaacgaaactcctaacgccccgcccccataaactcatcaaaaaccgccgcccctaaataataaaacgaaaacgcacactttaccgaaaattaaaaacgatccgcctcactctttcccca

SEQ ID NO: 761 - DNA, 710 bp, Artificial Sequence
  chemically treated genomic DNA (Homo sapiens) CpG-island No: 761
  unsure (16, 213..)
aagcgtttcggggcgnacgcggggaagtttcggggcggtatttgttgggcgtggtttcggttagttttttcggtacggttggtagtggtcgcggtaggcgtagttgagagtcggatttaggttacgtggtagttatagaagtcgcgtaggtagcggtgtagtttcgcggcggtcgttacgttcgtggagtcgcgtattcgtacgcgcgtcgtnncgtcgtcgtttaggttgtaggtgtttaagttcggtttggtagttagagcgcgttttatcgatacggagaagtcggtcgcggggtttggttttagtagtcgggttacgagcgttcgtacggtcgtcgtttttcgggtttcgtcgtttgtcgcgttttcggtttcggttaggagaaggatttttatcgtcgcggttatcgttatcgtttttatggttttagttttgcgggtttcgcgacggttagggggtggggcggttcgcgtttaattagttgtcggttttcggttacgtggattcgaaggttaagttcgggtttagggttaggagtcgcggttttcgggtattaggatatttttttgggggcgtttcgtgatcgtacgcggtggggagcgtgtgatttcggttttagggtcgaaggggattcgttggtttttatagagcgttttcgggtaaaacgcgtttttatacgtaaataatttttatttaattatttaata

SEQ ID NO: 762 - DNA, 710 bp, Artificial Sequence
  chemically treated genomic DNA (Homo sapiens) CpG-island No: 762
  unsure (497..498, 695)
tattaaataattaaataaaaattatttacgtataaaaacgcgttttacccgaaaacgctctataaaaaccaacgaatccccttcgaccctaaaaccgaaatcacacgctccccaccgcgtacgatcacgaaacgcccccaaaaaaatatcctaatacccgaaaaccgcgactcctaaccctaaacccgaacttaaccttcgaatccacgtaaccgaaaaccgacaactaattaaacgcgaaccgccccaccccctaaccgtcgcgaaacccgcaaaactaaaaccataaaaacgataacgataaccgcgacgataaaaatccttctcctaaccgaaaccgaaaacgcgacaaacgacgaaacccgaaaaacgacgaccgtacgaacgctcgtaacccgactactaaaaccaaaccccgcgaccgacttctccgtatcgataaaacgcgctctaactaccaaaccgaacttaaacacctacaacctaaacgacgacgnnacgacgcgcgtacgaatacgcgactccacgaacgtaacgaccgccgcgaaactacaccgctacctacgcgacttctataactaccacgtaacctaaatccgactctcaactacgcctaccgcgaccactaccaaccgtaccgaaaaaactaaccgaaaccacgcccaacaaataccgccccgaaacttccccgcgtncgccccgaaacgctt

SEQ ID NO: 763 - DNA, 710 bp, Artificial Sequence
  chemically treated genomic DNA (Homo sapiens) CpG-island No: 763
  unsure (497..498, 695)
tattagatggttggatggaagttatttgcgtgtgaaagcgcgttttattcgaaggcgttttgtgagggttagcgggtttttttcggttttggagtcggggttatacgttttttatcgcgtgcggttacgagacgtttttaagggagtattttggtattcggaagtcgcgatttttggttttgagttcgggtttagttttcgggtttacgtggtcggaggtcggtagttgattggacgcgggtcgttttattttttggtcgtcgcgggattcgtaggattgagattatggaggcggtggcggtggtcgcggcggtgggggttttttttttggtcggggtcgggggcgcggtaggcgacgaggttcgggaggcggcggtcgtgcgggcgttcgtggttcggttgttggggttaggtttcgcggtcgattttttcgtgtcggtggagcgcgttttggttgttaagtcgggtttggatatttatagtttgggcggcggcgnngcggcgcgcgtgcgggtgcgcggttttacgggcgtggcggtcgtcgcggggttgtatcgttatttgcgcgatttttgtggttgttacgtggtttgagttcggtttttagttgcgtttgtcgcggttattgttagtcgtgtcgggggagttgatcgaggttacgtttaataggtatcgtttcgaagttttttcgcgtncgtttcgaggcgttt

SEQ ID NO: 764 - DNA, 710 bp, Artificial Sequence
  chemically treated genomic DNA (Homo sapiens) CpG-island No: 764
  unsure (16, 213..)
aaacgcctcgaaacgnacgcgaaaaaacttcgaaacgatacctattaaacgtaacctcgatcaactcccccgacacgactaacaataaccgcgacaaacgcaactaaaaaccgaactcaaaccacgtaacaaccacaaaaatcgcgcaaataacgatacaaccccgcgacgaccgccacgcccgtaaaaccgcgcacccgcacgcgcgccgcnncgccgccgcccaaactataaatatccaaacccgacttaacaaccaaaacgcgctccaccgacacgaaaaaatcgaccgcgaaacctaaccccaacaaccgaaccacgaacgcccgcacgaccgccgcctcccgaacctcgtcgcctaccgcgcccccgaccccgaccaaaaaaaaaacccccaccgccgcgaccaccgccaccgcctccataatctcaatcctacgaatcccgcgacgaccaaaaaataaaacgacccgcgtccaatcaactaccgacctccgaccacgtaaacccgaaaactaaacccgaactcaaaaccaaaaatcgcgacttccgaataccaaaatactcccttaaaaacgtctcgtaaccgcacgcgataaaaaacgtataaccccgactccaaaaccgaaaaaaacccgctaaccctcacaaaacgccttcgaataaaacgcgctttcacacgcaaataacttccatccaaccatctaata

SEQ ID NO: 765 - DNA, 570 bp, Artificial Sequence
  chemically treated genomic DNA (Homo sapiens) CpG-island No: 765
tttggcgtttttttttttcgtttcgtcggttgttggggaagcggcgggcgtttagtgtttggaggtcgttttttcgttttttttggttgcgggaacggagaggcggcggcggtcggagtagggtgggcggtttgagtcgagagttcggtcggttttcgcgaggaatatggcgatttgcggcgatcggagtagtagcggcgttagttgttgtatcgtcgattttttggagtagcgaaagcgattcgcgagaagacgtcgttaagtggaattcgggttttgcggttttgggagggggtagtatcgatatagttatgaagtttcgggcgcggcgttgggcgttaacgagagttacggtaatttttagacggcgttatagtaatttttaggtagtgtttatattagtttataggtggcgtttttcgtattgtatttgtcgcggtcgtttcgggtgtgaattgcgttgttagtagggtcgcgttgatacgggtggtttaggttcgtagtagtcgaggagtttaggggtattgttcggggtgacgagaaggagaagacggtgttttagaaaaaggt

SEQ ID NO: 766 - DNA, 570 bp, Artificial Sequence
  chemically treated genomic DNA (Homo sapiens) CpG-island No: 766
acctttttctaaaacaccgtcttctccttctcgtcaccccgaacaatacccctaaactcctcgactactacgaacctaaaccacccgtatcaacgcgaccctactaacaacgcaattcacacccgaaacgaccgcgacaaatacaatacgaaaaacgccacctataaactaatataaacactacctaaaaattactataacgccgtctaaaaattaccgtaactctcgttaacgcccaacgccgcgcccgaaacttcataactatatcgatactaccccctcccaaaaccgcaaaacccgaattccacttaacgacgtcttctcgcgaatcgctttcgctactccaaaaaatcgacgatacaacaactaacgccgctactactccgatcgccgcaaatcgccatattcctcgcgaaaaccgaccgaactctcgactcaaaccgcccaccctactccgaccgccgccgcctctccgttcccgcaaccaaaaaaaacgaaaaaacgacctccaaacactaaacgcccgccgcttccccaacaaccgacgaaacgaaaaaaaaaaacgccaaa

SEQ ID NO: 767 - DNA, 570 bp, Artificial Sequence
  chemically treated genomic DNA (Homo sapiens) CpG-island No: 767
gtttttttttggggtatcgttttttttttttcgttatttcgggtagtgtttttgggtttttcggttgttgcgggtttgggttattcgtgttagcgcggttttgttgatagcgtagtttatattcggggcggtcgcggtaggtgtagtgcgaggggcgttatttgtaggttggtgtgggtattgtttagaggttgttgtggcgtcgtttggaggttgtcgtggttttcgttggcgtttagcgtcgcgttcggggttttatggttgtgtcggtgttgtttttttttagggtcgtagggttcgggttttatttggcggcgttttttcgcgagtcgttttcgttgttttaagaagtcggcggtgtagtaattgacgtcgttgttgtttcggtcgtcgtaggtcgttatatttttcgcgggggtcggtcgggttttcggtttaggtcgtttattttgtttcggtcgtcgtcgttttttcgttttcgtagttagaggaggcgagggagcgatttttaggtattgggcgttcgtcgtttttttagtagtcggcggggcggggaagaaagacgttagg

SEQ ID NO: 768 - DNA, 570 bp, Artificial Sequence
  chemically treated genomic DNA (Homo sapiens) CpG-island No: 768
cctaacgtctttcttccccgccccgccgactactaaaaaaacgacgaacgcccaatacctaaaaatcgctccctcgcctcctctaactacgaaaacgaaaaaacgacgacgaccgaaacaaaataaacgacctaaaccgaaaacccgaccgacccccgcgaaaaatataacgacctacgacgaccgaaacaacaacgacgtcaattactacaccgccgacttcttaaaacaacgaaaacgactcgcgaaaaaacgccgccaaataaaacccgaaccctacgaccctaaaaaaaaacaacaccgacacaaccataaaaccccgaacgcgacgctaaacgccaacgaaaaccacgacaacctccaaacgacgccacaacaacctctaaacaatacccacaccaacctacaaataacgcccctcgcactacacctaccgcgaccgccccgaatataaactacgctatcaacaaaaccgcgctaacacgaataacccaaacccgcaacaaccgaaaaacccaaaaacactacccgaaataacgaaaaaaaaaaaacgataccccaaaaaaaaac

SEQ ID NO: 769 - DNA, 509 bp, Artificial Sequence
  chemically treated genomic DNA (Homo sapiens) CpG-island No: 769
ataaggacgattcggattcgttgttcgaatcggtggtgaaaaatcgcgatatggcgacggcgcggaggtgttacggtcggatttgcgggggagttaaggcgttatcggttacgcgaagaggttcgagttaatatttttcgacgtttaattttttatcggttttattcggatttcgatttgggttttttattacgaagtacgaggtttaaaaaatattaattagttgagttcgcgagttatatcgtaggttttgatagcggaaacgtcgagagagaaggcgggttttcgcgttattttcgggaagcgtcgattaattatattgggagattataatttttagtggttttcgcgttataagggggcggggataagtttgagggaatcgggcgttgagattttggttgtaggcgtcgcgaattttatcgcgcgttggtgtcgggatttaaaatacgaagatcggcggggcgtagtggtttacgcgtgtaattatagtattaataggtattaat

SEQ ID NO: 770 - DNA, 509 bp, Artificial Sequence
  chemically treated genomic DNA (Homo sapiens) CpG-island No: 770
attaatacctattaatactataattacacgcgtaaaccactacgccccgccgatcttcgtattttaaatcccgacaccaacgcgcgataaaattcgcgacgcctacaaccaaaatctcaacgcccgattccctcaaacttatccccgcccccttataacgcgaaaaccactaaaaattataatctcccaatataattaatcgacgcttcccgaaaataacgcgaaaacccgccttctctctcgacgtttccgctatcaaaacctacgatataactcgcgaactcaactaattaatattttttaaacctcgtacttcgtaataaaaaacccaaatcgaaatccgaataaaaccgataaaaaattaaacgtcgaaaaatattaactcgaacctcttcgcgtaaccgataacgccttaactcccccgcaaatccgaccgtaacacctccgcgccgtcgccatatcgcgatttttcaccaccgattcgaacaacgaatccgaatcgtccttat

SEQ ID NO: 771 - DNA, 509 bp, Artificial Sequence
  chemically treated genomic DNA (Homo sapiens) CpG-island No: 771
attaatgtttattaatgttgtaattatacgcgtgagttattgcgtttcgtcgattttcgtgttttaaatttcgatattaacgcgcggtaggattcgcgacgtttgtagttaaggttttagcgttcggtttttttaggtttgttttcgtttttttatggcgcgaaggttattgggagttgtagttttttagtgtagttagtcggcgtttttcggaagtgacgcgaggattcgttttttttttcggcgttttcgttgttagggtttgcggtgtgattcgcgggtttagttggttggtattttttgggtttcgtgtttcgtggtgggagatttaggtcgaggttcgggtggggtcggtgaggggttgggcgtcgggaggtgttggttcgggttttttcgcgtggtcggtgacgttttggttttttcgtaggttcggtcgtagtattttcgcgtcgtcgttatgtcgcggttttttattatcggttcggatagcgagttcgagtcgtttttgt

SEQ ID NO: 772 - DNA, 509 bp, Artificial Sequence
  chemically treated genomic DNA (Homo sapiens) CpG-island No: 772
acaaaaacgactcgaactcgctatccgaaccgataataaaaaaccgcgacataacgacgacgcgaaaatactacgaccgaacctacgaaaaaaccaaaacgtcaccgaccacgcgaaaaaacccgaaccaacacctcccgacgcccaacccctcaccgaccccacccgaacctcgacctaaatctcccaccacgaaacacgaaacccaaaaaataccaaccaactaaacccgcgaatcacaccgcaaaccctaacaacgaaaacgccgaaaaaaaaaacgaatcctcgcgtcacttccgaaaaacgccgactaactacactaaaaaactacaactcccaataaccttcgcgccataaaaaaacgaaaacaaacctaaaaaaaccgaacgctaaaaccttaactacaaacgtcgcgaatcctaccgcgcgttaatatcgaaatttaaaacacgaaaatcgacgaaacgcaataactcacgcgtataattacaacattaataaacattaat

SEQ ID NO: 773 - DNA, 892 bp, Artificial Sequence
  chemically treated genomic DNA (Homo sapiens) CpG-island No: 773
gttgtatacgtttgattcggttatttgtttattcgattattaagcgaaatatcgtatcgagcgagtacgtattcggatggaagtcggttttgtcgattaggatgatttggacgaagagtattaggggttcgcgttagtcgaattgttcgttaggtttaaggcgcgtatgttcgacggcgaggatttcgtcgtgatttatggcgatgtttgtttgtcgaatattatggtggaaaatggtcgtttttttggatttatcgattgtggtcggttgggtgtggcggatcgttattaggatatagcgttggttattcgtgatattgttgaagagtttggcggcgaatgggttgatcgttttttcgtgttttacggtatcgtcgttttcgattcgtagcgtatcgttttttatcgtttttttgacgagtttttttgagcgggattttggggttcgaaatgatcgattaagcgacgtttaatttgttattacgagatttcgattttatcgtcgttttttatgaaaggttgggtttcggaatcgtttttcgggacgtcggttggatgattttttagcgcggggattttatgttggagtttttcgtttatttcgggttcgattttttcgcgagttggtttagttgttgtttgaggttggacgatttcgcggagttttatcggtagtgtaaattcgtcggtatttaggaaattagtagcggttattcgcgtatttatgttttcgaattgtaggagtggggaggtacgatggtcgttttggtttcggattaattcgcgcgatcggatcgattcgggtaacgttgttgttattgttgtagggggggggggggggggttttattgtttattttacggataaaaatagagaaaggaaacgatagagg

SEQ ID NO: 774 - DNA, 892 bp, Artificial Sequence
  chemically treated genomic DNA (Homo sapiens) CpG-island No: 774
cctctatcgtttcctttctctatttttatccgtaaaataaacaataaaaccccccccccccccccctacaacaataacaacaacgttacccgaatcgatccgatcgcgcgaattaatccgaaaccaaaacgaccatcgtacctccccactcctacaattcgaaaacataaatacgcgaataaccgctactaatttcctaaataccgacgaatttacactaccgataaaactccgcgaaatcgtccaacctcaaacaacaactaaaccaactcgcgaaaaaatcgaacccgaaataaacgaaaaactccaacataaaatccccgcgctaaaaaatcatccaaccgacgtcccgaaaaacgattccgaaacccaacctttcataaaaaacgacgataaaatcgaaatctcgtaataacaaattaaacgtcgcttaatcgatcatttcgaaccccaaaatcccgctcaaaaaaactcgtcaaaaaaacgataaaaaacgatacgctacgaatcgaaaacgacgataccgtaaaacacgaaaaaacgatcaacccattcgccgccaaactcttcaacaatatcacgaataaccaacgctatatcctaataacgatccgccacacccaaccgaccacaatcgataaatccaaaaaaacgaccattttccaccataatattcgacaaacaaacatcgccataaatcacgacgaaatcctcgccgtcgaacatacgcgccttaaacctaacgaacaattcgactaacgcgaacccctaatactcttcgtccaaatcatcctaatcgacaaaaccgacttccatccgaatacgtactcgctcgatacgatatttcgcttaataatcgaataaacaaataaccgaatcaaacgtatacaac

SEQ ID NO: 775 - DNA, 892 bp, Artificial Sequence
  chemically treated genomic DNA (Homo sapiens) CpG-island No: 775
tttttgtcgttttttttttttgtttttgttcgtggaatgaataatggaattttttttttttttttttgtagtaatggtaataacgttgttcggatcgattcggtcgcgcgaattgattcgggattaaagcggttatcgtgtttttttatttttgtagttcgggggtatggatgcgcggatagtcgttgttggttttttggatgtcgacggatttgtattgtcggtagaatttcgcgaggtcgtttagttttaggtagtagttgaattaattcgcgaggggatcgagttcggggtgggcgaagaattttagtatgagattttcgcgttggaggattatttagtcggcgtttcggaaaacgatttcgaagtttaattttttatagaaggcggcggtggaatcgaaatttcgtgatggtaggttgggcgtcgtttggtcggttatttcgaattttagagtttcgtttagaagaattcgttaagaaggcgatagaaggcgatgcgttgcgaatcgggagcggcgatatcgtaaagtacgaggaagcggttagtttattcgtcgttaagttttttagtaatattacgggtagttaacgttatgttttgatagcggttcgttatatttagtcggttatagtcgatgaatttagaaaagcggttattttttattatgatattcggtaagtaggtatcgttatgggttacgacgagattttcgtcgtcgggtatgcgcgttttgagtttggcgaatagttcggttggcgcgagtttttgatgtttttcgtttagattattttgatcgataagatcggtttttattcgagtacgtgttcgttcgatgcgatgtttcgtttggtggtcgaatgggtaggtagtcggattaagcgtatgtagt

SEQ ID NO: 776 - DNA, 892 bp, Artificial Sequence
  chemically treated genomic DNA (Homo sapiens) CpG-island No: 776
actacatacgcttaatccgactacctacccattcgaccaccaaacgaaacatcgcatcgaacgaacacgtactcgaataaaaaccgatcttatcgatcaaaataatctaaacgaaaaacatcaaaaactcgcgccaaccgaactattcgccaaactcaaaacgcgcatacccgacgacgaaaatctcgtcgtaacccataacgatacctacttaccgaatatcataataaaaaataaccgcttttctaaattcatcgactataaccgactaaatataacgaaccgctatcaaaacataacgttaactacccgtaatattactaaaaaacttaacgacgaataaactaaccgcttcctcgtactttacgatatcgccgctcccgattcgcaacgcatcgccttctatcgccttcttaacgaattcttctaaacgaaactctaaaattcgaaataaccgaccaaacgacgcccaacctaccatcacgaaatttcgattccaccgccgccttctataaaaaattaaacttcgaaatcgttttccgaaacgccgactaaataatcctccaacgcgaaaatctcatactaaaattcttcgcccaccccgaactcgatcccctcgcgaattaattcaactactacctaaaactaaacgacctcgcgaaattctaccgacaatacaaatccgtcgacatccaaaaaaccaacaacgactatccgcgcatccatacccccgaactacaaaaataaaaaaacacgataaccgctttaatcccgaatcaattcgcgcgaccgaatcgatccgaacaacgttattaccattactacaaaaaaaaaaaaaaaaaattccattattcattccacgaacaaaaacaaaaaaaaaaaacgacaaaaa

SEQ ID NO: 777 - DNA, 562 bp, Artificial Sequence
  chemically treated genomic DNA (Homo sapiens) CpG-island No: 777
tgcggttttacggcgtaatttcgtattagtaagcgtattggttcgtatgttttgatataggttggtaattagttagtagtgcgcgtttgatttttacggataagatttcgtattcggatataggtttcgttttcggtaatattcgtaaattatattaattagttcgttgacgtttggtagttcggcggtaacggatgttttttttcggtattatgtaataaattgttcgggtgatggtagaaatggtcgattttgtcgacgggttacgcgtatttttgcgttaatttgttttatcgtggtgatttcgttttttcgaaaagttagaatttattggcgacggatttcgtttatttcgttttggttacggttagttaggttcgtcgggaaagttgttagtaattggttgaatatatcgttgatgatttgcgttatttgttgtatttgcggtttttcgtcgtattgtttcggtatgttgttggcgattcgacgtatttgtttacggttaaagttaattatttgtgcggcgatgttttttatagatttatttcgtaaatttagtttg

SEQ ID NO: 778 - DNA, 562 bp, Artificial Sequence
  chemically treated genomic DNA (Homo sapiens) CpG-island No: 778
caaactaaatttacgaaataaatctataaaaaacatcgccgcacaaataattaactttaaccgtaaacaaatacgtcgaatcgccaacaacataccgaaacaatacgacgaaaaaccgcaaatacaacaaataacgcaaatcatcaacgatatattcaaccaattactaacaactttcccgacgaacctaactaaccgtaaccaaaacgaaataaacgaaatccgtcgccaataaattctaacttttcgaaaaaacgaaatcaccacgataaaacaaattaacgcaaaaatacgcgtaacccgtcgacaaaatcgaccatttctaccatcacccgaacaatttattacataataccgaaaaaaaacatccgttaccgccgaactaccaaacgtcaacgaactaattaatataatttacgaatattaccgaaaacgaaacctatatccgaatacgaaatcttatccgtaaaaatcaaacgcgcactactaactaattaccaacctatatcaaaacatacgaaccaatacgcttactaatacgaaattacgccgtaaaaccgca

SEQ ID NO: 779 - DNA, 562 bp, Artificial Sequence
  chemically treated genomic DNA (Homo sapiens) CpG-island No: 779
tagattggatttacggggtggatttatgaaaaatatcgtcgtatagatggttaattttgatcgtgagtagatgcgtcggatcgttaataatatgtcggaatagtacgacgaaaagtcgtaggtatagtaggtagcgtagattattaacggtgtgtttagttagttattggtaattttttcggcgagtttggttaatcgtgattagaacgaagtgaacgaaattcgtcgttagtgggttttggtttttcgggaaaacgggattattacgatggaataggttaacgtaggaatgcgcgtagttcgtcggtagaatcgattatttttgttattattcgggtagtttgttgtatggtgtcgggaagaagtattcgttatcgtcggattgttaaacgttagcgagttggttgatatggtttacgagtattgtcggaagcgaggtttgtattcggatgcggagttttattcgtggaaattaaacgcgtattattggttggttattaatttgtattagaatatgcgggttaatgcgtttattgatgcggaattacgtcgtaaggtcgta

SEQ ID NO: 780 - DNA, 562 bp, Artificial Sequence
  chemically treated genomic DNA (Homo sapiens) CpG-island No: 780
tacgaccttacgacgtaattccgcatcaataaacgcattaacccgcatattctaatacaaattaataaccaaccaataatacgcgtttaatttccacgaataaaactccgcatccgaatacaaacctcgcttccgacaatactcgtaaaccatatcaaccaactcgctaacgtttaacaatccgacgataacgaatacttcttcccgacaccatacaacaaactacccgaataataacaaaaataatcgattctaccgacgaactacgcgcattcctacgttaacctattccatcgtaataatcccgttttcccgaaaaaccaaaacccactaacgacgaatttcgttcacttcgttctaatcacgattaaccaaactcgccgaaaaaattaccaataactaactaaacacaccgttaataatctacgctacctactatacctacgacttttcgtcgtactattccgacatattattaacgatccgacgcatctactcacgatcaaaattaaccatctatacgacgatatttttcataaatccaccccgtaaatccaatcta

SEQ ID NO: 781 - DNA, 643 bp, Artificial Sequence
  chemically treated genomic DNA (Homo sapiens) CpG-island No: 781
atagtgggcgttttttaaacgcggttttcgttcggtcgttcgggtttcgtttttttcggttagtttaggttttttatttttgtagatttgtttttatagatttttgtttgacggttcggtgatttgttacgacgagataggtagttcgcgggacgcgagagatacggtgggtatcggcgttcgggtgaacgacgagtttgtagagtagttgggtttgaggcgtattatgtggttggggatttgtcgcggtgtcgttatggtcgcggtttttacggtaatcgcgttcgtcggaaggtcgcgattcggaagaagtcggaattcgagagggtgggtcggcgattcgaagtggattttcgggttacggcggagttggtttttacgtggaggcggggaaatttcgtttatcggtgagtgttagggcgcgttgtaggcgggtcggcgcggggtgtggagattgtattagaggaagtgcgcggcggggaagatggggaaatgcggtttatttatatttttgaattcgatttttttagtcggtgtgcgttcgtttcggtttgaggtcgtcgtttttagaaagttttttcgttttagagtcggttttgggattttacgtaattttttttagtttgttgatgcggaggtttgg

SEQ ID NO: 782 - DNA, 643 bp, Artificial Sequence
  chemically treated genomic DNA (Homo sapiens) CpG-island No: 782
ccaaacctccgcatcaacaaactaaaaaaaattacgtaaaatcccaaaaccgactctaaaacgaaaaaactttctaaaaacgacgacctcaaaccgaaacgaacgcacaccgactaaaaaaatcgaattcaaaaatataaataaaccgcatttccccatcttccccgccgcgcacttcctctaatacaatctccacaccccgcgccgacccgcctacaacgcgccctaacactcaccgataaacgaaatttccccgcctccacgtaaaaaccaactccgccgtaacccgaaaatccacttcgaatcgccgacccaccctctcgaattccgacttcttccgaatcgcgaccttccgacgaacgcgattaccgtaaaaaccgcgaccataacgacaccgcgacaaatccccaaccacataatacgcctcaaacccaactactctacaaactcgtcgttcacccgaacgccgatacccaccgtatctctcgcgtcccgcgaactacctatctcgtcgtaacaaatcaccgaaccgtcaaacaaaaatctataaaaacaaatctacaaaaataaaaaacctaaactaaccgaaaaaaacgaaacccgaacgaccgaacgaaaaccgcgtttaaaaaacgcccactat

SEQ ID NO: 783 - DNA, 643 bp, Artificial Sequence
  chemically treated genomic DNA (Homo sapiens) CpG-island No: 783
ttaagttttcgtattaatagattgggagggattacgtggggttttagggtcggttttgaggcgggaaaattttttggaggcggcggttttaggtcggagcgggcgtatatcgattggaggggtcggatttagggatgtgggtggatcgtatttttttatttttttcgtcgcgtattttttttggtgtaatttttatatttcgcgtcggttcgtttgtaacgcgttttggtatttatcggtgggcgaaattttttcgtttttacgtgagagttagtttcgtcgtgattcggaagtttatttcgagtcgtcggtttattttttcgggtttcggtttttttcgggtcgcggtttttcggcgaacgcggttatcgtggaaatcgcggttatggcggtatcgcggtaaatttttagttatatagtgcgttttaagtttagttgttttatagattcgtcgtttattcggacgtcggtgtttatcgtgtttttcgcgtttcgcgagttgtttgtttcgtcgtggtaggttatcgagtcgttaagtaagaatttgtgggagtagatttgtaagggtaggaaatttgggttggtcgagaggggcgggattcgggcggtcggacgggggtcgcgtttggggagcgtttattgt

SEQ ID NO: 784 - DNA, 643 bp, Artificial Sequence
  chemically treated genomic DNA (Homo sapiens) CpG-island No: 784
acaataaacgctccccaaacgcgacccccgtccgaccgcccgaatcccgcccctctcgaccaacccaaatttcctacccttacaaatctactcccacaaattcttacttaacgactcgataacctaccacgacgaaacaaacaactcgcgaaacgcgaaaaacacgataaacaccgacgtccgaataaacgacgaatctataaaacaactaaacttaaaacgcactatataactaaaaatttaccgcgataccgccataaccgcgatttccacgataaccgcgttcgccgaaaaaccgcgacccgaaaaaaaccgaaacccgaaaaaataaaccgacgactcgaaataaacttccgaatcacgacgaaactaactctcacgtaaaaacgaaaaaatttcgcccaccgataaataccaaaacgcgttacaaacgaaccgacgcgaaatataaaaattacaccaaaaaaaatacgcgacgaaaaaaataaaaaaatacgatccacccacatccctaaatccgacccctccaatcgatatacgcccgctccgacctaaaaccgccgcctccaaaaaattttcccgcctcaaaaccgaccctaaaaccccacgtaatccctcccaatctattaatacgaaaacttaa

SEQ ID NO: 785 - DNA, 640 bp, Artificial Sequence
  chemically treated genomic DNA (Homo sapiens) CpG-island No: 785
cgggttttgcgttcgttcgttcgttcgttaggttaggtcgttcgttgatcggttttggagttgtaggtcgggtcgttttcgaggttttttatagaagttgatgttcgggtgcgtggcgagggttcgttagagaaatttttgcgtgtagggttttaaaggtagcgggaagggcggtattcgcgtttttagtcggttttatagcgttggtagatataggttatcgagtttttttagagcgatttcgtttaataacgattttagcgcgtttattgttattttagtcggcggcgttcggggcgtatgcgtaacgtatcgttaagggttttggtttatcgcgtttgcgtataacgattcggggttcggggaggtgggttagatttagggttcggaggaggagttttagcgcgtcggtatgacgttatttttcgggggcgggtttagtaagtggagttttatcgttattggttcggggtttcgtagtaattaggggaattgtaaatagtgtagaggtcgttttcggttcgagttttcggaatcgtcgtttttagggatggacggtgagtgtttgtgggttttttcgggaggtcgggttgttatttttttatttttttcgatcgcgttttgggtagaattttaggtt

SEQ ID NO: 786 - DNA, 640 bp, Artificial Sequence
  chemically treated genomic DNA (Homo sapiens) CpG-island No: 786
aacctaaaattctacccaaaacgcgatcgaaaaaaataaaaaaataacaacccgacctcccgaaaaaacccacaaacactcaccgtccatccctaaaaacgacgattccgaaaactcgaaccgaaaacgacctctacactatttacaattcccctaattactacgaaaccccgaaccaataacgataaaactccacttactaaacccgcccccgaaaaataacgtcataccgacgcgctaaaactcctcctccgaaccctaaatctaacccacctccccgaaccccgaatcgttatacgcaaacgcgataaaccaaaacccttaacgatacgttacgcatacgccccgaacgccgccgactaaaataacaataaacgcgctaaaatcgttattaaacgaaatcgctctaaaaaaactcgataacctatatctaccaacgctataaaaccgactaaaaacgcgaataccgcccttcccgctacctttaaaaccctacacgcaaaaatttctctaacgaaccctcgccacgcacccgaacatcaacttctataaaaaacctcgaaaacgacccgacctacaactccaaaaccgatcaacgaacgacctaacctaacgaacgaacgaacgaacgcaaaacccg

SEQ ID NO: 787 - DNA, 640 bp, Artificial Sequence
  chemically treated genomic DNA (Homo sapiens) CpG-island No: 787
ggtttaggattttgtttaaagcgcggtcgggagggatgggagaataatagttcgatttttcggaggggtttatagatatttatcgtttatttttagaggcggcggtttcgggagttcgaatcggaagcggtttttatattgtttgtagtttttttggttattgcggggtttcggattaatgacggtggagttttatttattgagttcgttttcggggagtgacgttatgtcggcgcgttggaatttttttttcgaattttgggtttgatttattttttcgggtttcggatcgttgtgcgtaggcgcgatggattaaggtttttggcggtgcgttgcgtatgcgtttcgggcgtcgtcgattgaagtagtaatggacgcgttggagtcgttgttggacgaagtcgttttggaggggttcgatggtttgtgtttgttagcgttgtggagtcggttggagacgcgagtgtcgtttttttcgttgtttttggaattttgtacgtaggagtttttttggcgggttttcgttacgtattcgggtattagtttttatgaggagtttcgggagcgattcgatttatagttttaggatcggttagcgggcggtttggtttggcgggcgggcgggcgggcgtagggttcg

SEQ ID NO: 788 - DNA, 640 bp, Artificial Sequence
  chemically treated genomic DNA (Homo sapiens) CpG-island No: 788
cgaaccctacgcccgcccgcccgcccgccaaaccaaaccgcccgctaaccgatcctaaaactataaatcgaatcgctcccgaaactcctcataaaaactaatacccgaatacgtaacgaaaacccgccaaaaaaactcctacgtacaaaattccaaaaacaacgaaaaaaacgacactcgcgtctccaaccgactccacaacgctaacaaacacaaaccatcgaacccctccaaaacgacttcgtccaacaacgactccaacgcgtccattactacttcaatcgacgacgcccgaaacgcatacgcaacgcaccgccaaaaaccttaatccatcgcgcctacgcacaacgatccgaaacccgaaaaaataaatcaaacccaaaattcgaaaaaaaaattccaacgcgccgacataacgtcactccccgaaaacgaactcaataaataaaactccaccgtcattaatccgaaaccccgcaataaccaaaaaaactacaaacaatataaaaaccgcttccgattcgaactcccgaaaccgccgcctctaaaaataaacgataaatatctataaacccctccgaaaaatcgaactattattctcccatccctcccgaccgcgctttaaacaaaatcctaaacc

SEQ ID NO: 789 - DNA, 724 bp, Artificial Sequence
  chemically treated genomic DNA (Homo sapiens) CpG-island No: 789
  unsure (96, 237)
ttgtagtagtaagcgtcgtatatttcggggcgggggtagggagggggcgtcggggtcgggcgggggttatttatcgggcgtggggagtagcgatanagtagagtcgcgaacgtttagcgtcgtagtagttttatggttcgtttatttttttcggttcgggggttgcggttgttagcggcgcggggagggcgggaatagggacgggggtggggaggcgttattgcggagtcggggcgngggcgcggggtcgggcgggggtcgcggagaggtgggggcggtagggacggcgtcggggtttagcgcgtttcggtcgcggttatttcggcggggcggcggggcgggtttaagagttgagtagcgagtacgtgagtttagggttcgtttttcgttttttcgtcgtttttcggtttttttagtttcgtagtttcgggtcgtcgtcgcgagggataaaagaggcgtcgttcggggttttttttcgtatttcgaagttttttcggtaggtgcggggcggtggcgtttcgcgtatttatttcgcggttttttttcggttatttttgtttgagtattttcgaggattcgtagatttgtaggggagggaagtaggggacggggtattttcggggtcgattcggcgattgtttgtttggggttcgggggtaggggcgtggttgcggcgtttacgttcgtttttttgtcgtggtattttagagaggttgttttagtt

SEQ ID NO: 790 - DNA, 724 bp, Artificial Sequence
  chemically treated genomic DNA (Homo sapiens) CpG-island No: 790
  unsure (488, 629)
aactaaaacaacctctctaaaataccacgacaaaaaaacgaacgtaaacgccgcaaccacgcccctacccccgaaccccaaacaaacaatcgccgaatcgaccccgaaaataccccgtcccctacttccctcccctacaaatctacgaatcctcgaaaatactcaaacaaaaataaccgaaaaaaaaccgcgaaataaatacgcgaaacgccaccgccccgcacctaccgaaaaaacttcgaaatacgaaaaaaaaccccgaacgacgcctcttttatccctcgcgacgacgacccgaaactacgaaactaaaaaaaccgaaaaacgacgaaaaaacgaaaaacgaaccctaaactcacgtactcgctactcaactcttaaacccgccccgccgccccgccgaaataaccgcgaccgaaacgcgctaaaccccgacgccgtccctaccgcccccacctctccgcgacccccgcccgaccccgcgcccncgccccgactccgcaataacgcctccccacccccgtccctattcccgccctccccgcgccgctaacaaccgcaacccccgaaccgaaaaaaataaacgaaccataaaactactacgacgctaaacgttcgcgactctactntatcgctactccccacgcccgataaataacccccgcccgaccccgacgccccctccctacccccgccccgaaatatacgacgcttactactacaa

SEQ ID NO: 791 - DNA, 724 bp, Artificial Sequence
  chemically treated genomic DNA (Homo sapiens) CpG-island No: 791
  unsure (488, 629)
ggttggggtagtttttttggggtattacgatagaggggcgaacgtgggcgtcgtagttacgtttttgttttcgggttttagataggtagtcgtcgggtcgatttcgggggtatttcgttttttgttttttttttttataaatttacgagttttcggagatgtttaggtagaggtggtcgaggagaggtcgcgggataagtacgcggagcgttatcgtttcgtatttgtcgaggagatttcgaggtgcgaggagggatttcgggcggcgttttttttgtttttcgcggcggcggttcggggttgcggggttgggggggtcggggggcggcgggagagcggagggcgggttttgggtttacgtgttcgttgtttagtttttaaattcgtttcgtcgtttcgtcgggatggtcgcggtcggagcgcgttgagtttcggcgtcgtttttgtcgtttttattttttcgcgattttcgttcggtttcgcgtttncgtttcggtttcgtagtggcgtttttttattttcgtttttgttttcgtttttttcgcgtcgttggtagtcgtagttttcggatcgggaggaatgagcgagttatgaggttgttgcggcgttgggcgttcgcggttttgttntgtcgttgttttttacgttcggtgagtgattttcgttcggtttcggcgttttttttttgttttcgtttcgggatgtgcggcgtttgttgttgtag

SEQ ID NO: 792 - DNA, 724 bp, Artificial Sequence
  chemically treated genomic DNA (Homo sapiens) CpG-island No: 792
  unsure (96, 237)
ctacaacaacaaacgccgcacatcccgaaacgaaaacaaaaaaaaaacgccgaaaccgaacgaaaatcactcaccgaacgtaaaaaacaacgacanaacaaaaccgcgaacgcccaacgccgcaacaacctcataactcgctcattcctcccgatccgaaaactacgactaccaacgacgcgaaaaaaacgaaaacaaaaacgaaaataaaaaaacgccactacgaaaccgaaacgnaaacgcgaaaccgaacgaaaatcgcgaaaaaataaaaacgacaaaaacgacgccgaaactcaacgcgctccgaccgcgaccatcccgacgaaacgacgaaacgaatttaaaaactaaacaacgaacacgtaaacccaaaacccgccctccgctctcccgccgccccccgacccccccaaccccgcaaccccgaaccgccgccgcgaaaaacaaaaaaaacgccgcccgaaatccctcctcgcacctcgaaatctcctcgacaaatacgaaacgataacgctccgcgtacttatcccgcgacctctcctcgaccacctctacctaaacatctccgaaaactcgtaaatttataaaaaaaaaaaacaaaaaacgaaatacccccgaaatcgacccgacgactacctatctaaaacccgaaaacaaaaacgtaactacgacgcccacgttcgcccctctatcgtaataccccaaaaaaactaccccaacc

SEQ ID NO: 793 - DNA, 568 bp, Artificial Sequence
  chemically treated genomic DNA (Homo sapiens) CpG-island No: 793
ttagttttcgaacgaatttttttttaattttcgggaggtaggagttttagcggggagatgcgggaagttttagacgagttcgtacgtcgtcggagacgtagggatcgaggtcggggagataaagagtagttcgcgaagagttcgggcggcgaggggcggttcggtttcgttttgcgtttttaatcgttcgggtagttgtcggtatcgcggggcgtcgtcgagtgcgcgtcgtttttgttcgggtttttcgatcgtcgttcgatattttcgcggtttaggatattttcgagtcgtttttttttcgatttgggagtcgcgcgtttggggataaagagggagggtgcgtcggggatagtggtaggacgcgggtcggcgacgtttttcggattcggcgggaattttcggcggcgttttttttttttttcgttttggtcgcgttttttcggattcggagttttttcggttttttcggcgtttaagagttttcgtttttttggattcgtttggtcgtttgggattataagtatgagttaatacgtttagttttttggatttttttttttttttt

SEQ ID NO: 794 - DNA, 568 bp, Artificial Sequence
  chemically treated genomic DNA (Homo sapiens) CpG-island No: 794
aaaaaaaaaaaaaaaatccaaaaaactaaacgtattaactcatacttataatcccaaacgaccaaacgaatccaaaaaaacgaaaactcttaaacgccgaaaaaaccgaaaaaactccgaatccgaaaaaacgcgaccaaaacgaaaaaaaaaaaaaacgccgccgaaaattcccgccgaatccgaaaaacgtcgccgacccgcgtcctaccactatccccgacgcaccctccctctttatccccaaacgcgcgactcccaaatcgaaaaaaaaacgactcgaaaatatcctaaaccgcgaaaatatcgaacgacgatcgaaaaacccgaacaaaaacgacgcgcactcgacgacgccccgcgataccgacaactacccgaacgattaaaaacgcaaaacgaaaccgaaccgcccctcgccgcccgaactcttcgcgaactactctttatctccccgacctcgatccctacgtctccgacgacgtacgaactcgtctaaaacttcccgcatctccccgctaaaactcctacctcccgaaaattaaaaaaaaattcgttcgaaaactaa

SEQ ID NO: 795 - DNA, 568 bp, Artificial Sequence
  chemically treated genomic DNA (Homo sapiens) CpG-island No: 795
aaaaaaaaaaaaaaaatttagggggttaggcgtgttggtttatgtttgtaattttaaacggttaggcgggtttagggaagcggagatttttggacgtcgggagggtcgagagaatttcgagttcgggagagcgcggttagagcgggagaaggagggggcgtcgtcgagggttttcgtcgagttcggagggcgtcgtcggttcgcgttttgttattgttttcggcgtattttttttttttgtttttaggcgcgcggtttttaaatcgggagggaaacggttcgggggtgttttgggtcgcggaggtgtcgggcgacggtcggggagttcggatagaagcggcgcgtattcggcggcgtttcgcggtgtcgataattattcgggcggttaggggcgtagggcggagtcgggtcgtttttcgtcgttcgggtttttcgcgggttgttttttgttttttcgatttcgatttttgcgttttcggcggcgtgcgggttcgtttgaggtttttcgtattttttcgttggaatttttgtttttcgggggttagaggagggttcgttcgagggttgg

SEQ ID NO: 796 - DNA, 568 bp, Artificial Sequence
  chemically treated genomic DNA (Homo sapiens) CpG-island No: 796
ccaaccctcgaacgaaccctcctctaacccccgaaaaacaaaaattccaacgaaaaaatacgaaaaacctcaaacgaacccgcacgccgccgaaaacgcaaaaatcgaaatcgaaaaaacaaaaaacaacccgcgaaaaacccgaacgacgaaaaacgacccgactccgccctacgcccctaaccgcccgaataattatcgacaccgcgaaacgccgccgaatacgcgccgcttctatccgaactccccgaccgtcgcccgacacctccgcgacccaaaacacccccgaaccgtttccctcccgatttaaaaaccgcgcgcctaaaaacaaaaaaaaaaaatacgccgaaaacaataacaaaacgcgaaccgacgacgccctccgaactcgacgaaaaccctcgacgacgccccctccttctcccgctctaaccgcgctctcccgaactcgaaattctctcgaccctcccgacgtccaaaaatctccgcttccctaaacccgcctaaccgtttaaaattacaaacataaaccaacacgcctaaccccctaaatttttttttttttttt

SEQ ID NO: 797 - DNA, 509 bp, Artificial Sequence
  chemically treated genomic DNA (Homo sapiens) CpG-island No: 797
ttcggtagcgtttcgttttgggtttggttttgggcggtcggttgttgattgcgattgcgcgtttcgaggtttgtagagacggttcggggtatttgttatcgtatcgtttaagatcggaagcggaaatggaatcgagatagtttcgcgcgtttagttggtcgtcgttatttttacgttttaggtcgggtcgatttacggagtcgtcggaagcggaagtcgttgaggggtggtgaagcggttgggaaagtgtcggtttattttcgcgttttttgcgtttttgtcgcggtttgtttgggtaggtaaagcgcgattgcgagagttcggtaattttgtcgatttagtcggaatcggttttcggttcgaggggcgtggtgttttggtgtttcgatttttttcgtaggttttttgggattcgcggtttcgggagttttttgtttagggttttttttttgtagtgaggcgtcgttcgttttttttgtgttttcgtagatttttattatgggtaatat

SEQ ID NO: 798 - DNA, 509 bp, Artificial Sequence
  chemically treated genomic DNA (Homo sapiens) CpG-island No: 798
atattacccataataaaaatctacgaaaacacaaaaaaaacgaacgacgcctcactacaaaaaaaaaaccctaaacaaaaaactcccgaaaccgcgaatcccaaaaaacctacgaaaaaaatcgaaacaccaaaacaccacgcccctcgaaccgaaaaccgattccgactaaatcgacaaaattaccgaactctcgcaatcgcgctttacctacccaaacaaaccgcgacaaaaacgcaaaaaacgcgaaaataaaccgacactttcccaaccgcttcaccacccctcaacgacttccgcttccgacgactccgtaaatcgacccgacctaaaacgtaaaaataacgacgaccaactaaacgcgcgaaactatctcgattccatttccgcttccgatcttaaacgatacgataacaaataccccgaaccgtctctacaaacctcgaaacgcgcaatcgcaatcaacaaccgaccgcccaaaaccaaacccaaaacgaaacgctaccgaa

SEQ ID NO: 799 - DNA, 509 bp, Artificial Sequence
  chemically treated genomic DNA (Homo sapiens) CpG-island No: 799
gtattgtttatgatgggggtttgcggggatatagggaaggcggacggcgttttattgtaggaaagggattttgagtaagggattttcggaatcgcgggttttaaggagtttgcggaaggagtcggagtattaggatattacgtttttcgggtcgggagtcggtttcggttgagtcggtagggttgtcgagttttcgtaatcgcgttttatttgtttaggtaagtcgcggtaagaacgtaaggggcgcgaagataaatcgatatttttttaatcgttttattattttttagcgattttcgttttcggcgatttcgtaagtcggttcggtttagggcgtggaggtggcggcggttagttaaacgcgcgaggttatttcgattttattttcgttttcggttttgagcggtgcggtaataggtgtttcgggtcgtttttgtaggtttcggagcgcgtagtcgtagttagtagtcggtcgtttagggttaggtttaggacgaggcgttgtcgag

SEQ ID NO: 800 - DNA, 509 bp, Artificial Sequence
  chemically treated genomic DNA (Homo sapiens) CpG-island No: 800
ctcgacaacgcctcgtcctaaacctaaccctaaacgaccgactactaactacgactacgcgctccgaaacctacaaaaacgacccgaaacacctattaccgcaccgctcaaaaccgaaaacgaaaataaaatcgaaataacctcgcgcgtttaactaaccgccgccacctccacgccctaaaccgaaccgacttacgaaatcgccgaaaacgaaaatcgctaaaaaataataaaacgattaaaaaaatatcgatttatcttcgcgccccttacgttcttaccgcgacttacctaaacaaataaaacgcgattacgaaaactcgacaaccctaccgactcaaccgaaaccgactcccgacccgaaaaacgtaatatcctaatactccgactccttccgcaaactccttaaaacccgcgattccgaaaatcccttactcaaaatccctttcctacaataaaacgccgtccgccttccctatatccccgcaaacccccatcataaacaatac

SEQ ID NO: 801 - DNA, 569 bp, Artificial Sequence
  chemically treated genomic DNA (Homo sapiens) CpG-island No: 801
gatgggggaggggagaggacggggggagggggatttataaagttgcggggttgtagttcggattgcggtttcgcggcgcgggcgaggcgtaatttcggtttggttttcgcggcgcggcgtagcgaggttttttcgggtcgttcgttcggttttcgtagtaacgtagtttgcgttttttcgtcgaggttcgaagtttcggggacgttcggcgtcgtcgtttttgttgtcgtcgtcgcgggttgcgggttttgcggtagcgttcgcggtttttttcgttcggagggaggtttttgtttcgtttattttatgtgtgtaaagtgtacgagtaagtggggcgcggcgaaggaggttcgcgagttttaagtttttcgtagcgtcgcggggagaggttcgagtcgttgtattagcgttattttttatatcgattcgttgtcgtcgtcgtcgtcgtcgtcgtcgtcgtcgtcgatatcgtcgtcgtcgtaggttttagatcggaagtgaatgttttattcggtaatttttttcgggggcgttacggttattggtttttaagatggaggttttagtaa

SEQ ID NO: 802 - DNA, 569 bp, Artificial Sequence
  chemically treated genomic DNA (Homo sapiens) CpG-island No: 802
ttactaaaacctccatcttaaaaaccaataaccgtaacgcccccgaaaaaaattaccgaataaaacattcacttccgatctaaaacctacgacgacgacgatatcgacgacgacgacgacgacgacgacgacgacgacaacgaatcgatataaaaaataacgctaatacaacgactcgaacctctccccgcgacgctacgaaaaacttaaaactcgcgaacctccttcgccgcgccccacttactcgtacactttacacacataaaataaacgaaacaaaaacctccctccgaacgaaaaaaaccgcgaacgctaccgcaaaacccgcaacccgcgacgacgacaacaaaaacgacgacgccgaacgtccccgaaacttcgaacctcgacgaaaaaacgcaaactacgttactacgaaaaccgaacgaacgacccgaaaaaacctcgctacgccgcgccgcgaaaaccaaaccgaaattacgcctcgcccgcgccgcgaaaccgcaatccgaactacaaccccgcaactttataaatccccctccccccgtcctctcccctcccccatc

SEQ ID NO: 803 - DNA, 569 bp, Artificial Sequence
  chemically treated genomic DNA (Homo sapiens) CpG-island No: 803
ttgttagggtttttattttgggggttagtggtcgtggcgttttcggaaggggttgtcgagtggggtatttattttcggtttggggtttgcggcggcggcggtgtcggcggcggcggcggcggcggcggcggcggcggtagcgggtcggtgtagaaaatggcgttggtgtagcggttcgggttttttttcgcggcgttgcggagggtttgaggttcgcgagtttttttcgtcgcgttttatttgttcgtgtattttatatatatgaggtgagcggaataagggttttttttcgggcgggaggagtcgcgggcgttgtcgtagggttcgtaattcgcggcggcggtagtagaggcggcggcgtcgggcgttttcgagatttcgggtttcggcgggagggcgtaggttgcgttgttgcggaggtcgagcgggcggttcgggggagtttcgttgcgtcgcgtcgcgggggttaggtcggggttgcgtttcgttcgcgtcgcgggatcgtagttcgggttgtagtttcgtagttttgtgagttttttttttttcgttttttttttttttttatt

SEQ ID NO: 804 - DNA, 569 bp, Artificial Sequence
  chemically treated genomic DNA (Homo sapiens) CpG-island No: 804
aataaaaaaaaaaaaaaaacgaaaaaaaaaaaactcacaaaactacgaaactacaacccgaactacgatcccgcgacgcgaacgaaacgcaaccccgacctaacccccgcgacgcgacgcaacgaaactcccccgaaccgcccgctcgacctccgcaacaacgcaacctacgccctcccgccgaaacccgaaatctcgaaaacgcccgacgccgccgcctctactaccgccgccgcgaattacgaaccctacgacaacgcccgcgactcctcccgcccgaaaaaaaacccttattccgctcacctcatatatataaaatacacgaacaaataaaacgcgacgaaaaaaactcgcgaacctcaaaccctccgcaacgccgcgaaaaaaaacccgaaccgctacaccaacgccattttctacaccgacccgctaccgccgccgccgccgccgccgccgccgccgccgacaccgccgccgccgcaaaccccaaaccgaaaataaataccccactcgacaaccccttccgaaaacgccacgaccactaacccccaaaataaaaaccctaacaa

SEQ ID NO: 805 - DNA, 520 bp, Artificial Sequence
  chemically treated genomic DNA (Homo sapiens) CpG-island No: 805
aagcggcgcgtttcgcggttttttcgggcgtcgcgaagttgggaggcgcgtaaagtgcggtttaggggggatcgtcgggggttttcgttagtagttttttgttcgaggtcgtagtttttgtttttttcgtttttcgttcggtcgtttggtcgttcggtcgtttcgtcgatcgagggtttattagcgtttttttatggtcgcggtagttaatcgatgattgaatcgaataaagagtagcggcgagattaatttttaatatttatcgatgggtagcgggcggtcgagtttcggcgagtttcggtagtcgtcgttcgtcgttttagggcgttcgtttgttcgttcggggatttttttaatgcgtttagggcgcgttcgggggttttttacggtcgcgcggtcggcgttgttcgtattaatttggagtcgtcgtagattaaatcgtttttaatattgaaatatcgattttatattggcggttattttgggggttatcgagacgcgtatatataagagtttggtt

SEQ ID NO: 806 - DNA, 520 bp, Artificial Sequence
  chemically treated genomic DNA (Homo sapiens) CpG-island No: 806
aaccaaactcttatatatacgcgtctcgataacccccaaaataaccgccaatataaaatcgatatttcaatattaaaaacgatttaatctacgacgactccaaattaatacgaacaacgccgaccgcgcgaccgtaaaaaacccccgaacgcgccctaaacgcattaaaaaaatccccgaacgaacaaacgaacgccctaaaacgacgaacgacgactaccgaaactcgccgaaactcgaccgcccgctacccatcgataaatattaaaaattaatctcgccgctactctttattcgattcaatcatcgattaactaccgcgaccataaaaaaacgctaataaaccctcgatcgacgaaacgaccgaacgaccaaacgaccgaacgaaaaacgaaaaaaacaaaaactacgacctcgaacaaaaaactactaacgaaaacccccgacgatcccccctaaaccgcactttacgcgcctcccaacttcgcgacgcccgaaaaaaccgcgaaacgcgccgctt

SEQ ID NO: 807 - DNA, 520 bp, Artificial Sequence
  chemically treated genomic DNA (Homo sapiens) CpG-island No: 807
agttaaatttttgtgtgtgcgcgtttcgatagtttttaagatggtcgttaatgtgggatcgatgttttaatattggaagcgatttgatttacggcgattttaggttagtgcgggtagcgtcggtcgcgcggtcgtgaggagttttcgggcgcgttttgggcgtattggggaggttttcgggcgggtaggcggacgttttggggcggcgggcggcggttgtcggggttcgtcggggttcggtcgttcgttgtttatcgataggtattaggaattgatttcgtcgttgttttttgttcggtttagttatcgattagttgtcgcgattatggagaagcgttagtgagttttcggtcggcggagcggtcgagcggttaggcggtcgggcgaggagcggggaaggtaggggttacggtttcgggtagggggttgttggcgggaattttcggcggttttttttgagtcgtattttgcgcgttttttaatttcgcggcgttcggggaggtcgcggagcgcgtcgttt

SEQ ID NO: 808 - DNA, 520 bp, Artificial Sequence
  chemically treated genomic DNA (Homo sapiens) CpG-island No: 808
aaacgacgcgctccgcgacctccccgaacgccgcgaaattaaaaaacgcgcaaaatacgactcaaaaaaaaccgccgaaaattcccgccaacaaccccctacccgaaaccgtaacccctaccttccccgctcctcgcccgaccgcctaaccgctcgaccgctccgccgaccgaaaactcactaacgcttctccataatcgcgacaactaatcgataactaaaccgaacaaaaaacaacgacgaaatcaattcctaatacctatcgataaacaacgaacgaccgaaccccgacgaaccccgacaaccgccgcccgccgccccaaaacgtccgcctacccgcccgaaaacctccccaatacgcccaaaacgcgcccgaaaactcctcacgaccgcgcgaccgacgctacccgcactaacctaaaatcgccgtaaatcaaatcgcttccaatattaaaacatcgatcccacattaacgaccatcttaaaaactatcgaaacgcgcacacacaaaaatttaact

SEQ ID NO: 809 - DNA, 636 bp, Artificial Sequence
  chemically treated genomic DNA (Homo sapiens) CpG-island No: 809
tcgcgataatatttgtagagggttcgtgcggagttttttagtgagcggatcgaaaatcgttattttggaaggatattggtatgttttagggtgaaaatttatattacgatattcggggggtgggtttttttcgagttttcgttcgcgggtgtttttatttagatttgaggggtgtcgggaagattttcgtttatcgagttagggcgggattaagattttcggcgttggaaacgcgtagggcggggtttagatttggatttagttagtcgggcggtgtggggtgcgtatgcgtaatgttcgtttcggttttaggatcgcgcgggcgatagtagggtcgcggtgtagtgttcgattcgagagttgcggtttgagttatcggtttcgtttttcggagtcggacgttgcgggaggttcgggagcggtagtggaatcgatttttagaatttcggacgtgtgcggcggtaagcgttcggttcgtatttttttcgtatttcgtaatttcgattttggcggtttttagattcggcgaaatcgtgaagtttcggttttaggagttttttagatttatggttttagattcgaatttttagatttgttcgatttttttttatgtcgtttcggggatttttttttatt

SEQ ID NO: 810 - DNA, 636 bp, Artificial Sequence
  chemically treated genomic DNA (Homo sapiens) CpG-island No: 810
aataaaaaaaaatccccgaaacgacataaaaaaaaatcgaacaaatctaaaaattcgaatctaaaaccataaatctaaaaaactcctaaaaccgaaacttcacgatttcgccgaatctaaaaaccgccaaaatcgaaattacgaaatacgaaaaaaatacgaaccgaacgcttaccgccgcacacgtccgaaattctaaaaatcgattccactaccgctcccgaacctcccgcaacgtccgactccgaaaaacgaaaccgataactcaaaccgcaactctcgaatcgaacactacaccgcgaccctactatcgcccgcgcgatcctaaaaccgaaacgaacattacgcatacgcaccccacaccgcccgactaactaaatccaaatctaaaccccgccctacgcgtttccaacgccgaaaatcttaatcccgccctaactcgataaacgaaaatcttcccgacacccctcaaatctaaataaaaacacccgcgaacgaaaactcgaaaaaaacccaccccccgaatatcgtaatataaattttcaccctaaaacataccaatatccttccaaaataacgattttcgatccgctcactaaaaaactccgcacgaaccctctacaaatattatcgcga

SEQ ID NO: 811 - DNA, 636 bp, Artificial Sequence
  chemically treated genomic DNA (Homo sapiens) CpG-island No: 811
ggtggagaagggttttcgggacggtataaaaggagatcgaataggtttgagggttcgaatttgagattatggatttggggggtttttgaggtcgagattttacggtttcgtcgggtttgggggtcgttaaagtcggagttgcggggtgcggagggggtacgggtcgggcgtttatcgtcgtatacgttcggagttttgggagtcggttttattgtcgttttcgggtttttcgtagcgttcggtttcggagggcggggtcggtgatttaggtcgtaattttcgggtcggatattgtatcgcggttttgttgtcgttcgcgcggttttagagtcgaagcggatattgcgtatgcgtattttatatcgttcggttagttggatttaggtttgggtttcgttttacgcgtttttagcgtcggaggttttaatttcgttttgattcggtaggcgggggttttttcgatattttttaggtttgggtggaggtattcgcggacgagaattcggaggggatttatttttcgagtgtcgtagtgtgaatttttattttagggtatgttaatatttttttagggtggcggttttcggttcgtttattaagggatttcgtacgggttttttgtaggtgttgtcgcga

SEQ ID NO: 812 - DNA, 636 bp, Artificial Sequence
  chemically treated genomic DNA (Homo sapiens) CpG-island No: 812
tcgcgacaacacctacaaaaaacccgtacgaaatcccttaataaacgaaccgaaaaccgccaccctaaaaaaatattaacataccctaaaataaaaattcacactacgacactcgaaaaataaatcccctccgaattctcgtccgcgaatacctccacccaaacctaaaaaatatcgaaaaaacccccgcctaccgaatcaaaacgaaattaaaacctccgacgctaaaaacgcgtaaaacgaaacccaaacctaaatccaactaaccgaacgatataaaatacgcatacgcaatatccgcttcgactctaaaaccgcgcgaacgacaacaaaaccgcgatacaatatccgacccgaaaattacgacctaaatcaccgaccccgccctccgaaaccgaacgctacgaaaaacccgaaaacgacaataaaaccgactcccaaaactccgaacgtatacgacgataaacgcccgacccgtaccccctccgcaccccgcaactccgactttaacgacccccaaacccgacgaaaccgtaaaatctcgacctcaaaaaccccccaaatccataatctcaaattcgaaccctcaaacctattcgatctccttttataccgtcccgaaaacccttctccacc

SEQ ID NO: 813 - DNA, 819 bp, Artificial Sequence
  chemically treated genomic DNA (Homo sapiens) CpG-island No: 813
  unsure (108, 175, 207, 279, 360, 423)
gggacggtcgcgtttatttgaatcgaattgtacgtataagcgcgtttttgattttaggtgtatatcgtggaggtttgaaacgagagttatgatcgcgacgcgttgaantaaattaagtcgttagtttttcgtttcgtttcggtttcggttttggcgaggtgcgtatgcgtagggntcgggagttaggatttcgcggtaggcgggcgncgttcgcgtcgtacggaagtttcgcgatgtttgcgtttgaattttttggcgggtgtcggttatggcggtttncgttttcgggatttgggagtcggttttttcgtatatatggggttgcggacggtaggagatagcggcggtcgggtcgggaangtcgcgtagtggttttcgtcgtaggatcggaggcgtttttttaatagtagcggtagtagcgancgttagtatcggcgatttttcgtagttcgacgattttgacgatttcgacgatttcgattttttcggtagttcggtgaggcggcggcggaggcgtttcggcggtcgagtgtttaaggatcggtttagtttgatcgtgattttaaagcgttggaagttgcgagttcgtttaagtttaatcgtgattttaagacgtttggggttgcgagttcggttttcgtagaagtgtagtatattttgcggttcgtttcgattttcgtttttttttagtcgcgatttcggtcgttttagttcggattttagcgtgtgcggttagtttagggacggcgacgagttgggtattagtgtttttttgtttagttttttggtttcgttttgtttcgggtttttaacgttaag

SEQ ID NO: 814 - DNA, 819 bp, Artificial Sequence
  chemically treated genomic DNA (Homo sapiens) CpG-island No: 814
  unsure (397, 460, 541, 613, 645, 712)
cttaacgttaaaaacccgaaacaaaacgaaaccaaaaaactaaacaaaaaaacactaatacccaactcgtcgccgtccctaaactaaccgcacacgctaaaatccgaactaaaacgaccgaaatcgcgactaaaaaaaaacgaaaatcgaaacgaaccgcaaaatatactacacttctacgaaaaccgaactcgcaaccccaaacgtcttaaaatcacgattaaacttaaacgaactcgcaacttccaacgctttaaaatcacgatcaaactaaaccgatccttaaacactcgaccgccgaaacgcctccgccgccgcctcaccgaactaccgaaaaaatcgaaatcgtcgaaatcgtcaaaatcgtcgaactacgaaaaatcgccgatactaacgntcgctactaccgctactattaaaaaaacgcctccgatcctacgacgaaaaccactacgcgacnttcccgacccgaccgccgctatctcctaccgtccgcaaccccatatatacgaaaaaaccgactcccaaatcccgaaaacgnaaaccgccataaccgacacccgccaaaaaattcaaacgcaaacatcgcgaaacttccgtacgacgcgaacgncgcccgcctaccgcgaaatcctaactcccganccctacgcatacgcacctcgccaaaaccgaaaccgaaacgaaacgaaaaactaacgacttaatttanttcaacgcgtcgcgatcataactctcgtttcaaacctccacgatatacacctaaaatcaaaaacgcgcttatacgtacaattcgattcaaataaacgcgaccgtccc

SEQ ID NO: 815 - DNA, 819 bp, Artificial Sequence
  chemically treated genomic DNA (Homo sapiens) CpG-island No: 815
  unsure (397, 460, 541, 613, 645, 712)
tttggcgttggggattcggggtagggcgaggttagagagttgaatagggaggtattgatgtttagttcgtcgtcgtttttgggttggtcgtatacgttgaggttcgggttgaggcggtcggagtcgcggttggggaagggcggaagtcggagcgggtcgtagggtgtgttgtatttttgcgggggtcgagttcgtagttttaggcgttttggggttacggttaggtttgggcgagttcgtagtttttagcgttttggggttacggttaggttgggtcggtttttgggtattcggtcgtcgggacgttttcgtcgtcgttttatcgggttgtcggggaagtcggggtcgtcgggatcgttaggatcgtcggattgcgaggggtcgtcgatgttggcgntcgttgttgtcgttgttgttgaagaaacgttttcggttttgcggcgggaattattgcgcggtnttttcggttcggtcgtcgttgttttttgtcgttcgtagttttatatgtgcggaaaagtcggtttttaggtttcgggagcgnaagtcgttatggtcggtattcgttaagaggtttaaacgtaaatatcgcgagattttcgtgcgacgcggacgncgttcgtttgtcgcggggttttagttttcggnttttgcgtatgcgtatttcgttagggtcggggtcgggacgggacggaaaattggcggtttggtttgntttagcgcgtcgcggttatggttttcgttttaggtttttacggtgtgtatttggagttaggagcgcgtttgtgcgtatagttcggtttaggtaagcgcggtcgtttt

SEQ ID NO: 816 - DNA, 819 bp, Artificial Sequence
  chemically treated genomic DNA (Homo sapiens) CpG-island No: 816
  unsure (108, 175, 207, 279, 360, 423)
aaaacgaccgcgcttacctaaaccgaactatacgcacaaacgcgctcctaactccaaatacacaccgtaaaaacctaaaacgaaaaccataaccgcgacgcgctaaancaaaccaaaccgccaattttccgtcccgtcccgaccccgaccctaacgaaatacgcatacgcaaaanccgaaaactaaaaccccgcgacaaacgaacgncgtccgcgtcgcacgaaaatctcgcgatatttacgtttaaacctcttaacgaataccgaccataacgacttncgctcccgaaacctaaaaaccgacttttccgcacatataaaactacgaacgacaaaaaacaacgacgaccgaaccgaaaanaccgcgcaataattcccgccgcaaaaccgaaaacgtttcttcaacaacaacgacaacaacgancgccaacatcgacgacccctcgcaatccgacgatcctaacgatcccgacgaccccgacttccccgacaacccgataaaacgacgacgaaaacgtcccgacgaccgaatacccaaaaaccgacccaacctaaccgtaaccccaaaacgctaaaaactacgaactcgcccaaacctaaccgtaaccccaaaacgcctaaaactacgaactcgacccccgcaaaaatacaacacaccctacgacccgctccgacttccgcccttccccaaccgcgactccgaccgcctcaacccgaacctcaacgtatacgaccaacccaaaaacgacgacgaactaaacatcaatacctccctattcaactctctaacctcgccctaccccgaatccccaacgccaaa

SEQ ID NO: 817 - DNA, 516 bp, Artificial Sequence
  chemically treated genomic DNA (Homo sapiens) CpG-island No: 817
  unsure (149, 155, 166)
tattcgttttgtttttttttcgtttttttaaaagttcgcggagaatttatacgattaggtacgttaggatggaggtttgtagtagtcggtatagtaggtttatttttttgtttttggcgatgatatatttttcggttttgtagtcgaantagcgnataggtagagntttttgtagttcgtttgttttatggcgcgtttttagtcgggtttgcggatcgttcggtttacgtgcgtttatggggagtattcggtttttcggtttttgcgcgttcggcgttcgtttcggttcgtttgcgttcgtttagttgtagttcggggtgttcggtagggttgcggggcgcgggggcgggtcggggcggttttttattgacgcggttgagaaagtttcggttgggagttgggcggcggcgagtatcggaattttagatcgcgattttgtcgttattttttttttttttttttttttttttttttttgatatagtgatatttttgtaatttattttttagttatcgg

SEQ ID NO: 818 - DNA, 516 bp, Artificial Sequence
  chemically treated genomic DNA (Homo sapiens) CpG-island No: 818
  unsure (351, 362, 368)
ccgataactaaaaaataaattacaaaaatatcactatatcaaaaaaaaaaaaaaaaaaaaaaaaaaaaaaaataacgacaaaatcgcgatctaaaattccgatactcgccgccgcccaactcccaaccgaaactttctcaaccgcgtcaataaaaaaccgccccgacccgcccccgcgccccgcaaccctaccgaacaccccgaactacaactaaacgaacgcaaacgaaccgaaacgaacgccgaacgcgcaaaaaccgaaaaaccgaatactccccataaacgcacgtaaaccgaacgatccgcaaacccgactaaaaacgcgccataaaacaaacgaactacaaaaanctctacctatncgctanttcgactacaaaaccgaaaaatatatcatcgccaaaaacaaaaaaataaacctactataccgactactacaaacctccatcctaacgtacctaatcgtataaattctccgcgaacttttaaaaaaacgaaaaaaaaacaaaacgaata

SEQ ID NO: 819 - DNA, 516 bp, Artificial Sequence
  chemically treated genomic DNA (Homo sapiens) CpG-island No: 819
  unsure (351, 362, 368)
tcggtggttggggagtaggttgtaggggtgttattgtgttaggggaggaggaggaggaggaggaagaagaggtagcggtaaggtcgcggtttgaggtttcggtgttcgtcgtcgtttagtttttagtcgaggtttttttaatcgcgttaataaaaggtcgtttcgattcgttttcgcgtttcgtagttttgtcggatatttcgggttgtagttgagcgggcgtagacgggtcgaggcgggcgtcgggcgcgtagggatcgagggatcgagtgttttttatgagcgtacgtgggtcgggcggttcgtaagttcggttgagagcgcgttatggggtaggcgggttgtaagggnttttgtttgtncgttgnttcgattataagatcgagaagtatgttatcgttaagaataagaaggtgggtttgttgtatcggttgttgtaggtttttattttggcgtatttggtcgtgtaagtttttcgcggatttttgggaaggcgggggaggggtagggcgggtg

SEQ ID NO: 820 - DNA, 516 bp, Artificial Sequence
  chemically treated genomic DNA (Homo sapiens) CpG-island No: 820
  unsure (149, 155, 166)
cacccgccctacccctcccccgccttcccaaaaatccgcgaaaaacttacacgaccaaatacgccaaaataaaaacctacaacaaccgatacaacaaacccaccttcttattcttaacgataacatacttctcgatcttataatcgaancaacgnacaaacaaaancccttacaacccgcctaccccataacgcgctctcaaccgaacttacgaaccgcccgacccacgtacgctcataaaaaacactcgatccctcgatccctacgcgcccgacgcccgcctcgacccgtctacgcccgctcaactacaacccgaaatatccgacaaaactacgaaacgcgaaaacgaatcgaaacgaccttttattaacgcgattaaaaaaacctcgactaaaaactaaacgacgacgaacaccgaaacctcaaaccgcgaccttaccgctacctcttcttcctcctcctcctcctcctcccctaacacaataacacccctacaacctactccccaaccaccga

SEQ ID NO: 821 - DNA, 525 bp, Artificial Sequence
  chemically treated genomic DNA (Homo sapiens) CpG-island No: 821
cgggtcggaaaataaagcgcgagttcggtcggtgggtttatttggttgtagaagatttcgggttgttggttgggggtaggtacggtttgggtggcggcggttgataagaggcggcggtttaggcggggttcgaagcgggcggtagcgcgtaatatcgtagcgggttagcggatagcgagcggatcgagagtagagttagggttttagggttattgagtcgatttcgtttttcgtttcgcgcggtagttaatggaaaggcgggggcgggtcgggggcggggttgtttttattatttttcgggatggggcgcgtagttgatgtaagcgaagcgggtggcgttaggtattttcggttcgtggttgttttttggttcgcgcgacgttttcgcgttcgttatcgtttttcgtttgtgcggaaagattcggtttcgcgaacgtagttcgttttggttgagtttttaatgtgtgtttttgattttaatgtgaataggttcgagttagggcgattttgattttttcggttgat

SEQ ID NO: 822 - DNA, 525 bp, Artificial Sequence
  chemically treated genomic DNA (Homo sapiens) CpG-island No: 822
atcaaccgaaaaaatcaaaatcgccctaactcgaacctattcacattaaaatcaaaaacacacattaaaaactcaaccaaaacgaactacgttcgcgaaaccgaatctttccgcacaaacgaaaaacgataacgaacgcgaaaacgtcgcgcgaaccaaaaaacaaccacgaaccgaaaatacctaacgccacccgcttcgcttacatcaactacgcgccccatcccgaaaaataataaaaacaaccccgcccccgacccgcccccgcctttccattaactaccgcgcgaaacgaaaaacgaaatcgactcaataaccctaaaaccctaactctactctcgatccgctcgctatccgctaacccgctacgatattacgcgctaccgcccgcttcgaaccccgcctaaaccgccgcctcttatcaaccgccgccacccaaaccgtacctacccccaaccaacaacccgaaatcttctacaaccaaataaacccaccgaccgaactcgcgctttattttccgacccg

SEQ ID NO: 823 - DNA, 525 bp, Artificial Sequence
  chemically treated genomic DNA (Homo sapiens) CpG-island No: 823
attagtcgggaaggttagggtcgttttggttcgggtttgtttatattggggttaaaggtatatattgggggtttaattaaggcgagttgcgttcgcggggtcgggttttttcgtataggcggagggcggtggcgggcgcggaggcgtcgcgcgagttagggggtagttacgggtcgggggtatttagcgttattcgtttcgtttgtattagttgcgcgttttatttcgaggaatggtagaggtagtttcgttttcggttcgttttcgtttttttattggttgtcgcgcggggcggggagcggggtcggtttagtggttttgagattttagttttgttttcggttcgttcgttgttcgttagttcgttgcgatgttgcgcgttgtcgttcgtttcgggtttcgtttgggtcgtcgttttttgttagtcgtcgttatttaggtcgtgtttgtttttaattagtagttcgaggttttttgtaattaggtgagtttatcggtcgggttcgcgttttgtttttcggttcg

SEQ ID NO: 824 - DNA, 525 bp, Artificial Sequence
  chemically treated genomic DNA (Homo sapiens) CpG-island No: 824
cgaaccgaaaaacaaaacgcgaacccgaccgataaactcacctaattacaaaaaacctcgaactactaattaaaaacaaacacgacctaaataacgacgactaacaaaaaacgacgacccaaacgaaacccgaaacgaacgacaacgcgcaacatcgcaacgaactaacgaacaacgaacgaaccgaaaacaaaactaaaatctcaaaaccactaaaccgaccccgctccccgccccgcgcgacaaccaataaaaaaacgaaaacgaaccgaaaacgaaactacctctaccattcctcgaaataaaacgcgcaactaatacaaacgaaacgaataacgctaaatacccccgacccgtaactaccccctaactcgcgcgacgcctccgcgcccgccaccgccctccgcctatacgaaaaaacccgaccccgcgaacgcaactcgccttaattaaacccccaatatatacctttaaccccaatataaacaaacccgaaccaaaacgaccctaaccttcccgactaat

SEQ ID NO: 825 - DNA, 710 bp, Artificial Sequence
  chemically treated genomic DNA (Homo sapiens) CpG-island No: 825
gagttagggatttcgcgtcgttagtcgaggtggattaggacgaggtttttggagtaagtagaggttaattcgcgattgtgcgaaaatttgtagtttagtttaagtgtggtattttagcgtaagtaatttttacgacgttttttcgtttcgatttttttaaaattgcgttcggaagagtagtgggtgatttttgttacgtcgtttaatcgttgtgcgcggttttgcgcgtatgcgtaaatcgtaggttagcgacggcggtcgggaggcggaagtggaggttgttgtggtttcgagggttgttcgaggagttgttgttgttgaggcggcggtaattgtattgaggtggtggcggcgttgtcggtttcgggtcgttcggtttttcggttcgttttttagtttcgtttgagttcgtcggggttcgcgtcggttagcgtttgttttatgagtgtgttattggttgttattcgattggagttcgcggaatattcgtttgttttcgtcggtttcggttttagcgtcgcgggtgagtttcgcggtttcgtcgtattttttgtagtcgggtttgggttcggagggtttttttttttaaagtattggttcgggaaaagttcgcggcgagggttgttgtttaggaagatacggagaggtaatcgggattttttttttttttattcgtttttgagaggttttttcgtttgttattttaggga

SEQ ID NO: 826 - DNA, 710 bp, Artificial Sequence
  chemically treated genomic DNA (Homo sapiens) CpG-island No: 826
tccctaaaataacaaacgaaaaaacctctcaaaaacgaataaaaaaaaaaaaaatcccgattacctctccgtatcttcctaaacaacaaccctcgccgcgaacttttcccgaaccaatactttaaaaaaaaaaaccctccgaacccaaacccgactacaaaaaatacgacgaaaccgcgaaactcacccgcgacgctaaaaccgaaaccgacgaaaacaaacgaatattccgcgaactccaatcgaataacaaccaataacacactcataaaacaaacgctaaccgacgcgaaccccgacgaactcaaacgaaactaaaaaacgaaccgaaaaaccgaacgacccgaaaccgacaacgccgccaccacctcaatacaattaccgccgcctcaacaacaacaactcctcgaacaaccctcgaaaccacaacaacctccacttccgcctcccgaccgccgtcgctaacctacgatttacgcatacgcgcaaaaccgcgcacaacgattaaacgacgtaacaaaaatcacccactactcttccgaacgcaattttaaaaaaatcgaaacgaaaaaacgtcgtaaaaattacttacgctaaaataccacacttaaactaaactacaaattttcgcacaatcgcgaattaacctctacttactccaaaaacctcgtcctaatccacctcgactaacgacgcgaaatccctaactc

SEQ ID NO: 827 - DNA, 710 bp, Artificial Sequence
  chemically treated genomic DNA (Homo sapiens) CpG-island No: 827
tttttgagataataaacgggaaggttttttaaaggcggatgggaaagagagggatttcgattattttttcgtgtttttttgggtaatagttttcgtcgcgggtttttttcgggttagtgttttgggaagggaagtttttcgggtttagattcggttatagggaatgcggcgaggtcgcgggatttattcgcggcgttgaagtcgaagtcggcggggataggcgagtgtttcgcgagttttaatcggataataattagtgatatatttatagggtaggcgttggtcggcgcgggtttcggcgggtttaggcgaggttggaaggcgagtcgagaggtcgagcggttcggggtcggtagcgtcgttattattttaatgtagttgtcgtcgttttagtagtagtagtttttcgaatagttttcggagttataataatttttattttcgtttttcggtcgtcgtcgttgatttgcggtttacgtatgcgcgtaggatcgcgtatagcgattgggcggcgtggtaggggttatttattgttttttcggacgtaattttgaggaggtcggagcggaaggacgtcgtggagattgtttgcgttggggtgttatatttaggttgagttgtaggttttcgtatagtcgcgagttaatttttgtttgttttagaggtttcgttttaatttatttcggttgacggcgcgggatttttggttt

SEQ ID NO: 828 - DNA, 710 bp, Artificial Sequence
  chemically treated genomic DNA (Homo sapiens) CpG-island No: 828
aaaccaaaaatcccgcgccgtcaaccgaaataaattaaaacgaaacctctaaaacaaacaaaaattaactcgcgactatacgaaaacctacaactcaacctaaatataacaccccaacgcaaacaatctccacgacgtccttccgctccgacctcctcaaaattacgtccgaaaaaacaataaataacccctaccacgccgcccaatcgctatacgcgatcctacgcgcatacgtaaaccgcaaatcaacgacgacgaccgaaaaacgaaaataaaaattattataactccgaaaactattcgaaaaactactactactaaaacgacgacaactacattaaaataataacgacgctaccgaccccgaaccgctcgacctctcgactcgccttccaacctcgcctaaacccgccgaaacccgcgccgaccaacgcctaccctataaatatatcactaattattatccgattaaaactcgcgaaacactcgcctatccccgccgacttcgacttcaacgccgcgaataaatcccgcgacctcgccgcattccctataaccgaatctaaacccgaaaaacttcccttcccaaaacactaacccgaaaaaaacccgcgacgaaaactattacccaaaaaaacacgaaaaaataatcgaaatccctctctttcccatccgcctttaaaaaaccttcccgtttattatctcaaaaa

SEQ ID NO: 829 - DNA, 816 bp, Artificial Sequence
  chemically treated genomic DNA (Homo sapiens) CpG-island No: 829
gtcggtttcggggatcgtagagataggcgttaggtacgggttttaggtagttttttgtttttttttggtttttttgacgtcgtagtggcgttcgtattttcgtcgttcgagttcggtttttgtcggggtagtcggagttttttcgcgcgcgtattcggttcgttatcgttagcgttcggttttcgcgtcgtttcgggtttagtcggtcgagttgtcggtttttatacgttcggggacggcggttcgcgtgtaggtagcgacgtaggcgaaggcgggcgtacgtttattcgtagttttttgtttcgggggtcgttgtcgcggtttaagttgggtttcggggtagtcggagcgtttcgtgcgtcggtttcgcgcgggttcgttagtttttgaagttgtcggggtttagtagcgtgcggggcggggatagtcgcgtcgttcgtttcggtttgcgtgtgttcggcggagttgataggagttttggtcgtcgcggttttcgttcggtttttttcgggttcgttcgttgggttgtagtgcgtagtcgtattagttcgggtcgggtttggttagttgcggaattttaggagggacgcgcgattgaattttttcggaattttatttgagtaagcgtatgatcgggtagtggtcgaaacgttcgttttcgtttcggtagacgcgtagcggggtgcgtttttcgcggttttattcggtttcggtttaggtagttttaggtttttgtcgttgcgtttttcgggtaaaggggtgttgttttttgtcggtatagcgtatttttcgagtttttttttttttcgtgtttgt

SEQ ID NO: 830 - DNA, 816 bp, Artificial Sequence
  chemically treated genomic DNA (Homo sapiens) CpG-island No: 830
acaaacacgaaaaaaaaaaaaactcgaaaaatacgctataccgacaaaaaacaacacccctttacccgaaaaacgcaacgacaaaaacctaaaactacctaaaccgaaaccgaataaaaccgcgaaaaacgcaccccgctacgcgtctaccgaaacgaaaacgaacgtttcgaccactacccgatcatacgcttactcaaataaaattccgaaaaaattcaatcgcgcgtccctcctaaaattccgcaactaaccaaacccgacccgaactaatacgactacgcactacaacccaacgaacgaacccgaaaaaaaccgaacgaaaaccgcgacgaccaaaactcctatcaactccgccgaacacacgcaaaccgaaacgaacgacgcgactatccccgccccgcacgctactaaaccccgacaacttcaaaaactaacgaacccgcgcgaaaccgacgcacgaaacgctccgactaccccgaaacccaacttaaaccgcgacaacgacccccgaaacaaaaaactacgaataaacgtacgcccgccttcgcctacgtcgctacctacacgcgaaccgccgtccccgaacgtataaaaaccgacaactcgaccgactaaacccgaaacgacgcgaaaaccgaacgctaacgataacgaaccgaatacgcgcgcgaaaaaactccgactaccccgacaaaaaccgaactcgaacgacgaaaatacgaacgccactacgacgtcaaaaaaaccaaaaaaaaacaaaaaactacctaaaacccgtacctaacgcctatctctacgatccccgaaaccgac

SEQ ID NO: 831 - DNA, 816 bp, Artificial Sequence
  chemically treated genomic DNA (Homo sapiens) CpG-island No: 831
gtaggtacggaaaggaaagggattcgaggaatgcgttgtatcgataggaggtagtatttttttgttcgaggggcgtaacgatagagatttaaggttatttgggtcggagtcgggtgaggtcgcggagaacgtatttcgttacgcgtttgtcgagacggaggcgggcgtttcgattattgttcgattatgcgtttatttaagtaggatttcgaaaaaatttagtcgcgcgttttttttaaggtttcgtagttggttaggttcggttcgggttggtgcggttgcgtattgtagtttagcggacgggttcgggaggagtcgggcggggatcgcggcggttagagtttttgttagtttcgtcgggtatacgtaggtcggggcgggcggcgcggttgttttcgtttcgtacgttgttgggtttcggtagttttagaggttggcggattcgcgcggggtcggcgtacggagcgtttcggttgtttcggggtttagtttggatcgcggtagcggttttcggagtaaggggttacgggtgagcgtgcgttcgttttcgtttgcgtcgttgtttgtacgcgggtcgtcgttttcgggcgtgtgagagtcggtagttcggtcgattgggttcggagcggcgcggaggtcgggcgttgacggtaacgggtcgggtgcgcgcgcgggagggtttcggttgtttcgatagaggtcgggttcgggcggcgggagtgcgagcgttattgcggcgttagaggggttaggaagggataggaggttgtttgaggttcgtatttggcgtttgtttttgcggttttcggggtcgat

SEQ ID NO: 832 - DNA, 816 bp, Artificial Sequence
  chemically treated genomic DNA (Homo sapiens) CpG-island No: 832
atcgaccccgaaaaccgcaaaaacaaacgccaaatacgaacctcaaacaacctcctatcccttcctaacccctctaacgccgcaataacgctcgcactcccgccgcccgaacccgacctctatcgaaacaaccgaaaccctcccgcgcgcgcacccgacccgttaccgtcaacgcccgacctccgcgccgctccgaacccaatcgaccgaactaccgactctcacacgcccgaaaacgacgacccgcgtacaaacaacgacgcaaacgaaaacgaacgcacgctcacccgtaaccccttactccgaaaaccgctaccgcgatccaaactaaaccccgaaacaaccgaaacgctccgtacgccgaccccgcgcgaatccgccaacctctaaaactaccgaaacccaacaacgtacgaaacgaaaacaaccgcgccgcccgccccgacctacgtatacccgacgaaactaacaaaaactctaaccgccgcgatccccgcccgactcctcccgaacccgtccgctaaactacaatacgcaaccgcaccaacccgaaccgaacctaaccaactacgaaaccttaaaaaaaacgcgcgactaaattttttcgaaatcctacttaaataaacgcataatcgaacaataatcgaaacgcccgcctccgtctcgacaaacgcgtaacgaaatacgttctccgcgacctcacccgactccgacccaaataaccttaaatctctatcgttacgcccctcgaacaaaaaaatactacctcctatcgatacaacgcattcctcgaatccctttcctttccgtacctac

SEQ ID NO: 833 - DNA, 556 bp, Artificial Sequence
  chemically treated genomic DNA (Homo sapiens) CpG-island No: 833
tacgcgaattatattgtttagaaggcgtcgcgtcgtgagtcgcgatgtttggttaatgaaaagaggtttattcgagagtgcgacgcgtaatgggcgggattttcggcgttttttttcggcggttgttttcgttgtttttaagagaatttagtttgtcggaagttggttgttcgttgcggcgattagtttcggaaagcgcggtggggacgcgttgtgttttcgtagtttagaggcgggtttgaggttcggtggcggcgtttagggtggttcgggtttttttttcggtcgttgttttatcgttataggtttcgatggcggcggttacgttgagggatttcgtttaggtgagcgtcgcgttttttcggtttttttcgaattttaaagttttgtgagggtcgtttgtttaggttttcgggtgtagaattgtggggcgttcgtgggcggcgtttcgtttttgatacgtagtgtgatggggtggtaatggagggtaaggggttcggttcgtaaagatgtgaggcgtatttagcgagtttcgaatttgaggttttttggtgtt

SEQ ID NO: 834 - DNA, 556 bp, Artificial Sequence
  chemically treated genomic DNA (Homo sapiens) CpG-island No: 834
aacaccaaaaaacctcaaattcgaaactcgctaaatacgcctcacatctttacgaaccgaaccccttaccctccattaccaccccatcacactacgtatcaaaaacgaaacgccgcccacgaacgccccacaattctacacccgaaaacctaaacaaacgaccctcacaaaactttaaaattcgaaaaaaaccgaaaaaacgcgacgctcacctaaacgaaatccctcaacgtaaccgccgccatcgaaacctataacgataaaacaacgaccgaaaaaaaaacccgaaccaccctaaacgccgccaccgaacctcaaacccgcctctaaactacgaaaacacaacgcgtccccaccgcgctttccgaaactaatcgccgcaacgaacaaccaacttccgacaaactaaattctcttaaaaacaacgaaaacaaccgccgaaaaaaaacgccgaaaatcccgcccattacgcgtcgcactctcgaataaacctcttttcattaaccaaacatcgcgactcacgacgcgacgccttctaaacaatataattcgcgta

SEQ ID NO: 835 - DNA, 556 bp, Artificial Sequence
  chemically treated genomic DNA (Homo sapiens) CpG-island No: 835
gatattaggaggttttaggttcgggattcgttgaatgcgttttatatttttgcgagtcgggttttttgttttttattgttattttattatattgcgtgttagaaacgggacgtcgtttacgaacgttttatagttttgtattcggggatttgagtaggcggtttttatagggttttaggattcgggggaggtcgggaggacgcggcgtttatttgagcggggttttttagcgtggtcgtcgttatcggagtttgtggcggtgagataacgatcgaggaaagggttcgggttattttgggcgtcgttatcgagttttagattcgtttttgagttgcgagaatatagcgcgtttttatcgcgtttttcggagttggtcgtcgtagcgaataattagttttcggtaagttgagtttttttgagggtagcgaaagtaatcgtcgaggggagacgtcggaagtttcgtttattgcgcgtcgtattttcgggtagatttttttttattggttaagtatcgcggtttacggcgcggcgttttttgggtagtgtagttcgcgtg

SEQ ID NO: 836 - DNA, 556 bp, Artificial Sequence
  chemically treated genomic DNA (Homo sapiens) CpG-island No: 836
cacgcgaactacactacccaaaaaacgccgcgccgtaaaccgcgatacttaaccaataaaaaaaaatctacccgaaaatacgacgcgcaataaacgaaacttccgacgtctcccctcgacgattactttcgctaccctcaaaaaaactcaacttaccgaaaactaattattcgctacgacgaccaactccgaaaaacgcgataaaaacgcgctatattctcgcaactcaaaaacgaatctaaaactcgataacgacgcccaaaataacccgaaccctttcctcgatcgttatctcaccgccacaaactccgataacgacgaccacgctaaaaaaccccgctcaaataaacgccgcgtcctcccgacctcccccgaatcctaaaaccctataaaaaccgcctactcaaatccccgaatacaaaactataaaacgttcgtaaacgacgtcccgtttctaacacgcaatataataaaataacaataaaaaacaaaaaacccgactcgcaaaaatataaaacgcattcaacgaatcccgaacctaaaacctcctaatatc

SEQ ID NO: 837 - DNA, 556 bp, Artificial Sequence
  chemically treated genomic DNA (Homo sapiens) CpG-island No: 837
gtcggttttttcgtttgttacgtttttttatatttcgttatacgtagtgttaaaaaaagggttttatttacgaacgttttagtgttttcgattttgggtagcggggattcgagtaggcgttttttattgatggttttagaacgtgggtgggggaaggtgtgtgaggacgggaagacgtcgtatttatttgagttggcgtttttagagtggtcgttgttattagattttgcgggtagagttgggtcgggagcgacgggcgatattggtagggattcggggatagcggtttttattttaggtttgacgtgggttttttagggcggcgtcgttaaggtttagacgttttcgtgtaggagggacgacgattttttttacgttttcgtggttttaattcggcgttttgttatttttgattcggtgaatatattttagagaagttaaaatggtcgttacgaagaggtttttttaaaagtttcgttttttttttttgtgatttttaaggaaagtcggttttttgagtttttattggtttagtagcgtggcgtttaacgtagag

SEQ ID NO: 838 - DNA, 556 bp, Artificial Sequence
  chemically treated genomic DNA (Homo sapiens) CpG-island No: 838
ctctacgttaaacgccacgctactaaaccaataaaaactcaaaaaaccgactttccttaaaaatcacaaaaaaaaaaaacgaaacttttaaaaaaacctcttcgtaacgaccattttaacttctctaaaatatattcaccgaatcaaaaataacaaaacgccgaattaaaaccacgaaaacgtaaaaaaaatcgtcgtccctcctacacgaaaacgtctaaaccttaacgacgccgccctaaaaaacccacgtcaaacctaaaataaaaaccgctatccccgaatccctaccaatatcgcccgtcgctcccgacccaactctacccgcaaaatctaataacaacgaccactctaaaaacgccaactcaaataaatacgacgtcttcccgtcctcacacaccttcccccacccacgttctaaaaccatcaataaaaaacgcctactcgaatccccgctacccaaaatcgaaaacactaaaacgttcgtaaataaaaccctttttttaacactacgtataacgaaatataaaaaaacgtaacaaacgaaaaaaccgac

SEQ ID NO: 839 - DNA, 556 bp, Artificial Sequence
  chemically treated genomic DNA (Homo sapiens) CpG-island No: 839
ttttgcgttgaacgttacgttattaagttagtaagagtttagaaaatcgattttttttgagagttataaaaagaaaggacgggatttttgggggggttttttcgtggcggttattttagtttttttgaggtgtgtttatcggattagagatagtagagcgtcgagttggggttacgaaggcgtgaggggagtcgtcgttttttttgtacgaaagcgtttaagttttggcgacgtcgttttgggggatttacgttaggtttgggatagggatcgttgttttcgggtttttattaatgtcgttcgtcgttttcggtttagttttattcgtagagtttgatggtagcggttattttgaggacgttaatttaggtgagtgcggcgttttttcgtttttatatatttttttttatttacgttttaaagttattagtgaggggcgtttgttcgagttttcgttgtttagggtcggggatattgaggcgttcgtgggtggggttttttttttgatattgcgtgtgacgaggtgtgggagagcgtgataggcggaggaatcggt

SEQ ID NO: 840 - DNA, 556 bp, Artificial Sequence
  chemically treated genomic DNA (Homo sapiens) CpG-island No: 840
accgattcctccgcctatcacgctctcccacacctcgtcacacgcaatatcaaaaaaaaaaccccacccacgaacgcctcaatatccccgaccctaaacaacgaaaactcgaacaaacgcccctcactaataactttaaaacgtaaataaaaaaaaatatataaaaacgaaaaaacgccgcactcacctaaattaacgtcctcaaaataaccgctaccatcaaactctacgaataaaactaaaccgaaaacgacgaacgacattaataaaaacccgaaaacaacgatccctatcccaaacctaacgtaaatcccccaaaacgacgtcgccaaaacttaaacgctttcgtacaaaaaaaacgacgactcccctcacgccttcgtaaccccaactcgacgctctactatctctaatccgataaacacacctcaaaaaaactaaaataaccgccacgaaaaaacccccccaaaaatcccgtcctttctttttataactctcaaaaaaaatcgattttctaaactcttactaacttaataacgtaacgttcaacgcaaaa

SEQ ID NO: 841 - DNA, 990 bp, Artificial Sequence
  chemically treated genomic DNA (Homo sapiens) CpG-island No: 841
tgacgcgggcgtcgggggggtaggtcgcgaggtcggggtttttatggcgtaggagtacgggggttttcgaggattacgcgggtttgggaatcgtttgttaggttaggtcggacgacgtacgtgtttcgagttgggtcgagggggcggggttgagggtcgcggtcgggttacgggtcggggaggagtcgcggacggtgggcggggttagtgggtcggggtttaaaaggcggcgcgggcggggtttttgacgtagttgcgggcggcgggcggcgagcggcgcgtataattttcgttcggttgcggttttcgggtgttttaggttcggtcggtaagtagagtatggcgggtgcgggttcgaagcggcgcgcgttagcggtttcggtggtcgaggagaaggaagaggcgcgggagaagatgatggtcgttaagcgcgcggacggcgcggcgtcggtaggcgagggcgagggcgtgattttgtaggggaatattacgttatttaagggcgtggtcgttatcgtggtcgttattatgagttcgggtattttcgtgacgtttacgggcgtgtttaaggaggtaggttcgtcggggttggcgttggtggtgtgggtcgcgtgcggcgttttttttatcgtgggcgcgttttgttacgcggagttgggtattattatttttaaatcgggcggcgattacgtttatatgttggacgtttacggttcgttgttcgttttttttaagttttggatcgagttgtttattattcggtttttatcgtagtatatcgtggttttggttttcgttatttatttgtttaagtcgtttttttttatttgttcggtgttcgaggaggtagttaagttcgtagtttgttatttcgtgcgtgagtacggggcgcgggtcgggggttgggaggtcgtagtttttgggtttttgtatttttgtattattacgtttttggtttttatatttttatatttttgcgtttttggatcg

SEQ ID NO: 842 - DNA, 990 bp, Artificial Sequence
  chemically treated genomic DNA (Homo sapiens) CpG-island No: 842
cgatccaaaaacgcaaaaatataaaaatataaaaaccaaaaacgtaataatacaaaaatacaaaaacccaaaaactacgacctcccaacccccgacccgcgccccgtactcacgcacgaaataacaaactacgaacttaactacctcctcgaacaccgaacaaataaaaaaaaacgacttaaacaaataaataacgaaaaccaaaaccacgatatactacgataaaaaccgaataataaacaactcgatccaaaacttaaaaaaaacgaacaacgaaccgtaaacgtccaacatataaacgtaatcgccgcccgatttaaaaataataatacccaactccgcgtaacaaaacgcgcccacgataaaaaaaacgccgcacgcgacccacaccaccaacgccaaccccgacgaacctacctccttaaacacgcccgtaaacgtcacgaaaatacccgaactcataataacgaccacgataacgaccacgcccttaaataacgtaatattcccctacaaaatcacgccctcgccctcgcctaccgacgccgcgccgtccgcgcgcttaacgaccatcatcttctcccgcgcctcttccttctcctcgaccaccgaaaccgctaacgcgcgccgcttcgaacccgcacccgccatactctacttaccgaccgaacctaaaacacccgaaaaccgcaaccgaacgaaaattatacgcgccgctcgccgcccgccgcccgcaactacgtcaaaaaccccgcccgcgccgccttttaaaccccgacccactaaccccgcccaccgtccgcgactcctccccgacccgtaacccgaccgcgaccctcaaccccgccccctcgacccaactcgaaacacgtacgtcgtccgacctaacctaacaaacgattcccaaacccgcgtaatcctcgaaaacccccgtactcctacgccataaaaaccccgacctcgcgacctacccccccgacgcccgcgtca

SEQ ID NO: 843 - DNA, 990 bp, Artificial Sequence
  chemically treated genomic DNA (Homo sapiens) CpG-island No: 843
cggtttaggaacgtaaaaatgtagagatgtgggagttaggggcgtagtgatgtaaggatgtagggatttagggattacgattttttaattttcggttcgcgtttcgtatttacgtacggagtggtaggttacgagtttggttgttttttcgggtatcgggtaggtggggaagagcggtttgagtaggtaggtggcgaagattagggttacgatgtattgcgatgaaggtcggatgatgagtagttcgatttagagtttgaggaaggcgggtagcgagtcgtagacgtttagtatgtaggcgtagtcgtcgttcgatttggagatggtggtgtttagtttcgcgtagtagagcgcgtttacgatggagaagacgtcgtacgcggtttatattattagcgttagtttcggcgagtttgtttttttgagtacgttcgtgggcgttacgaagatgttcgagtttatgatggcgattacgatgacggttacgtttttgagtagcgtgatgtttttttgtagggttacgttttcgttttcgtttgtcggcgtcgcgtcgttcgcgcgtttggcggttattattttttttcgcgtttttttttttttttcggttatcggggtcgttagcgcgcgtcgtttcgggttcgtattcgttatgttttgtttatcggtcgggtttgggatattcgggagtcgtagtcgagcgaggattgtgcgcgtcgttcgtcgttcgtcgttcgtagttgcgttaggaatttcgttcgcgtcgttttttaggtttcggtttattggtttcgtttatcgttcgcggttttttttcgattcgtggttcggtcgcggtttttagtttcgttttttcgatttagttcggagtacgtgcgtcgttcggtttagtttggtaggcgatttttaggttcgcgtggttttcgaaggttttcgtatttttgcgttatggagatttcggtttcgcgatttattttttcggcgttcgcgtta

SEQ ID NO: 844 - DNA, 990 bp, Artificial Sequence
  chemically treated genomic DNA (Homo sapiens) CpG-island No: 844
taacgcgaacgccgaaaaaataaatcgcgaaaccgaaatctccataacgcaaaaatacgaaaaccttcgaaaaccacgcgaacctaaaaatcgcctaccaaactaaaccgaacgacgcacgtactccgaactaaatcgaaaaaacgaaactaaaaaccgcgaccgaaccacgaatcgaaaaaaaaccgcgaacgataaacgaaaccaataaaccgaaacctaaaaaacgacgcgaacgaaattcctaacgcaactacgaacgacgaacgacgaacgacgcgcacaatcctcgctcgactacgactcccgaatatcccaaacccgaccgataaacaaaacataacgaatacgaacccgaaacgacgcgcgctaacgaccccgataaccgaaaaaaaaaaaaaaacgcgaaaaaaaataataaccgccaaacgcgcgaacgacgcgacgccgacaaacgaaaacgaaaacgtaaccctacaaaaaaacatcacgctactcaaaaacgtaaccgtcatcgtaatcgccatcataaactcgaacatcttcgtaacgcccacgaacgtactcaaaaaaacaaactcgccgaaactaacgctaataatataaaccgcgtacgacgtcttctccatcgtaaacgcgctctactacgcgaaactaaacaccaccatctccaaatcgaacgacgactacgcctacatactaaacgtctacgactcgctacccgccttcctcaaactctaaatcgaactactcatcatccgaccttcatcgcaatacatcgtaaccctaatcttcgccacctacctactcaaaccgctcttccccacctacccgatacccgaaaaaacaaccaaactcgtaacctaccactccgtacgtaaatacgaaacgcgaaccgaaaattaaaaaatcgtaatccctaaatccctacatccttacatcactacgcccctaactcccacatctctacatttttacgttcctaaaccg

SEQ ID NO: 845 - DNA, 854 bp, Artificial Sequence
  chemically treated genomic DNA (Homo sapiens) CpG-island No: 845
cgttttaggattcgttatcgttacgtttagattttttcgtcgtttaagagtttggggtcgtggggggcggggcggtttgttatcggtttcgtttcgtcgataggattcgttttttttcgtaggtacggcggggtcgatttcgtttttcgtttttagtatgtcgtgcgatagcggcggcgcggcgagcggagtcgggaggcggggaagtagtggtcgtgtgagcgtgaggagttgtcgttatcgtttgtttttcgtcgttttttttttcgggggtttcggcgacgtgggtcgcgtagggttttggaagagacgtcgttttttttttattcgttttttttttatcgcgtcgttttcgttttttcgttttgtgttgcgggtttaggcggaattcgaaacggtcgtttttttttttcgttcgtcgtcgtttttttttttttttttttttcggttttttttttagtttcgggtcggagcggggtgttggcggcggtcggttcgggtggcgattcgcgtttttttgggcggcggcgtttggttatatcgtgtcggggaaggtaatgagtcgtagagtttcggggtttcggttgagcggcggcggcggcggcggcggcggcggcggtattaacggtattaattattcgcggagttggaatgattggtaatttaggtgggtgatcggttcgggatttcgtttcgatttttcgggtttcgtttcgggcgggcggaggtttagggtcgcggggttgggaggcgcggtttaggttttttattttcgggagtcgggcgcggttttttgggtttttttcgtttcggttgggggaggaaggtcgcggggaggcgaggtttaagtgttt

SEQ ID NO: 846 - DNA, 854 bp, Artificial Sequence
  chemically treated genomic DNA (Homo sapiens) CpG-island No: 846
aaacacttaaacctcgcctccccgcgaccttcctcccccaaccgaaacgaaaaaaacccaaaaaaccgcgcccgactcccgaaaataaaaaacctaaaccgcgcctcccaaccccgcgaccctaaacctccgcccgcccgaaacgaaacccgaaaaatcgaaacgaaatcccgaaccgatcacccacctaaattaccaatcattccaactccgcgaataattaataccgttaataccgccgccgccgccgccgccgccgccgccgctcaaccgaaaccccgaaactctacgactcattaccttccccgacacgatataaccaaacgccgccgcccaaaaaaacgcgaatcgccacccgaaccgaccgccgccaacaccccgctccgacccgaaactaaaaaaaaaaccgaaaaaaaaaaaaaaaaaaaaacgacgacgaacgaaaaaaaaaaacgaccgtttcgaattccgcctaaacccgcaacacaaaacgaaaaaacgaaaacgacgcgataaaaaaaaaacgaataaaaaaaaaacgacgtctcttccaaaaccctacgcgacccacgtcgccgaaacccccgaaaaaaaaaacgacgaaaaacaaacgataacgacaactcctcacgctcacacgaccactacttccccgcctcccgactccgctcgccgcgccgccgctatcgcacgacatactaaaaacgaaaaacgaaatcgaccccgccgtacctacgaaaaaaaacgaatcctatcgacgaaacgaaaccgataacaaaccgccccgccccccacgaccccaaactcttaaacgacgaaaaaatctaaacgtaacgataacgaatcctaaaacg

SEQ ID NO: 847 - DNA, 854 bp, Artificial Sequence
  chemically treated genomic DNA (Homo sapiens) CpG-island No: 847
aggtatttaggtttcgttttttcgcggttttttttttttagtcggggcggaggagatttaggaagtcgcgttcggttttcgggggtggagggtttaggtcgcgttttttagtttcgcggttttaggttttcgttcgttcgaggcggagttcgggaggtcggggcggggtttcgggtcggttatttatttgggttgttagttattttagtttcgcgaatagttggtgtcgttggtgtcgtcgtcgtcgtcgtcgtcgtcgtcgtcgtttagtcgagatttcggggttttgcggtttattatttttttcgatacgatatggttaagcgtcgtcgtttagagaagcgcgagtcgttattcgaatcggtcgtcgttaatatttcgtttcggttcggggttgagaaggaagtcgagaaggaggaggaggaggaggcggcggcgggcgggggaagaggacgatcgtttcgggtttcgtttgagttcgtagtataggacgaggaggcgggagcggcgcggtgagagagaggcggatgaaggggaggcgacgttttttttagggttttgcgcggtttacgtcgtcggggttttcgaggaggaggacgacgaggaataggcggtggcggtagttttttacgtttatacggttattgttttttcgtttttcggtttcgttcgtcgcgtcgtcgttgtcgtacggtatgttgggagcgagaggcggggtcggtttcgtcgtgtttgcggagagaggcgggttttgtcggcggggcggggtcgatagtaggtcgtttcgttttttacggttttaggtttttggacggcgaagaggtttgggcgtagcggtgacgaattttaagacg

SEQ ID NO: 848 - DNA, 854 bp, Artificial Sequence
  chemically treated genomic DNA (Homo sapiens) CpG-island No: 848
cgtcttaaaattcgtcaccgctacgcccaaacctcttcgccgtccaaaaacctaaaaccgtaaaaaacgaaacgacctactatcgaccccgccccgccgacaaaacccgcctctctccgcaaacacgacgaaaccgaccccgcctctcgctcccaacataccgtacgacaacgacgacgcgacgaacgaaaccgaaaaacgaaaaaacaataaccgtataaacgtaaaaaactaccgccaccgcctattcctcgtcgtcctcctcctcgaaaaccccgacgacgtaaaccgcgcaaaaccctaaaaaaaacgtcgcctccccttcatccgcctctctctcaccgcgccgctcccgcctcctcgtcctatactacgaactcaaacgaaacccgaaacgatcgtcctcttcccccgcccgccgccgcctcctcctcctcctccttctcgacttccttctcaaccccgaaccgaaacgaaatattaacgacgaccgattcgaataacgactcgcgcttctctaaacgacgacgcttaaccatatcgtatcgaaaaaaataataaaccgcaaaaccccgaaatctcgactaaacgacgacgacgacgacgacgacgacgacgacaccaacgacaccaactattcgcgaaactaaaataactaacaacccaaataaataaccgacccgaaaccccgccccgacctcccgaactccgcctcgaacgaacgaaaacctaaaaccgcgaaactaaaaaacgcgacctaaaccctccacccccgaaaaccgaacgcgacttcctaaatctcctccgccccgactaaaaaaaaaaaaccgcgaaaaaacgaaacctaaatacct

SEQ ID NO: 849 - DNA, 1190 bp, Artificial Sequence
  chemically treated genomic DNA (Homo sapiens) CpG-island No: 849
gagcggaaagtagcgcgcgttttttcgatcggtagcgggggtgggcgttttttcggggcgcgggagcgtttttaaagtcgcggggcgttcgtagcgggtaggagttttgttttgtatttttttacggcggggcgtttcgtacgtttttttatgttggttttcggtttcggaacggcgcgcgttttttgtttcggaacgtcgtttttagttaggcggagcgttgggagttgggtttaggcggcgggaggagggcgaacgggttcggggttcgggtttcgatggtcgcgtcgtttcgggggagtcggagtcgagttggtcgtcgttcgcgcgtatttattaagttcgttgagttttttttcgtacgagtattagatgtcggtgtggaaatttttgaagaggaagcggtcgtcgtcggttttttagttgtagagcgcgtcgttaggggggtcgtttttcgaggcggtggcggcggcggcggcggcggcgggggcggcggtgtcgttggtcgtggcgttggcgttcgagttggggtagttggcgcgttcgttttggtcgtagttcggtttggggattcgttgcgtgttttggtattagtgcgtggtgaggaaagcggtggtggcgaatagtagcgttagtaggtttagggttacggttaggagcgttcggtcgcggcggttagtttttatgtcgttcgcgtcgtcgggacgggattgtatcgtcggggagtttcgcgcgcgaagttggtagttggcgtttcgcgttagcggtcgttgttcgtcgcgtttcggggttcgggtgtttgagatcggcggcggcggacgcggcgcgggtttatgttttttttaatttcggggtgggggcgcggcgcggggggcgtgcggggcgggttggcggggcgggcggcggtggaggagcggttacggcgcgttcggagttcggagcgcgagtgtatttcggttaggagtcgttggcgtttggtagcggttacggcgtagggacgcgcgttttttcgtggggagatatttgtaggcggtcggcgatattgtttcggagttcgttcgtacggggagagggggtcgttacgtcgggcgcgggcgggggtttgggagtggagggacgttttcgaaagaaattcgagttagggtgagggtttgagacgtaaggagaattttaggtaaggcgtttttgag

SEQ ID NO: 850 - DNA, 1190 bp, Artificial Sequence
  chemically treated genomic DNA (Homo sapiens) CpG-island No: 850
ctcaaaaacgccttacctaaaattctccttacgtctcaaaccctcaccctaactcgaatttctttcgaaaacgtccctccactcccaaacccccgcccgcgcccgacgtaacgaccccctctccccgtacgaacgaactccgaaacaatatcgccgaccgcctacaaatatctccccacgaaaaaacgcgcgtccctacgccgtaaccgctaccaaacgccaacgactcctaaccgaaatacactcgcgctccgaactccgaacgcgccgtaaccgctcctccaccgccgcccgccccgccaacccgccccgcacgccccccgcgccgcgcccccaccccgaaattaaaaaaaacataaacccgcgccgcgtccgccgccgccgatctcaaacacccgaaccccgaaacgcgacgaacaacgaccgctaacgcgaaacgccaactaccaacttcgcgcgcgaaactccccgacgatacaatcccgtcccgacgacgcgaacgacataaaaactaaccgccgcgaccgaacgctcctaaccgtaaccctaaacctactaacgctactattcgccaccaccgctttcctcaccacgcactaataccaaaacacgcaacgaatccccaaaccgaactacgaccaaaacgaacgcgccaactaccccaactcgaacgccaacgccacgaccaacgacaccgccgcccccgccgccgccgccgccgccgccaccgcctcgaaaaacgacccccctaacgacgcgctctacaactaaaaaaccgacgacgaccgcttcctcttcaaaaatttccacaccgacatctaatactcgtacgaaaaaaaactcaacgaacttaataaatacgcgcgaacgacgaccaactcgactccgactcccccgaaacgacgcgaccatcgaaacccgaaccccgaacccgttcgccctcctcccgccgcctaaacccaactcccaacgctccgcctaactaaaaacgacgttccgaaacaaaaaacgcgcgccgttccgaaaccgaaaaccaacataaaaaaacgtacgaaacgccccgccgtaaaaaaatacaaaacaaaactcctacccgctacgaacgccccgcgactttaaaaacgctcccgcgccccgaaaaaacgcccacccccgctaccgatcgaaaaaacgcgcgctactttccgctc

SEQ ID NO: 851 - DNA, 1190 bp, Artificial Sequence
  chemically treated genomic DNA (Homo sapiens) CpG-island No: 851
tttaggagcgttttgtttgggattttttttgcgttttagatttttattttggttcggatttttttcgggggcgtttttttatttttaggttttcgttcgcgttcggcgtggcggtttttttttttcgtgcgggcgggtttcggaatagtgtcgtcggtcgtttgtaggtgtttttttacggaggggcgcgcgtttttgcgtcgtggtcgttgttaggcgttagcggtttttagtcgaggtgtattcgcgtttcgggtttcgggcgcgtcgtagtcgtttttttatcgtcgttcgtttcgttagttcgtttcgtacgtttttcgcgtcgcgtttttatttcggggttggggggggtatgggttcgcgtcgcgttcgtcgtcgtcgattttaggtattcgagtttcggggcgcggcgggtagcggtcgttgacgcggggcgttagttgttaatttcgcgcgcggagtttttcggcggtgtagtttcgtttcggcggcgcgggcggtatgaagattagtcgtcgcggtcgagcgtttttggtcgtggttttgaatttgttggcgttgttgttcgttattatcgttttttttattacgtattggtgttagggtacgtagcgggtttttaagtcgggttgcggttagggcgggcgcgttaattgttttaattcgggcgttaacgttacggttaacggtatcgtcgttttcgtcgtcgtcgtcgtcgtcgttatcgtttcggggaacggtttttttggcggcgcgttttatagttgggagatcggcgacgatcgttttttttttaggaatttttatatcggtatttggtattcgtgcgaggaggagtttagcgggtttggtgagtgcgcgcgggcggcggttagttcggtttcggttttttcggggcggcgcggttatcgaggttcgagtttcggattcgttcgtttttttttcgtcgtttgggtttagtttttagcgtttcgtttggttaggggcgacgtttcggggtagggggcgcgcgtcgtttcggggtcggggattagtatggggggacgtgcgggacgtttcgtcgtggagaggtgtaaggtagagtttttattcgttgcggacgtttcgcggttttggggacgttttcgcgtttcgggaaggcgtttattttcgttgtcggtcggaggggcgcgcgttgtttttcgttt

SEQ ID NO: 852 - DNA, 1190 bp, Artificial Sequence
  chemically treated genomic DNA (Homo sapiens) CpG-island No: 852
aaacgaaaaacaacgcgcgcccctccgaccgacaacgaaaataaacgccttcccgaaacgcgaaaacgtccccaaaaccgcgaaacgtccgcaacgaataaaaactctaccttacacctctccacgacgaaacgtcccgcacgtccccccatactaatccccgaccccgaaacgacgcgcgccccctaccccgaaacgtcgcccctaaccaaacgaaacgctaaaaactaaacccaaacgacgaaaaaaaaacgaacgaatccgaaactcgaacctcgataaccgcgccgccccgaaaaaaccgaaaccgaactaaccgccgcccgcgcgcactcaccaaacccgctaaactcctcctcgcacgaataccaaataccgatataaaaattcctaaaaaaaaaacgatcgtcgccgatctcccaactataaaacgcgccgccaaaaaaaccgttccccgaaacgataacgacgacgacgacgacgacgaaaacgacgataccgttaaccgtaacgttaacgcccgaattaaaacaattaacgcgcccgccctaaccgcaacccgacttaaaaacccgctacgtaccctaacaccaatacgtaataaaaaaaacgataataacgaacaacaacgccaacaaattcaaaaccacgaccaaaaacgctcgaccgcgacgactaatcttcataccgcccgcgccgccgaaacgaaactacaccgccgaaaaactccgcgcgcgaaattaacaactaacgccccgcgtcaacgaccgctacccgccgcgccccgaaactcgaatacctaaaatcgacgacgacgaacgcgacgcgaacccataccccccccaaccccgaaataaaaacgcgacgcgaaaaacgtacgaaacgaactaacgaaacgaacgacgataaaaaaacgactacgacgcgcccgaaacccgaaacgcgaatacacctcgactaaaaaccgctaacgcctaacaacgaccacgacgcaaaaacgcgcgcccctccgtaaaaaaacacctacaaacgaccgacgacactattccgaaacccgcccgcacgaaaaaaaaaaaccgccacgccgaacgcgaacgaaaacctaaaaataaaaaaacgcccccgaaaaaaatccgaaccaaaataaaaatctaaaacgcaaaaaaaatcccaaacaaaacgctcctaaa

SEQ ID NO: 853 - DNA, 511 bp, Artificial Sequence
  chemically treated genomic DNA (Homo sapiens) CpG-island No: 853
cggtagaaagggatgcgaaggtgtaaggatgagggcgcgtattagtacgcgggagaaaaagagggggcggcgggtaaaatgaagttgtttttttgtttttttgtttttttgtttttggtatagatcgtaatttttcgtcgcgtatcgcgtagcgtcgggttcgaaggtagggaagcggttgttggagtttttgtgattttaggattttgttttattttgttcgtcgcgttttggcgtttcgtcgtttgttcgtcgggtgttgcgtttcgagggttaaagagggagtcgcgcggcgtagtcggggtttttttttgttgcgaggtattagtattcgtattttcgtattttttgttcgtttcgattattttattttgttttggcgtaggcggagagtacggattttaattcgaatgtcgttgtagttatttttaaaagttttcgttttaggttttttaggaataggagttgagttattgcggtcgtagcggtagagttttcgtttgattttatt

SEQ ID NO: 854 - DNA, 511 bp, Artificial Sequence
  chemically treated genomic DNA (Homo sapiens) CpG-island No: 854
aataaaatcaaacgaaaactctaccgctacgaccgcaataactcaactcctattcctaaaaaacctaaaacgaaaacttttaaaaataactacaacgacattcgaattaaaatccgtactctccgcctacgccaaaacaaaataaaataatcgaaacgaacaaaaaatacgaaaatacgaatactaatacctcgcaacaaaaaaaaaccccgactacgccgcgcgactccctctttaaccctcgaaacgcaacacccgacgaacaaacgacgaaacgccaaaacgcgacgaacaaaataaaacaaaatcctaaaatcacaaaaactccaacaaccgcttccctaccttcgaacccgacgctacgcgatacgcgacgaaaaattacgatctataccaaaaacaaaaaaacaaaaaaacaaaaaaacaacttcattttacccgccgccccctctttttctcccgcgtactaatacgcgccctcatccttacaccttcgcatccctttctaccg

SEQ ID NO: 855 - DNA, 511 bp, Artificial Sequence
  chemically treated genomic DNA (Homo sapiens) CpG-island No: 855
ggtgaggttaggcggaggttttgtcgttgcggtcgtagtagtttagtttttatttttgggaagtttggaacggggatttttgaaaataattgtagcggtattcgggttagggttcgtgtttttcgtttgcgttaggatagggtgaagtggtcggggcgagtagagggtgcgaaggtgcgggtgttggtgtttcgtagtaggagggagtttcggttgcgtcgcgcgattttttttttggttttcggagcgtagtattcggcggataagcggcgggacgttaggacgcggcgagtaaggtgaggtagggttttgaagttataggggttttagtagtcgtttttttgttttcggattcggcgttgcgcggtgcgcggcgaggagttgcgatttgtattaggggtagaggagtagaggagtagggaaatagttttattttgttcgtcgttttttttttttttttcgcgtgttggtgcgcgtttttatttttatattttcgtatttttttttgtcg

SEQ ID NO: 856 - DNA, 511 bp, Artificial Sequence
  chemically treated genomic DNA (Homo sapiens) CpG-island No: 856
cgacaaaaaaaaatacgaaaatataaaaataaaaacgcgcaccaacacgcgaaaaaaaaaaaaaaaacgacgaacaaaataaaactatttccctactcctctactcctctacccctaatacaaatcgcaactcctcgccgcgcaccgcgcaacgccgaatccgaaaacaaaaaaacgactactaaaacccctataacttcaaaaccctacctcaccttactcgccgcgtcctaacgtcccgccgcttatccgccgaatactacgctccgaaaaccaaaaaaaaaatcgcgcgacgcaaccgaaactccctcctactacgaaacaccaacacccgcaccttcgcaccctctactcgccccgaccacttcaccctatcctaacgcaaacgaaaaacacgaaccctaacccgaataccgctacaattattttcaaaaatccccgttccaaacttcccaaaaataaaaactaaactactacgaccgcaacgacaaaacctccgcctaacctcacc

SEQ ID NO: 857 - DNA, 508 bp, Artificial Sequence
  chemically treated genomic DNA (Homo sapiens) CpG-island No: 857
ttcggtcgagtggaaagaagtcggattatattcggcgaggaggaaggtttatttttcggaggggaggtttttcgattagagcgagtggagaggatagtatgacgtgggggtaggatcgagaggggttacggtagtcgaagggtatacggagggatacgcgcggaatagatagagagcggtgcggggggtatattaaagagtgtttttatgttaaggaaaggcgaggacggaaattaagagtggagtttagaggtggtttaacgggtcgaaacgtaggagaaggcggtaagacgaggttcgggtgaggagtagtttttcgaaaggtgtttgtgtatgaattcgggattaaagggagttataatgagggttcggggtttaaacgttacgaatatatcgtaaattaaggacggttgagcggtgagttaatgtgtaacgcgagagaggcgtgttttgtatgtggataagttttaggtttattacggatatgtaaataatgatattgtaagat

SEQ ID NO: 858 - DNA, 508 bp, Artificial Sequence
  chemically treated genomic DNA (Homo sapiens) CpG-island No: 858
atcttacaatatcattatttacatatccgtaataaacctaaaacttatccacatacaaaacacgcctctctcgcgttacacattaactcaccgctcaaccgtccttaatttacgatatattcgtaacgtttaaaccccgaaccctcattataactccctttaatcccgaattcatacacaaacacctttcgaaaaactactcctcacccgaacctcgtcttaccgccttctcctacgtttcgacccgttaaaccacctctaaactccactcttaatttccgtcctcgcctttccttaacataaaaacactctttaatataccccccgcaccgctctctatctattccgcgcgtatccctccgtatacccttcgactaccgtaacccctctcgatcctacccccacgtcatactatcctctccactcgctctaatcgaaaaacctcccctccgaaaaataaaccttcctcctcgccgaatataatccgacttctttccactcgaccgaa

SEQ ID NO: 859 - DNA, 508 bp, Artificial Sequence
  chemically treated genomic DNA (Homo sapiens) CpG-island No: 859
attttatagtgttattgtttgtatgttcgtgatgggtttaggatttatttatatatagagtacgtttttttcgcgttgtatattgatttatcgtttagtcgtttttgatttacggtgtgttcgtaacgtttgagtttcgggtttttattgtggttttttttggtttcgaatttatgtataaatatttttcggggggttattttttattcgaatttcgttttgtcgtttttttttgcgtttcggttcgttgggttatttttgggttttatttttggttttcgttttcgtttttttttaatataggagtattttttggtgtgtttttcgtatcgttttttgtttatttcgcgcgtgttttttcgtgtatttttcggttgtcgtggtttttttcggttttgtttttacgttatattgttttttttattcgttttgatcgggagatttttttttcgggaggtaagttttttttttcgtcgggtgtagttcggtttttttttattcggtcggg

SEQ ID NO: 860 - DNA, 508 bp, Artificial Sequence
  chemically treated genomic DNA (Homo sapiens) CpG-island No: 860
cccgaccgaataaaaaaaaaccgaactacacccgacgaaaaaaaaaacttacctcccgaaaaaaaaatctcccgatcaaaacgaataaaaaaaacaatataacgtaaaaacaaaaccgaaaaaaaccacgacaaccgaaaaatacacgaaaaaacacgcgcgaaataaacaaaaaacgatacgaaaaacacaccaaaaaatactcctatattaaaaaaaaacgaaaacgaaaaccaaaaataaaacccaaaaataacccaacgaaccgaaacgcaaaaaaaaacgacaaaacgaaattcgaataaaaaataaccccccgaaaaatatttatacataaattcgaaaccaaaaaaaaccacaataaaaacccgaaactcaaacgttacgaacacaccgtaaatcaaaaacgactaaacgataaatcaatatacaacgcgaaaaaaacgtactctatatataaataaatcctaaacccatcacgaacatacaaacaataacactataaaat

SEQ ID NO: 861 - DNA, 883 bp, Artificial Sequence
  chemically treated genomic DNA (Homo sapiens) CpG-island No: 861
tatcgtggcgtttttagcgtcgtggtggtcgatgaggcggttgttttttgggtgtcgttgtgtttagcggttgatgtcgtagacgcggcgttcgatgattagttatttgtcgtcgggttggtcgtgcgcgcggatttgtttttagtagaaggtgggtagcggtgttttcggttgcgcgggtttttttcgcggtttcggtttttcgacgtcgtttatgttgtacgtacgagttttggggattttaggcggtggtcgaggttcgagtaagatttcgagggaagcgaagagcgttttcgggcgtcgttttcgtcgtcgttcgttgtttcggtttcgttttgtcgtcgcggtcgtcgtacgagcgagcgtgcgtttttcggttcgcggcgtagggaatttttcgttttataatcgcgcggacggcgttcgtttcgtttcgtttgttttttcgttttcggttaggtttcggtttttaaggttggttgatttttcgcgttcgttttaatttaggcgcggggtttcggtttttattggtcgttagggagggcggcgtcgaggcggttcgtttttttcgggaggatagcggtcgttatttagttttgtttcggggtatcgtttcgtttttttttttcgggttgtcggtttttaggtttttgatttcgttcggagcgcggggtttggggatataatacgtatttgttgggcgtttcgtagcgtttcgttacgttttcgggaatcggaggcggagtttcggtttgtgagtagcggggtttggggggtttttagtcgcgcgttttgtaacgttaaatttagtgcgtttagaggggggacgttgtttcggggtgtttgtgaatagtttttaaattatgggttttaatttttgcgg

SEQ ID NO: 862 - DNA, 883 bp, Artificial Sequence
  chemically treated genomic DNA (Homo sapiens) CpG-island No: 862
ccgcaaaaattaaaacccataatttaaaaactattcacaaacaccccgaaacaacgtcccccctctaaacgcactaaatttaacgttacaaaacgcgcgactaaaaaccccccaaaccccgctactcacaaaccgaaactccgcctccgattcccgaaaacgtaacgaaacgctacgaaacgcccaacaaatacgtattatatccccaaaccccgcgctccgaacgaaatcaaaaacctaaaaaccgacaacccgaaaaaaaaaaacgaaacgataccccgaaacaaaactaaataacgaccgctatcctcccgaaaaaaacgaaccgcctcgacgccgccctccctaacgaccaataaaaaccgaaaccccgcgcctaaattaaaacgaacgcgaaaaatcaaccaaccttaaaaaccgaaacctaaccgaaaacgaaaaaacaaacgaaacgaaacgaacgccgtccgcgcgattataaaacgaaaaattccctacgccgcgaaccgaaaaacgcacgctcgctcgtacgacgaccgcgacgacaaaacgaaaccgaaacaacgaacgacgacgaaaacgacgcccgaaaacgctcttcgcttccctcgaaatcttactcgaacctcgaccaccgcctaaaatccccaaaactcgtacgtacaacataaacgacgtcgaaaaaccgaaaccgcgaaaaaaacccgcgcaaccgaaaacaccgctacccaccttctactaaaaacaaatccgcgcgcacgaccaacccgacgacaaataactaatcatcgaacgccgcgtctacgacatcaaccgctaaacacaacgacacccaaaaaacaaccgcctcatcgaccaccacgacgctaaaaacgccacgata

SEQ ID NO: 863 - DNA, 883 bp, Artificial Sequence
  chemically treated genomic DNA (Homo sapiens) CpG-island No: 863
tcgtagagattggggtttatggtttgaaggttgtttataggtatttcgagatagcgttttttttttgggcgtattggatttgacgttgtaggacgcgcggttggaagttttttaggtttcgttgtttatagatcgggatttcgttttcggttttcgagggcgtggcgaggcgttgcgggacgtttaataggtgcgtgttgtgtttttaggtttcgcgtttcgggcggagttaagagtttggaagtcggtagttcgggaaaagggggcgggacggtgtttcggggtagggttgggtggcggtcgttgttttttcgggaggggcgggtcgtttcgacgtcgttttttttggcggttaatggagatcgaggtttcgcgtttggattggagcggacgcggggggttagttagttttgggggtcggggtttggtcgggggcgggggggtaggcgaggcgaggcgggcgtcgttcgcgcggttataaggcggggagttttttgcgtcgcgagtcgggaggcgtacgttcgttcgtacggcggtcgcggcggtagggcggggtcggagtagcgggcggcggcggaggcggcgttcgggagcgtttttcgtttttttcggggttttgttcggatttcggttatcgtttgggatttttaggattcgtgcgtgtagtatgggcggcgtcggggagtcgggatcgcgggagggattcgcgtagtcgggggtatcgttgtttattttttgttgggagtagattcgcgcgtacgattagttcggcgataagtggttggttatcgagcgtcgcgtttacgatattagtcgttgggtatagcggtatttagggggtagtcgttttatcggttattacggcgttgaggacgttacggta

SEQ ID NO: 864 - DNA, 883 bp, Artificial Sequence
  chemically treated genomic DNA (Homo sapiens) CpG-island No: 864
taccgtaacgtcctcaacgccgtaataaccgataaaacgactaccccctaaataccgctatacccaacgactaatatcgtaaacgcgacgctcgataaccaaccacttatcgccgaactaatcgtacgcgcgaatctactcccaacaaaaaataaacaacgatacccccgactacgcgaatccctcccgcgatcccgactccccgacgccgcccatactacacgcacgaatcctaaaaatcccaaacgataaccgaaatccgaacaaaaccccgaaaaaaacgaaaaacgctcccgaacgccgcctccgccgccgcccgctactccgaccccgccctaccgccgcgaccgccgtacgaacgaacgtacgcctcccgactcgcgacgcaaaaaactccccgccttataaccgcgcgaacgacgcccgcctcgcctcgcctacccccccgcccccgaccaaaccccgacccccaaaactaactaaccccccgcgtccgctccaatccaaacgcgaaacctcgatctccattaaccgccaaaaaaaacgacgtcgaaacgacccgcccctcccgaaaaaacaacgaccgccacccaaccctaccccgaaacaccgtcccgcccccttttcccgaactaccgacttccaaactcttaactccgcccgaaacgcgaaacctaaaaacacaacacgcacctattaaacgtcccgcaacgcctcgccacgccctcgaaaaccgaaaacgaaatcccgatctataaacaacgaaacctaaaaaacttccaaccgcgcgtcctacaacgtcaaatccaatacgcccaaaaaaaaaacgctatctcgaaatacctataaacaaccttcaaaccataaaccccaatctctacga

SEQ ID NO: 865 - DNA, 594 bp, Artificial Sequence
  chemically treated genomic DNA (Homo sapiens) CpG-island No: 865
gtatagtattttcgggtggcggcgtagattcggcggggattttcgaaattttttcgtttcgggaggcgatcgcggtttagatttagcgcgggatcgcgagcgcgcgcggatttattcgttttatatttcggcgtttcggggcgtttaggcgttcgtttttagcgtcgtcgcgtttttttagcgtcgcgttttcgttcgtcgtcgatttcgttaggggtcgagtcgttttatcgtttgttagttttgttcgcggttagttagtaggttttagacgtttgggttcgcggtttttagtttagtttcgattttgttttgggcgggttacgtggcggaggggggagcggttcgaggatacgtgttcggtttcgttttttcgtcggttcggcgttgggattcggcgcgcgtttttaaggtttggttttattcggttcgtcgcgtcgggatagggagattacggcgttcggagggaattcggtttttaatatttcgcgggtcgcgtcgcgtttagattttttagttgattttttttttttagtcgtttttcgtattatttattttgggttatttttgtttaagaatttataatggttttcg

SEQ ID NO: 866 - DNA, 594 bp, Artificial Sequence
  chemically treated genomic DNA (Homo sapiens) CpG-island No: 866
cgaaaaccattataaattcttaaacaaaaataacccaaaataaataatacgaaaaacgactaaaaaaaaaaaatcaactaaaaaatctaaacgcgacgcgacccgcgaaatattaaaaaccgaattccctccgaacgccgtaatctccctatcccgacgcgacgaaccgaataaaaccaaaccttaaaaacgcgcgccgaatcccaacgccgaaccgacgaaaaaacgaaaccgaacacgtatcctcgaaccgctcccccctccgccacgtaacccgcccaaaacaaaatcgaaactaaactaaaaaccgcgaacccaaacgtctaaaacctactaactaaccgcgaacaaaactaacaaacgataaaacgactcgacccctaacgaaatcgacgacgaacgaaaacgcgacgctaaaaaaacgcgacgacgctaaaaacgaacgcctaaacgccccgaaacgccgaaatataaaacgaataaatccgcgcgcgctcgcgatcccgcgctaaatctaaaccgcgatcgcctcccgaaacgaaaaaatttcgaaaatccccgccgaatctacgccgccacccgaaaatactatac

SEQ ID NO: 867 - DNA, 594 bp, Artificial Sequence
  chemically treated genomic DNA (Homo sapiens) CpG-island No: 867
cgggagttattgtaggtttttgagtaggggtggtttaaagtgggtggtgcggagggcgattggagaggaggagttagttggggagtttgagcgcggcgcggttcgcgggatgttgggggtcgggtttttttcgagcgtcgtggtttttttgtttcggcgcggcgggtcgggtggggttaggttttgggagcgcgcgtcggattttagcgtcgggtcggcggaggggcggggtcgggtacgtgttttcgggtcgttttttttttcgttacgtgattcgtttagggtagggtcggggttgggttgggggtcgcgagtttaggcgtttgagatttattgattggtcgcgggtagggttgataggcggtggggcggttcggtttttggcggagtcggcggcgggcggggacgcggcgttgggaggacgcggcggcgttgggaacggacgtttgggcgtttcgaggcgtcgggatgtggagcgggtaggttcgcgcgcgttcgcggtttcgcgttgggtttgggtcgcggtcgtttttcgggacgggaggatttcgggggttttcgtcgggtttgcgtcgttattcggaggtgttgtgt

SEQ ID NO: 868 - DNA, 594 bp, Artificial Sequence
  chemically treated genomic DNA (Homo sapiens) CpG-island No: 868
acacaacacctccgaataacgacgcaaacccgacgaaaacccccgaaatcctcccgtcccgaaaaacgaccgcgacccaaacccaacgcgaaaccgcgaacgcgcgcgaacctacccgctccacatcccgacgcctcgaaacgcccaaacgtccgttcccaacgccgccgcgtcctcccaacgccgcgtccccgcccgccgccgactccgccaaaaaccgaaccgccccaccgcctatcaaccctacccgcgaccaatcaataaatctcaaacgcctaaactcgcgacccccaacccaaccccgaccctaccctaaacgaatcacgtaacgaaaaaaaaaacgacccgaaaacacgtacccgaccccgcccctccgccgacccgacgctaaaatccgacgcgcgctcccaaaacctaaccccacccgacccgccgcgccgaaacaaaaaaaccacgacgctcgaaaaaaacccgacccccaacatcccgcgaaccgcgccgcgctcaaactccccaactaactcctcctctccaatcgccctccgcaccacccactttaaaccacccctactcaaaaacctacaataactcccg

SEQ ID NO: 869 - DNA, 720 bp, Artificial Sequence
  chemically treated genomic DNA (Homo sapiens) CpG-island No: 869
ttttagaagggcgtagggaggcgggagagttcgcgggtggttatattttcggttcgttttagcgcgcgtttcgggaatcgcgttcggttttcgttatcgtttaggttcgttcgcgtttattatggataggtaaacgtaggaggcgtagagttttaggttgatttggcggttgatggcggtttttgagttttggtggtagttttggcgtatttgcgaggtggacgcggtcgttatggcggcgattaaggagaggcggcggcggcggcggtggttgcgcggcgttggagcggcggcgggggttttggggtagttcgagggtgcggtgaagaggtgacggagggttggttatgggcggtcggtcggggtggggaacgagcgtcgggtttcgtttaagtattgttgaagtaggaaatttcgacgattttcggcgaagaacgtttggttttgcgggtcgtttgtggttttttatagtcgcgtcggcgttaggttcgtttcggttaattagcgtcgttcgtttcgagttcgtttttttcggtgggcgcgggatttcgtttttgttgtgggggaggggcggtcgttggaggttttcgcgcgttttggcggagttcgggagcggggatcggtagtcgattgtttttgggatagcggtggcgtttttgtgttcgtttagtggagttggagggaagttgcgaggaggcgtaggaagtttattttagaatt

SEQ ID NO: 870 - DNA, 720 bp, Artificial Sequence
  chemically treated genomic DNA (Homo sapiens) CpG-island No: 870
aattctaaaataaacttcctacgcctcctcgcaacttccctccaactccactaaacgaacacaaaaacgccaccgctatcccaaaaacaatcgactaccgatccccgctcccgaactccgccaaaacgcgcgaaaacctccaacgaccgcccctcccccacaacaaaaacgaaatcccgcgcccaccgaaaaaaacgaactcgaaacgaacgacgctaattaaccgaaacgaacctaacgccgacgcgactataaaaaaccacaaacgacccgcaaaaccaaacgttcttcgccgaaaatcgtcgaaatttcctacttcaacaatacttaaacgaaacccgacgctcgttccccaccccgaccgaccgcccataaccaaccctccgtcacctcttcaccgcaccctcgaactaccccaaaacccccgccgccgctccaacgccgcgcaaccaccgccgccgccgccgcctctccttaatcgccgccataacgaccgcgtccacctcgcaaatacgccaaaactaccaccaaaactcaaaaaccgccatcaaccgccaaatcaacctaaaactctacgcctcctacgtttacctatccataataaacgcgaacgaacctaaacgataacgaaaaccgaacgcgattcccgaaacgcgcgctaaaacgaaccgaaaatataaccacccgcgaactctcccgcctccctacgcccttctaaaa

SEQ ID NO: 871 - DNA, 720 bp, Artificial Sequence
  chemically treated genomic DNA (Homo sapiens) CpG-island No: 871
ggttttgaggtggattttttgcgttttttcgtagtttttttttaattttattaaacgggtatagagacgttatcgttgttttagaggtagtcggttatcggttttcgttttcgagtttcgttagagcgcgcgagggtttttagcggtcgttttttttttatagtaggggcggggtttcgcgtttatcggaaggagcgggttcggggcgggcggcgttgattggtcggggcgggtttgacgtcgacgcggttataagagattataagcgattcgtagggttagacgtttttcgtcgagagtcgtcggggttttttgttttaatagtgtttggacggaattcggcgttcgttttttatttcggtcggtcgtttatagttagtttttcgttatttttttatcgtattttcggattgttttaaggttttcgtcgtcgttttagcgtcgcgtagttatcgtcgtcgtcgtcgtttttttttagtcgtcgttatgacgatcgcgtttatttcgtaggtgcgttagaattattattaggatttagaggtcgttattaatcgttagattaatttggagttttacgttttttacgtttatttgtttatggtgagcgcgggcgggtttaagcggtggcgggggtcgggcgcggttttcggggcgcgcgttggggcgggtcgggggtgtggttattcgcgggttttttcgtttttttgcgtttttttggaa

SEQ ID NO: 872 - DNA, 720 bp, Artificial Sequence
  chemically treated genomic DNA (Homo sapiens) CpG-island No: 872
ttccaaaaaaacgcaaaaaaacgaaaaaacccgcgaataaccacacccccgacccgccccaacgcgcgccccgaaaaccgcgcccgacccccgccaccgcttaaacccgcccgcgctcaccataaacaaataaacgtaaaaaacgtaaaactccaaattaatctaacgattaataacgacctctaaatcctaataataattctaacgcacctacgaaataaacgcgatcgtcataacgacgactaaaaaaaaacgacgacgacgacgataactacgcgacgctaaaacgacgacgaaaaccttaaaacaatccgaaaatacgataaaaaaataacgaaaaactaactataaacgaccgaccgaaataaaaaacgaacgccgaattccgtccaaacactattaaaacaaaaaaccccgacgactctcgacgaaaaacgtctaaccctacgaatcgcttataatctcttataaccgcgtcgacgtcaaacccgccccgaccaatcaacgccgcccgccccgaacccgctccttccgataaacgcgaaaccccgcccctactataaaaaaaaaacgaccgctaaaaaccctcgcgcgctctaacgaaactcgaaaacgaaaaccgataaccgactacctctaaaacaacgataacgtctctatacccgtttaataaaattaaaaaaaaactacgaaaaaacgcaaaaaatccacctcaaaacc

SEQ ID NO: 873 - DNA, 543 bp, Artificial Sequence
  chemically treated genomic DNA (Homo sapiens) CpG-island No: 873
gtacgcgtatttacgcgagttcgggtttatgacgttattagcgtagcgttatcgtcgcggaaggtttaggggtttgttttgtatgcggcgtgttttagggaggtttaggcggacgtttgtaagtcgggtgcgcggttcgggggcggttcggaaattttagcggaaggtagtaaggggcgcgtggggtcgtggagttacgaagttgggcggtaggaggggcggtttggagttttcgcggggtatagcgcgtgcgtgagggcggtcggcggggttgttcggcgcgggtgtttcggcgatgtgtggcgttgaggcggcggcgggagtagcggcgtcgagttttgtttcggtttcggtttcggtttcgcggcggtgtaggcggcggaggcggaggcgtaggtttttttttaggatttggcgagtttaggtttaagcggcggtttcgcgaggtttttgtacggcgtttcgggtcgaggtttttttcgtttcgttttattttaggagtttgtttttttagttggggatgaggttaggaggcggtcgcgt

SEQ ID NO: 874 - DNA, 543 bp, Artificial Sequence
  chemically treated genomic DNA (Homo sapiens) CpG-island No: 874
acgcgaccgcctcctaacctcatccccaactaaaaaaacaaactcctaaaataaaacgaaacgaaaaaaacctcgacccgaaacgccgtacaaaaacctcgcgaaaccgccgcttaaacctaaactcgccaaatcctaaaaaaaaacctacgcctccgcctccgccgcctacaccgccgcgaaaccgaaaccgaaaccgaaacaaaactcgacgccgctactcccgccgccgcctcaacgccacacatcgccgaaacacccgcgccgaacaaccccgccgaccgccctcacgcacgcgctataccccgcgaaaactccaaaccgcccctcctaccgcccaacttcgtaactccacgaccccacgcgccccttactaccttccgctaaaatttccgaaccgcccccgaaccgcgcacccgacttacaaacgtccgcctaaacctccctaaaacacgccgcatacaaaacaaacccctaaaccttccgcgacgataacgctacgctaataacgtcataaacccgaactcgcgtaaatacgcgtac

SEQ ID NO: 875 - DNA, 543 bp, Artificial Sequence
  chemically treated genomic DNA (Homo sapiens) CpG-island No: 875
acgcggtcgttttttagttttatttttagttggggaggtaggtttttggggtagggcgaggcggggagggtttcgattcggggcgtcgtgtaagggtttcgcggggtcgtcgtttagatttgggttcgttaggttttaaagaagagtttgcgttttcgttttcgtcgtttgtatcgtcgcgaagtcgaagtcgaagtcgaagtagagttcggcgtcgttgttttcgtcgtcgttttagcgttatatatcgtcgggatattcgcgtcgggtagtttcgtcggtcgtttttacgtacgcgttgtgtttcgcgggagttttaggtcgttttttttgtcgtttagtttcgtgattttacggttttacgcgttttttgttgtttttcgttggggttttcgagtcgttttcgaatcgcgtattcgatttgtaggcgttcgtttgggtttttttaagatacgtcgtatataggataggtttttgggtttttcgcggcgatggcgttgcgttaatgacgttataggttcggattcgcgtgagtgcgcgtgt

SEQ ID NO: 876 - DNA, 543 bp, Artificial Sequence
  chemically treated genomic DNA (Homo sapiens) CpG-island No: 876
acacgcgcactcacgcgaatccgaacctataacgtcattaacgcaacgccatcgccgcgaaaaacccaaaaacctatcctatatacgacgtatcttaaaaaaacccaaacgaacgcctacaaatcgaatacgcgattcgaaaacgactcgaaaaccccaacgaaaaacaacaaaaaacgcgtaaaaccgtaaaatcacgaaactaaacgacaaaaaaaacgacctaaaactcccgcgaaacacaacgcgtacgtaaaaacgaccgacgaaactacccgacgcgaatatcccgacgatatataacgctaaaacgacgacgaaaacaacgacgccgaactctacttcgacttcgacttcgacttcgcgacgatacaaacgacgaaaacgaaaacgcaaactcttctttaaaacctaacgaacccaaatctaaacgacgaccccgcgaaacccttacacgacgccccgaatcgaaaccctccccgcctcgccctaccccaaaaacctacctccccaactaaaaataaaactaaaaaacgaccgcgt

SEQ ID NO: 877 - DNA, 567 bp, Artificial Sequence
  chemically treated genomic DNA (Homo sapiens) CpG-island No: 877
tcggtgtagaagtatcgttcgattttcggcgcgggtgttcgttatagttttagtgtttcgttcggtgtagtttttttttcgtcggtttcgttattcgtagttattttacgtttgtcgtttcggcgttttattcggggtagtcgattagtaggtagttttcggtttttagtattgtatcgtttgcggtgcgaacgtgacgttcgcgatatagggggggattttcggcgcgtcgcgttacgttacgtgtttcgtatcggaagcgcgtttttagtcgtttcggtaatagtcgtttttttcgcgttttttattttttttttgtttttttaaggaaaattaggtttttgcgcggttaacgtttaggattcgtaagttgcgcgtttacgaggtgatttcggggacggttgggttttttttggggagtgagggaggagtttagacgtttcgggttttggttttttttgatgcgtagagagtcgaggttttggacgttacgttgtttttataattattttaatttcgcgataaaaggtggggtcggaggtttatgagatttttaaattattgtag

SEQ ID NO: 878 - DNA, 567 bp, Artificial Sequence
  chemically treated genomic DNA (Homo sapiens) CpG-island No: 878
ctacaataatttaaaaatctcataaacctccgaccccaccttttatcgcgaaattaaaataattataaaaacaacgtaacgtccaaaacctcgactctctacgcatcaaaaaaaaccaaaacccgaaacgtctaaactcctccctcactccccaaaaaaaacccaaccgtccccgaaatcacctcgtaaacgcgcaacttacgaatcctaaacgttaaccgcgcaaaaacctaattttccttaaaaaaacaaaaaaaaaataaaaaacgcgaaaaaaacgactattaccgaaacgactaaaaacgcgcttccgatacgaaacacgtaacgtaacgcgacgcgccgaaaatccccccctatatcgcgaacgtcacgttcgcaccgcaaacgatacaatactaaaaaccgaaaactacctactaatcgactaccccgaataaaacgccgaaacgacaaacgtaaaataactacgaataacgaaaccgacgaaaaaaaaactacaccgaacgaaacactaaaactataacgaacacccgcgccgaaaatcgaacgatacttctacaccga

SEQ ID NO: 879 - DNA, 567 bp, Artificial Sequence
  chemically treated genomic DNA (Homo sapiens) CpG-island No: 879
ttgtaatgatttaggaattttatgggttttcggttttattttttgtcgcgggattaagataattatgagagtaacgtgacgtttaagatttcggttttttgcgtattagaagaagttagggttcggggcgtttaagttttttttttattttttaaaggaaatttagtcgttttcgaagttatttcgtgggcgcgtagtttgcggattttgggcgttggtcgcgtaggggtttagttttttttggagagatagagggggagtgggggacgcgagggaggcggttgttgtcggggcgattggaagcgcgttttcggtgcggaatacgtggcgtggcgcggcgcgtcggaagtttttttttgtgtcgcggacgttacgttcgtatcgtaggcggtgtagtgttggaggtcggaagttgtttgttaatcggttatttcgagtggagcgtcggggcggtaggcgtgggatggttgcgggtggcggggtcggcggagagggagttgtatcgggcggggtattgggattgtggcgggtattcgcgtcgggggtcggacggtgtttttgtatcgg

SEQ ID NO: 880 - DNA, 567 bp, Artificial Sequence
  chemically treated genomic DNA (Homo sapiens) CpG-island No: 880
ccgatacaaaaacaccgtccgacccccgacgcgaatacccgccacaatcccaataccccgcccgatacaactccctctccgccgaccccgccacccgcaaccatcccacgcctaccgccccgacgctccactcgaaataaccgattaacaaacaacttccgacctccaacactacaccgcctacgatacgaacgtaacgtccgcgacacaaaaaaaaacttccgacgcgccgcgccacgccacgtattccgcaccgaaaacgcgcttccaatcgccccgacaacaaccgcctccctcgcgtcccccactccccctctatctctccaaaaaaaactaaacccctacgcgaccaacgcccaaaatccgcaaactacgcgcccacgaaataacttcgaaaacgactaaatttcctttaaaaaataaaaaaaaaacttaaacgccccgaaccctaacttcttctaatacgcaaaaaaccgaaatcttaaacgtcacgttactctcataattatcttaatcccgcgacaaaaaataaaaccgaaaacccataaaattcctaaatcattacaa

SEQ ID NO: 881 - DNA, 989 bp, Artificial Sequence
  chemically treated genomic DNA (Homo sapiens) CpG-island No: 881
gcggatcgtcgttttcgcgattttagaagtttatttttttttttatttatttttttcgttggttttttcggttttcgcgattttcggcgttcgttcgggggggttttagaggaagtcgcgagttttgtttgtagatttcgcgcgttcgttgtttttaatcgggttttagtttcgggcgtataaagttttcggcgttgacgttagggttttttttcgcgcggtcggtttttagtgtaggcggagtcgcgtcgcgtttttatttcggtcgggagttaggagttagcggttagtttcgcgtagcgtagcgtagttcgtagaagttcggttagcgtacgtgttcgcgagatttgtaaatttgtgttatcggttttgttcgttttcggggagttcgaacgtttcgtagtttttatttttttcgttagtttttagttatgggtaagcgagcgcgttggttgcgcgttacggttacggtttcgcgttttcgtttcgggagggcgcgttttttcgagggtttcgtttttttttcgtttaggtggcgttttttcggttatttttgcgacgaagtcgggacgttggaggtgggaggggcgcggcgtaggtgttcggaacgtttaggtgcgtttttttgttgtattttgtggggggggtggttttcgtttcggttgcggttaggttgtattttcgtacgtgcggttcgcgggagtttaagagttgggtattcgggaggggttgtagagagaatagacggcgcgtttcgggttagtgttttattttaaggggttagtagagagtcgttttttgtttgtttttcgggacgttttttttgtcgttcgagtttttagtttagttttgtttcgtttcgtttcgtcgtgtttttgttttttttaagttcgcgcgaaataaatattcggttttttaagtttggggtttttcgggagtttatttcgaaattatgatttttgaaattaggaaagtgataggagagattt

SEQ ID NO: 882 - DNA, 989 bp, Artificial Sequence
  chemically treated genomic DNA (Homo sapiens) CpG-island No: 882
aaatctctcctatcactttcctaatttcaaaaatcataatttcgaaataaactcccgaaaaaccccaaacttaaaaaaccgaatatttatttcgcgcgaacttaaaaaaaacaaaaacacgacgaaacgaaacgaaacaaaactaaactaaaaactcgaacgacaaaaaaaacgtcccgaaaaacaaacaaaaaacgactctctactaaccccttaaaataaaacactaacccgaaacgcgccgtctattctctctacaacccctcccgaatacccaactcttaaactcccgcgaaccgcacgtacgaaaatacaacctaaccgcaaccgaaacgaaaaccaccccccccacaaaatacaacaaaaaaacgcacctaaacgttccgaacacctacgccgcgcccctcccacctccaacgtcccgacttcgtcgcaaaaataaccgaaaaaacgccacctaaacgaaaaaaaaacgaaaccctcgaaaaaacgcgccctcccgaaacgaaaacgcgaaaccgtaaccgtaacgcgcaaccaacgcgctcgcttacccataactaaaaactaacgaaaaaaataaaaactacgaaacgttcgaactccccgaaaacgaacaaaaccgataacacaaatttacaaatctcgcgaacacgtacgctaaccgaacttctacgaactacgctacgctacgcgaaactaaccgctaactcctaactcccgaccgaaataaaaacgcgacgcgactccgcctacactaaaaaccgaccgcgcgaaaaaaaaccctaacgtcaacgccgaaaactttatacgcccgaaactaaaacccgattaaaaacaacgaacgcgcgaaatctacaaacaaaactcgcgacttcctctaaaacccccccgaacgaacgccgaaaatcgcgaaaaccgaaaaaaccaacgaaaaaaataaataaaaaaaaaaataaacttctaaaatcgcgaaaacgacgatccgc

SEQ ID NO: 883 - DNA, 989 bp, Artificial Sequence
  chemically treated genomic DNA (Homo sapiens) CpG-island No: 883
gagttttttttgttatttttttggttttaagggttatggtttcgaaatgagttttcggaagattttaggtttggggaatcgggtgtttgtttcgcgcgggtttaaggagaatagaagtacggcggggcggggcggggtaggattggattgggagttcgggcgatagggagagcgtttcgggaaataggtaagaagcgattttttattggttttttaaaataaagtattagttcgggacgcgtcgtttgttttttttgtaatttttttcgggtatttagtttttaggttttcgcgagtcgtacgtgcgggggtgtagtttggtcgtagtcggagcggggattattttttttataggatataatagggaagcgtatttgggcgtttcggatatttgcgtcgcgttttttttatttttagcgtttcggtttcgtcgtagaggtggtcgaggaggcgttatttgagcgggggaggggcgggattttcggaagggcgcgttttttcggggcgggggcgcgagatcgtggtcgtggcgcgtagttagcgcgttcgtttatttatggttggagattggcgggaggggtgagggttgcggggcgttcgggtttttcggggacgggtagagtcggtggtataagtttgtaggtttcgcgggtacgtgcgttgatcgggtttttgcgggttgcgttgcgttgcgcggggttggtcgttggtttttagttttcggtcggggtgggagcgcggcgcggtttcgtttgtattgggggtcggtcgcgcggagaggggttttgacgttagcgtcgggggttttgtgcgttcggagttagggttcgattgggggtagcgggcgcgcggagtttgtaggtaaagttcgcggttttttttgggattttttcgggcgagcgtcgagggtcgcgggaatcggaaaagttagcgagggggatgggtagagaggggagtgggtttttaggatcgcggaggcggcgattcgt

SEQ ID NO: 884 - DNA, 989 bp, Artificial Sequence
  chemically treated genomic DNA (Homo sapiens) CpG-island No: 884
acgaatcgccgcctccgcgatcctaaaaacccactcccctctctacccatccccctcgctaacttttccgattcccgcgaccctcgacgctcgcccgaaaaaatcccaaaaaaaaccgcgaactttacctacaaactccgcgcgcccgctacccccaatcgaaccctaactccgaacgcacaaaacccccgacgctaacgtcaaaacccctctccgcgcgaccgacccccaatacaaacgaaaccgcgccgcgctcccaccccgaccgaaaactaaaaaccaacgaccaaccccgcgcaacgcaacgcaacccgcaaaaacccgatcaacgcacgtacccgcgaaacctacaaacttataccaccgactctacccgtccccgaaaaacccgaacgccccgcaaccctcacccctcccgccaatctccaaccataaataaacgaacgcgctaactacgcgccacgaccacgatctcgcgcccccgccccgaaaaaacgcgcccttccgaaaatcccgcccctcccccgctcaaataacgcctcctcgaccacctctacgacgaaaccgaaacgctaaaaataaaaaaaacgcgacgcaaatatccgaaacgcccaaatacgcttccctattatatcctataaaaaaaataatccccgctccgactacgaccaaactacacccccgcacgtacgactcgcgaaaacctaaaaactaaatacccgaaaaaaattacaaaaaaaacaaacgacgcgtcccgaactaatactttattttaaaaaaccaataaaaaatcgcttcttacctatttcccgaaacgctctccctatcgcccgaactcccaatccaatcctaccccgccccgccccgccgtacttctattctccttaaacccgcgcgaaacaaacacccgattccccaaacctaaaatcttccgaaaactcatttcgaaaccataacccttaaaaccaaaaaaataacaaaaaaaactc

SEQ ID NO: 885 - DNA, 967 bp, Artificial Sequence
  chemically treated genomic DNA (Homo sapiens) CpG-island No: 885
gtcgttattttttttcgagcgggggtcgtttcgagttcgggaggaatgaatgaacgattgaattaatgagtttttgtggacgcggttcgtcgtttttcggtttttgcgggcgaggaaatgggggcgtcgggttcgggaggtcgtagtcggttatttaggttaattcggcggggacgcggtcgtcgtcgtagttagagggtcgagtttgcgacgttattacggagttcggggcgggtttttaaggtcgagttcgagttttttatttcgggagttatttatcgacgacgttagggttcgggttttatttcgagattatcgcgcgcggagttattttcgtcgtcgttttaggttttttattcgtcgtcgtcgtcgcgcgaggcggggatatgtaaatgaattaacggttttcgtagcgtcgcgtcgcgtaggcgtaagtcgtcgtcgagttttggtgcgtaggcgcgggtcgtcgcggttcggtttttttgcgtaagcgcgttgttcgttttttttgggcggacgttttggaggtaaaatatttttttgttgggggcggcgattatcgtgagcgtttcggaaggggcggtaaagacgttttcgtcgcgtacgaggtggtttcgttggttttattttggttcgcggtcgtttttggttatcgtgagcgttcgcgagtttttgggaggttaagtttaggggcgttatagcgtttgcgcgcgtacggcggtcggaaggggttagaggcggttttttgggtgataatcgcgcgttttatttttttttacgtggtcgcgaagatcgggtgagacgttgcggttgtcgaggtttgtttcgcgcggagtggggagtgggggtgtcgtagggtcgggttggcgcgattttcgggtacgtggtttggggggaaaaaaaaaatgaaagaattttatagaagtcgtttggggataaaattttcggtttttttggtattcgt

SEQ ID NO: 886 - DNA, 967 bp, Artificial Sequence
  chemically treated genomic DNA (Homo sapiens) CpG-island No: 886
acgaataccaaaaaaaccgaaaattttatccccaaacgacttctataaaattctttcattttttttttccccccaaaccacgtacccgaaaatcgcgccaacccgaccctacgacacccccactccccactccgcgcgaaacaaacctcgacaaccgcaacgtctcacccgatcttcgcgaccacgtaaaaaaaaataaaacgcgcgattatcacccaaaaaaccgcctctaaccccttccgaccgccgtacgcgcgcaaacgctataacgcccctaaacttaacctcccaaaaactcgcgaacgctcacgataaccaaaaacgaccgcgaaccaaaataaaaccaacgaaaccacctcgtacgcgacgaaaacgtctttaccgccccttccgaaacgctcacgataatcgccgcccccaacaaaaaaatattttacctccaaaacgtccgcccaaaaaaaacgaacaacgcgcttacgcaaaaaaaccgaaccgcgacgacccgcgcctacgcaccaaaactcgacgacgacttacgcctacgcgacgcgacgctacgaaaaccgttaattcatttacatatccccgcctcgcgcgacgacgacgacgaataaaaaacctaaaacgacgacgaaaataactccgcgcgcgataatctcgaaataaaacccgaaccctaacgtcgtcgataaataactcccgaaataaaaaactcgaactcgaccttaaaaacccgccccgaactccgtaataacgtcgcaaactcgaccctctaactacgacgacgaccgcgtccccgccgaattaacctaaataaccgactacgacctcccgaacccgacgcccccatttcctcgcccgcaaaaaccgaaaaacgacgaaccgcgtccacaaaaactcattaattcaatcgttcattcattcctcccgaactcgaaacgacccccgctcgaaaaaaaataacgac

SEQ ID NO: 887 - DNA, 967 bp, Artificial Sequence
  chemically treated genomic DNA (Homo sapiens) CpG-island No: 887
gcgaatgttagggaagtcgaggattttgtttttaggcggtttttgtaaaatttttttattttttttttttttttaaattacgtattcgagggtcgcgttagttcgattttgcggtatttttattttttatttcgcgcgggataggtttcggtagtcgtagcgttttattcggttttcgcggttacgtggggaaaggtggggcgcgcggttgttatttagggagtcgtttttagtttttttcggtcgtcgtacgcgcgtaggcgttgtggcgtttttaggtttggttttttagagattcgcggacgtttacgataattaaggacgatcgcgaattaaggtaaagttaacgaggttatttcgtgcgcgacggaggcgtttttgtcgtttttttcgggacgtttacggtggtcgtcgtttttagtagggaaatgttttgtttttagagcgttcgtttagaagaagcggatagcgcgtttgcgtaagagagtcgggtcgcggcggttcgcgtttgcgtattaggattcggcggcggtttgcgtttgcgcggcgcggcgttgcggagatcgttggtttatttgtatgttttcgtttcgcgcggcggcggcggcgggtgaggagtttgaggcggcggcgggggtggtttcgcgcgcggtggtttcggggtgaggttcgggttttggcgtcgtcggtgggtggttttcggggtgggaagttcgggttcggttttgggggttcgtttcgggtttcgtgatggcgtcgtaggttcggttttttggttgcggcggcggtcgcgttttcgtcgggttggtttgggtggtcggttgcggtttttcgggttcggcgtttttattttttcgttcgtagaggtcgggagacggcgggtcgcgtttataaaggtttattggtttagtcgtttatttatttttttcgaattcggagcggttttcgttcgggaggagataacggt

SEQ ID NO: 888 - DNA, 967 bp, Artificial Sequence
  chemically treated genomic DNA (Homo sapiens) CpG-island No: 888
accgttatctcctcccgaacgaaaaccgctccgaattcgaaaaaaataaataaacgactaaaccaataaacctttataaacgcgacccgccgtctcccgacctctacgaacgaaaaaataaaaacgccgaacccgaaaaaccgcaaccgaccacccaaaccaacccgacgaaaacgcgaccgccgccgcaaccaaaaaaccgaacctacgacgccatcacgaaacccgaaacgaacccccaaaaccgaacccgaacttcccaccccgaaaaccacccaccgacgacgccaaaacccgaacctcaccccgaaaccaccgcgcgcgaaaccacccccgccgccgcctcaaactcctcacccgccgccgccgccgcgcgaaacgaaaacatacaaataaaccaacgatctccgcaacgccgcgccgcgcaaacgcaaaccgccgccgaatcctaatacgcaaacgcgaaccgccgcgacccgactctcttacgcaaacgcgctatccgcttcttctaaacgaacgctctaaaaacaaaacatttccctactaaaaacgacgaccaccgtaaacgtcccgaaaaaaacgacaaaaacgcctccgtcgcgcacgaaataacctcgttaactttaccttaattcgcgatcgtccttaattatcgtaaacgtccgcgaatctctaaaaaaccaaacctaaaaacgccacaacgcctacgcgcgtacgacgaccgaaaaaaactaaaaacgactccctaaataacaaccgcgcgccccacctttccccacgtaaccgcgaaaaccgaataaaacgctacgactaccgaaacctatcccgcgcgaaataaaaaataaaaataccgcaaaatcgaactaacgcgaccctcgaatacgtaatttaaaaaaaaaaaaaaaataaaaaaattttacaaaaaccgcctaaaaacaaaatcctcgacttccctaacattcgc

SEQ ID NO: 889 - DNA, 504 bp, Artificial Sequence
  chemically treated genomic DNA (Homo sapiens) CpG-island No: 889
tcgtatcggggttgagcgttcgttttttgtcggtcgcggttttacgttttcgttttagattttttgttagagagcgagggtcggggagcgagagttagggttcgaggtgatcgtcgtagttggggtcgaggttcgtgtggtaggggattgggataggagtcggagtcgtagggcgagggtttagatcggggttggaagttataggttttttatttcgtttggtcgagcggtcgggatttcgggttcgtagcggatggaagcgggcgttgtttgttcggcggcggtcggggttttttggggttttttcgcgggcgttcggtagggcggtagtagttgtcgcggagaggacgatcgtcgtcggtgtaattaggttttcgcgtttttgttcggtttttggggcgtttaagcgggtcgtttttatcgcggtaattttacgttcgtttttttagtttaattttatagttttgttttgtttttaagtaaggagtcggtttttttgtttat

SEQ ID NO: 890 - DNA, 504 bp, Artificial Sequence
  chemically treated genomic DNA (Homo sapiens) CpG-island No: 890
ataaacaaaaaaaccgactccttacttaaaaacaaaacaaaactataaaattaaactaaaaaaacgaacgtaaaattaccgcgataaaaacgacccgcttaaacgccccaaaaaccgaacaaaaacgcgaaaacctaattacaccgacgacgatcgtcctctccgcgacaactactaccgccctaccgaacgcccgcgaaaaaaccccaaaaaaccccgaccgccgccgaacaaacaacgcccgcttccatccgctacgaacccgaaatcccgaccgctcgaccaaacgaaataaaaaacctataacttccaaccccgatctaaaccctcgccctacgactccgactcctatcccaatcccctaccacacgaacctcgaccccaactacgacgatcacctcgaaccctaactctcgctccccgaccctcgctctctaacaaaaaatctaaaacgaaaacgtaaaaccgcgaccgacaaaaaacgaacgctcaaccccgatacga

SEQ ID NO: 891 - DNA, 504 bp, Artificial Sequence
  chemically treated genomic DNA (Homo sapiens) CpG-island No: 891
gtggatagggaggtcgattttttgtttgggggtaggataaggttgtgaggttgggttggaggggcgggcgtggagttgtcgcggtgaggacggttcgtttgggcgttttagaggtcgggtaggggcgcggggatttggttgtatcggcggcggtcgtttttttcgcggtagttgttgtcgttttgtcgagcgttcgcgggaaaattttagaaggtttcggtcgtcgtcgggtaggtagcgttcgtttttattcgttgcgggttcggagtttcggtcgttcggttaagcgaggtgagaggtttgtggtttttagtttcgatttgggttttcgttttgcgatttcgatttttgttttagttttttattatacggatttcggttttaattacgacggttatttcggattttggttttcgtttttcgattttcgttttttgataaagggtttggggcgagggcgtggagtcgcggtcggtaggaggcgagcgtttagtttcggtgcgg

SEQ ID NO: 892 - DNA, 504 bp, Artificial Sequence
  chemically treated genomic DNA (Homo sapiens) CpG-island No: 892
ccgcaccgaaactaaacgctcgcctcctaccgaccgcgactccacgccctcgccccaaaccctttatcaaaaaacgaaaatcgaaaaacgaaaaccaaaatccgaaataaccgtcgtaattaaaaccgaaatccgtataataaaaaactaaaacaaaaatcgaaatcgcaaaacgaaaacccaaatcgaaactaaaaaccacaaacctctcacctcgcttaaccgaacgaccgaaactccgaacccgcaacgaataaaaacgaacgctacctacccgacgacgaccgaaaccttctaaaattttcccgcgaacgctcgacaaaacgacaacaactaccgcgaaaaaaacgaccgccgccgatacaaccaaatccccgcgcccctacccgacctctaaaacgcccaaacgaaccgtcctcaccgcgacaactccacgcccgcccctccaacccaacctcacaaccttatcctacccccaaacaaaaaatcgacctccctatccac

SEQ ID NO: 893 - DNA, 674 bp, Artificial Sequence
  chemically treated genomic DNA (Homo sapiens) CpG-island No: 893
ggcggagagcgttgcgcggggagataaagggaagggatagggatcgtagggatagggataggagcggttgtcgggttttgggttttcgatcgttattagatatgttttcgagtagtcgaggtaaagggaacggatgggaaaggaaaatagaggagcggtttagaagggcggttcgttgcggtggtggggcgcggattcgggaattcggggcgggtagggtacgggcgtattttttttttttttttttttcgttcgaggtcggtagcgtttttcgtttcgcgttatgtatatttattgtggtgatgagagttcgcgtttcgtgttcgttacggttattgtgcgtttaataaaaataaatattgtcgaggagtcgtcgcgatgcggggcggacgcgcggttcggaaaggggagggggttttaggaagagttatattcgcgagtcgggtttgggttaggggcgaggggagagcgttaagattgtttcgtcgtcgagggcgtcgatggaggtataggggttttcgtggggcgtttcgagagatatcgtgtttggtcggcgggacgtgggttggttttttattcgacggagagaagcggtatttttattttcgggtatcgggtttgggtttcgagcgggggtttttggaatataaggtagtgggggtagacgggtttgg

SEQ ID NO: 894 - DNA, 674 bp, Artificial Sequence
  chemically treated genomic DNA (Homo sapiens) CpG-island No: 894
ccaaacccgtctacccccactaccttatattccaaaaacccccgctcgaaacccaaacccgatacccgaaaataaaaataccgcttctctccgtcgaataaaaaaccaacccacgtcccgccgaccaaacacgatatctctcgaaacgccccacgaaaacccctatacctccatcgacgccctcgacgacgaaacaatcttaacgctctcccctcgcccctaacccaaacccgactcgcgaatataactcttcctaaaaccccctcccctttccgaaccgcgcgtccgccccgcatcgcgacgactcctcgacaatatttatttttattaaacgcacaataaccgtaacgaacacgaaacgcgaactctcatcaccacaataaatatacataacgcgaaacgaaaaacgctaccgacctcgaacgaaaaaaaaaaaaaaaaaaaatacgcccgtaccctacccgccccgaattcccgaatccgcgccccaccaccgcaacgaaccgcccttctaaaccgctcctctattttcctttcccatccgttccctttacctcgactactcgaaaacatatctaataacgatcgaaaacccaaaacccgacaaccgctcctatccctatccctacgatccctatcccttccctttatctccccgcgcaacgctctccgcc

SEQ ID NO: 895 - DNA, 674 bp, Artificial Sequence
  chemically treated genomic DNA (Homo sapiens) CpG-island No: 895
ttaggttcgtttgtttttattgttttgtgttttaggagttttcgttcggagtttagattcggtgttcgaagatgagagtgtcgttttttttcgtcgggtgagaagttagtttacgtttcgtcggttaggtacggtgtttttcggggcgttttacgggaatttttgtgtttttatcggcgttttcggcggcggggtagttttggcgtttttttttcgtttttggtttaggttcggttcgcgggtgtagttttttttagggttttttttttttttcgggtcgcgcgttcgtttcgtatcgcggcggtttttcggtagtgtttgtttttattggacgtatagtgatcgtgacgggtacggggcgcgagtttttattattataatgggtgtgtatggcgcggggcggggggcgttgtcggtttcgagcgagggaggggagaggagggggtgcgttcgtgttttgttcgtttcgagttttcgagttcgcgttttattatcgtagcgagtcgtttttttgggtcgtttttttgttttttttttttattcgttttttttgtttcggttgttcggagatatgtttggtggcgatcggggatttagagttcggtagtcgtttttgtttttgtttttgcgatttttgttttttttttttgttttttcgcgtagcgtttttcgtt

SEQ ID NO: 896 - DNA, 674 bp, Artificial Sequence
  chemically treated genomic DNA (Homo sapiens) CpG-island No: 896
aacgaaaaacgctacgcgaaaaaacaaaaaaaaaaaacaaaaatcgcaaaaacaaaaacaaaaacgactaccgaactctaaatccccgatcgccaccaaacatatctccgaacaaccgaaacaaaaaaaacgaataaaaaaaaaaaacaaaaaaacgacccaaaaaaacgactcgctacgataataaaacgcgaactcgaaaactcgaaacgaacaaaacacgaacgcaccccctcctctcccctccctcgctcgaaaccgacaacgccccccgccccgcgccatacacacccattataataataaaaactcgcgccccgtacccgtcacgatcactatacgtccaataaaaacaaacactaccgaaaaaccgccgcgatacgaaacgaacgcgcgacccgaaaaaaaaaaaaaaccctaaaaaaaactacacccgcgaaccgaacctaaaccaaaaacgaaaaaaaaacgccaaaactaccccgccgccgaaaacgccgataaaaacacaaaaattcccgtaaaacgccccgaaaaacaccgtacctaaccgacgaaacgtaaactaacttctcacccgacgaaaaaaaacgacactctcatcttcgaacaccgaatctaaactccgaacgaaaactcctaaaacacaaaacaataaaaacaaacgaacctaa

SEQ ID NO: 897 - DNA, 627 bp, Artificial Sequence
  chemically treated genomic DNA (Homo sapiens) CpG-island No: 897
cggcgtggcgggtaggtgaattcgatttcggggaaacgattcgttcgcgacgttttcgttttcggttcggttttatttcgatgttgtttatagtgcgggcgtagtttattatttttagtttttgttggattagggttcgggttacggtcgcgtcgatgtttttcgaggttttcgttattagcgttagtcggtcgcgttatcgttttatgtcgggtttggttatgggtttacgtcgttcgttcgtttcgttggattagttcgatacgggggtcgaggagttgacgttcggtcgtttttttgtcgtcgtcgtcgatttgtttgggttcgattcgcgtttagatttattagagtttcggtttgttttcggtcgggattttatttttaggttttcggcgattcgtcgtatttagtcggaggtcgtcgcggttcggtcgtttcgtttttttcgtttttttgtttcgtttcggcgtagggaaatcgggttgcgcgggagcgttttggtagttggcggcgtcgtttttttagtgagcgttgttttttggggttagggaaatcgaggtttagcggggaggtttttttagttttaagggcgtatattgaagcgtttcgtttagtttttttttttta

SEQ ID NO: 898 - DNA, 627 bp, Artificial Sequence
  chemically treated genomic DNA (Homo sapiens) CpG-island No: 898
taaaaaaaaaaaactaaacgaaacgcttcaatatacgcccttaaaactaaaaaaacctccccgctaaacctcgatttccctaaccccaaaaaacaacgctcactaaaaaaacgacgccgccaactaccaaaacgctcccgcgcaacccgatttccctacgccgaaacgaaacaaaaaaacgaaaaaaacgaaacgaccgaaccgcgacgacctccgactaaatacgacgaatcgccgaaaacctaaaaataaaatcccgaccgaaaacaaaccgaaactctaataaatctaaacgcgaatcgaacccaaacaaatcgacgacgacgacaaaaaaacgaccgaacgtcaactcctcgacccccgtatcgaactaatccaacgaaacgaacgaacgacgtaaacccataaccaaacccgacataaaacgataacgcgaccgactaacgctaataacgaaaacctcgaaaaacatcgacgcgaccgtaacccgaaccctaatccaacaaaaactaaaaataataaactacgcccgcactataaacaacatcgaaataaaaccgaaccgaaaacgaaaacgtcgcgaacgaatcgtttccccgaaatcgaattcacctacccgccacgccg

SEQ ID NO: 899 - DNA, 627 bp, Artificial Sequence
  chemically treated genomic DNA (Homo sapiens) CpG-island No: 899
tagagaagggagattaagcgggacgttttagtatgcgtttttggggttgaaggaattttttcgttaaatttcggtttttttgattttaaagggtagcgtttattggggaagcggcgtcgttagttgttaggacgttttcgcgtagttcggtttttttacgtcggggcggggtagaggggcggaaggggcggggcggtcgggtcgcggcggttttcgattggatacggcggatcgtcgggggtttgagggtggagtttcggtcggaggtaggtcgggattttggtgggtttaggcgcggatcggatttaagtaggtcggcggcggcggtaggagagcggtcgggcgttagtttttcgattttcgtgtcgggttagtttagcgaggcggacgggcggcgtgggtttatggttaggttcggtatggagcggtggcgcgatcggttggcgttggtgacgggggtttcggggggtatcggcgcggtcgtggttcgggttttggtttagtagggattgaaggtggtgggttgcgttcgtattgtgggtaatatcgaggtgaggtcgggtcgagggcggggacgtcgcgggcgggtcgttttttcggagtcgggtttatttgttcgttacgtcg

SEQ ID NO: 900 - DNA, 627 bp, Artificial Sequence
  chemically treated genomic DNA (Homo sapiens) CpG-island No: 900
cgacgtaacgaacaaataaacccgactccgaaaaaacgacccgcccgcgacgtccccgccctcgacccgacctcacctcgatattacccacaatacgaacgcaacccaccaccttcaatccctactaaaccaaaacccgaaccacgaccgcgccgataccccccgaaacccccgtcaccaacgccaaccgatcgcgccaccgctccataccgaacctaaccataaacccacgccgcccgtccgcctcgctaaactaacccgacacgaaaatcgaaaaactaacgcccgaccgctctcctaccgccgccgccgacctacttaaatccgatccgcgcctaaacccaccaaaatcccgacctacctccgaccgaaactccaccctcaaacccccgacgatccgccgtatccaatcgaaaaccgccgcgacccgaccgccccgccccttccgcccctctaccccgccccgacgtaaaaaaaccgaactacgcgaaaacgtcctaacaactaacgacgccgcttccccaataaacgctaccctttaaaatcaaaaaaaccgaaatttaacgaaaaaattccttcaaccccaaaaacgcatactaaaacgtcccgcttaatctcccttctcta

SEQ ID NO: 901 - DNA, 892 bp, Artificial Sequence
  chemically treated genomic DNA (Homo sapiens) CpG-island No: 901
agcgtagagtttgggagcgtagagcgcgggggttgcggggtgggttgaaggtgggtagtatcggggggcggcgggcggagcggggtcgggagggggcggtgtcggagggttagcggtgtggcgcgtcgtttgtagggggcgtttgcggcggtttcggtcggagataatcgcgttgagcgggcgtcgtagcgggagcgggagtcggagttgcgaggcgcggcgtagagttggggttgcgcggggtcgggcgagcgggattaggcgggagttatggatcgttagggttcggtttagtttcgcgatgtcgtcggcgagtggttttagcgttttcgcgcggttgttgtcgttgttggggttgttgttcggtagcgtttttcgggttttcggtaagtcgtcgtcggagttttttagttcgtagggtgagttttagtcgggaggggtcgcgatcgcgggtttgcgttttttgattaggttttcgttcgttagtttttttttcgcggcgttcgtgaattgagtggtattttgttttttggattcgggtggggggagttaagcgatttggggttggcgtttttgggggaaagtggaggcggggagagggaggtcgttcggggcgggggttttggggagatataatgggtagtgcgagggtttttaggatttgcgtcgtcgttttttttttatttgttttttttttttttggttcgcgaggcgttgttgtttgagttattgtttatcgaagatattcgtttaggggcgggttggggcgggcgtttgtttcgtagttttttgcgggttgttcgttttcgattttggcggggtgggggcgtcggtattcgttgttattttaggtcgggatcggaggttgggagtttggagttgggtttgaagg

SEQ ID NO: 902 - DNA, 892 bp, Artificial Sequence
  chemically treated genomic DNA (Homo sapiens) CpG-island No: 902
ccttcaaacccaactccaaactcccaacctccgatcccgacctaaaataacaacgaataccgacgcccccaccccgccaaaatcgaaaacgaacaacccgcaaaaaactacgaaacaaacgcccgccccaacccgcccctaaacgaatatcttcgataaacaataactcaaacaacaacgcctcgcgaaccaaaaaaaaaaaaaacaaataaaaaaaaaacgacgacgcaaatcctaaaaaccctcgcactacccattatatctccccaaaacccccgccccgaacgacctccctctccccgcctccactttcccccaaaaacgccaaccccaaatcgcttaactccccccacccgaatccaaaaaacaaaataccactcaattcacgaacgccgcgaaaaaaaaactaacgaacgaaaacctaatcaaaaaacgcaaacccgcgatcgcgacccctcccgactaaaactcaccctacgaactaaaaaactccgacgacgacttaccgaaaacccgaaaaacgctaccgaacaacaaccccaacaacgacaacaaccgcgcgaaaacgctaaaaccactcgccgacgacatcgcgaaactaaaccgaaccctaacgatccataactcccgcctaatcccgctcgcccgaccccgcgcaaccccaactctacgccgcgcctcgcaactccgactcccgctcccgctacgacgcccgctcaacgcgattatctccgaccgaaaccgccgcaaacgccccctacaaacgacgcgccacaccgctaaccctccgacaccgccccctcccgaccccgctccgcccgccgccccccgatactacccaccttcaacccaccccgcaacccccgcgctctacgctcccaaactctacgct

SEQ ID NO: 903 - DNA, 892 bp, Artificial Sequence
  chemically treated genomic DNA (Homo sapiens) CpG-island No: 903
tttttaaatttagttttaggtttttagttttcggtttcggtttagggtggtagcggatgtcggcgtttttatttcgttagggtcgggagcgagtaattcgtagggggttgcggagtaggcgttcgttttagttcgtttttgggcgggtgttttcggtagataatggtttaggtagtagcgtttcgcggattaggagggagaaaaataaatagggagagggcggcggcgtagattttggggattttcgtattatttattgtgtttttttaagattttcgtttcggacggttttttttttttcgtttttatttttttttagaagcgttaattttagatcgtttagttttttttattcgaatttagggaatagaatattatttaatttacgaacgtcgcgaagagggggttgacgggcgggagtttgattagggggcgtaggttcgcgatcgcggtttttttcggttgagatttattttgcgggttggggggtttcggcggcgatttgtcgggagttcgggaggcgttgtcgagtagtagttttagtagcggtaatagtcgcgcgaggacgttggggttattcgtcggcggtatcgcggggttaggtcgggttttagcggtttatggttttcgtttggtttcgttcgttcggtttcgcgtagttttagttttgcgtcgcgtttcgtagtttcggttttcgttttcgttgcggcgttcgtttagcgcgattgttttcgatcggagtcgtcgtaagcgttttttgtaggcggcgcgttatatcgttggtttttcggtatcgttttttttcggtttcgtttcgttcgtcgtttttcggtattgtttatttttagtttatttcgtagttttcgcgttttgcgtttttagattttgcgtt

SEQ ID NO: 904 - DNA, 892 bp, Artificial Sequence
  chemically treated genomic DNA (Homo sapiens) CpG-island No: 904
aacgcaaaatctaaaaacgcaaaacgcgaaaactacgaaataaactaaaaataaacaataccgaaaaacgacgaacgaaacgaaaccgaaaaaaaacgataccgaaaaaccaacgatataacgcgccgcctacaaaaaacgcttacgacgactccgatcgaaaacaatcgcgctaaacgaacgccgcaacgaaaacgaaaaccgaaactacgaaacgcgacgcaaaactaaaactacgcgaaaccgaacgaacgaaaccaaacgaaaaccataaaccgctaaaacccgacctaaccccgcgataccgccgacgaataaccccaacgtcctcgcgcgactattaccgctactaaaactactactcgacaacgcctcccgaactcccgacaaatcgccgccgaaaccccccaacccgcaaaataaatctcaaccgaaaaaaaccgcgatcgcgaacctacgccccctaatcaaactcccgcccgtcaaccccctcttcgcgacgttcgtaaattaaataatattctattccctaaattcgaataaaaaaaactaaacgatctaaaattaacgcttctaaaaaaaaataaaaacgaaaaaaaaaaaaccgtccgaaacgaaaatcttaaaaaaacacaataaataatacgaaaatccccaaaatctacgccgccgccctctccctatttatttttctccctcctaatccgcgaaacgctactacctaaaccattatctaccgaaaacacccgcccaaaaacgaactaaaacgaacgcctactccgcaaccccctacgaattactcgctcccgaccctaacgaaataaaaacgccgacatccgctaccaccctaaaccgaaaccgaaaactaaaaacctaaaactaaatttaaaaa

SEQ ID NO: 905 - DNA, 690 bp, Artificial Sequence
  chemically treated genomic DNA (Homo sapiens) CpG-island No: 905
gggatgatttttttcgtattaagtcgcgttttgttagtcgttcggtcgtcgagttttcgggtgttcgcgggggcgagagcgtcgggtttaagggcgttcgttcggtcgagggtttcggcgggttggagttcggtttagaggagtatcggcgggggttttcgggggttgcggtttttttgtacgagtcgttttcgtcgtcgtcgtttttcgattattatttgggttataagggggcggtcgagggtaagattttcgattttttgttgtcgtagtcggtggattagttggcgcggtcgtcgtcgttgggttaggcggggtagtttattttttgcggttttatcgattattttaaggataacgtttatcgtaacgttatgtttattttggtgattttcgcgtattacgtgcgtttcggcggcgaggcgggcgtcgtcggcgtgggcgacgagtcggtttcgtcggagggtacggtattcggttcggcgcgcgtttttttttagttcgatttttagcgttcgtagatgtcgggttattcgggttcggggggcgagggcggcgggggcggcggcgagggttggggggtcgggcgcgcggcgttcgttagtggtttagttattatttttgtgttatttaacgagtttattatggcgtagtttaacggggagttgtaggttttgatcgagaagaagt

SEQ ID NO: 906 - DNA, 690 bp, Artificial Sequence
  chemically treated genomic DNA (Homo sapiens) CpG-island No: 906
acttcttctcgatcaaaacctacaactccccgttaaactacgccataataaactcgttaaataacacaaaaataataactaaaccactaacgaacgccgcgcgcccgaccccccaaccctcgccgccgcccccgccgccctcgccccccgaacccgaataacccgacatctacgaacgctaaaaatcgaactaaaaaaaaacgcgcgccgaaccgaataccgtaccctccgacgaaaccgactcgtcgcccacgccgacgacgcccgcctcgccgccgaaacgcacgtaatacgcgaaaatcaccaaaataaacataacgttacgataaacgttatccttaaaataatcgataaaaccgcaaaaaataaactaccccgcctaacccaacgacgacgaccgcgccaactaatccaccgactacgacaacaaaaaatcgaaaatcttaccctcgaccgcccccttataacccaaataataatcgaaaaacgacgacgacgaaaacgactcgtacaaaaaaaccgcaacccccgaaaacccccgccgatactcctctaaaccgaactccaacccgccgaaaccctcgaccgaacgaacgcccttaaacccgacgctctcgcccccgcgaacacccgaaaactcgacgaccgaacgactaacaaaacgcgacttaatacgaaaaaaatcatccc

SEQ ID NO: 907 - DNA, 690 bp, Artificial Sequence
  chemically treated genomic DNA (Homo sapiens) CpG-island No: 907
gttttttttcggttagggtttgtagtttttcgttgagttgcgttatggtggattcgttgaatagtatagggatggtgattgagttattgacgggcgtcgcgcgttcggttttttagttttcgtcgtcgttttcgtcgttttcgtttttcgggttcgagtggttcggtatttgcgggcgttgggggtcgggttggggaaaagcgcgcgtcgggtcgggtgtcgtgtttttcggcggggtcggttcgtcgtttacgtcggcggcgttcgtttcgtcgtcgaggcgtacgtagtgcgcggggattattagggtgggtatgacgttgcggtagacgttgtttttgaggtggtcgatggagtcgtagaagatgagttgtttcgtttggtttagcgacggcggtcgcgttagttggtttatcgattgcgatagtaggaagtcgggggttttgttttcggtcgtttttttgtggtttaggtagtggtcgaagggcggcggcggcgagggcggttcgtgtaggaaggtcgtagttttcgagggttttcgtcggtgtttttttaggtcgggttttagttcgtcggggttttcggtcgagcgagcgtttttgagttcggcgttttcgttttcgcgggtattcgaaggttcggcggtcgggcggttggtagagcgcggtttggtgcggaagaagttatttt

SEQ ID NO: 908 - DNA, 690 bp, Artificial Sequence
  chemically treated genomic DNA (Homo sapiens) CpG-island No: 908
aaaataacttcttccgcaccaaaccgcgctctaccaaccgcccgaccgccgaaccttcgaatacccgcgaaaacgaaaacgccgaactcaaaaacgctcgctcgaccgaaaaccccgacgaactaaaacccgacctaaaaaaacaccgacgaaaaccctcgaaaactacgaccttcctacacgaaccgccctcgccgccgccgcccttcgaccactacctaaaccacaaaaaaacgaccgaaaacaaaacccccgacttcctactatcgcaatcgataaaccaactaacgcgaccgccgtcgctaaaccaaacgaaacaactcatcttctacgactccatcgaccacctcaaaaacaacgtctaccgcaacgtcatacccaccctaataatccccgcgcactacgtacgcctcgacgacgaaacgaacgccgccgacgtaaacgacgaaccgaccccgccgaaaaacacgacacccgacccgacgcgcgcttttccccaacccgacccccaacgcccgcaaataccgaaccactcgaacccgaaaaacgaaaacgacgaaaacgacgacgaaaactaaaaaaccgaacgcgcgacgcccgtcaataactcaatcaccatccctatactattcaacgaatccaccataacgcaactcaacgaaaaactacaaaccctaaccgaaaaaaaac

SEQ ID NO: 909 - DNA, 699 bp, Artificial Sequence
  chemically treated genomic DNA (Homo sapiens) CpG-island No: 909
gtcgtattcgcgcgtttggttcgtgtttttcgacgggcgttttaattcgtaagtgcgttatttttatatcgatttgtaggcgggcggcggggtacgtagtatcgacgttagtttggattcgggcgtagatgtttacgaggcgcggttcgcgcgtcgtcggttcgcgagggaggagcgggagcgcgtttcgtttgtcgcgtcgtcgtcgtcgttcgcgttttcgcgtttggcgtttagcgaggatacggagtttagtagtagcgagagtcgtacgggtttttgtttttcggaggataattcgttgacgtcgttgttggacgaggtggcggcgttcgagggtcgggcggttacggtatttcgggggcggggtcgtagtcgcggggatagttttcgtagtagcgttagcgagttgcggcgcgattcgtttattagttcggaggacgagttgggggcggaggtgggcgacgaggcgggagataagaagagttcgtggtagcggcgggaggagcggtcgttgatggtgtttaacgttaagtagcgttcgcgtagggtttggtatcgtttttttcgcgcgggttcgtatttagggtgcgcgtttcgggggttcgcgggggttttcgcgcgtagtttttagttttaggtcggagaggggtttaggggttttggagttgtttcgtggttggtgttgggtcgtgtttt

SEQ ID NO: 910 - DNA, 699 bp, Artificial Sequence
  chemically treated genomic DNA (Homo sapiens) CpG-island No: 910
aaaacacgacccaacaccaaccacgaaacaactccaaaacccctaaacccctctccgacctaaaactaaaaactacgcgcgaaaacccccgcgaacccccgaaacgcgcaccctaaatacgaacccgcgcgaaaaaaacgataccaaaccctacgcgaacgctacttaacgttaaacaccatcaacgaccgctcctcccgccgctaccacgaactcttcttatctcccgcctcgtcgcccacctccgcccccaactcgtcctccgaactaataaacgaatcgcgccgcaactcgctaacgctactacgaaaactatccccgcgactacgaccccgcccccgaaataccgtaaccgcccgaccctcgaacgccgccacctcgtccaacaacgacgtcaacgaattatcctccgaaaaacaaaaacccgtacgactctcgctactactaaactccgtatcctcgctaaacgccaaacgcgaaaacgcgaacgacgacgacgacgcgacaaacgaaacgcgctcccgctcctccctcgcgaaccgacgacgcgcgaaccgcgcctcgtaaacatctacgcccgaatccaaactaacgtcgatactacgtaccccgccgcccgcctacaaatcgatataaaaataacgcacttacgaattaaaacgcccgtcgaaaaacacgaaccaaacgcgcgaatacgac

SEQ ID NO: 911 - DNA, 699 bp, Artificial Sequence
  chemically treated genomic DNA (Homo sapiens) CpG-island No: 911
aagatacgatttagtattaattacggaatagttttaaggtttttgggttttttttcggtttggggttgggagttacgcgcgagggttttcgcgggttttcggggcgcgtattttgggtgcgggttcgcgcgggaggggcggtgttaggttttgcgcgggcgttatttgacgttgaatattattagcggtcgtttttttcgtcgttgttacgggttttttttgtttttcgtttcgtcgtttattttcgtttttagttcgtttttcgggttggtgagcgagtcgcgtcgtagttcgttggcgttgttgcgggagttgttttcgcggttgcggtttcgttttcggggtatcgtggtcgttcggttttcgggcgtcgttatttcgtttagtagcggcgttagcgagttgtttttcggagagtagaggttcgtgcggttttcgttgttgttgggtttcgtgttttcgttgagcgttaggcgcgggggcgcgggcggcggcggcggcgcggtaggcggggcgcgttttcgtttttttttcgcgggtcggcggcgcgcgggtcgcgtttcgtggatatttacgttcgagtttaggttggcgtcggtgttgcgtgtttcgtcgttcgtttgtaggtcgatgtaagagtggcgtatttgcgagttggagcgttcgtcgagggatacgaattaggcgcgcgggtgcggt

SEQ ID NO: 912 - DNA, 699 bp, Artificial Sequence
  chemically treated genomic DNA (Homo sapiens) CpG-island No: 912
accgcacccgcgcgcctaattcgtatccctcgacgaacgctccaactcgcaaatacgccactcttacatcgacctacaaacgaacgacgaaacacgcaacaccgacgccaacctaaactcgaacgtaaatatccacgaaacgcgacccgcgcgccgccgacccgcgaaaaaaaaacgaaaacgcgccccgcctaccgcgccgccgccgccgcccgcgcccccgcgcctaacgctcaacgaaaacacgaaacccaacaacaacgaaaaccgcacgaacctctactctccgaaaaacaactcgctaacgccgctactaaacgaaataacgacgcccgaaaaccgaacgaccacgataccccgaaaacgaaaccgcaaccgcgaaaacaactcccgcaacaacgccaacgaactacgacgcgactcgctcaccaacccgaaaaacgaactaaaaacgaaaataaacgacgaaacgaaaaacaaaaaaaacccgtaacaacgacgaaaaaaacgaccgctaataatattcaacgtcaaataacgcccgcgcaaaacctaacaccgcccctcccgcgcgaacccgcacccaaaatacgcgccccgaaaacccgcgaaaaccctcgcgcgtaactcccaaccccaaaccgaaaaaaaacccaaaaaccttaaaactattccgtaattaatactaaatcgtatctt

SEQ ID NO: 913 - DNA, 500 bp, Artificial Sequence
  chemically treated genomic DNA (Homo sapiens) CpG-island No: 913
ttcgcgtagagttatttcgggttttaggcgaggttgtgatttgtttaaggttacgcgaaggtgggatttggttttttatggttttttcgtttttttcggtttgtttacgttttagttcgttcggttcgggttgtagtttagttaatttagtggcgtatattcgcgcggggttttgtggtttataaagcgttttgtagttgtaggtttgttttgtaatttgaaaaatgggggcgatgttaaggtcggcgagagaagtcgtcgcgaagtttttaagtttcggcgggtagttcggtaagtaatttcgtcgttattgtgtggtttttcggcgatttcgaagaatttatttttattgtcgtcgttacgtatttgaggatatcgaggaagagggttagtgcgttattttcgtcgtttagaaggcgttggggtttttagtgtcgcgcgcggtcggggcggggttggtgaaaatgcgttgttaaggtcggcgcggcggtttacgtttg

SEQ ID NO: 914 - DNA, 500 bp, Artificial Sequence
  chemically treated genomic DNA (Homo sapiens) CpG-island No: 914
caaacgtaaaccgccgcgccgaccttaacaacgcattttcaccaaccccgccccgaccgcgcgcgacactaaaaaccccaacgccttctaaacgacgaaaataacgcactaaccctcttcctcgatatcctcaaatacgtaacgacgacaataaaaataaattcttcgaaatcgccgaaaaaccacacaataacgacgaaattacttaccgaactacccgccgaaacttaaaaacttcgcgacgacttctctcgccgaccttaacatcgcccccatttttcaaattacaaaacaaacctacaactacaaaacgctttataaaccacaaaaccccgcgcgaatatacgccactaaattaactaaactacaacccgaaccgaacgaactaaaacgtaaacaaaccgaaaaaaacgaaaaaaccataaaaaaccaaatcccaccttcgcgtaaccttaaacaaatcacaacctcgcctaaaacccgaaataactctacgcgaa

SEQ ID NO: 915 - DNA, 500 bp, Artificial Sequence
  chemically treated genomic DNA (Homo sapiens) CpG-island No: 915
taggcgtgagtcgtcgcgtcggttttaatagcgtatttttattagtttcgtttcggtcgcgcgcggtattggaaattttagcgttttttggacggcgagggtgacgtattggttttttttttcggtgtttttaggtgcgtggcggcggtagtgagaatgagtttttcgagatcgtcgggagattatataataacgacgaagttatttgtcgggttattcgtcgagatttgaaaatttcgcggcgatttttttcgtcggttttagtatcgtttttattttttaggttataggataggtttgtaattgtaaaacgttttgtaaattatagggtttcgcgcgggtgtgcgttattgggttagttgagttgtagttcgggtcgggcgggttgggacgtgagtaagtcgggggagacgggagagttatggggagttagattttattttcgcgtgattttgggtaaattataatttcgtttaaggttcggaatgattttgcgcgga

SEQ ID NO: 916 - DNA, 500 bp, Artificial Sequence
  chemically treated genomic DNA (Homo sapiens) CpG-island No: 916
tccgcgcaaaatcattccgaaccttaaacgaaattataatttacccaaaatcacgcgaaaataaaatctaactccccataactctcccgtctcccccgacttactcacgtcccaacccgcccgacccgaactacaactcaactaacccaataacgcacacccgcgcgaaaccctataatttacaaaacgttttacaattacaaacctatcctataacctaaaaaataaaaacgatactaaaaccgacgaaaaaaatcgccgcgaaattttcaaatctcgacgaataacccgacaaataacttcgtcgttattatataatctcccgacgatctcgaaaaactcattctcactaccgccgccacgcacctaaaaacaccgaaaaaaaaaaccaatacgtcaccctcgccgtccaaaaaacgctaaaatttccaataccgcgcgcgaccgaaacgaaactaataaaaatacgctattaaaaccgacgcgacgactcacgccta

SEQ ID NO: 917 - DNA, 728 bp, Artificial Sequence
  chemically treated genomic DNA (Homo sapiens) CpG-island No: 917
tggataggtatggaattcgttcgcgcggtttcgttaagggggcgggatcgtcgtaggttcgggcggagacgcgagtgggcggagtcggggatatttcgggtttgcggttggtcggttcgcggcgggcggggtttcgtggcgcggtgtaggggcggggtttttttggttgttttcggcgtcggtttaggtgcgttgcgagcgcgcgcggatcgcgtataggcggcggagtcggtatgggttcgtttgattttgggcgtcgcgtcgtacgagtattagtttagagttaggtaggcggtattgggtcggggttgggggcggagacggaagcgggggttttcgggcggtcgtgcgagttagggtaggtgttggggtcgtcgagttggcgtggttttttttatttggcggtttttcgtcgttcggggtcgggagtgtcgtcgagggtcggggagacgttttggttttacgtttttatttttcgttttttcggttgcgtttcgggtttgtattttggggcgggaatttagagattgtttttttttttcgggtttcgggtttggttcgttcggtcgggcggggagggtcgggtattttagttcgtagttttgaggaggcgacgggttttttttggttatcggatttgtttatacgttattttcgatgttcggtcgtttttttacgtttagtaatttgggtttttaggtgtttgttcggggttttggtgttggagt

SEQ ID NO: 918 - DNA, 728 bp, Artificial Sequence
  chemically treated genomic DNA (Homo sapiens) CpG-island No: 918
actccaacaccaaaaccccgaacaaacacctaaaaacccaaattactaaacgtaaaaaaacgaccgaacatcgaaaataacgtataaacaaatccgataaccaaaaaaaacccgtcgcctcctcaaaactacgaactaaaatacccgaccctccccgcccgaccgaacgaaccaaacccgaaacccgaaaaaaaaaaacaatctctaaattcccgccccaaaatacaaacccgaaacgcaaccgaaaaaacgaaaaataaaaacgtaaaaccaaaacgtctccccgaccctcgacgacactcccgaccccgaacgacgaaaaaccgccaaataaaaaaaaccacgccaactcgacgaccccaacacctaccctaactcgcacgaccgcccgaaaacccccgcttccgtctccgcccccaaccccgacccaataccgcctacctaactctaaactaatactcgtacgacgcgacgcccaaaatcaaacgaacccataccgactccgccgcctatacgcgatccgcgcgcgctcgcaacgcacctaaaccgacgccgaaaacaaccaaaaaaaccccgcccctacaccgcgccacgaaaccccgcccgccgcgaaccgaccaaccgcaaacccgaaatatccccgactccgcccactcgcgtctccgcccgaacctacgacgatcccgcccccttaacgaaaccgcgcgaacgaattccatacctatcca

SEQ ID NO: 919 - DNA, 728 bp, Artificial Sequence
  chemically treated genomic DNA (Homo sapiens) CpG-island No: 919
attttagtattaaggtttcgggtaggtatttgagagtttaagttattgggcgtggagggacggtcgggtatcgagggtgacgtgtaaatagattcggtgattaagaagggttcgtcgtttttttaggattgcgggttgggatgttcggtttttttcgttcggtcggacgggttagattcggggttcggagagaaagagtagtttttgggttttcgttttaaaatgtaggttcggggcgtagtcgggagagcgggaagtaggaacgtaggattaggacgttttttcgattttcggcgatattttcggtttcgaacggcggagagtcgttaggtgagggggattacgttagttcgacggttttagtatttgttttggttcgtacggtcgttcggagattttcgttttcgttttcgtttttagtttcggtttagtgtcgtttatttggttttaggttggtgttcgtgcggcgcggcgtttagggttaggcgggtttatatcggtttcgtcgtttgtgcgcggttcgcgcgcgttcgtagcgtatttaggtcgacgtcgaaagtagttaagggggtttcgtttttatatcgcgttacgaggtttcgttcgtcgcgggtcgattagtcgtaagttcggagtgttttcggtttcgtttattcgcgttttcgttcggatttgcgacggtttcgtttttttgacggggtcgcgcgggcgagttttatgtttgttta

SEQ ID NO: 920 - DNA, 728 bp, Artificial Sequence
  chemically treated genomic DNA (Homo sapiens) CpG-island No: 920
taaacaaacataaaactcgcccgcgcgaccccgtcaaaaaaacgaaaccgtcgcaaatccgaacgaaaacgcgaataaacgaaaccgaaaacactccgaacttacgactaatcgacccgcgacgaacgaaacctcgtaacgcgatataaaaacgaaacccccttaactactttcgacgtcgacctaaatacgctacgaacgcgcgcgaaccgcgcacaaacgacgaaaccgatataaacccgcctaaccctaaacgccgcgccgcacgaacaccaacctaaaaccaaataaacgacactaaaccgaaactaaaaacgaaaacgaaaacgaaaatctccgaacgaccgtacgaaccaaaacaaatactaaaaccgtcgaactaacgtaatccccctcacctaacgactctccgccgttcgaaaccgaaaatatcgccgaaaatcgaaaaaacgtcctaatcctacgttcctacttcccgctctcccgactacgccccgaacctacattttaaaacgaaaacccaaaaactactctttctctccgaaccccgaatctaacccgtccgaccgaacgaaaaaaaccgaacatcccaacccgcaatcctaaaaaaacgacgaacccttcttaatcaccgaatctatttacacgtcaccctcgatacccgaccgtccctccacgcccaataacttaaactctcaaatacctacccgaaaccttaatactaaaat

SEQ ID NO: 921 - DNA, 784 bp, Artificial Sequence
  chemically treated genomic DNA (Homo sapiens) CpG-island No: 921
tagagtcgatggaagtgaagatggggtttattcggtgatgtggtcggggcggcgggggttaggggttagggtaggtcgtgcgtttatagttgtttttgtagttttaggattacgttttttagttttcgtttttcgcgttggttttgcgtcgtcgttttttttagttgtagttgaagtcgtcggtttttcgtttttaggttttttagttgcgattcgcgtagacgtattagtttttttaggtagttttgcggggcgtcggtttagttcgggcggttgggaggacgtttcggtcgcggtttttattttcgtttcgtttcgggatgttcggatttttcgttcggttcgttcgtttttcgggttcgtcggcgtcgcgtattttttgcgcgtagacgatgcggaatttttgttttattttgtgttatttgttgtattagttgtttttatcggtgacgagcgggaggtacgggtgttcgggcgagttgttttcgttcgtgttgttttcggcgttgtgtcgttttttttcgttcgttaggtagtcgtagtttgggagagggagtagtgggtacggtcggtttcgttttttttttcgcgcgtttgcgttggtcgttgagggcggtgggattaggacgtttttaggatgtttcgaggtttcgtttttcgtttcgtcgtagttatggagtcgtttatttttgcgtgaattttaggtagggcgtgtaatcgatgattacgggggttttttcgtttaggatttttttttttagatagaagttgaggtagaggagtt

SEQ ID NO: 922 - DNA, 784 bp, Artificial Sequence
  chemically treated genomic DNA (Homo sapiens) CpG-island No: 922
aactcctctacctcaacttctatctaaaaaaaaaaatcctaaacgaaaaaacccccgtaatcatcgattacacgccctacctaaaattcacgcaaaaataaacgactccataactacgacgaaacgaaaaacgaaacctcgaaacatcctaaaaacgtcctaatcccaccgccctcaacgaccaacgcaaacgcgcgaaaaaaaaaacgaaaccgaccgtacccactactccctctcccaaactacgactacctaacgaacgaaaaaaaacgacacaacgccgaaaacaacacgaacgaaaacaactcgcccgaacacccgtacctcccgctcgtcaccgataaaaacaactaatacaacaaataacacaaaataaaacaaaaattccgcatcgtctacgcgcaaaaaatacgcgacgccgacgaacccgaaaaacgaacgaaccgaacgaaaaatccgaacatcccgaaacgaaacgaaaataaaaaccgcgaccgaaacgtcctcccaaccgcccgaactaaaccgacgccccgcaaaactacctaaaaaaactaatacgtctacgcgaatcgcaactaaaaaacctaaaaacgaaaaaccgacgacttcaactacaactaaaaaaaacgacgacgcaaaaccaacgcgaaaaacgaaaactaaaaaacgtaatcctaaaactacaaaaacaactataaacgcacgacctaccctaacccctaacccccgccgccccgaccacatcaccgaataaaccccatcttcacttccatcgactcta

SEQ ID NO: 923 - DNA, 784 bp, Artificial Sequence
  chemically treated genomic DNA (Homo sapiens) CpG-island No: 923
ggtttttttgttttagtttttgtttaaagggggaagttttggacgggaagattttcgtggttatcgattatacgttttatttaaagtttacgtagaggtgagcggttttatgattgcggcggggcgggggacggggtttcgggatattttggggacgttttggttttatcgtttttagcggttagcgtagacgcgcggggggaggggcgggatcggtcgtgtttattgtttttttttttaagttacgattatttgacggacgaggaggagcggtatagcgtcgagagtagtacgagcgaggataattcgttcgagtattcgtatttttcgttcgttatcgatgaggatagttggtatagtaagtggtataagatggagtagaagtttcgtatcgtttacgcgtagaaggtgcgcgacgtcggcgggttcggggggcgggcgggtcgggcgggggattcgggtatttcggggcggggcggggatgggggtcgcggtcgggacgtttttttagtcgttcgggttgagtcggcgtttcgtagggttatttggaggagttggtgcgtttgcgcgagtcgtagttgaaggatttggaggcggagaatcggcggttttagttgtagttggaggaggcggcggcgtagaattagcgcgagaaacgggagttggaaggcgtgattttggagttgtaggagtagttgtgagcgtacggtttgttttaatttttgattttcgtcgtttcgattatattatcgggtgaattttatttttatttttatcgatttta

SEQ ID NO: 924 - DNA, 784 bp, Artificial Sequence
  chemically treated genomic DNA (Homo sapiens) CpG-island No: 924
taaaatcgataaaaataaaaataaaattcacccgataatataatcgaaacgacgaaaatcaaaaattaaaacaaaccgtacgctcacaactactcctacaactccaaaatcacgccttccaactcccgtttctcgcgctaattctacgccgccgcctcctccaactacaactaaaaccgccgattctccgcctccaaatccttcaactacgactcgcgcaaacgcaccaactcctccaaataaccctacgaaacgccgactcaacccgaacgactaaaaaaacgtcccgaccgcgacccccatccccgccccgccccgaaatacccgaatcccccgcccgacccgcccgccccccgaacccgccgacgtcgcgcaccttctacgcgtaaacgatacgaaacttctactccatcttataccacttactataccaactatcctcatcgataacgaacgaaaaatacgaatactcgaacgaattatcctcgctcgtactactctcgacgctataccgctcctcctcgtccgtcaaataatcgtaacttaaaaaaaaaaacaataaacacgaccgatcccgcccctccccccgcgcgtctacgctaaccgctaaaaacgataaaaccaaaacgtccccaaaatatcccgaaaccccgtcccccgccccgccgcaatcataaaaccgctcacctctacgtaaactttaaataaaacgtataatcgataaccacgaaaatcttcccgtccaaaacttccccctttaaacaaaaactaaaacaaaaaaacc

SEQ ID NO: 925 - DNA, 515 bp, Artificial Sequence
  chemically treated genomic DNA (Homo sapiens) CpG-island No: 925
ttaattcgcgggtttttcgtttttattttattacggaataggtttaaatttataggtcgtgcgtttttattcgggtattagtcgggttttaatttgcgggttacgcgtttttatttaggcgttgattagattttaattcgcgggtcgcgcgcgtttttatttaggtagtcgagaaggtcgtaggtagcggtagcgcgtaggatgcggatcgaggtcggcggggacgtcgcgggggattcggggttcgcgggtcggcggtcgggtagtagttgtagaaggtttagcgttaagcggagttcgtcgttgtttaggtagagcgcgtggaaggttcgcggttggaagtttagtacgagttgcgtggttgcgtttcgcgtggggtagtagaaggtttttaggcgcggggaggttatgggttgtgttcgcggacgcggttcgggtgtgttaggatttcgtcggtttgtttgggttatgtgttgggcgggttgggggcggtattatgtgttttgggttttttt

SEQ ID NO: 926 - DNA, 515 bp, Artificial Sequence
  chemically treated genomic DNA (Homo sapiens) CpG-island No: 926
aaaaaaacccaaaacacataataccgcccccaacccgcccaacacataacccaaacaaaccgacgaaatcctaacacacccgaaccgcgtccgcgaacacaacccataacctccccgcgcctaaaaaccttctactaccccacgcgaaacgcaaccacgcaactcgtactaaacttccaaccgcgaaccttccacgcgctctacctaaacaacgacgaactccgcttaacgctaaaccttctacaactactacccgaccgccgacccgcgaaccccgaatcccccgcgacgtccccgccgacctcgatccgcatcctacgcgctaccgctacctacgaccttctcgactacctaaataaaaacgcgcgcgacccgcgaattaaaatctaatcaacgcctaaataaaaacgcgtaacccgcaaattaaaacccgactaatacccgaataaaaacgcacgacctataaatttaaacctattccgtaataaaataaaaacgaaaaacccgcgaattaa

SEQ ID NO: 927 - DNA, 515 bp, Artificial Sequence
  chemically treated genomic DNA (Homo sapiens) CpG-island No: 927
ggagaggtttagggtatatgatgtcgtttttagttcgtttagtatatgatttaggtaggtcggcggggttttggtatattcgagtcgcgttcgcgaatatagtttatggttttttcgcgtttagggattttttgttgttttacgcgggacgtagttacgtagttcgtgttgagtttttagtcgcgggttttttacgcgttttgtttgggtagcggcgggtttcgtttggcgttgggttttttgtagttgttgttcggtcgtcggttcgcgggtttcgggtttttcgcgacgttttcgtcggtttcggttcgtattttgcgcgttgtcgttgtttgcgattttttcggttgtttgggtaagggcgcgcgcggttcgcgggttggaatttgattagcgtttgggtgagggcgcgtggttcgtaggttgagattcgattggtgttcggataagggcgtacggtttgtggatttggatttgtttcgtgatggagtgaggacgagaggttcgcgggttgg

SEQ ID NO: 928 - DNA, 515 bp, Artificial Sequence
  chemically treated genomic DNA (Homo sapiens) CpG-island No: 928
ccaacccgcgaacctctcgtcctcactccatcacgaaacaaatccaaatccacaaaccgtacgcccttatccgaacaccaatcgaatctcaacctacgaaccacgcgccctcacccaaacgctaatcaaattccaacccgcgaaccgcgcgcgcccttacccaaacaaccgaaaaaatcgcaaacaacgacaacgcgcaaaatacgaaccgaaaccgacgaaaacgtcgcgaaaaacccgaaacccgcgaaccgacgaccgaacaacaactacaaaaaacccaacgccaaacgaaacccgccgctacccaaacaaaacgcgtaaaaaacccgcgactaaaaactcaacacgaactacgtaactacgtcccgcgtaaaacaacaaaaaatccctaaacgcgaaaaaaccataaactatattcgcgaacgcgactcgaatataccaaaaccccgccgacctacctaaatcatatactaaacgaactaaaaacgacatcatataccctaaacctctcc

SEQ ID NO: 929 - DNA, 1434 bp, Artificial Sequence
  chemically treated genomic DNA (Homo sapiens) CpG-island No: 929
ttttgcgcggtggttgtgggaggtttttgcgggaaggtgggaaggttttcgtggaaacggggtacggtttttttgcgttcgttttttaagtttttttagaggtcggattcgcgttcggtttaggttgttggggggcgtttttttcggttttttaagtttagagtgtgagtgcgcgtagggtcgcgcgggacgggcggtttttttgtttcggggtagcggttatagcgcgggtattagggtttttcgcggcgttttcgtttttatttgcgcggtagttcgcggtgcgcgagaataaagtgtgggcgtcggcgggtcgcgcgtttcgagacggaggaggtcggagattttcgttacgttatttcgcgtttattttatttgtcgttttatttgttcggttttggtttttaatcggcgggcgggggcgtttagagtttcgaagtattgtagagttttggcgcgggaggaaaggttcgatttggcgtcggggttttcgttttcgttttcgttcgcgttggtttcgttagtttcggggcgcgcgtttttcgatttcgatttcgaattcgttgaacggcgcgcgcgtttgagcgtttttttcggttcgtttttttttatcgggcgagagaatcggggcgcgtttttttttagtttttttcggtacgagcggtcgcgtgggtttttgagcgcgtatttgatttcgttttttatttttcgggtcgcgggttggatttttggacgcgtttttcgtgatcggtttcgcggtacgagttttcgaacgcgttcgtttcgtttttcgtcggtttcgtttttttttcgttagtttcggtttcggtttcggtttcggtttcgtttttttttcgttagtttttcgggtttttttcgtcgtcgggtcggtattttttttttaagttacggcgtaagttttgcggcgttcggagttttttttgcgattttacggtcgggattgttcggagtgtatgggcgcgggttagggacgttgagcggtcgcgttatggagggcgtcgagtttcgcgcgcggttcgagcgtttggtcgaggtcgagacgcgggcggcggacggcgggcgtttggtggaggtgtagttgagcggcggcgtttcgtggggttttattttgaagggcggtcgcgagtacggcgagtcgttggttattattaaggtaaggcggtcgcggggcgcgggcgttgatagtcgggagttggtcgttttgcggggcgcgtcgaggtaggggcgcgggaggggcggtaggttcgcgttttcgggtttggcgcgcgcgtttgttggggttatttgtcgggtttgggcgtcgggatcggcgtgggcgtgtgattttggcggtttttcgcgtttcgtagagtttaaatggtttttgttcggagttttttttttttttttttttttttttcgggtaggggtttg

SEQ ID NO: 930 - DNA, 1434 bp, Artificial Sequence
  chemically treated genomic DNA (Homo sapiens) CpG-island No: 930
caaacccctacccgaaaaaaaaaaaaaaaaaaaaaaaaaactccgaacaaaaaccatttaaactctacgaaacgcgaaaaaccgccaaaatcacacgcccacgccgatcccgacgcccaaacccgacaaataaccccaacaaacgcgcgcgccaaacccgaaaacgcgaacctaccgcccctcccgcgcccctacctcgacgcgccccgcaaaacgaccaactcccgactatcaacgcccgcgccccgcgaccgccttaccttaataataaccaacgactcgccgtactcgcgaccgcccttcaaaataaaaccccacgaaacgccgccgctcaactacacctccaccaaacgcccgccgtccgccgcccgcgtctcgacctcgaccaaacgctcgaaccgcgcgcgaaactcgacgccctccataacgcgaccgctcaacgtccctaacccgcgcccatacactccgaacaatcccgaccgtaaaatcgcaaaaaaaactccgaacgccgcaaaacttacgccgtaacttaaaaaaaaaataccgacccgacgacgaaaaaaacccgaaaaactaacgaaaaaaaaacgaaaccgaaaccgaaaccgaaaccgaaactaacgaaaaaaaaacgaaaccgacgaaaaacgaaacgaacgcgttcgaaaactcgtaccgcgaaaccgatcacgaaaaacgcgtccaaaaatccaacccgcgacccgaaaaataaaaaacgaaatcaaatacgcgctcaaaaacccacgcgaccgctcgtaccgaaaaaaactaaaaaaaaacgcgccccgattctctcgcccgataaaaaaaaacgaaccgaaaaaaacgctcaaacgcgcgcgccgttcaacgaattcgaaatcgaaatcgaaaaacgcgcgccccgaaactaacgaaaccaacgcgaacgaaaacgaaaacgaaaaccccgacgccaaatcgaacctttcctcccgcgccaaaactctacaatacttcgaaactctaaacgcccccgcccgccgattaaaaaccaaaaccgaacaaataaaacgacaaataaaataaacgcgaaataacgtaacgaaaatctccgacctcctccgtctcgaaacgcgcgacccgccgacgcccacactttattctcgcgcaccgcgaactaccgcgcaaataaaaacgaaaacgccgcgaaaaaccctaatacccgcgctataaccgctaccccgaaacaaaaaaaccgcccgtcccgcgcgaccctacgcgcactcacactctaaacttaaaaaaccgaaaaaaacgccccccaacaacctaaaccgaacgcgaatccgacctctaaaaaaacttaaaaaacgaacgcaaaaaaaccgtaccccgtttccacgaaaaccttcccaccttcccgcaaaaacctcccacaaccaccgcgcaaaa

SEQ ID NO: 931 - DNA, 1434 bp, Artificial Sequence
  chemically treated genomic DNA (Homo sapiens) CpG-island No: 931
taggtttttgttcggaggagggagggggaggggaaagggatttcgggtaggagttatttaaattttgcgaggcgcggggaatcgttaggattatacgtttacgtcggtttcggcgtttaggttcggtaggtgattttagtagacgcgcgcgttagattcgggggcgcgagtttatcgtttttttcgcgtttttatttcgacgcgtttcgtagggcggttagttttcggttgttagcgttcgcgtttcgcggtcgttttattttggtgatgattagcggttcgtcgtgttcgcggtcgttttttagggtgaagttttacggggcgtcgtcgtttagttgtatttttattaggcgttcgtcgttcgtcgttcgcgtttcggtttcggttaggcgttcgggtcgcgcgcggggttcggcgttttttatggcgcgatcgtttagcgtttttggttcgcgtttatgtatttcgggtagtttcggtcgtgggatcgtaagggaggtttcgagcgtcgtagaatttgcgtcgtaatttggaaagaaagtgtcggttcggcggcggagggagttcggagggttggcggggagggggcggggtcggggtcggggtcggggtcggggttggcggggagggggcggggtcgacggggggcggggcgggcgcgttcgggagttcgtatcgcggggtcggttacggggagcgcgtttagaggtttagttcgcggttcgaagggtgagggacggggttaggtgcgcgtttaggggtttacgcggtcgttcgtatcggggagagttggagaggggcgcgtttcggttttttcgttcggtggaggggagcgggtcgggaggggcgtttaggcgcgcgcgtcgtttagcgggttcggggtcggggtcgaggagcgcgcgtttcggggttggcggagttagcgcgggcgaggacgggggcggaggtttcggcgttaggtcgggttttttttttcgcgttagagttttgtagtgtttcgaagttttgggcgttttcgttcgtcggttggaggttaggatcgggtaggtgaggcggtaggtgagatgggcgcggggtggcgtggcgggagttttcggtttttttcgtttcggggcgcgcggttcgtcggcgtttatattttgttttcgcgtatcgcgggttgtcgcgtaggtgagagcggaagcgtcgcgggaggttttggtgttcgcgttgtggtcgttgtttcggggtagagggatcgttcgtttcgcgcggttttgcgcgtatttatattttggatttagagagtcgggaagggcgttttttagtagtttgagtcgggcgcgggttcggtttttggaggggtttggaaggcgggcgtagaaggatcgtgtttcgtttttacgagggtttttttattttttcgtagaggttttttatagttatcgcgtagaa

SEQ ID NO: 932 - DNA, 1434 bp, Artificial Sequence
  chemically treated genomic DNA (Homo sapiens) CpG-island No: 932
ttctacgcgataactataaaaaacctctacgaaaaaataaaaaaaccctcgtaaaaacgaaacacgatccttctacgcccgccttccaaacccctccaaaaaccgaacccgcgcccgactcaaactactaaaaaacgcccttcccgactctctaaatccaaaatataaatacgcgcaaaaccgcgcgaaacgaacgatccctctaccccgaaacaacgaccacaacgcgaacaccaaaacctcccgcgacgcttccgctctcacctacgcgacaacccgcgatacgcgaaaacaaaatataaacgccgacgaaccgcgcgccccgaaacgaaaaaaaccgaaaactcccgccacgccaccccgcgcccatctcacctaccgcctcacctacccgatcctaacctccaaccgacgaacgaaaacgcccaaaacttcgaaacactacaaaactctaacgcgaaaaaaaaaacccgacctaacgccgaaacctccgcccccgtcctcgcccgcgctaactccgccaaccccgaaacgcgcgctcctcgaccccgaccccgaacccgctaaacgacgcgcgcgcctaaacgcccctcccgacccgctcccctccaccgaacgaaaaaaccgaaacgcgcccctctccaactctccccgatacgaacgaccgcgtaaacccctaaacgcgcacctaaccccgtccctcacccttcgaaccgcgaactaaacctctaaacgcgctccccgtaaccgaccccgcgatacgaactcccgaacgcgcccgccccgccccccgtcgaccccgccccctccccgccaaccccgaccccgaccccgaccccgaccccgccccctccccgccaaccctccgaactccctccgccgccgaaccgacactttctttccaaattacgacgcaaattctacgacgctcgaaacctcccttacgatcccacgaccgaaactacccgaaatacataaacgcgaaccaaaaacgctaaacgatcgcgccataaaaaacgccgaaccccgcgcgcgacccgaacgcctaaccgaaaccgaaacgcgaacgacgaacgacgaacgcctaataaaaatacaactaaacgacgacgccccgtaaaacttcaccctaaaaaacgaccgcgaacacgacgaaccgctaatcatcaccaaaataaaacgaccgcgaaacgcgaacgctaacaaccgaaaactaaccgccctacgaaacgcgtcgaaataaaaacgcgaaaaaaacgataaactcgcgcccccgaatctaacgcgcgcgtctactaaaatcacctaccgaacctaaacgccgaaaccgacgtaaacgtataatcctaacgattccccgcgcctcgcaaaatttaaataactcctacccgaaatccctttcccctccccctccctcctccgaacaaaaaccta

SEQ ID NO: 933 - DNA, 1038 bp, Artificial Sequence
  chemically treated genomic DNA (Homo sapiens) CpG-island No: 933
gtttcgcggtaggcgagttttattttgggggtattggggcgtagagtaggcgggcgggtttggcggcggcgcggggtattagtgaaggggaagtaggcggtttttgcgcgcgttcggagttagcgtgtggttagtaggagtgcgcggtttggaggttcggggcgagcgcggtatcggtagcgcgtgcgagggcgcgttcgcggatcgttgcgagtgggttggacggggtacgtcggattgcgttggtttggtcgtcgattttattgtttcggggcgaggggttaggtcgtagtttagttcggggttgagaggcgatttattttagtcgttttttggtcgtttcgtatcgggttttagggtttcgtttcgttatttatcggttaagcgtcgatttttttaattaagcgagtgttgcgtttcgttcgttcgcgatttttcgtcgtcggtcgtcgatcgttgagttttcggttcgtggtcgtttcgtttcggtttcgggtttcgttttttcgttttttcggtcgttttcggggttacgtttttttcggaggttgtaattttgtttcgtttcgcgttttttttttttggtcgtatcgcgattcgtggtttcgtttatttttttacgttaattaatgagacggtcgtttcggtaagttcgttttttcgttttttagtaacgattggttaacgaggtttggtttttagaaatgggtattattttcggacgatgtttgtagaagggagatcgttgggcgggcggattgatagaaggcggaggcgattagggtgttggtggaattatatatgcgttttcggtttttggtagttttattagttgcgttttcgaggttacgggaaggaagggcgagtgtgcgtatgcgtgggtattttttgttattgatttcggttattttggagatagcgaggcgttttttttcgtgggtcgcgcgcgtttcgttttttttttgttgttaagcggtggcggttgaggcgggaggtggtgggggtagagacgtttttattgagtttttatcgtgtgtt

SEQ ID NO: 934 - DNA, 1038 bp, Artificial Sequence
  chemically treated genomic DNA (Homo sapiens) CpG-island No: 934
aacacacgataaaaactcaataaaaacgtctctacccccaccacctcccgcctcaaccgccaccgcttaacaacaaaaaaaaaacgaaacgcgcgcgacccacgaaaaaaaacgcctcgctatctccaaaataaccgaaatcaataacaaaaaatacccacgcatacgcacactcgcccttccttcccgtaacctcgaaaacgcaactaataaaactaccaaaaaccgaaaacgcatatataattccaccaacaccctaatcgcctccgccttctatcaatccgcccgcccaacgatctcccttctacaaacatcgtccgaaaataatacccatttctaaaaaccaaacctcgttaaccaatcgttactaaaaaacgaaaaaacgaacttaccgaaacgaccgtctcattaattaacgtaaaaaaataaacgaaaccacgaatcgcgatacgaccaaaaaaaaaaaacgcgaaacgaaacaaaattacaacctccgaaaaaaacgtaaccccgaaaacgaccgaaaaaacgaaaaaacgaaacccgaaaccgaaacgaaacgaccacgaaccgaaaactcaacgatcgacgaccgacgacgaaaaatcgcgaacgaacgaaacgcaacactcgcttaattaaaaaaatcgacgcttaaccgataaataacgaaacgaaaccctaaaacccgatacgaaacgaccaaaaaacgactaaaataaatcgcctctcaaccccgaactaaactacgacctaacccctcgccccgaaacaataaaatcgacgaccaaaccaacgcaatccgacgtaccccgtccaacccactcgcaacgatccgcgaacgcgccctcgcacgcgctaccgataccgcgctcgccccgaacctccaaaccgcgcactcctactaaccacacgctaactccgaacgcgcgcaaaaaccgcctacttccccttcactaataccccgcgccgccgccaaacccgcccgcctactctacgccccaatacccccaaaataaaactcgcctaccgcgaaac

SEQ ID NO: 935 - DNA, 1038 bp, Artificial Sequence
  chemically treated genomic DNA (Homo sapiens) CpG-island No: 935
ggtatacggtaagagtttaataaaaacgtttttatttttattatttttcgttttagtcgttatcgtttggtagtagagaggaagcggaacgcgcgcgatttacgagggagagcgtttcgttgtttttaaggtaatcgaagttagtggtagggagtgtttacgtatgcgtatattcgtttttttttttcgtaatttcgagaacgtagttggtaagattgttagaagtcgagggcgtatgtgtggttttattaatattttagtcgttttcgttttttgttagttcgttcgtttagcgattttttttttataaatatcgttcggaaatagtgtttatttttggaaattaggtttcgttaattaatcgttgttagggagcgggaagacgggtttgtcgggacgatcgttttattggttggcgtaggggagtgggcggggttacgggtcgcggtgcggttaaagaaaggaggcgcgaagcgaggtaaagttatagttttcgggggaggcgtggtttcgggggcggtcgagaaggcgagggggcggagttcgggatcggggcggggcgattacgggtcgggagtttagcggtcggcggtcggcggcgggagatcgcgggcgagcggagcgtaatattcgtttggttggggagatcggcgtttggtcggtaggtgacggggcgggattttggggttcggtgcgaggcgattagggagcggttgggatggatcgttttttagtttcgggttgggttgcggtttggtttttcgtttcggagtagtggggtcggcggttaggttagcgtagttcgacgtatttcgtttaatttattcgtagcggttcgcgggcgcgttttcgtacgcgttgtcggtgtcgcgttcgtttcgggtttttaggtcgcgtatttttgttggttatacgttggtttcgagcgcgcgtaggggtcgtttgttttttttttattagtgtttcgcgtcgtcgttaggttcgttcgtttgttttgcgttttagtgtttttaggatggagttcgtttgtcgcggggt

SEQ ID NO: 936 - DNA, 1038 bp, Artificial Sequence
  chemically treated genomic DNA (Homo sapiens) CpG-island No: 936
accccgcgacaaacgaactccatcctaaaaacactaaaacgcaaaacaaacgaacgaacctaacgacgacgcgaaacactaataaaaaaaaaacaaacgacccctacgcgcgctcgaaaccaacgtataaccaacaaaaatacgcgacctaaaaacccgaaacgaacgcgacaccgacaacgcgtacgaaaacgcgcccgcgaaccgctacgaataaattaaacgaaatacgtcgaactacgctaacctaaccgccgaccccactactccgaaacgaaaaaccaaaccgcaacccaacccgaaactaaaaaacgatccatcccaaccgctccctaatcgcctcgcaccgaaccccaaaatcccgccccgtcacctaccgaccaaacgccgatctccccaaccaaacgaatattacgctccgctcgcccgcgatctcccgccgccgaccgccgaccgctaaactcccgacccgtaatcgccccgccccgatcccgaactccgccccctcgccttctcgaccgcccccgaaaccacgcctcccccgaaaactataactttacctcgcttcgcgcctcctttctttaaccgcaccgcgacccgtaaccccgcccactcccctacgccaaccaataaaacgatcgtcccgacaaacccgtcttcccgctccctaacaacgattaattaacgaaacctaatttccaaaaataaacactatttccgaacgatatttataaaaaaaaaatcgctaaacgaacgaactaacaaaaaacgaaaacgactaaaatattaataaaaccacacatacgccctcgacttctaacaatcttaccaactacgttctcgaaattacgaaaaaaaaaaacgaatatacgcatacgtaaacactccctaccactaacttcgattaccttaaaaacaacgaaacgctctccctcgtaaatcgcgcgcgttccgcttcctctctactaccaaacgataacgactaaaacgaaaaataataaaaataaaaacgtttttattaaactcttaccgtatacc

SEQ ID NO: 937 - DNA, 850 bp, Artificial Sequence
  chemically treated genomic DNA (Homo sapiens) CpG-island No: 937
gacgttgagcggagcgggtttttttgcgtttcggtttcgtgcgggcgcggtttttagcgcgttattcgttttcgcgttttagcgttcggggaggtatttgttttgcgtttttttttcgcggcgggacgtgtaagttttggatgatttcgtagacgttttttgagtcgttgcgcgttagaggtcgcgggtatatttaggagttcgttacgttgtaggttttgaagttgtcgttgttttttaggaggtcggcgggaggcgagacggcggcgtaggttaggtcgtttagggattgcgcgggtcgtacgggcgtcgcgggtcgtaggtataggtaggttggtaggtcgggcgttaggttgttgcgttgggtcgcggcgtcgcgttgcgtagggtcgtatagggagttggttcggttttcggatttttcgggggcgtcgtcggggttcgcggtcgtcgtcgcgtttataaatcggtagtcgtaggcgagcggtttaggggtcgcggggttcgggtggggatttggcggcgcggcggcggtagggttgtttagcgcgggtagttcgcgtacgtattgcgtaggtaggtagaaggggcggtcgtcgggtttacgtcgtacgtgttattagtgttcggtgttgcgtcgtagtagtcggtagcgtttattcggtcggatggttacgcggcgttcgtttttgtcggtgtattcgaaggggtgttttattagtacgtatacgttttttattacgttcgtcgttatcgtagtcgcggcgtttttttgcgggtaataagaaggagggtcgcggaggttaagattatcgagtttggaatagtttcgtattcggggatagatttg

SEQ ID NO: 938 - DNA, 850 bp, Artificial Sequence
  chemically treated genomic DNA (Homo sapiens) CpG-island No: 938
caaatctatccccgaatacgaaactattccaaactcgataatcttaacctccgcgaccctccttcttattacccgcaaaaaaacgccgcgactacgataacgacgaacgtaataaaaaacgtatacgtactaataaaacaccccttcgaatacaccgacaaaaacgaacgccgcgtaaccatccgaccgaataaacgctaccgactactacgacgcaacaccgaacactaataacacgtacgacgtaaacccgacgaccgccccttctacctacctacgcaatacgtacgcgaactacccgcgctaaacaaccctaccgccgccgcgccgccaaatccccacccgaaccccgcgacccctaaaccgctcgcctacgactaccgatttataaacgcgacgacgaccgcgaaccccgacgacgcccccgaaaaatccgaaaaccgaaccaactccctatacgaccctacgcaacgcgacgccgcgacccaacgcaacaacctaacgcccgacctaccaacctacctatacctacgacccgcgacgcccgtacgacccgcgcaatccctaaacgacctaacctacgccgccgtctcgcctcccgccgacctcctaaaaaacaacgacaacttcaaaacctacaacgtaacgaactcctaaatatacccgcgacctctaacgcgcaacgactcaaaaaacgtctacgaaatcatccaaaacttacacgtcccgccgcgaaaaaaaaacgcaaaacaaatacctccccgaacgctaaaacgcgaaaacgaataacgcgctaaaaaccgcgcccgcacgaaaccgaaacgcaaaaaaacccgctccgctcaacgtc

SEQ ID NO: 939 - DNA, 850 bp, Artificial Sequence
  chemically treated genomic DNA (Homo sapiens) CpG-island No: 939
taagtttgttttcgagtgcggggttattttaggttcggtggttttgattttcgcggtttttttttttgttgttcgtaggaaaacgtcgcggttgcgatggcggcggacgtggtgggggacgtgtacgtgttggtggagtattttttcgagtatatcggtaaggacgggcgtcgcgtggttattcggtcgaatgagcgttatcggttgttgcggcgtagtatcgagtattggtggtacgtgcggcgtgagttcggcggtcgttttttttatttgtttgcgtagtacgtgcgcgagttgttcgcgttgggtaattttgtcgtcgtcgcgtcgttaggtttttattcgagtttcgcggtttttgagtcgttcgtttacgattatcggtttgtgagcgcggcggcgatcgcgggtttcgacggcgttttcgaggagttcggaggtcgagttagttttttgtgcggttttgcgtaacgcggcgtcgcgatttagcgtagtagtttggcgttcggtttgttagtttgtttgtatttgcggttcgcggcgttcgtgcggttcgcgtagtttttgaacgatttggtttgcgtcgtcgtttcgtttttcgtcggttttttaggaagtagcggtagttttaaggtttgtagcgtggcgggtttttgggtgtgttcgcggtttttggcgcgtagcgatttagagaacgtttacgaggttatttaggatttgtacgtttcgtcgcgggaggagagcgtagagtaggtattttttcgggcgttggggcgcggaggcgggtggcgcgttagggatcgcgttcgtacggagtcggggcgtaaggagattcgtttcgtttagcgtt

SEQ ID NO: 940 - DNA, 850 bp, Artificial Sequence
  chemically treated genomic DNA (Homo sapiens) CpG-island No: 940
aacgctaaacgaaacgaatctccttacgccccgactccgtacgaacgcgatccctaacgcgccacccgcctccgcgccccaacgcccgaaaaaatacctactctacgctctcctcccgcgacgaaacgtacaaatcctaaataacctcgtaaacgttctctaaatcgctacgcgccaaaaaccgcgaacacacccaaaaacccgccacgctacaaaccttaaaactaccgctacttcctaaaaaaccgacgaaaaacgaaacgacgacgcaaaccaaatcgttcaaaaactacgcgaaccgcacgaacgccgcgaaccgcaaatacaaacaaactaacaaaccgaacgccaaactactacgctaaatcgcgacgccgcgttacgcaaaaccgcacaaaaaactaactcgacctccgaactcctcgaaaacgccgtcgaaacccgcgatcgccgccgcgctcacaaaccgataatcgtaaacgaacgactcaaaaaccgcgaaactcgaataaaaacctaacgacgcgacgacgacaaaattacccaacgcgaacaactcgcgcacgtactacgcaaacaaataaaaaaaacgaccgccgaactcacgccgcacgtaccaccaatactcgatactacgccgcaacaaccgataacgctcattcgaccgaataaccacgcgacgcccgtccttaccgatatactcgaaaaaatactccaccaacacgtacacgtcccccaccacgtccgccgccatcgcaaccgcgacgttttcctacgaacaacaaaaaaaaaaaccgcgaaaatcaaaaccaccgaacctaaaataaccccgcactcgaaaacaaactta

SEQ ID NO: 941 - DNA, 1352 bp, Artificial Sequence
  chemically treated genomic DNA (Homo sapiens) CpG-island No: 941
tatatattcgttttcggattagttcgggtttcgcgtttttttttttttttcgttttttgttttcggtgatttcggagcggttcggtcgttttcgcgttaagttgttcgcgcgttttttattgtcgtcgttttttatcgttttcgtttcgttttcgttgagttttttggcgtttatcggggtttcgggaagtcgagggtcgagttgggttggaagggggacggtttcggtcgggttttcgtcgtttcgggagtagttttataaaagtttgagtcgtaggtgcgagcggagttggcgttgtcgtcggcgggtttcgggggtttagtttatttttcgatattttttgaattttttatttgtttttttttattcgttgggtcgggtgcgttcgcggatcgttttgcgttttcggggttttcgggcggggcgcgaaagagggcgcgagggcgttcggggttagtagggcgtagggtcgggttggggtgttcgggttcggggcgtcggggggttcggggtgttttgtcggatcggcgggcgttttcgggttcgtttattttgcgtagtttgttaattgagtttttcgatgaatattttgttgcgggaggaggagagatataaagggttcgcgtgagcgtcgggcgttagggcgtagggggcgcgggttcgggtttcggggaggttcggtcggattcggatcggttatgttggcggggtcggggcgggcgcgggttaagtaggtcgggtcgggtcgtattaggggtcgtgcggcgagttcggggaggcgaggtcgggttggggcgcgttagtttttatcgggagtcgcgggcggcgcgggtagcggagcggcggcggcggcggcggcggcggcgttcggcgcggggtagatgaggagcgcggcgaagggggtcggacggataggttatgttgttttttttttcgatttcgttcgggcgggcgggcggggacggtcgaggggagggttcgtcgggggtcgatttgtcggttttttttttcgtcgttttgcgcgtataaagtttcgcgttcgttcgcgagttcgggcgttcgcggaggcggcggcgtcgggatttttttttcgcggggtttttgggttttcggggtcgagcgagattttcgaatttcggtgcgggtcgggattagggcgcggtcgtattttttatttatttcggcgcgggggttcggtcgcgggaacgttttttcggaatgaagcgtttttcggtgtttttaaggtagttcggtttcggatcgggaattttttcggtttttttttttaggtttttgttgtttagaattgaagagaattttaattttttcgggtcgggcgggagatagtttt

SEQ ID NO: 942 - DNA, 1352 bp, Artificial Sequence
  chemically treated genomic DNA (Homo sapiens) CpG-island No: 942
aaaactatctcccgcccgacccgaaaaaattaaaattctcttcaattctaaacaacaaaaacctaaaaaaaaaaaccgaaaaaattcccgatccgaaaccgaactaccttaaaaacaccgaaaaacgcttcattccgaaaaaacgttcccgcgaccgaacccccgcgccgaaataaataaaaaatacgaccgcgccctaatcccgacccgcaccgaaattcgaaaatctcgctcgaccccgaaaacccaaaaaccccgcgaaaaaaaaatcccgacgccgccgcctccgcgaacgcccgaactcgcgaacgaacgcgaaactttatacgcgcaaaacgacgaaaaaaaaaaccgacaaatcgacccccgacgaaccctcccctcgaccgtccccgcccgcccgcccgaacgaaatcgaaaaaaaaaacaacataacctatccgtccgacccccttcgccgcgctcctcatctaccccgcgccgaacgccgccgccgccgccgccgccgccgctccgctacccgcgccgcccgcgactcccgataaaaactaacgcgccccaacccgacctcgcctccccgaactcgccgcacgacccctaatacgacccgacccgacctacttaacccgcgcccgccccgaccccgccaacataaccgatccgaatccgaccgaacctccccgaaacccgaacccgcgccccctacgccctaacgcccgacgctcacgcgaaccctttatatctctcctcctcccgcaacaaaatattcatcgaaaaactcaattaacaaactacgcaaaataaacgaacccgaaaacgcccgccgatccgacaaaacaccccgaaccccccgacgccccgaacccgaacaccccaacccgaccctacgccctactaaccccgaacgccctcgcgccctctttcgcgccccgcccgaaaaccccgaaaacgcaaaacgatccgcgaacgcacccgacccaacgaataaaaaaaaacaaataaaaaattcaaaaaatatcgaaaaataaactaaacccccgaaacccgccgacgacaacgccaactccgctcgcacctacgactcaaacttttataaaactactcccgaaacgacgaaaacccgaccgaaaccgtcccccttccaacccaactcgaccctcgacttcccgaaaccccgataaacgccaaaaaactcaacgaaaacgaaacgaaaacgataaaaaacgacgacaataaaaaacgcgcgaacaacttaacgcgaaaacgaccgaaccgctccgaaatcaccgaaaacaaaaaacgaaaaaaaaaaaaaaacgcgaaacccgaactaatccgaaaacgaatatata

SEQ ID NO: 943 - DNA, 1352 bp, Artificial Sequence
  chemically treated genomic DNA (Homo sapiens) CpG-island No: 943
agggttatttttcgttcgattcgaggagattggggttttttttaattttggatagtagggatttgagagggaagatcgggggggttttcgattcggaatcgagttattttgaaggtatcgggaagcgttttatttcgggagggcgttttcgcggtcgggttttcgcgtcggggtgggtggggggtgcggtcgcgttttggtttcggttcgtatcgggattcgggggtttcgttcggtttcggagatttaggagtttcgcgggaagggggtttcggcgtcgtcgttttcgcgggcgttcgggttcgcgggcgagcgcggggttttatgcgcgtagggcggcggggggaggagtcggtaggtcggttttcggcgggtttttttttcggtcgttttcgttcgttcgttcgagcggggtcgggggagggggtagtatggtttgttcgttcggtttttttcgtcgcgttttttatttgtttcgcgtcgagcgtcgtcgtcgtcgtcgtcgtcgtcgtttcgttgttcgcgtcgttcgcggttttcgatggagattgacgcgttttagttcggtttcgttttttcggattcgtcgtacgatttttggtacggttcggttcggtttgtttggttcgcgttcgtttcggtttcgttaatatggtcgattcgggttcggtcgggttttttcggagttcgggttcgcgttttttgcgttttggcgttcggcgtttacgcgggttttttgtgtttttttttttttcgtagtaagatgtttatcgggggatttagttggtagattacgtagggtgagcgagttcgggagcgttcgtcggttcggtagggtatttcggatttttcggcgtttcggattcggatattttagttcggttttgcgttttgttgatttcgggcgttttcgcgttttttttcgcgtttcgttcggagatttcgagagcgtagggcgattcgcgagcgtattcggtttagcgggtggaggggagtagatgaggggtttagggggtatcggggggtgggttgggttttcgggattcgtcggcggtagcgttaatttcgttcgtatttgcggtttaaatttttgtgaggttgttttcggagcggcgggaattcggtcggagtcgttttttttttagtttagttcggttttcggtttttcggggtttcggtgggcgttaggaggtttagcgggaacggggcgagggcggtggggggcggcggtagtggagaacgcgcgggtagtttggcgcgggggcggtcgggtcgtttcggggttatcgggggtaaaggacgggggggggggaagggcgcggggttcgggttggttcgaaggcgggtgtgtg

SEQ ID NO: 944 - DNA, 1352 bp, Artificial Sequence
  chemically treated genomic DNA (Homo sapiens) CpG-island No: 944
cacacacccgccttcgaaccaacccgaaccccgcgcccttcccccccccccgtcctttacccccgataaccccgaaacgacccgaccgcccccgcgccaaactacccgcgcgttctccactaccgccgccccccaccgccctcgccccgttcccgctaaacctcctaacgcccaccgaaaccccgaaaaaccgaaaaccgaactaaactaaaaaaaaaacgactccgaccgaattcccgccgctccgaaaacaacctcacaaaaatttaaaccgcaaatacgaacgaaattaacgctaccgccgacgaatcccgaaaacccaacccaccccccgataccccctaaacccctcatctactcccctccacccgctaaaccgaatacgctcgcgaatcgccctacgctctcgaaatctccgaacgaaacgcgaaaaaaaacgcgaaaacgcccgaaatcaacaaaacgcaaaaccgaactaaaatatccgaatccgaaacgccgaaaaatccgaaataccctaccgaaccgacgaacgctcccgaactcgctcaccctacgtaatctaccaactaaatcccccgataaacatcttactacgaaaaaaaaaaaaacacaaaaaacccgcgtaaacgccgaacgccaaaacgcaaaaaacgcgaacccgaactccgaaaaaacccgaccgaacccgaatcgaccatattaacgaaaccgaaacgaacgcgaaccaaacaaaccgaaccgaaccgtaccaaaaatcgtacgacgaatccgaaaaaacgaaaccgaactaaaacgcgtcaatctccatcgaaaaccgcgaacgacgcgaacaacgaaacgacgacgacgacgacgacgacgacgctcgacgcgaaacaaataaaaaacgcgacgaaaaaaaccgaacgaacaaaccatactaccccctcccccgaccccgctcgaacgaacgaacgaaaacgaccgaaaaaaaaacccgccgaaaaccgacctaccgactcctccccccgccgccctacgcgcataaaaccccgcgctcgcccgcgaacccgaacgcccgcgaaaacgacgacgccgaaacccccttcccgcgaaactcctaaatctccgaaaccgaacgaaacccccgaatcccgatacgaaccgaaaccaaaacgcgaccgcaccccccacccaccccgacgcgaaaacccgaccgcgaaaacgccctcccgaaataaaacgcttcccgataccttcaaaataactcgattccgaatcgaaaacccccccgatcttccctctcaaatccctactatccaaaattaaaaaaaaccccaatctcctcgaatcgaacgaaaaataaccct

SEQ ID NO: 945 - DNA, 777 bp, Artificial Sequence
  chemically treated genomic DNA (Homo sapiens) CpG-island No: 945
ttcgtagcgcggcgaacgtttcgtttagcgattgggtgcgttggcgttttcgtacgttggttatgattcgttgcgtttgtagtttttcgtaagattgcggattttcgtcgtcgttgttgttgtcgtcgtcgtcgttcgcgtcgtcgtcgtcgttatagttcgtagattttttgtcgcgtttgttttgggtcgggttgttcggttcgtcgtcgttttcgacgtttttattcgcggtttcgtcgggtttcgcgtcgtcgttcgcgttgcgtttgttgttgcgtcgtttgcgtttttcgcgtttgtcgttcggcggttgttgtcggtttggttttttttcgttgttgtttaggttgtcgtcggtcggcgagattggcgagttggatacgttttgtattatttttcgagcggcgacgcgtggtttcgcgggttcggggtagaggagaagagcggggcgttttagttcgttagtttttttcgcgcgcggcgtcggttcgggcgatgcggttcgcggaggagagagtaggaggacggacgggagggattttcgcggggagggcgcgcgggggaggcggggagggaggcgggagggggaggggacggtgtggatggtttcgaggtttaaaaagaaagcgtttaacggttggacgtatatttcgttaggttttttggaaacggtgtcggtgttgtagagttcgcgaggtgtttgggagttgggcgagagttgtagatttggaggtttttatattttcgtgtaggcggaaagtttgggggtagtag

SEQ ID NO: 946 - DNA, 777 bp, Artificial Sequence
  chemically treated genomic DNA (Homo sapiens) CpG-island No: 946
ctactacccccaaactttccgcctacacgaaaatataaaaacctccaaatctacaactctcgcccaactcccaaacacctcgcgaactctacaacaccgacaccgtttccaaaaaacctaacgaaatatacgtccaaccgttaaacgctttctttttaaacctcgaaaccatccacaccgtcccctccccctcccgcctccctccccgcctcccccgcgcgccctccccgcgaaaatccctcccgtccgtcctcctactctctcctccgcgaaccgcatcgcccgaaccgacgccgcgcgcgaaaaaaactaacgaactaaaacgccccgctcttctcctctaccccgaacccgcgaaaccacgcgtcgccgctcgaaaaataatacaaaacgtatccaactcgccaatctcgccgaccgacgacaacctaaacaacaacgaaaaaaaaccaaaccgacaacaaccgccgaacgacaaacgcgaaaaacgcaaacgacgcaacaacaaacgcaacgcgaacgacgacgcgaaacccgacgaaaccgcgaataaaaacgtcgaaaacgacgacgaaccgaacaacccgacccaaaacaaacgcgacaaaaaatctacgaactataacgacgacgacgacgcgaacgacgacgacgacaacaacaacgacgacgaaaatccgcaatcttacgaaaaactacaaacgcaacgaatcataaccaacgtacgaaaacgccaacgcacccaatcgctaaacgaaacgttcgccgcgctacgaa

SEQ ID NO: 947 - DNA, 777 bp, Artificial Sequence
  chemically treated genomic DNA (Homo sapiens) CpG-island No: 947
ttgttgtttttaaatttttcgtttgtacggaggtataagagtttttaagtttgtagttttcgtttaatttttagatatttcgcgggttttgtagtatcggtatcgtttttaggaggtttggcggggtgtgcgtttagtcgttgggcgttttttttttggatttcggggttatttatatcgttttttttttttttcgttttttttttcgtttttttcgcgcgtttttttcgcggaggtttttttcgttcgtttttttgttttttttttcgcgggtcgtatcgttcgggtcggcgtcgcgcgcgggggaagttggcgggttgaggcgtttcgttttttttttttgtttcgggttcgcgaggttacgcgtcgtcgttcgagagatgatgtaggacgtgtttagttcgttagtttcgtcggtcgacgatagtttgagtaatagcgaggaagagttagatcggtagtagtcgtcgagcggtaagcgcgggggacgtaagcggcgtagtagtaggcgtagcgcgggcggcggcgcggggttcggcggagtcgcgggtgggggcgtcggaggcggcgacgagtcgggtagttcggtttagggtaagcgcggtaagaagtttgcgggttgtggcggcggcggcggcgcgggcggcggcggcggtagtagtagcggcggcgggagttcgtagttttacgaggagttgtagacgtagcgggttatggttaacgtgcgggagcgttagcgtatttagtcgttgaacgaggcgttcgtcgcgttgcgga

SEQ ID NO: 948 - DNA, 777 bp, Artificial Sequence
  chemically treated genomic DNA (Homo sapiens) CpG-island No: 948
tccgcaacgcgacgaacgcctcgttcaacgactaaatacgctaacgctcccgcacgttaaccataacccgctacgtctacaactcctcgtaaaactacgaactcccgccgccgctactactaccgccgccgccgcccgcgccgccgccgccgccacaacccgcaaacttcttaccgcgcttaccctaaaccgaactacccgactcgtcgccgcctccgacgcccccacccgcgactccgccgaaccccgcgccgccgcccgcgctacgcctactactacgccgcttacgtcccccgcgcttaccgctcgacgactactaccgatctaactcttcctcgctattactcaaactatcgtcgaccgacgaaactaacgaactaaacacgtcctacatcatctctcgaacgacgacgcgtaacctcgcgaacccgaaacaaaaaaaaaaaacgaaacgcctcaacccgccaacttcccccgcgcgcgacgccgacccgaacgatacgacccgcgaaaaaaaaaacaaaaaaacgaacgaaaaaaacctccgcgaaaaaaacgcgcgaaaaaaacgaaaaaaaaaacgaaaaaaaaaaaaaacgatataaataaccccgaaatccaaaaaaaaaacgcccaacgactaaacgcacaccccgccaaacctcctaaaaacgataccgatactacaaaacccgcgaaatatctaaaaattaaacgaaaactacaaacttaaaaactcttatacctccgtacaaacgaaaaatttaaaaacaacaa

SEQ ID NO: 949 - DNA, 504 bp, Artificial Sequence
  chemically treated genomic DNA (Homo sapiens) CpG-island No: 949
ggcggattcggatggagtagtttttgagtgacggttttttcgggtttgggcgttaagggcgaaggtcgaaagtcggcgttagaaagaggaacgttagtttttatcgaagattttaaggtcgcggtaaggagataattgttcgggggaggttatgcgttcgggtttagcggttttttagttcgcggacgcgtttaaatttcgtcgggtcggaagtcggcgtcgggaagcgcgtgtgttttttacgttcgttttcgcgtagtcgcggtcgttgtcgtcgcgttttcgtttgtttttttgcgtcgcgcgttttttagtgtcggttttagagggcgtttttgggttagcgtgtagggttggcggcggcggcgttcgggttatttttgggagcggagtgggggcggagcgagacggaagtagtttaggagatttgaggcgtaggttgcggtttttaaggtgatcgcgttttatgtgggattcgttttaatgtttttgaatttgggtttg

SEQ ID NO: 950 - DNA, 504 bp, Artificial Sequence
  chemically treated genomic DNA (Homo sapiens) CpG-island No: 950
caaacccaaattcaaaaacattaaaacgaatcccacataaaacgcgatcaccttaaaaaccgcaacctacgcctcaaatctcctaaactacttccgtctcgctccgcccccactccgctcccaaaaataacccgaacgccgccgccgccaaccctacacgctaacccaaaaacgccctctaaaaccgacactaaaaaacgcgcgacgcaaaaaaacaaacgaaaacgcgacgacaacgaccgcgactacgcgaaaacgaacgtaaaaaacacacgcgcttcccgacgccgacttccgacccgacgaaatttaaacgcgtccgcgaactaaaaaaccgctaaacccgaacgcataacctcccccgaacaattatctccttaccgcgaccttaaaatcttcgataaaaactaacgttcctctttctaacgccgactttcgaccttcgcccttaacgcccaaacccgaaaaaaccgtcactcaaaaactactccatccgaatccgcc

SEQ ID NO: 951 - DNA, 504 bp, Artificial Sequence
  chemically treated genomic DNA (Homo sapiens) CpG-island No: 951
taaatttaggtttagaggtattagggcgagttttatatagggcgcggttattttggggatcgtagtttacgttttaagttttttgagttgttttcgtttcgtttcgtttttatttcgtttttagaggtgattcgagcgtcgtcgtcgttagttttatacgttagtttaggagcgttttttagagtcggtattggagagcgcgcggcgtagggaggtaggcggagacgcggcggtagcggtcgcggttgcgcgggggcggacgtaaaaggtatacgcgtttttcggcgtcggttttcggttcggcgaggtttgagcgcgttcgcgggttgggaggtcgttggattcgggcgtatggtttttttcgggtagttatttttttgtcgcgattttgaggttttcggtaagaattggcgtttttttttttaacgtcggttttcggttttcgtttttgacgtttaggttcggggaggtcgttatttagaaattgttttattcgagttcgtt

SEQ ID NO: 952 - DNA, 504 bp, Artificial Sequence
  chemically treated genomic DNA (Homo sapiens) CpG-island No: 952
aacgaactcgaataaaacaatttctaaataacgacctccccgaacctaaacgtcaaaaacgaaaaccgaaaaccgacgttaaaaaaaaaaacgccaattcttaccgaaaacctcaaaatcgcgacaaaaaaataactacccgaaaaaaaccatacgcccgaatccaacgacctcccaacccgcgaacgcgctcaaacctcgccgaaccgaaaaccgacgccgaaaaacgcgtataccttttacgtccgcccccgcgcaaccgcgaccgctaccgccgcgtctccgcctacctccctacgccgcgcgctctccaataccgactctaaaaaacgctcctaaactaacgtataaaactaacgacgacgacgctcgaatcacctctaaaaacgaaataaaaacgaaacgaaacgaaaacaactcaaaaaacttaaaacgtaaactacgatccccaaaataaccgcgccctatataaaactcgccctaatacctctaaacctaaattta

SEQ ID NO: 953 - DNA, 522 bp, Artificial Sequence
  chemically treated genomic DNA (Homo sapiens) CpG-island No: 953
gcgcggtttttcgggttaatcgtcgggcggcgcgcgtcgagaagttttgggtaaagtatttagaattggtcgcgtgttggtggcgttcgttagtcggttcgggagaggggatttgagcgtttcgcggtcggtgcgtagcgcggtttcggtttcgtagtttgtttgtaagtggttattttcgttttcgatttttgcggtcggtgcgggagttgttagttgtacgttgcgggggtatcggagaagtcggggttgttttttttcggttttgtgcgttaatttcggagttcggtttcggggaattagggagcgttttcggttgtatagcgtttaggtgagtggcggggcgttcgtttaaatggggtttgggtgtcggggggtttggcggcggcgcgggttcggaagggttgttgtttgcggggcgtcgcggttttttgtcggatcggggtttgttcgagtcgttcggggaggtttcggttttggggtagatttaagtttgggagtttgggtgtcggttgtagtttt

SEQ ID NO: 954 - DNA, 522 bp, Artificial Sequence
  chemically treated genomic DNA (Homo sapiens) CpG-island No: 954
aaaactacaaccgacacccaaactcccaaacttaaatctaccccaaaaccgaaacctccccgaacgactcgaacaaaccccgatccgacaaaaaaccgcgacgccccgcaaacaacaacccttccgaacccgcgccgccgccaaaccccccgacacccaaaccccatttaaacgaacgccccgccactcacctaaacgctatacaaccgaaaacgctccctaattccccgaaaccgaactccgaaattaacgcacaaaaccgaaaaaaaacaaccccgacttctccgatacccccgcaacgtacaactaacaactcccgcaccgaccgcaaaaatcgaaaacgaaaataaccacttacaaacaaactacgaaaccgaaaccgcgctacgcaccgaccgcgaaacgctcaaatcccctctcccgaaccgactaacgaacgccaccaacacgcgaccaattctaaatactttacccaaaacttctcgacgcgcgccgcccgacgattaacccgaaaaaccgcgc

SEQ ID NO: 955 - DNA, 522 bp, Artificial Sequence
  chemically treated genomic DNA (Homo sapiens) CpG-island No: 955
ggagttgtagtcggtatttaagtttttaggtttgggtttgttttagggtcggagttttttcgggcgattcggatagatttcggttcggtagagaatcgcggcgtttcgtaaatagtagttttttcgagttcgcgtcgtcgttaggtttttcgatatttaggttttatttaggcgggcgtttcgttatttatttgagcgttgtgtagtcggagacgttttttagtttttcggggtcgggtttcggggttagcgtatagaatcgggagaaggtaatttcggttttttcggtattttcgtaacgtgtagttgatagttttcgtatcggtcgtaggagtcgggggcggggatggttatttgtagatagattgcggggtcggagtcgcgttgcgtatcggtcgcgaagcgtttaagttttttttttcgggtcggttggcgggcgttattagtacgcggttagttttgagtattttgtttagaatttttcggcgcgcgtcgttcggcgattagttcgaggagtcgcgt

SEQ ID NO: 956 - DNA, 522 bp, Artificial Sequence
  chemically treated genomic DNA (Homo sapiens) CpG-island No: 956
acgcgactcctcgaactaatcgccgaacgacgcgcgccgaaaaattctaaacaaaatactcaaaactaaccgcgtactaataacgcccgccaaccgacccgaaaaaaaaaacttaaacgcttcgcgaccgatacgcaacgcgactccgaccccgcaatctatctacaaataaccatccccgcccccgactcctacgaccgatacgaaaactatcaactacacgttacgaaaataccgaaaaaaccgaaattaccttctcccgattctatacgctaaccccgaaacccgaccccgaaaaactaaaaaacgtctccgactacacaacgctcaaataaataacgaaacgcccgcctaaataaaacctaaatatcgaaaaacctaacgacgacgcgaactcgaaaaaactactatttacgaaacgccgcgattctctaccgaaccgaaatctatccgaatcgcccgaaaaaactccgaccctaaaacaaacccaaacctaaaaacttaaataccgactacaactcc

SEQ ID NO: 957 - DNA, 677 bp, Artificial Sequence
  chemically treated genomic DNA (Homo sapiens) CpG-island No: 957
tcggggaggttgtttacgtagtgtttttcgaaggtttgcgcgttcgtttgttcgtgtttgttatttttgtatttttcgatttttttttttttcggttttcggcgggcggtattttttagtcggtttttaattttgaggagttttaagtagtcgcggcggtagtagtagttttggacgtagtagttaagtttttcgttggttttcgggggttttttcgggttttttttattgtaggttgaaggtatcgtttcggcgttttggtcgtcgtgtgttcgcgcgcggggcgtttcgtttttagagtcggggtcgcgggagggggcgtaggtagtcgggcggtagcgggcggtttcgttttttcgtattcgggaggttgtaggattcggggttttcgcgcgttcggggtcgggagacgggttggggcgtcggttttatttttgcgcgttttgttttttgcgggtagtagttcggagtttgcgggagggagtaggttgggcgcgtggtggggggcgcgcgatgcggagggggcggcggcgtagttaattcgagaggcggtcggcgtttttttatatcgtttcgcggtttcgtcgttttttttcgttttttttttttagtttttattcggatttttagaacggtcgcgtagagcggggagggggtaggggtttatattagaggtt

SEQ ID NO: 958 - DNA, 677 bp, Artificial Sequence
  chemically treated genomic DNA (Homo sapiens) CpG-island No: 958
aacctctaatataaacccctaccccctccccgctctacgcgaccgttctaaaaatccgaataaaaactaaaaaaaaaaaacgaaaaaaaacgacgaaaccgcgaaacgatataaaaaaacgccgaccgcctctcgaattaactacgccgccgccccctccgcatcgcgcgccccccaccacgcgcccaacctactccctcccgcaaactccgaactactacccgcaaaaaacaaaacgcgcaaaaataaaaccgacgccccaacccgtctcccgaccccgaacgcgcgaaaaccccgaatcctacaacctcccgaatacgaaaaaacgaaaccgcccgctaccgcccgactacctacgccccctcccgcgaccccgactctaaaaacgaaacgccccgcgcgcgaacacacgacgaccaaaacgccgaaacgataccttcaacctacaataaaaaaaacccgaaaaaacccccgaaaaccaacgaaaaacttaactactacgtccaaaactactactaccgccgcgactacttaaaactcctcaaaattaaaaaccgactaaaaaataccgcccgccgaaaaccgaaaaaaaaaaaaatcgaaaaatacaaaaataacaaacacgaacaaacgaacgcgcaaaccttcgaaaaacactacgtaaacaacctccccga

SEQ ID NO: 959 - DNA, 677 bp, Artificial Sequence
  chemically treated genomic DNA (Homo sapiens) CpG-island No: 959
ggtttttggtgtggatttttgtttttttttcgttttgcgcggtcgttttagaggttcgggtgggagttggaggaggaaagcgggaggaggcggcgaggtcgcggggcggtatgagggggcgtcggtcgtttttcggattggttgcgtcgtcgtttttttcgtatcgcgcgttttttattacgcgtttagtttgttttttttcgtaggtttcgagttgttgttcgtaggaggtaggacgcgtaggggtgggatcggcgttttagttcgtttttcggtttcgggcgcgcgggaatttcgggttttgtagtttttcgagtgcggagaggcggggtcgttcgttgtcgttcggttgtttgcgttttttttcgcggtttcggttttgggagcggggcgtttcgcgcgcgggtatacggcggttagagcgtcgaggcggtatttttagtttgtaatgagaggaattcgggagagttttcgggagttagcgaagagtttggttgttgcgtttagggttgttgttgtcgtcgcggttgtttgaaattttttaaagttgagagtcggttagagggtgtcgttcgtcgggagtcggagggaaaggaagtcggaaggtgtaagagtgatagatacggatagacggacgcgtagattttcggaaggtattgcgtaggtagttttttcgg

SEQ ID NO: 960 - DNA, 677 bp, Artificial Sequence
  chemically treated genomic DNA (Homo sapiens) CpG-island No: 960
ccgaaaaaactacctacgcaataccttccgaaaatctacgcgtccgtctatccgtatctatcactcttacaccttccgacttcctttccctccgactcccgacgaacgacaccctctaaccgactctcaactttaaaaaatttcaaacaaccgcgacgacaacaacaaccctaaacgcaacaaccaaactcttcgctaactcccgaaaactctcccgaattcctctcattacaaactaaaaataccgcctcgacgctctaaccgccgtatacccgcgcgcgaaacgccccgctcccaaaaccgaaaccgcgaaaaaaaacgcaaacaaccgaacgacaacgaacgaccccgcctctccgcactcgaaaaactacaaaacccgaaattcccgcgcgcccgaaaccgaaaaacgaactaaaacgccgatcccacccctacgcgtcctacctcctacgaacaacaactcgaaacctacgaaaaaaaacaaactaaacgcgtaataaaaaacgcgcgatacgaaaaaaacgacgacgcaaccaatccgaaaaacgaccgacgccccctcataccgccccgcgacctcgccgcctcctcccgctttcctcctccaactcccacccgaacctctaaaacgaccgcgcaaaacgaaaaaaaaacaaaaatccacaccaaaaacc

SEQ ID NO: 961 - DNA, 804 bp, Artificial Sequence
  chemically treated genomic DNA (Homo sapiens) CpG-island No: 961
ttggttcgcggttttgtcgataaaatttaatttttattttgtaagattaataggtcgcgtaggatttttttagtcgttttttgtttcgtatttttttgggtttgaggattttcggttcggtttttttcgcgcgcgcgaggttttagatggcgagggcgtagttttttggtttatttgattacgttggggtgttcgaaggtttttaggtgttttagtatcgttatttcgcggatggtggagagcggtatgtttttttcgtcggtttgtattcgtacgcgttttaacgttacgaaacggttttcgttttttaagtcgcgggttttgaatatttttttataggcgtttttttcgattttcgttacgtattcgtattgttggttagcgcggtataggtcgtttttttttatgtcgtttggacgtcgttcgtcgcggcgtcgttggggcgggcggggggtgcgtttaattagttggcggtcgtcgttcgtttatttcggggtttttcggagatcggtttagttttatttgtttttcgtcggtttaggcgttcgggcgttggggttttcgtcgttgtagaagttggatggagagattttttcgcggggttggcgtaattttggtgtcgtcgtcgcgaaatttcgtttgtagagtcgtcgtcgtcgtcgtcgtcggaggagcgagtcgattttttttttttttttttcgaagcgaagtttttaatatagatacgattatatagtttttgtttaagcgcgttttagtttagaattattgtatttaaaggaggagacgggaggataagaagaa

SEQ ID NO: 962 - DNA, 804 bp, Artificial Sequence
  chemically treated genomic DNA (Homo sapiens) CpG-island No: 962
ttcttcttatcctcccgtctcctcctttaaatacaataattctaaactaaaacgcgcttaaacaaaaactatataatcgtatctatattaaaaacttcgcttcgaaaaaaaaaaaaaaaaaatcgactcgctcctccgacgacgacgacgacgacgactctacaaacgaaatttcgcgacgacgacaccaaaattacgccaaccccgcgaaaaaatctctccatccaacttctacaacgacgaaaaccccaacgcccgaacgcctaaaccgacgaaaaacaaataaaactaaaccgatctccgaaaaaccccgaaataaacgaacgacgaccgccaactaattaaacgcaccccccgcccgccccaacgacgccgcgacgaacgacgtccaaacgacataaaaaaaaacgacctataccgcgctaaccaacaatacgaatacgtaacgaaaatcgaaaaaaacgcctataaaaaaatattcaaaacccgcgacttaaaaaacgaaaaccgtttcgtaacgttaaaacgcgtacgaatacaaaccgacgaaaaaaacataccgctctccaccatccgcgaaataacgatactaaaacacctaaaaaccttcgaacaccccaacgtaatcaaataaaccaaaaaactacgccctcgccatctaaaacctcgcgcgcgcgaaaaaaaccgaaccgaaaatcctcaaacccaaaaaaatacgaaacaaaaaacgactaaaaaaatcctacgcgacctattaatcttacaaaataaaaattaaattttatcgacaaaaccgcgaaccaa

SEQ ID NO: 963 - DNA, 804 bp, Artificial Sequence
  chemically treated genomic DNA (Homo sapiens) CpG-island No: 963
ttttttttattttttcgtttttttttttaggtgtaatgattttggattgagacgcgtttgggtagaggttatgtaatcgtgtttgtgttgaggatttcgtttcgaggagggaagaggagggatcggttcgttttttcggcggcggcggcggcggcgattttgtaggcggagtttcgcggcggcggtattagggttacgttagtttcgcggggaggtttttttatttagtttttgtagcggcgaaagttttagcgttcgagcgtttgagtcggcggggagtaagtaaagttagatcgattttcggggagtttcggagtaggcgagcggcggtcgttagttagttgagcgtatttttcgttcgttttagcggcgtcgcggcgggcggcgtttaggcggtatggagaaggacggtttgtgtcgcgttgattagtagtacgaatgcgtggcggagatcggggagggcgtttatgggaaggtgtttaaggttcgcgatttgaagaacggaggtcgtttcgtggcgttgaagcgcgtgcgggtgtagatcggcgaggagggtatgtcgttttttattattcgcgaggtggcggtgttgaggtatttggagattttcgagtattttaacgtggttaggtgagttagggagttgcgttttcgttatttggggtttcgcgcgcgcggggagggtcgagtcgggaatttttaggtttagaaaggtgcggggtagagggcgattggggaggttttgcgcgatttgttggttttatagagtgagagttaagttttgtcgatagagtcgcgagttag

SEQ ID NO: 964 - DNA, 804 bp, Artificial Sequence
  chemically treated genomic DNA (Homo sapiens) CpG-island No: 964
ctaactcgcgactctatcgacaaaacttaactctcactctataaaaccaacaaatcgcgcaaaacctccccaatcgccctctaccccgcacctttctaaacctaaaaattcccgactcgaccctccccgcgcgcgcgaaaccccaaataacgaaaacgcaactccctaactcacctaaccacgttaaaatactcgaaaatctccaaatacctcaacaccgccacctcgcgaataataaaaaacgacataccctcctcgccgatctacacccgcacgcgcttcaacgccacgaaacgacctccgttcttcaaatcgcgaaccttaaacaccttcccataaacgccctccccgatctccgccacgcattcgtactactaatcaacgcgacacaaaccgtccttctccataccgcctaaacgccgcccgccgcgacgccgctaaaacgaacgaaaaatacgctcaactaactaacgaccgccgctcgcctactccgaaactccccgaaaatcgatctaactttacttactccccgccgactcaaacgctcgaacgctaaaactttcgccgctacaaaaactaaataaaaaaacctccccgcgaaactaacgtaaccctaataccgccgccgcgaaactccgcctacaaaatcgccgccgccgccgccgccgaaaaaacgaaccgatccctcctcttccctcctcgaaacgaaatcctcaacacaaacacgattacataacctctacccaaacgcgtctcaatccaaaatcattacacctaaaaaaaaaaacgaaaaaataaaaaaaa

SEQ ID NO: 965 - DNA, 1201 bp, Artificial Sequence
  chemically treated genomic DNA (Homo sapiens) CpG-island No: 965
gtcggagcgagggcgtttagtgaggagtttaggcggaaggtggcggtgtttcgttgttcgttttagatttattcggttcggttcgtatcggatttaaaatggttagaattggtagtcgacgtttcgcgttttggtgattttgtattgatagcgcgattttcggttttttttaggaaatcgggagagttggtaaggttgggtttttacggttgtagttttcgggttcgatcgagggaattgaggttcgttaggtcggttttaaatcgttcgtttgttgtaaggtcgttcgttttagcgcggagggtcgcggttaggaaggtcgtattcggatttgtcgtaggtaatagggttcgttcgggtgttaggaggtcggcgcgttagtagtcgcgttgaggaggtttcgtattttggtttttggtcgagcgttagatttcggtttttacgcgttcgcgttcggggatttcgtcggtcgcgttttcgttacgttaggtcgcgggttttttttaggtcgtcgttttcgagttttcggttcgcgttcgttttcgcgtttttcggatttcgcgtcgttagtttgttttcggtttagcgatgtttgtttgtcgttcgattttcgcgttcgttgtcgttcggttcgttcggtttacgtttcgtagttgatttggtgtcgtcgttagtcgaggtcgtattcgtagttggagggaggcgggaggcgggaggcgggaggcgcgaggcgggaggttgggcgagaggagtcggcggggcgggggtttgggtcgttacgtgggtgcgtcgcgtaggcgtcgggcgggttagacgtaggttcgggggttttcggtttggtcgggtagtagcgcgggggcggttttggggcggggagatagggggcggttttatttcggcgttttgcggaggatagtagcgatcgttaaggtttagtgagttttcgtattagcgcggtatttggtatttggcggggtcgaattaacgaatgagcgaatttgtcgagagtcgtttcgtttgaatttattgattttttttttgtttcggttttatttttatttttcgatttatttttttttgtttttttttattattttttttttcgtttatatttttttttttttttttttatttttttttttatttttttttttttttttttatttttttttttttatttttttttttttttattttttta

SEQ ID NO: 966 - DNA, 1201 bp, Artificial Sequence
  chemically treated genomic DNA (Homo sapiens) CpG-island No: 966
taaaaaaataaaaaaaaaaaaaaataaaaaaaaaaaaataaaaaaaaaaaaaaaaaaataaaaaaaaaaataaaaaaaaaaaaaaaaaaatataaacgaaaaaaaaaataataaaaaaaaacaaaaaaaaataaatcgaaaaataaaaataaaaccgaaacaaaaaaaaaatcaataaattcaaacgaaacgactctcgacaaattcgctcattcgttaattcgaccccgccaaataccaaataccgcgctaatacgaaaactcactaaaccttaacgatcgctactatcctccgcaaaacgccgaaataaaaccgccccctatctccccgccccaaaaccgcccccgcgctactacccgaccaaaccgaaaacccccgaacctacgtctaacccgcccgacgcctacgcgacgcacccacgtaacgacccaaacccccgccccgccgactcctctcgcccaacctcccgcctcgcgcctcccgcctcccgcctcccgcctccctccaactacgaatacgacctcgactaacgacgacaccaaatcaactacgaaacgtaaaccgaacgaaccgaacgacaacgaacgcgaaaatcgaacgacaaacaaacatcgctaaaccgaaaacaaactaacgacgcgaaatccgaaaaacgcgaaaacgaacgcgaaccgaaaactcgaaaacgacgacctaaaaaaaacccgcgacctaacgtaacgaaaacgcgaccgacgaaatccccgaacgcgaacgcgtaaaaaccgaaatctaacgctcgaccaaaaaccaaaatacgaaacctcctcaacgcgactactaacgcgccgacctcctaacacccgaacgaaccctattacctacgacaaatccgaatacgaccttcctaaccgcgaccctccgcgctaaaacgaacgaccttacaacaaacgaacgatttaaaaccgacctaacgaacctcaattccctcgatcgaacccgaaaactacaaccgtaaaaacccaaccttaccaactctcccgatttcctaaaaaaaaccgaaaatcgcgctatcaatacaaaatcaccaaaacgcgaaacgtcgactaccaattctaaccattttaaatccgatacgaaccgaaccgaataaatctaaaacgaacaacgaaacaccgccaccttccgcctaaactcctcactaaacgccctcgctccgac

SEQ ID NO: 967 - DNA, 1201 bp, Artificial Sequence
  chemically treated genomic DNA (Homo sapiens) CpG-island No: 967
tgagagagtgaaggagggagggaatgagagggggggagtaagagaggagagaagagagtgaagaagggaatgaggaaaggagagggaggatatgagcggggagggagatagtgaggaagggtaggaggaagtgagtcgaggaatgagggtaggatcgaggtaaggaaagagttaatggatttagacggggcgattttcggtaaattcgtttattcgttggttcggtttcgttaagtgttaggtgtcgcgttagtgcggggatttattgagttttggcgatcgttgttgtttttcgtagagcgtcggagtggagtcgttttttgttttttcgttttagggtcgttttcgcgttgttattcggttaggtcgggaattttcgggtttacgtttggttcgttcggcgtttgcgcggcgtatttacgtgacggtttaggttttcgtttcgtcggtttttttcgtttagtttttcgtttcgcgtttttcgtttttcgtttttcgtttttttttagttgcgagtgcggtttcggttggcggcggtattaggttagttgcgaggcgtgagtcgaacgggtcgggcggtagcgaacgcgggggtcgggcggtaagtaggtatcgttgggtcggggataagttagcggcgcggagttcgaggggcgcgggggcgggcgcgggtcggaggttcgggggcggcgatttgaggagagttcgcggtttgacgtggcggggacgcggtcggcgggattttcgggcgcgggcgcgtaggggtcgggatttggcgttcggttaggggttagggtgcgaggtttttttagcgcggttgttggcgcgtcggttttttggtattcgggcgggttttgttgtttgcggtaggttcgaatgcggtttttttggtcgcgatttttcgcgttggagcgggcggttttgtaataggcgggcgatttggggtcggtttgacgagttttagttttttcgatcgggttcggggattgtagtcgtaggagtttagttttgttagttttttcggttttttgagaggagtcggagatcgcgttgttagtgtaaaattattagagcgcgaagcgtcggttgttagttttgattattttagattcggtgcgggtcgagtcgagtggatttggggcgggtagcggggtatcgttatttttcgtttgggttttttattgggcgttttcgtttcggt

SEQ ID NO: 968 - DNA, 1201 bp, Artificial Sequence
  chemically treated genomic DNA (Homo sapiens) CpG-island No: 968
accgaaacgaaaacgcccaataaaaaacccaaacgaaaaataacgataccccgctacccgccccaaatccactcgactcgacccgcaccgaatctaaaataatcaaaactaacaaccgacgcttcgcgctctaataattttacactaacaacgcgatctccgactcctctcaaaaaaccgaaaaaactaacaaaactaaactcctacgactacaatccccgaacccgatcgaaaaaactaaaactcgtcaaaccgaccccaaatcgcccgcctattacaaaaccgcccgctccaacgcgaaaaatcgcgaccaaaaaaaccgcattcgaacctaccgcaaacaacaaaacccgcccgaataccaaaaaaccgacgcgccaacaaccgcgctaaaaaaacctcgcaccctaacccctaaccgaacgccaaatcccgacccctacgcgcccgcgcccgaaaatcccgccgaccgcgtccccgccacgtcaaaccgcgaactctcctcaaatcgccgcccccgaacctccgacccgcgcccgcccccgcgcccctcgaactccgcgccgctaacttatccccgacccaacgatacctacttaccgcccgacccccgcgttcgctaccgcccgacccgttcgactcacgcctcgcaactaacctaataccgccgccaaccgaaaccgcactcgcaactaaaaaaaaacgaaaaacgaaaaacgaaaaacgcgaaacgaaaaactaaacgaaaaaaaccgacgaaacgaaaacctaaaccgtcacgtaaatacgccgcgcaaacgccgaacgaaccaaacgtaaacccgaaaattcccgacctaaccgaataacaacgcgaaaacgaccctaaaacgaaaaaacaaaaaacgactccactccgacgctctacgaaaaacaacaacgatcgccaaaactcaataaatccccgcactaacgcgacacctaacacttaacgaaaccgaaccaacgaataaacgaatttaccgaaaatcgccccgtctaaatccattaactctttccttacctcgatcctaccctcattcctcgactcacttcctcctacccttcctcactatctccctccccgctcatatcctccctctcctttcctcattcccttcttcactctcttctctcctctcttactccccccctctcattccctccctccttcactctctca

SEQ ID NO: 969 - DNA, 886 bp, Artificial Sequence
  chemically treated genomic DNA (Homo sapiens) CpG-island No: 969
  unsure (467)
tcgttatcggagatttatagggttagaagcgggagcggggtgcgtttcgattcgtaaaagtgtaaggttattgggatcgttcgagttgtaatcgtgggacggggttgatgttgcgggtttaggaaggtagcgttgggcggggtagatatcgttaggaaacggcggacgagtgcggggatttttgatgtgggggtgtcgggtttaggttaggggacgggggggtggggatggaggggcgaggaataaggagggaatcgcgggagattttataggaggcggtttgagcgtcgggacgtagatttttttttagtattcgtaattttcgggattttcgggagagtcgggttgcgggcgcgtttacgtcggggacgcgggatatttttcgttcgtaggggtttgtttttatcgacggtagcggggttttttttttttcgcgatagcgtcgcggtggattttttagtttttgncgttgtaggagcgagcgtcgatttcgcgatttaggtcgtcgtcgttatttcgattcgggtattagtttttagtttcgatttgtttttcgggagcgagtttcgtgatcgcgcgcgcgatttcgtcgggggagtcggttttgcggaacgtttaggcgcgttattttagagtatgcgtagtaagatcgcgcggttcgttttttaggtaaatcgttgtttcgggttttttttgcgcggcgtcgagtcgtaggtttggtttgttagcgtatgggggcggggacgtaatttacggaaaaggcggggttatttcgagattggacggcggcgtttaggggcggagttaggatgggggagttgaataggacgtttttggcgtaaaggggttggggtagggggcgtttaattgagattttaggacggtt

SEQ ID NO: 970 - DNA, 886 bp, Artificial Sequence
  chemically treated genomic DNA (Homo sapiens) CpG-island No: 970
  unsure (420)
aaccgtcctaaaatctcaattaaacgccccctaccccaacccctttacgccaaaaacgtcctattcaactcccccatcctaactccgcccctaaacgccgccgtccaatctcgaaataaccccgccttttccgtaaattacgtccccgcccccatacgctaacaaaccaaacctacgactcgacgccgcgcaaaaaaaacccgaaacaacgatttacctaaaaaacgaaccgcgcgatcttactacgcatactctaaaataacgcgcctaaacgttccgcaaaaccgactcccccgacgaaatcgcgcgcgcgatcacgaaactcgctcccgaaaaacaaatcgaaactaaaaactaatacccgaatcgaaataacgacgacgacctaaatcgcgaaatcgacgctcgctcctacaacgncaaaaactaaaaaatccaccgcgacgctatcgcgaaaaaaaaaaaaccccgctaccgtcgataaaaacaaacccctacgaacgaaaaatatcccgcgtccccgacgtaaacgcgcccgcaacccgactctcccgaaaatcccgaaaattacgaatactaaaaaaaaatctacgtcccgacgctcaaaccgcctcctataaaatctcccgcgattccctccttattcctcgcccctccatccccacccccccgtcccctaacctaaacccgacacccccacatcaaaaatccccgcactcgtccgccgtttcctaacgatatctaccccgcccaacgctaccttcctaaacccgcaacatcaaccccgtcccacgattacaactcgaacgatcccaataaccttacacttttacgaatcgaaacgcaccccgctcccgcttctaaccctataaatctccgataacga

SEQ ID NO: 971 - DNA, 886 bp, Artificial Sequence
  chemically treated genomic DNA (Homo sapiens) CpG-island No: 971
  unsure (420)
gatcgttttggggttttaattaagcgttttttattttagtttttttacgttaagagcgttttgtttagtttttttattttagtttcgtttttggacgtcgtcgtttaatttcgggatggtttcgtttttttcgtgagttacgttttcgtttttatgcgttgataggttaggtttgcggttcggcgtcgcgtagggaagattcggagtagcggtttatttaaggaacgggtcgcgcggttttgttgcgtatgttttgaagtagcgcgtttgagcgtttcgtaaggtcggttttttcggcggggtcgcgcgcgcggttacggggttcgttttcgaggggtaggtcggggttgggagttggtgttcgggtcggggtggcggcggcggtttgggtcgcggggtcgacgttcgtttttgtagcgntagaggttgaaggatttatcgcggcgttgtcgcgggagagggagggtttcgttgtcgtcggtgaggataggtttttgcgggcggggaatgtttcgcgttttcggcgtggacgcgttcgtagttcggttttttcgggggtttcgagggttgcgggtgttggggaggggtttgcgtttcggcgtttaggtcgttttttgtggggtttttcgcgattttttttttgtttttcgtttttttatttttattttttcgttttttggtttaagttcgatatttttatattaaggattttcgtattcgttcgtcgttttttggcggtgtttgtttcgtttagcgttgtttttttggattcgtagtattagtttcgttttacggttgtagttcgggcggttttagtgattttgtatttttgcgggtcgggacgtatttcgttttcgtttttgattttatagattttcggtgacgg

SEQ ID NO: 972 - DNA, 886 bp, Artificial Sequence
  chemically treated genomic DNA (Homo sapiens) CpG-island No: 972
  unsure (467)
ccgtcaccgaaaatctataaaatcaaaaacgaaaacgaaatacgtcccgacccgcaaaaatacaaaatcactaaaaccgcccgaactacaaccgtaaaacgaaactaatactacgaatccaaaaaaacaacgctaaacgaaacaaacaccgccaaaaaacgacgaacgaatacgaaaatccttaatataaaaatatcgaacttaaaccaaaaaacgaaaaaataaaaataaaaaaacgaaaaacaaaaaaaaaatcgcgaaaaaccccacaaaaaacgacctaaacgccgaaacgcaaacccctccccaacacccgcaaccctcgaaacccccgaaaaaaccgaactacgaacgcgtccacgccgaaaacgcgaaacattccccgcccgcaaaaacctatcctcaccgacgacaacgaaaccctccctctcccgcgacaacgccgcgataaatccttcaacctctancgctacaaaaacgaacgtcgaccccgcgacccaaaccgccgccgccaccccgacccgaacaccaactcccaaccccgacctacccctcgaaaacgaaccccgtaaccgcgcgcgcgaccccgccgaaaaaaccgaccttacgaaacgctcaaacgcgctacttcaaaacatacgcaacaaaaccgcgcgacccgttccttaaataaaccgctactccgaatcttccctacgcgacgccgaaccgcaaacctaacctatcaacgcataaaaacgaaaacgtaactcacgaaaaaaacgaaaccatcccgaaattaaacgacgacgtccaaaaacgaaactaaaataaaaaaactaaacaaaacgctcttaacgtaaaaaaactaaaataaaaaacgcttaattaaaaccccaaaacgatc

SEQ ID NO: 973 - DNA, 683 bp, Artificial Sequence
  chemically treated genomic DNA (Homo sapiens) CpG-island No: 973
acgcgggagggcggggttagggagggcgatgcggggagtcggagttcggattatgaggttgggagcgttttttttgtatttttggtcgttcgcgtcgcgtttcgcgtttattagagggtagtattacgacgcgcgcggataaggttgaggcgggaacggtcgtatttttagtttcgttcggagtcgttcggtttcgtttcgttcgcgagtatcgattttcggcgtcggcggggaaataggttcggcgttttcgattttacggttcggttttattttgtttttgacgttagcgtcgtgttttaaataatttttttttcgagtttttttcgtcgcggcgtcgcgtttagagttaggcggggatatcgaaacggtaatttcggttcggttttttcggagtcgttttcgtttcgtttggtgttaggaagttttcgttttttttaagggatggtagtcggggttcgggtcggtcgtttgggtcgcgttggcgcgcgtttgaggaatttttggggtttgttgtttcgggaggagggtcgttgcggttaatttcggatttcgttttatgttttatcgttttttttgttttcggtttcgtaaatatttttggttttgatttttttattagcgcggtttagttttattgtgttttatcggcgtttaataaaatattgaatgaggtcgggcgt

SEQ ID NO: 974 - DNA, 683 bp, Artificial Sequence
  chemically treated genomic DNA (Homo sapiens) CpG-island No: 974
acgcccgacctcattcaatattttattaaacgccgataaaacacaataaaactaaaccgcgctaataaaaaaatcaaaaccaaaaatatttacgaaaccgaaaacaaaaaaaacgataaaacataaaacgaaatccgaaattaaccgcaacgaccctcctcccgaaacaacaaaccccaaaaattcctcaaacgcgcgccaacgcgacccaaacgaccgacccgaaccccgactaccatcccttaaaaaaaacgaaaacttcctaacaccaaacgaaacgaaaacgactccgaaaaaaccgaaccgaaattaccgtttcgatatccccgcctaactctaaacgcgacgccgcgacgaaaaaaactcgaaaaaaaaattatttaaaacacgacgctaacgtcaaaaacaaaataaaaccgaaccgtaaaatcgaaaacgccgaacctatttccccgccgacgccgaaaatcgatactcgcgaacgaaacgaaaccgaacgactccgaacgaaactaaaaatacgaccgttcccgcctcaaccttatccgcgcgcgtcgtaatactaccctctaataaacgcgaaacgcgacgcgaacgaccaaaaatacaaaaaaaacgctcccaacctcataatccgaactccgactccccgcatcgccctccctaaccccgccctcccgcgt

SEQ ID NO: 975 - DNA, 683 bp, Artificial Sequence
  chemically treated genomic DNA (Homo sapiens) CpG-island No: 975
gcgttcggttttatttagtattttattgagcgtcgatggaatatagtggggttgggtcgcgttggtgggaaagttaaggttaggggtgtttgcggggtcgagggtaggggaggcgatgggatatggggcggggttcggagttggtcgtagcgatttttttttcgggatagtaggttttagaagttttttaggcgcgcgttagcgcggtttaggcggtcgattcgggtttcggttgttattttttggaaggggcgggggttttttggtattaggcggggcggaagcggtttcgggaaggtcgggtcggggttatcgtttcggtgttttcgtttggttttgggcgcggcgtcgcggcggaagaggttcggggaggaagttatttggggtacggcgttgacgttagagatagagtggggtcggatcgtggggtcgggggcgtcggatttgttttttcgtcggcgtcgggggtcggtattcgcgggcggggcggggtcgggcggtttcgggcggggttgggggtgcggtcgttttcgttttagttttgttcgcgcgcgtcgtggtgttgttttttggtgggcgcggggcgcggcgcgggcggttaggggtgtagaaggggcgtttttagttttatggttcgggtttcggtttttcgtatcgttttttttagtttcgttttttcgcgt

SEQ ID NO: 976 - DNA, 683 bp, Artificial Sequence
  chemically treated genomic DNA (Homo sapiens) CpG-island No: 976
acgcgaaaaaacgaaactaaaaaaaacgatacgaaaaaccgaaacccgaaccataaaactaaaaacgccccttctacacccctaaccgcccgcgccgcgccccgcgcccaccaaaaaacaacaccacgacgcgcgcgaacaaaactaaaacgaaaacgaccgcacccccaaccccgcccgaaaccgcccgaccccgccccgcccgcgaataccgacccccgacgccgacgaaaaaacaaatccgacgcccccgaccccacgatccgaccccactctatctctaacgtcaacgccgtaccccaaataacttcctccccgaacctcttccgccgcgacgccgcgcccaaaaccaaacgaaaacaccgaaacgataaccccgacccgaccttcccgaaaccgcttccgccccgcctaataccaaaaaacccccgccccttccaaaaaataacaaccgaaacccgaatcgaccgcctaaaccgcgctaacgcgcgcctaaaaaacttctaaaacctactatcccgaaaaaaaaatcgctacgaccaactccgaaccccgccccatatcccatcgcctcccctaccctcgaccccgcaaacacccctaaccttaactttcccaccaacgcgacccaaccccactatattccatcgacgctcaataaaatactaaataaaaccgaacgc

SEQ ID NO: 977 - DNA, 881 bp, Artificial Sequence
  chemically treated genomic DNA (Homo sapiens) CpG-island No: 977
cggaggcgttggggagggggggcgttttttttacgaacggtggttcggatcgtacgttgcgttaagttagggcgagatttttattttgcgtcgcgtttttttgtttcgtaattatttacggttttagtcgggaggcgtcgtagtttcggaatttattttcgcgtttttggaaggatggatgcggaggaggcgggagagaggcggcggtttcggaacgagttgtttttatagttttttcgtttttcgtcgtttcgttttcgtttttagtttatttagttttgcgcgttattgtttagtttgatttttttgtataggttttcggggatttttatgatcgcggagcgcgttgagtagtcggggttttttgcgtcgggagggtagtaagaggagggtaggttagcgagcggggcggggttggagggcggggttttttcgcgtcggagcgggcgcgcgttgatttaagtacgcgttcgtgttcgtggtttgggttgcgcggcgtatgcggcgcgtttcggaaatgggttcggggtagaggtttgtggggaagggcgaaacgtcgggatagaatcggaggtagaagttgggggcggagttttagcgttcgcgtcggcgcgggcgcgtacggcgtttttttttttagatttcgatgaaggggcggggtttggaatgtagtcgtggaattttaggtgtttttgcggtatcgagtttagttttgagttaacgtagatttttaagagcgagtattagtcgtcgggagaaaggtaaggggagtgcgcggttcgtcgcgcgcggtatttttttagtagaggttgattgggaggacgttgacgcggttttttgtatttgtggttatttttttatagatttggttgtcgattttt

SEQ ID NO: 978 - DNA, 881 bp, Artificial Sequence
  chemically treated genomic DNA (Homo sapiens) CpG-island No: 978
aaaaatcgacaaccaaatctataaaaaaataaccacaaatacaaaaaaccgcgtcaacgtcctcccaatcaacctctactaaaaaaataccgcgcgcgacgaaccgcgcactccccttacctttctcccgacgactaatactcgctcttaaaaatctacgttaactcaaaactaaactcgataccgcaaaaacacctaaaattccacgactacattccaaaccccgccccttcatcgaaatctaaaaaaaaaaacgccgtacgcgcccgcgccgacgcgaacgctaaaactccgcccccaacttctacctccgattctatcccgacgtttcgcccttccccacaaacctctaccccgaacccatttccgaaacgcgccgcatacgccgcgcaacccaaaccacgaacacgaacgcgtacttaaatcaacgcgcgcccgctccgacgcgaaaaaaccccgccctccaaccccgccccgctcgctaacctaccctcctcttactaccctcccgacgcaaaaaaccccgactactcaacgcgctccgcgatcataaaaatccccgaaaacctatacaaaaaaatcaaactaaacaataacgcgcaaaactaaataaactaaaaacgaaaacgaaacgacgaaaaacgaaaaaactataaaaacaactcgttccgaaaccgccgcctctctcccgcctcctccgcatccatccttccaaaaacgcgaaaataaattccgaaactacgacgcctcccgactaaaaccgtaaataattacgaaacaaaaaaacgcgacgcaaaataaaaatctcgccctaacttaacgcaacgtacgatccgaaccaccgttcgtaaaaaaaacgccccccctccccaacgcctccg

SEQ ID NO: 979 - DNA, 881 bp, Artificial Sequence
  chemically treated genomic DNA (Homo sapiens) CpG-island No: 979
ggaggtcggtagttaggtttgtggaggagtagttataggtgtaagaggtcgcgttagcgtttttttaattagtttttgttgagggagtgtcgcgcgcggcgagtcgcgtattttttttgtttttttttcggcggttggtattcgtttttagagatttgcgttagtttagagttaggttcggtgtcgtagaggtatttgaggttttacgattgtattttaggtttcgtttttttatcgggatttggaaggaggagcgtcgtgcgcgttcgcgtcggcgcgagcgttgaagtttcgtttttagtttttattttcggttttatttcggcgtttcgtttttttttatagatttttgtttcggatttattttcgaggcgcgtcgtatgcgtcgcgtaatttaggttacgagtacgggcgcgtgtttaagttagcgcgcgttcgtttcgacgcgaggaggtttcgttttttagtttcgtttcgttcgttggtttgttttttttttgttattttttcggcgtagagaatttcggttgtttagcgcgtttcgcggttatggagattttcgggagtttgtgtaagaaagttaaattgagtaataacgcgtagaattgggtaagttggggacgaaggcgagacggcgaggagcggaggggttgtgggagtagttcgtttcggagtcgtcgtttttttttcgtttttttcgtatttatttttttaggagcgcggaggtgggtttcggggttgcggcgtttttcggttggggtcgtgggtggttgcgaggtagaggggcgcggcgtagggtggggatttcgttttagtttggcgtagcgtgcggttcgagttatcgttcgtgggaagaacgttttttttttttagcgttttcg

SEQ ID NO: 980 - DNA, 881 bp, Artificial Sequence
  chemically treated genomic DNA (Homo sapiens) CpG-island No: 980
cgaaaacgctaaaaaaaaaaaacgttcttcccacgaacgataactcgaaccgcacgctacgccaaactaaaacgaaatccccaccctacgccgcgcccctctacctcgcaaccacccacgaccccaaccgaaaaacgccgcaaccccgaaacccacctccgcgctcctaaaaaaataaatacgaaaaaaacgaaaaaaaaacgacgactccgaaacgaactactcccacaacccctccgctcctcgccgtctcgccttcgtccccaacttacccaattctacgcgttattactcaatttaactttcttacacaaactcccgaaaatctccataaccgcgaaacgcgctaaacaaccgaaattctctacgccgaaaaaataacaaaaaaaaaacaaaccaacgaacgaaacgaaactaaaaaacgaaacctcctcgcgtcgaaacgaacgcgcgctaacttaaacacgcgcccgtactcgtaacctaaattacgcgacgcatacgacgcgcctcgaaaataaatccgaaacaaaaatctataaaaaaaaacgaaacgccgaaataaaaccgaaaataaaaactaaaaacgaaacttcaacgctcgcgccgacgcgaacgcgcacgacgctcctccttccaaatcccgataaaaaaacgaaacctaaaatacaatcgtaaaacctcaaatacctctacgacaccgaacctaactctaaactaacgcaaatctctaaaaacgaataccaaccgccgaaaaaaaaacaaaaaaaatacgcgactcgccgcgcgcgacactccctcaacaaaaactaattaaaaaaacgctaacgcgacctcttacacctataactactcctccacaaacctaactaccgacctcc

SEQ ID NO: 981 - DNA, 564 bp, Artificial Sequence
  chemically treated genomic DNA (Homo sapiens) CpG-island No: 981
tttgttttcggaaggggggcgcgtagtagcgggagcggtaggtcggacgtcgggcgtcgggagggggtcgggggagggacgtcgtgttcggagcgcgcgcgtatttatatatttatatatatatttacgcgagtatcgcgaagggtatttaaggatcgcgtacgcggggttgcggagatttttcgggtagtcgcgatttcggtttcgcgagtagtattggttttttgggtttatttcgttttttttttttttttttattttagtcgtttttttcgcgttgcgttgtagcgtgtttttatagtttttttgttttgaattgaatgtaggtgggaaataggtcggcgtgtcgaaagatatcgagtaggtagaaataaggtaaatttatagaggcgtaataggttcggtttttcgtggttagggcgagtcgcggtttcgcgtggcgtttcggtcgttgttttcggattttgagcggttattgttggggttttcgaaagaggtgtcggttttttgggagtcggaagagttgtttgggtgggtttcgttttgttttttattttatcgtta

SEQ ID NO: 982 - DNA, 564 bp, Artificial Sequence
  chemically treated genomic DNA (Homo sapiens) CpG-island No: 982
taacgataaaataaaaaacaaaacgaaacccacccaaacaactcttccgactcccaaaaaaccgacacctctttcgaaaaccccaacaataaccgctcaaaatccgaaaacaacgaccgaaacgccacgcgaaaccgcgactcgccctaaccacgaaaaaccgaacctattacgcctctataaatttaccttatttctacctactcgatatctttcgacacgccgacctatttcccacctacattcaattcaaaacaaaaaaactataaaaacacgctacaacgcaacgcgaaaaaaacgactaaaataaaaaaaaaaaaaaaaaacgaaataaacccaaaaaaccaatactactcgcgaaaccgaaatcgcgactacccgaaaaatctccgcaaccccgcgtacgcgatccttaaatacccttcgcgatactcgcgtaaatatatatataaatatataaatacgcgcgcgctccgaacacgacgtccctcccccgaccccctcccgacgcccgacgtccgacctaccgctcccgctactacgcgccccccttccgaaaacaaa

SEQ ID NO: 983 - DNA, 564 bp, Artificial Sequence
  chemically treated genomic DNA (Homo sapiens) CpG-island No: 983
tggcggtggggtaaaaagtaagacgaaatttatttagatagttttttcgatttttagaggatcgatatttttttcgagggttttaatagtggtcgtttagggttcgagggtaacggtcgaggcgttacgcggggtcgcggttcgttttggttacggaggatcggatttgttgcgtttttgtgagtttgttttatttttatttattcggtgtttttcggtacgtcgatttgttttttatttgtatttagtttaaggtaaaaaggttgtgagagtacgttatagcgtagcgcgaaaggggcgattaaggtggagaagagagaggaaaacgaaataaatttaaggaattaatgttattcgcgaagtcgaagtcgcggttgttcgaaggattttcgtagtttcgcgtgcgcgatttttaaatatttttcgcgatgttcgcgtgagtgtgtgtgtgagtgtgtgagtgcgcgcgcgtttcgagtacgacgtttttttttcgattttttttcggcgttcggcgttcggtttgtcgttttcgttgttgcgcgtttttttttcgaaggtaaa

SEQ ID NO: 984 - DNA, 564 bp, Artificial Sequence
  chemically treated genomic DNA (Homo sapiens) CpG-island No: 984
tttaccttcgaaaaaaaaacgcgcaacaacgaaaacgacaaaccgaacgccgaacgccgaaaaaaaatcgaaaaaaaaacgtcgtactcgaaacgcgcgcgcactcacacactcacacacacactcacgcgaacatcgcgaaaaatatttaaaaatcgcgcacgcgaaactacgaaaatccttcgaacaaccgcgacttcgacttcgcgaataacattaattccttaaatttatttcgttttcctctctcttctccaccttaatcgcccctttcgcgctacgctataacgtactctcacaacctttttaccttaaactaaatacaaataaaaaacaaatcgacgtaccgaaaaacaccgaataaataaaaataaaacaaactcacaaaaacgcaacaaatccgatcctccgtaaccaaaacgaaccgcgaccccgcgtaacgcctcgaccgttaccctcgaaccctaaacgaccactattaaaaccctcgaaaaaaatatcgatcctctaaaaatcgaaaaaactatctaaataaatttcgtcttactttttaccccaccgcca

SEQ ID NO: 985 - DNA, 556 bp, Artificial Sequence
  chemically treated genomic DNA (Homo sapiens) CpG-island No: 985
cgttttttcgttggtagttttcgtgattcggtgcgcgttttcgcgggaagtaaggtggtttggatcgcgcggttatcgttgagggttttaaaaagagagaagggagatcgcgcggggcgttttaagtgttttttattttattttttatttaggttttttcggtgcgtcgttcggcgaattttcgggagttatttattaaagaagaggcggtaattttgcgagtagggttggtcgcgttttttagtgtggtatagggttatagtacggcgcgattcggtttttgtattggtttttaatcgtaggtacgtagcggttggggtattcgtgcgtagtagtcgtagtagcgcgtttatggcgttaatgacggttttgttgtgcgcgcggagttatttgggggttcggtcgggtcgtacgtcggtgttttttatcgttcggagttatttttttcgtttcggcgttcgggttgcgattttggtttttgttagtggaatttggaatattagttagttgtgcgtattatgtttttagcgaggtcgtagtttaaagacgagtgaga

SEQ ID NO: 986 - DNA, 556 bp, Artificial Sequence
  chemically treated genomic DNA (Homo sapiens) CpG-island No: 986
tctcactcgtctttaaactacgacctcgctaaaaacataatacgcacaactaactaatattccaaattccactaacaaaaaccaaaatcgcaacccgaacgccgaaacgaaaaaaataactccgaacgataaaaaacaccgacgtacgacccgaccgaacccccaaataactccgcgcgcacaacaaaaccgtcattaacgccataaacgcgctactacgactactacgcacgaataccccaaccgctacgtacctacgattaaaaaccaatacaaaaaccgaatcgcgccgtactataaccctataccacactaaaaaacgcgaccaaccctactcgcaaaattaccgcctcttctttaataaataactcccgaaaattcgccgaacgacgcaccgaaaaaacctaaataaaaaataaaataaaaaacacttaaaacgccccgcgcgatctcccttctctctttttaaaaccctcaacgataaccgcgcgatccaaaccaccttacttcccgcgaaaacgcgcaccgaatcacgaaaactaccaacgaaaaaacg

SEQ ID NO: 987 - DNA, 556 bp, Artificial Sequence
  chemically treated genomic DNA (Homo sapiens) CpG-island No: 987
ttttattcgtttttgagttgcggtttcgttgagggtatagtgcgtataattggttggtgttttagattttattggtagggattaggatcgtagttcgagcgtcggggcgggagggatgatttcggacggtagggggtatcggcgtgcggttcggtcgagtttttaggtagtttcgcgcgtatagtaggatcgttattgacgttatgagcgcgttgttgcggttgttgcgtacgggtgttttagtcgttgcgtgtttgcggttggggattagtgtagggatcgggtcgcgtcgtgttatggttttgtattatattgaggagcgcggttagttttgttcgtagaattatcgttttttttttagtaagtagttttcggaggttcgtcgagcggcgtatcggagaaatttgggtgggggatggaatgggggatatttgggacgtttcgcgcggttttttttttttttttttggggtttttagcggtagtcgcgcggtttaggttattttatttttcgcgggagcgcgtatcgagttacgagaattgttagcgaggaggcg

SEQ ID NO: 988 - DNA, 556 bp, Artificial Sequence
  chemically treated genomic DNA (Homo sapiens) CpG-island No: 988
cgcctcctcgctaacaattctcgtaactcgatacgcgctcccgcgaaaaataaaataacctaaaccgcgcgactaccgctaaaaaccccaaaaaaaaaaaaaaaaaaccgcgcgaaacgtcccaaatatcccccattccatcccccacccaaatttctccgatacgccgctcgacgaacctccgaaaactacttactaaaaaaaaaacgataattctacgaacaaaactaaccgcgctcctcaatataatacaaaaccataacacgacgcgacccgatccctacactaatccccaaccgcaaacacgcaacgactaaaacacccgtacgcaacaaccgcaacaacgcgctcataacgtcaataacgatcctactatacgcgcgaaactacctaaaaactcgaccgaaccgcacgccgataccccctaccgtccgaaatcatccctcccgccccgacgctcgaactacgatcctaatccctaccaataaaatctaaaacaccaaccaattatacgcactataccctcaacgaaaccgcaactcaaaaacgaataaaa

SEQ ID NO: 989 - DNA, 530 bp, Artificial Sequence
  chemically treated genomic DNA (Homo sapiens) CpG-island No: 989
ttttcgtgatttacgtcggtcgttcggttattatttgtcgggatcgttcggcgcgcggagttcggtagttagtaaaacgtagttgattgttcggtcgttcggtttttgttttcgttaaagttgtttaacgtaaattttgtattagtttatttcgaatttttatagttcggtattcgtttttatttggggcggaggcggtagcggttacgggcgcgttgggcgttaggtgttaggggtcggtagtagtcgcgtgcgttacggttagaggtttttttggagtattttttcgttttaggcgcgcggttttcgtaggcgttagcggcgtatttttttttagtcgggtttttcgttagcgtttggtggtttcgagttgtgggcgttttcgtttcgtttgttcgtttagcgcgtcgcggttttagtttgggcgggtttacgggagggtgtgtttttgtttttatttgtcggttttttacgtattcgggcgtagggttgttttttttttttcgattaaaaaaaaaaaaaaaaaagag

SEQ ID NO: 990 - DNA, 530 bp, Artificial Sequence
  chemically treated genomic DNA (Homo sapiens) CpG-island No: 990
ctcttttttttttttttttttaatcgaaaaaaaaaaaacaaccctacgcccgaatacgtaaaaaaccgacaaataaaaacaaaaacacaccctcccgtaaacccgcccaaactaaaaccgcgacgcgctaaacgaacaaacgaaacgaaaacgcccacaactcgaaaccaccaaacgctaacgaaaaacccgactaaaaaaaaatacgccgctaacgcctacgaaaaccgcgcgcctaaaacgaaaaaatactccaaaaaaacctctaaccgtaacgcacgcgactactaccgacccctaacacctaacgcccaacgcgcccgtaaccgctaccgcctccgccccaaataaaaacgaataccgaactataaaaattcgaaataaactaatacaaaatttacgttaaacaactttaacgaaaacaaaaaccgaacgaccgaacaatcaactacgttttactaactaccgaactccgcgcgccgaacgatcccgacaaataataaccgaacgaccgacgtaaatcacgaaaa

SEQ ID NO: 991 - DNA, 530 bp, Artificial Sequence
  chemically treated genomic DNA (Homo sapiens) CpG-island No: 991
tttttttttttttttttttttggtcggaggaaagaaaatagttttgcgttcggatgcgtagagagtcgataagtggaaatagggatatattttttcgtgagttcgtttaagttggagtcgcggcgcgttgagcgagtaggcggggcgggagcgtttatagttcggagttattaggcgttgacgaggagttcggttgagggaggatgcgtcgttgacgtttgcgggagtcgcgcgtttggggcgggaggatgttttagaggggtttttggtcgtggcgtacgcggttgttgtcgatttttggtatttggcgtttagcgcgttcgtggtcgttgtcgttttcgttttaggtaagagcgggtgtcgggttgtgggggttcggggtaggttggtgtaaagtttgcgttggataattttggcgggagtaaaagtcgagcggtcgagtagttaattgcgttttgttggttgtcgggtttcgcgcgtcgggcggtttcgataggtggtggtcgggcggtcgacgtgggttacggagg

SEQ ID NO: 992 - DNA, 530 bp, Artificial Sequence
  chemically treated genomic DNA (Homo sapiens) CpG-island No: 992
cctccgtaacccacgtcgaccgcccgaccaccacctatcgaaaccgcccgacgcgcgaaacccgacaaccaacaaaacgcaattaactactcgaccgctcgacttttactcccgccaaaattatccaacgcaaactttacaccaacctaccccgaacccccacaacccgacacccgctcttacctaaaacgaaaacgacaacgaccacgaacgcgctaaacgccaaataccaaaaatcgacaacaaccgcgtacgccacgaccaaaaacccctctaaaacatcctcccgccccaaacgcgcgactcccgcaaacgtcaacgacgcatcctccctcaaccgaactcctcgtcaacgcctaataactccgaactataaacgctcccgccccgcctactcgctcaacgcgccgcgactccaacttaaacgaactcacgaaaaaatatatccctatttccacttatcgactctctacgcatccgaacgcaaaactattttctttcctccgaccaaaaaaaaaaaaaaaaaaaaa

SEQ ID NO: 993 - DNA, 577 bp, Artificial Sequence
  chemically treated genomic DNA (Homo sapiens) CpG-island No: 993
gcggggtcggcgtttcggggcggtcgcgtcgagggggcggacgtgatttgtatgcgagcgggattcgggcgcgcggcgttcgcgaggaggcggcggcggtcgtttaagttttcgtcgttgttattgtcgttatcgtcggtttttttttttcgttcgggtttttttttgtttcgtttcggttttttttcgtttcgtttcggtttgcgtcgtcgttttggggtttttagtttcggtttttagggaattagtttttcgtatcgggcgtttagtataaaggtcggcggtatttggggtcgtatagcggggcgcgtagtggagatttgggttgtttttacgtcgtgtagtggcgcggggggagtggtgcgttcggattagcgcggagtaggggttagggttggcgagcgcggggaagggtgtagttttcgggaatttcggggatttcggcgggtttttatttttgggagaagaagtagagtaagcgcgaaggttgggggcgaggtgggaggttgggatggtacgggtgtttggataaagacgtgatatttaagatttttttttgaaattttttgttggtttg

SEQ ID NO: 994 - DNA, 577 bp, Artificial Sequence
  chemically treated genomic DNA (Homo sapiens) CpG-island No: 994
caaaccaacaaaaaatttcaaaaaaaaatcttaaatatcacgtctttatccaaacacccgtaccatcccaacctcccacctcgcccccaaccttcgcgcttactctacttcttctcccaaaaataaaaacccgccgaaatccccgaaattcccgaaaactacacccttccccgcgctcgccaaccctaacccctactccgcgctaatccgaacgcaccactccccccgcgccactacacgacgtaaaaacaacccaaatctccactacgcgccccgctatacgaccccaaataccgccgacctttatactaaacgcccgatacgaaaaactaattccctaaaaaccgaaactaaaaaccccaaaacgacgacgcaaaccgaaacgaaacgaaaaaaaaccgaaacgaaacaaaaaaaaacccgaacgaaaaaaaaaaaccgacgataacgacaataacaacgacgaaaacttaaacgaccgccgccgcctcctcgcgaacgccgcgcgcccgaatcccgctcgcatacaaatcacgtccgccccctcgacgcgaccgccccgaaacgccgaccccgc

SEQ ID NO: 995 - DNA, 577 bp, Artificial Sequence
  chemically treated genomic DNA (Homo sapiens) CpG-island No: 995
tagattagtaaaaagttttaaagggaaattttagatgttacgtttttgtttaggtattcgtgttattttaattttttatttcgtttttaattttcgcgtttgttttgtttttttttttaggggtggagattcgtcgaggttttcggggttttcgagggttgtattttttttcgcgttcgttagttttggtttttatttcgcgttggttcgggcgtattatttttttcgcgttattgtacggcgtgagggtagtttaggtttttattgcgcgtttcgttgtacggttttaggtgtcgtcggtttttgtgttggacgttcggtgcggggggttaattttttgggagtcggggttgagggttttagggcggcggcgtaggtcggggcggagcgggaggaggtcggggcggagtaggaggaggttcgggcggaggaggagagtcggcggtagcggtagtggtagcggcgagagtttgggcggtcgtcgtcgttttttcgcgagcgtcgcgcgttcgggtttcgttcgtatgtaagttacgttcgttttttcggcgcggtcgtttcgagacgtcggtttcgt

SEQ ID NO: 996 - DNA, 577 bp, Artificial Sequence
  chemically treated genomic DNA (Homo sapiens) CpG-island No: 996
acgaaaccgacgtctcgaaacgaccgcgccgaaaaaacgaacgtaacttacatacgaacgaaacccgaacgcgcgacgctcgcgaaaaaacgacgacgaccgcccaaactctcgccgctaccactaccgctaccgccgactctcctcctccgcccgaacctcctcctactccgccccgacctcctcccgctccgccccgacctacgccgccgccctaaaaccctcaaccccgactcccaaaaaattaaccccccgcaccgaacgtccaacacaaaaaccgacgacacctaaaaccgtacaacgaaacgcgcaataaaaacctaaactaccctcacgccgtacaataacgcgaaaaaaataatacgcccgaaccaacgcgaaataaaaaccaaaactaacgaacgcgaaaaaaaatacaaccctcgaaaaccccgaaaacctcgacgaatctccacccctaaaaaaaaaaacaaaacaaacgcgaaaattaaaaacgaaataaaaaattaaaataacacgaatacctaaacaaaaacgtaacatctaaaatttccctttaaaactttttactaatcta

SEQ ID NO: 997 - DNA, 643 bp, Artificial Sequence
  chemically treated genomic DNA (Homo sapiens) CpG-island No: 997
taagcggcgttacgtatcggcgttgatatggattttttttatttaggggtatattacgggttttttgttttttaggtttagcgggtttttgtcggttaagagtagcgggtacgcgggggcgttgttttttgtcgggacgtttggggtggcgggggtcgtttcgtagcgtcgcggggtcgttgggggtacggcgcgaggttgtaggggcggcggtagttggggttgtaggacgtggttcgtatgtaggtcgtgcgttgggtttttggtttgcgtcgggggttgttcgggttggggcggtcgttcggggttggcgtcgtcgcggtagttataggggtaggcggtgttcgcggttttatgcgcggggtatagcgcggtagtagggtaggcgggttcgcgggcggttcgcggcgcgtagtaggaggtagtgggttttcggtcgtcgttcgcgtgagggagttggggttgttgtagcggtaggtgttgggtcgggggcgttgggggttgttggtagtcggggttttcgttcgggtcgtcgtttgcgtcgttcgagtcgttgtgttgcgcgtatttttcgaagggagggaatttgggttcgatgtagttggagtttattaaaaacgagtttatggttattaatttgtga

SEQ ID NO: 998 - DNA, 643 bp, Artificial Sequence
  chemically treated genomic DNA (Homo sapiens) CpG-island No: 998
tcacaaattaataaccataaactcgtttttaataaactccaactacatcgaacccaaattccctcccttcgaaaaatacgcgcaacacaacgactcgaacgacgcaaacgacgacccgaacgaaaaccccgactaccaacaacccccaacgcccccgacccaacacctaccgctacaacaaccccaactccctcacgcgaacgacgaccgaaaacccactacctcctactacgcgccgcgaaccgcccgcgaacccgcctaccctactaccgcgctataccccgcgcataaaaccgcgaacaccgcctacccctataactaccgcgacgacgccaaccccgaacgaccgccccaacccgaacaacccccgacgcaaaccaaaaacccaacgcacgacctacatacgaaccacgtcctacaaccccaactaccgccgcccctacaacctcgcgccgtacccccaacgaccccgcgacgctacgaaacgacccccgccaccccaaacgtcccgacaaaaaacaacgcccccgcgtacccgctactcttaaccgacaaaaacccgctaaacctaaaaaacaaaaaacccgtaatatacccctaaataaaaaaaatccatatcaacgccgatacgtaacgccgctta

SEQ ID NO: 999 - DNA, 643 bp, Artificial Sequence
  chemically treated genomic DNA (Homo sapiens) CpG-island No: 999
ttataaattaatgattatgagttcgtttttgataaattttaattatatcgagtttaagtttttttttttcgaggagtacgcgtagtatagcggttcgggcggcgtagacggcggttcgggcgggggtttcggttattagtagtttttagcgttttcgatttagtatttgtcgttgtagtagttttagtttttttacgcgggcggcggtcgagagtttattgttttttattacgcgtcgcggatcgttcgcgagttcgtttattttgttgtcgcgttgtatttcgcgtatggggtcgcggatatcgtttatttttatggttatcgcggcggcgttagtttcgggcggtcgttttagttcgagtagttttcggcgtaagttaagggtttagcgtacggtttgtatgcgagttacgttttgtagttttagttgtcgtcgtttttgtagtttcgcgtcgtgtttttagcggtttcgcggcgttgcgaggcggttttcgttattttaggcgtttcggtagggggtagcgttttcgcgtgttcgttgtttttggtcgataagagttcgttgggtttgaagggtaaggagttcgtggtgtatttttggatgaagaagatttatgttagcgtcggtacgtggcgtcgtttg

SEQ ID NO: 1000 - DNA, 643 bp, Artificial Sequence
  chemically treated genomic DNA (Homo sapiens) CpG-island No: 1000
caaacgacgccacgtaccgacgctaacataaatcttcttcatccaaaaatacaccacgaactccttacccttcaaacccaacgaactcttatcgaccaaaaacaacgaacacgcgaaaacgctaccccctaccgaaacgcctaaaataacgaaaaccgcctcgcaacgccgcgaaaccgctaaaaacacgacgcgaaactacaaaaacgacgacaactaaaactacaaaacgtaactcgcatacaaaccgtacgctaaacccttaacttacgccgaaaactactcgaactaaaacgaccgcccgaaactaacgccgccgcgataaccataaaaataaacgatatccgcgaccccatacgcgaaatacaacgcgacaacaaaataaacgaactcgcgaacgatccgcgacgcgtaataaaaaacaataaactctcgaccgccgcccgcgtaaaaaaactaaaactactacaacgacaaatactaaatcgaaaacgctaaaaactactaataaccgaaacccccgcccgaaccgccgtctacgccgcccgaaccgctatactacgcgtactcctcgaaaaaaaaaaacttaaactcgatataattaaaatttatcaaaaacgaactcataatcattaatttataa

SEQ ID NO: 1001 - DNA, 589 bp, Artificial Sequence
  chemically treated genomic DNA (Homo sapiens) CpG-island No: 1001
agagtcgcgttttcgcggtcgcgtggatttagaaaaaggttggttttattatgatttatgtgtagtttgcgtatttaggggtagatttggggttgggcgggcggcgtcgggttcggttcgttttgcgtattcgtttgttcgttgttggtaggggcgtttttttcggtttcggacgtcgtgttaattttttttttgttgttgatgtgggtgttgtcggcgtcggtcgaggcgtcgttggagttgtttagggagtttttttcgtcgtggtggttgtcgttgtcgggcgagggggttacggcggagtagggtagcggatcgggttgaggagagtgcgtggacgtggtcggttggttgtatttgggttcggcgggcgtcgcgttggcgttggtagcgtagttgcgggcgcgtttttcggagttaaagtggtcggagttcgagcggtcgacgttgagatttatgttattgtagtcgtagtcgtatttgtcggagtgtatgttcgtcgagtttttgaattgttcgtttacggaattatgatttttataattatgtaattggtagttcgggttatttggatagcgatcgtaaaatg

SEQ ID NO: 1002 - DNA, 589 bp, Artificial Sequence
  chemically treated genomic DNA (Homo sapiens) CpG-island No: 1002
cattttacgatcgctatccaaataacccgaactaccaattacataattataaaaatcataattccgtaaacgaacaattcaaaaactcgacgaacatacactccgacaaatacgactacgactacaataacataaatctcaacgtcgaccgctcgaactccgaccactttaactccgaaaaacgcgcccgcaactacgctaccaacgccaacgcgacgcccgccgaacccaaatacaaccaaccgaccacgtccacgcactctcctcaacccgatccgctaccctactccgccgtaaccccctcgcccgacaacgacaaccaccacgacgaaaaaaactccctaaacaactccaacgacgcctcgaccgacgccgacaacacccacatcaacaacaaaaaaaaaattaacacgacgtccgaaaccgaaaaaaacgcccctaccaacaacgaacaaacgaatacgcaaaacgaaccgaacccgacgccgcccgcccaaccccaaatctacccctaaatacgcaaactacacataaatcataataaaaccaacctttttctaaatccacgcgaccgcgaaaacgcgactct

SEQ ID NO: 1003 - DNA, 589 bp, Artificial Sequence
  chemically treated genomic DNA (Homo sapiens) CpG-island No: 1003
tattttgcggtcgttatttaaatggttcggattattagttgtataattatggagattatagtttcgtgagcgagtaatttagggattcggcgagtatgtatttcggtaggtacggttacggttataatggtatggattttagcgtcggtcgttcgggtttcggttattttggtttcggagagcgcgttcgtagttacgttgttagcgttagcgcggcgttcgtcgagtttaggtatagttagtcggttacgtttacgtattttttttagttcgattcgttgttttgtttcgtcgtggttttttcgttcggtagcgatagttattacggcgggaaaaattttttaagtaattttagcggcgtttcggtcgacgtcggtagtatttatattagtagtagagagggggttggtacggcgttcggagtcgaggaggacgtttttgttagtagcgagtaggcgagtgcgtagagcgagtcgagttcggcgtcgttcgtttaattttagatttatttttggatgcgtaagttgtatataagttatggtaaagttagtttttttttaaatttacgcgatcgcggggacgcggtttt

SEQ ID NO: 1004 - DNA, 589 bp, Artificial Sequence
  chemically treated genomic DNA (Homo sapiens) CpG-island No: 1004
aaaaccgcgtccccgcgatcgcgtaaatttaaaaaaaaactaactttaccataacttatatacaacttacgcatccaaaaataaatctaaaattaaacgaacgacgccgaactcgactcgctctacgcactcgcctactcgctactaacaaaaacgtcctcctcgactccgaacgccgtaccaaccccctctctactactaatataaatactaccgacgtcgaccgaaacgccgctaaaattacttaaaaaatttttcccgccgtaataactatcgctaccgaacgaaaaaaccacgacgaaacaaaacaacgaatcgaactaaaaaaaatacgtaaacgtaaccgactaactatacctaaactcgacgaacgccgcgctaacgctaacaacgtaactacgaacgcgctctccgaaaccaaaataaccgaaacccgaacgaccgacgctaaaatccataccattataaccgtaaccgtacctaccgaaatacatactcgccgaatccctaaattactcgctcacgaaactataatctccataattatacaactaataatccgaaccatttaaataacgaccgcaaaata

SEQ ID NO: 1005 - DNA, 592 bp, Artificial Sequence
  chemically treated genomic DNA (Homo sapiens) CpG-island No: 1005
ttcgcgaaggagagcgtatcgggcgtgggttttagttaggagcgtatgtatttgtcgttcggcgtcgtcgtcgttacgggcgtttgggggtgtacgtaggggtggtggtgatggtggtggtatatcgtagcgggtatagcgttggcgttcgtcgcgtgtattgggttttacgaggcgttaaatatcgtcgttttggattggaagttgtacgggttgaagtcggggtgttcggttagcgtcgtcgtttgtcggggaggttggtttagggttttcggcgtatagcggttaacgtttagtttattcgcggcgtcggcgtttagtaggaacgagtttacgtagtagttgtttagggttttagtggtggttattatcgtgtttagcgtttggttcgttcggttcgatttacggaaattatgaaattgtagattttatgtaataatttggtggtatcgggggggaagtatagttatttaataagttgtcggcgttcgcgtttttattggtcgtgcgcgttacgtgttcgtttagtagaataataacgcgtaaattatttcgtacgttattaatggttcgatgttttgtagttataatt

SEQ ID NO: 1006 - DNA, 592 bp, Artificial Sequence
  chemically treated genomic DNA (Homo sapiens) CpG-island No: 1006
aattataactacaaaacatcgaaccattaataacgtacgaaataatttacgcgttattattctactaaacgaacacgtaacgcgcacgaccaataaaaacgcgaacgccgacaacttattaaataactatacttcccccccgataccaccaaattattacataaaatctacaatttcataatttccgtaaatcgaaccgaacgaaccaaacgctaaacacgataataaccaccactaaaaccctaaacaactactacgtaaactcgttcctactaaacgccgacgccgcgaataaactaaacgttaaccgctatacgccgaaaaccctaaaccaacctccccgacaaacgacgacgctaaccgaacaccccgacttcaacccgtacaacttccaatccaaaacgacgatatttaacgcctcgtaaaacccaatacacgcgacgaacgccaacgctatacccgctacgatataccaccaccatcaccaccacccctacgtacacccccaaacgcccgtaacgacgacgacgccgaacgacaaatacatacgctcctaactaaaacccacgcccgatacgctctccttcgcgaa

SEQ ID NO: 1007 - DNA, 592 bp, Artificial Sequence
  chemically treated genomic DNA (Homo sapiens) CpG-island No: 1007
aattatgattgtaaaatatcggattattaatagcgtgcggagtgatttacgcgttattgttttgttggacgggtacgtgacgcgtacggttaatgggggcgcgggcgtcggtaatttattaggtgattgtatttttttttcggtgttattaagttgttatatgaaatttgtagttttataattttcgtgggtcgggtcgggcgggttaggcgttgggtacggtgatggttattattggggttttgggtaattattacgtggattcgtttttgttgggcgtcgacgtcgcggatgagttgagcgttggtcgttatgcgtcggggattttgggttagttttttcggtaggcggcgacgttggtcgagtatttcgattttagttcgtgtagtttttagtttaaggcgacggtgtttggcgtttcgtggaatttagtgtacgcggcgggcgttaacgttgtattcgttgcggtgtattattattattattattatttttacgtgtatttttaggcgttcgtggcggcggcggcgtcggacggtaggtatatgcgtttttggttggagtttacgttcggtgcgttttttttcgcggg

SEQ ID NO: 1008 - DNA, 592 bp, Artificial Sequence
  chemically treated genomic DNA (Homo sapiens) CpG-island No: 1008
cccgcgaaaaaaaacgcaccgaacgtaaactccaaccaaaaacgcatatacctaccgtccgacgccgccgccgccacgaacgcctaaaaatacacgtaaaaataataataataataataatacaccgcaacgaatacaacgttaacgcccgccgcgtacactaaattccacgaaacgccaaacaccgtcgccttaaactaaaaactacacgaactaaaatcgaaatactcgaccaacgtcgccgcctaccgaaaaaactaacccaaaatccccgacgcataacgaccaacgctcaactcatccgcgacgtcgacgcccaacaaaaacgaatccacgtaataattacccaaaaccccaataataaccatcaccgtacccaacgcctaacccgcccgacccgacccacgaaaattataaaactacaaatttcatataacaacttaataacaccgaaaaaaaaatacaatcacctaataaattaccgacgcccgcgcccccattaaccgtacgcgtcacgtacccgtccaacaaaacaataacgcgtaaatcactccgcacgctattaataatccgatattttacaatcataatt

SEQ ID NO: 1009 - DNA, 912 bp, Artificial Sequence
  chemically treated genomic DNA (Homo sapiens) CpG-island No: 1009
gtcgaggacgacgcgtgcgttttttcgtcgttttgcgagttttcgtcgttgtcgtaagttagcgtggggggcggcggcgaatcgagggttcgtttttttcgggtcgtatcggtcgagtcggaggttagcgcgggcgggagatcgaaatcgcgtttcgggggttgcgcggggaacgggttagtttcgagttgttgcgcgtcgtcgtcgtcgttgttatagtttttggcggtgtcgtaggtttgagaaaggcggaagtagttaggtattggtatttcgttggaggtgtttagggcgtagtcgtcgggcggcgggtttcgcgggaagggagttagttcggcggcggtggtcgagattttggggtatttgttcgtcgagtcgtagaggtagtaggagtttttttttttgatgttttgcgcgaaagagtacgaggtggtttgcggcgttggttggggtggttgcggcgggggcggcggttgttgttggggcggcggcggcggttcgttaggcggttttattcggtaagatcggggcgcgtttagttataggtttatgggcgagggttcgtagtcgtgcgtttcgggatttagattttcgttatcgttatcgttgttcggcgacgttgttttattgcgtttgtcgtttagcgtggggaagagttcgtagttttgtagttcgtagggtaggtcggcggcgggcggtaggtagatttcgtcgtgggcgtagtaatcgttatcgtcgtcgtttttcgcgttattattatcgtcgtttgtttcgtttttgttcgagttgatgagcgagtcgattaaaaaagagttcgcggcgggtttttcgagtatgatattgttgtgggataatttggcgaagggagtagatagttttttttggttgatattttttgtgtaaaatatgttg

SEQ ID NO: 1010 - DNA, 912 bp, Artificial Sequence
  chemically treated genomic DNA (Homo sapiens) CpG-island No: 1010
caacatattttacacaaaaaatatcaaccaaaaaaaactatctactcccttcgccaaattatcccacaacaatatcatactcgaaaaacccgccgcgaactcttttttaatcgactcgctcatcaactcgaacaaaaacgaaacaaacgacgataataataacgcgaaaaacgacgacgataacgattactacgcccacgacgaaatctacctaccgcccgccgccgacctaccctacgaactacaaaactacgaactcttccccacgctaaacgacaaacgcaataaaacaacgtcgccgaacaacgataacgataacgaaaatctaaatcccgaaacgcacgactacgaaccctcgcccataaacctataactaaacgcgccccgatcttaccgaataaaaccgcctaacgaaccgccgccgccgccccaacaacaaccgccgcccccgccgcaaccaccccaaccaacgccgcaaaccacctcgtactctttcgcgcaaaacatcaaaaaaaaaaactcctactacctctacgactcgacgaacaaataccccaaaatctcgaccaccgccgccgaactaactcccttcccgcgaaacccgccgcccgacgactacgccctaaacacctccaacgaaataccaatacctaactacttccgcctttctcaaacctacgacaccgccaaaaactataacaacgacgacgacgacgcgcaacaactcgaaactaacccgttccccgcgcaacccccgaaacgcgatttcgatctcccgcccgcgctaacctccgactcgaccgatacgacccgaaaaaaacgaaccctcgattcgccgccgccccccacgctaacttacgacaacgacgaaaactcgcaaaacgacgaaaaaacgcacgcgtcgtcctcgac

SEQ ID NO: 1011 - DNA, 912 bp, Artificial Sequence
  chemically treated genomic DNA (Homo sapiens) CpG-island No: 1011
tagtatgttttgtataagaaatgttagttagaaagggttatttgtttttttcgttaaattattttataataatgttatgttcggagagttcgtcgcgaatttttttttggtcgattcgtttattagttcgggtagaggcgaggtaggcggcggtggtggtggcgcggggggcggcggcggtggcggttattacgtttacggcggggtttatttgtcgttcgtcgtcgatttgttttacgggttgtagagttgcgggtttttttttacgttgggcggtaagcgtaatgaggtagcgtcgtcgggtagcggtggcggtggcgggggtttaggtttcggggcgtacggttacgggttttcgtttatagatttgtggttagacgcgtttcggttttgtcggatggagtcgtttgacgggtcgtcgtcgtcgttttagtagtagtcgtcgttttcgtcgtaattattttagttagcgtcgtaggttatttcgtgttttttcgcgtagaatattaaagaagagagtttttattgtttttacgattcggcggataaatgttttaaagtttcggttatcgtcgtcgaattggtttttttttcgcggggttcgtcgttcgacggttgcgttttgggtatttttagcggggtgttagtgtttggttattttcgttttttttaggtttacggtatcgttaagggttatggtagcggcggcggcggcgcgtagtaattcggggttggttcgtttttcgcgtagttttcggggcgcggtttcgatttttcgttcgcgttagttttcggttcggtcgatgcggttcggaaggagcgagttttcgattcgtcgtcgttttttacgttggtttgcggtagcggcgggggttcgtagggcgacgaggaggcgtacgcgtcgttttcggt

SEQ ID NO: 1012 - DNA, 912 bp, Artificial Sequence
  chemically treated genomic DNA (Homo sapiens) CpG-island No: 1012
accgaaaacgacgcgtacgcctcctcgtcgccctacgaacccccgccgctaccgcaaaccaacgtaaaaaacgacgacgaatcgaaaactcgctccttccgaaccgcatcgaccgaaccgaaaactaacgcgaacgaaaaatcgaaaccgcgccccgaaaactacgcgaaaaacgaaccaaccccgaattactacgcgccgccgccgccgctaccataacccttaacgataccgtaaacctaaaaaaaacgaaaataaccaaacactaacaccccgctaaaaatacccaaaacgcaaccgtcgaacgacgaaccccgcgaaaaaaaaaccaattcgacgacgataaccgaaactttaaaacatttatccgccgaatcgtaaaaacaataaaaactctcttctttaatattctacgcgaaaaaacacgaaataacctacgacgctaactaaaataattacgacgaaaacgacgactactactaaaacgacgacgacgacccgtcaaacgactccatccgacaaaaccgaaacgcgtctaaccacaaatctataaacgaaaacccgtaaccgtacgccccgaaacctaaacccccgccaccgccaccgctacccgacgacgctacctcattacgcttaccgcccaacgtaaaaaaaaacccgcaactctacaacccgtaaaacaaatcgacgacgaacgacaaataaaccccgccgtaaacgtaataaccgccaccgccgccgccccccgcgccaccaccaccgccgcctacctcgcctctacccgaactaataaacgaatcgaccaaaaaaaaattcgcgacgaactctccgaacataacattattataaaataatttaacgaaaaaaacaaataaccctttctaactaacatttcttatacaaaacatacta

SEQ ID NO: 1013 - DNA, 677 bp, Artificial Sequence
  chemically treated genomic DNA (Homo sapiens) CpG-island No: 1013
gttttgtttttagtgtggtcggaagacgattcggggttgttgttgttttcggggcgtcgtcgtcgtttttttttttttgttgtcgtcgtcgtttttcggtagtcgtcgtcgtcgtcgttgttcgaatttgaagttgtcggcgcgttcgttgtagtcgtcgtcgtcgtcgcggaggtcgtcgtggtcgtcgggggttttttttcggcgtttttgttttcggggtagtcggaggaggcgaggtttttcggggtgtcgtaggttgtttcgaaaaattggtcgaaagtttgtggtaggacgtcgtttttgtttacggtgttatagaaattggacgagattgcgggggtggggtggtggtagacgttggtcgagtttttggttagtacgtcgttaggtacgtcggtcgcgttgggcgtttgtaggtagtttttgtgtacgagttttttcgcggagtagtagtgggttagattgtcgcgggggtgttatttagtggcgggtttaatggcgtattttttgaaggttatttcgcgtacgggttggatttggggtaggttggaggagtaggagtatgttattgggcgcgaagacggggtttggggtagaaaagaagggaggttggagaaatttggattcgagacgtagtaagtataatttggtaaatatatgttagaggagtaggg

SEQ ID NO: 1014 - DNA, 677 bp, Artificial Sequence
  chemically treated genomic DNA (Homo sapiens) CpG-island No: 1014
ccctactcctctaacatatatttaccaaattatacttactacgtctcgaatccaaatttctccaacctcccttcttttctaccccaaaccccgtcttcgcgcccaataacatactcctactcctccaacctaccccaaatccaacccgtacgcgaaataaccttcaaaaaatacgccattaaacccgccactaaataacacccccgcgacaatctaacccactactactccgcgaaaaaactcgtacacaaaaactacctacaaacgcccaacgcgaccgacgtacctaacgacgtactaaccaaaaactcgaccaacgtctaccaccaccccacccccgcaatctcgtccaatttctataacaccgtaaacaaaaacgacgtcctaccacaaactttcgaccaatttttcgaaacaacctacgacaccccgaaaaacctcgcctcctccgactaccccgaaaacaaaaacgccgaaaaaaaacccccgacgaccacgacgacctccgcgacgacgacgacgactacaacgaacgcgccgacaacttcaaattcgaacaacgacgacgacgacgactaccgaaaaacgacgacgacaacaaaaaaaaaaaaacgacgacgacgccccgaaaacaacaacaaccccgaatcgtcttccgaccacactaaaaacaaaac

SEQ ID NO: 1015 - DNA, 677 bp, Artificial Sequence
  chemically treated genomic DNA (Homo sapiens) CpG-island No: 1015
ttttgtttttttaatatgtatttgttaagttgtatttattacgtttcgggtttagatttttttagtttttttttttttttgttttagatttcgttttcgcgtttaatgatatatttttatttttttaatttgttttaggtttaattcgtgcgcgaagtgatttttagagagtacgttattgagttcgttattaaatggtattttcgcggtaatttggtttattgttatttcgcggaggagttcgtgtatagagattgtttgtaggcgtttagcgcggtcggcgtgtttggcgacgtgttggttaagagttcggttaacgtttattattattttattttcgtagtttcgtttaatttttatagtatcgtgggtaggaacggcgttttgttataggttttcgattagtttttcgagatagtttacggtatttcggaaaatttcgtttttttcgattatttcggggataagagcgtcgagaaggggttttcggcggttacggcgattttcgcggcggcggcggcggttgtaacgggcgcgtcggtaattttaagttcggatagcggcggcggcggcggttgtcgggagacggcggcggtagtagaggagaaagagcggcggcggcgtttcgagagtagtagtagtttcgagtcgtttttcggttatattgaggataaggt

SEQ ID NO: 1016 - DNA, 677 bp, Artificial Sequence
  chemically treated genomic DNA (Homo sapiens) CpG-island No: 1016
accttatcctcaatataaccgaaaaacgactcgaaactactactactctcgaaacgccgccgccgctctttctcctctactaccgccgccgtctcccgacaaccgccgccgccgccgctatccgaacttaaaattaccgacgcgcccgttacaaccgccgccgccgccgcgaaaatcgccgtaaccgccgaaaaccccttctcgacgctcttatccccgaaataatcgaaaaaaacgaaattttccgaaataccgtaaactatctcgaaaaactaatcgaaaacctataacaaaacgccgttcctacccacgatactataaaaattaaacgaaactacgaaaataaaataataataaacgttaaccgaactcttaaccaacacgtcgccaaacacgccgaccgcgctaaacgcctacaaacaatctctatacacgaactcctccgcgaaataacaataaaccaaattaccgcgaaaataccatttaataacgaactcaataacgtactctctaaaaatcacttcgcgcacgaattaaacctaaaacaaattaaaaaaataaaaatatatcattaaacgcgaaaacgaaatctaaaacaaaaaaaaaaaaaaactaaaaaaatctaaacccgaaacgtaataaatacaacttaacaaatacatattaaaaaaacaaaa

SEQ ID NO: 1017 - DNA, 1014 bp, Artificial Sequence
  chemically treated genomic DNA (Homo sapiens) CpG-island No: 1017
tcggtagttgggtcggcggtatttatgtatttgttcgcgaaggcggcggcggcggcggtcgaggcgggttgcgcgtacgatttgatggcgttggggtgcgggtttatgcgggcgtacgggtagtagtcgttgtcgaagtagttatagggtagcgtcgcgggtttcgacgagttttgcgtcgttgtcgagtaggggttgtattgtttggcggtttttgcgttcgtcgggttcgtcgggtcgggatttttcgaggacgacgcggcggcggcggcggcggttgtagcggtagtcgcggtagtagcggcggtagtcgacgggggcgttttttcgggggcgttgttgtaggcggacgcggtttttggcgttaagggcgtcgggtgcgttattaggttgcggtattggttggtcgcggtcgtcgtcgtagtcgcggtcgtcgtcgttatcgagaagttgttttttgtcgtcgtagtcgtcgggtgggggaagttttcgttttcggtttcggtagtcgtcgtcgttgtagtcgttgttgtagtcgtcgtcgttttttttatgtttttgttgagttcgtcggttattaggtcgtcgtcgttgtcgtagagaaatatgacggtgggttcgatttagcgggggtggaggagtacggaggttgttatagttcgagtcgtatggagaagattttagtggcgttgttttaaaaagtttttaagaagtgaagagcgcgcggcgcggggtcggggttcgagcgaggggggcggatcgcgtttcgcggggtcgcgttaggcggtcgtttattggttcggttttttcgtttcgtttacggcgtatgtaaagcgggcggtttcgattttagttttgtacggtgtattcgtcgttttcgtcgcggttcgcgtcgtttttagcgttagtcgcgcggtcgcgtattatttattcgggggagaggcggaggaacgtgcgggtggggtagggaaggaaggcggttttattttcgttttttttttttttttttatttt

SEQ ID NO: 1018 - DNA, 1014 bp, Artificial Sequence
  chemically treated genomic DNA (Homo sapiens) CpG-island No: 1018
aaaataaaaaaaaaaaaaaaaaacgaaaataaaaccgccttccttccctaccccacccgcacgttcctccgcctctcccccgaataaataatacgcgaccgcgcgactaacgctaaaaacgacgcgaaccgcgacgaaaacgacgaatacaccgtacaaaactaaaatcgaaaccgcccgctttacatacgccgtaaacgaaacgaaaaaaccgaaccaataaacgaccgcctaacgcgaccccgcgaaacgcgatccgcccccctcgctcgaaccccgaccccgcgccgcgcgctcttcacttcttaaaaactttttaaaacaacgccactaaaatcttctccatacgactcgaactataacaacctccgtactcctccacccccgctaaatcgaacccaccgtcatatttctctacgacaacgacgacgacctaataaccgacgaactcaacaaaaacataaaaaaaacgacgacgactacaacaacgactacaacgacgacgactaccgaaaccgaaaacgaaaacttcccccacccgacgactacgacgacaaaaaacaacttctcgataacgacgacgaccgcgactacgacgacgaccgcgaccaaccaataccgcaacctaataacgcacccgacgcccttaacgccaaaaaccgcgtccgcctacaacaacgcccccgaaaaaacgcccccgtcgactaccgccgctactaccgcgactaccgctacaaccgccgccgccgccgccgcgtcgtcctcgaaaaatcccgacccgacgaacccgacgaacgcaaaaaccgccaaacaatacaacccctactcgacaacgacgcaaaactcgtcgaaacccgcgacgctaccctataactacttcgacaacgactactacccgtacgcccgcataaacccgcaccccaacgccatcaaatcgtacgcgcaacccgcctcgaccgccgccgccgccgccttcgcgaacaaatacataaataccgccgacccaactaccga

SEQ ID NO: 1019 - DNA, 1014 bp, Artificial Sequence
  chemically treated genomic DNA (Homo sapiens) CpG-island No: 1019
gggataaaggaagggaaggggggcggagatggggtcgttttttttttttgttttattcgtacgttttttcgtttttttttcgggtgaatggtgcgcggtcgcgcggttggcgttggggacggcgcgggtcgcggcggggacgacgggtgtatcgtgtagagttggagtcggagtcgttcgttttgtatacgtcgtgggcggagcgggggggtcgggttaatgggcggtcgtttggcgcgatttcgcggggcgcgattcgtttttttcgttcgggtttcggtttcgcgtcgcgcgttttttattttttgggggttttttaaaatagcgttattggggttttttttatgcggttcgggttatgatagttttcgtgtttttttattttcgttggatcgagtttatcgttatgtttttttacgataacggcggcggtttggtggtcgacgagtttaataagaatatggaaggggcggcggcggttgtagtagcggttgtagcggcggcggttgtcggggtcgggggcgggggttttttttattcggcggttgcggcggtagggggtaatttttcggtggcggcggcggtcgcggttgcggcggcggtcgcggttaattagtgtcgtaatttgatggcgtattcggcgtttttggcgttaggagtcgcgttcgtttatagtagcgttttcggggaggcgttttcgtcggttgtcgtcgttgttgtcgcggttgtcgttgtagtcgtcgtcgtcgtcgtcgcgtcgttttcgggaggtttcggttcggcgggttcggcgggcgtagaggtcgttaagtaatgtagtttttgttcggtagcggcgtagagttcgtcggggttcgcggcgttgttttatggttatttcggtagcggttattattcgtgcgttcgtatgggttcgtattttaacgttattaagtcgtgcgcgtagttcgtttcggtcgtcgtcgtcgtcgttttcgcggataagtatatggatatcgtcggtttagttgtcga

SEQ ID NO: 1020 - DNA, 1014 bp, Artificial Sequence
  chemically treated genomic DNA (Homo sapiens) CpG-island No: 1020
tcgacaactaaaccgacgatatccatatacttatccgcgaaaacgacgacgacgacgaccgaaacgaactacgcgcacgacttaataacgttaaaatacgaacccatacgaacgcacgaataataaccgctaccgaaataaccataaaacaacgccgcgaaccccgacgaactctacgccgctaccgaacaaaaactacattacttaacgacctctacgcccgccgaacccgccgaaccgaaacctcccgaaaacgacgcgacgacgacgacgacgactacaacgacaaccgcgacaacaacgacgacaaccgacgaaaacgcctccccgaaaacgctactataaacgaacgcgactcctaacgccaaaaacgccgaatacgccatcaaattacgacactaattaaccgcgaccgccgccgcaaccgcgaccgccgccgccaccgaaaaattaccccctaccgccgcaaccgccgaataaaaaaaacccccgcccccgaccccgacaaccgccgccgctacaaccgctactacaaccgccgccgccccttccatattcttattaaactcgtcgaccaccaaaccgccgccgttatcgtaaaaaaacataacgataaactcgatccaacgaaaataaaaaaacacgaaaactatcataacccgaaccgcataaaaaaaaccccaataacgctattttaaaaaacccccaaaaaataaaaaacgcgcgacgcgaaaccgaaacccgaacgaaaaaaacgaatcgcgccccgcgaaatcgcgccaaacgaccgcccattaacccgacccccccgctccgcccacgacgtatacaaaacgaacgactccgactccaactctacacgatacacccgtcgtccccgccgcgacccgcgccgtccccaacgccaaccgcgcgaccgcgcaccattcacccgaaaaaaaaacgaaaaaacgtacgaataaaacaaaaaaaaaaaacgaccccatctccgccccccttcccttcctttatccc

SEQ ID NO: 1021 - DNA, 553 bp, Artificial Sequence
  chemically treated genomic DNA (Homo sapiens) CpG-island No: 1021
ggttatgacgtggtcgtattcggcggatttcgttttttatatttatatgatgagttatgcggcggtcgcgggcggtttgttttatttttttttatcgtatttgtttttgttttattattcgtcggtgggtttgggcgtcgtattcgtcgttttcgtcgtcgtttcgttttttagcggttcgttgcgttcgttcgatacgtttcgcgtgttgtcgtagttttattcgcggttcgaattgttgtgcgtttttcgttattcgtcgttttatttcgggttcgcgtacggattgggcgtttttgtcggcggtttttgtttttgtttcgtttgttatagcggttcggttaacgggttggcgtttcgggttgtcgtcgtttcggattttatttgtgtttttatttttcgttcggattttttttttattttcgcgttttcggtgtttagtaaggtttttttcgtcgcgttggattagagggaggaggtgttttttattagataaggggtcgtcggttggttgtcggttttatgacgttcgtggggttatttttcggtttcg

SEQ ID NO: 1022 - DNA, 553 bp, Artificial Sequence
  chemically treated genomic DNA (Homo sapiens) CpG-island No: 1022
cgaaaccgaaaaataaccccacgaacgtcataaaaccgacaaccaaccgacgaccccttatctaataaaaaacacctcctccctctaatccaacgcgacgaaaaaaaccttactaaacaccgaaaacgcgaaaataaaaaaaaaatccgaacgaaaaataaaaacacaaataaaatccgaaacgacgacaacccgaaacgccaacccgttaaccgaaccgctataacaaacgaaacaaaaacaaaaaccgccgacaaaaacgcccaatccgtacgcgaacccgaaataaaacgacgaataacgaaaaacgcacaacaattcgaaccgcgaataaaactacgacaacacgcgaaacgtatcgaacgaacgcaacgaaccgctaaaaaacgaaacgacgacgaaaacgacgaatacgacgcccaaacccaccgacgaataataaaacaaaaacaaatacgataaaaaaaaataaaacaaaccgcccgcgaccgccgcataactcatcatataaatataaaaaacgaaatccgccgaatacgaccacgtcataacc

SEQ ID NO: 1023 - DNA, 553 bp, Artificial Sequence
  chemically treated genomic DNA (Homo sapiens) CpG-island No: 1023
cggggtcggggggtgattttacgggcgttatggagtcggtagttagtcggcggttttttatttagtgaggggtattttttttttttggtttagcgcgacggaggaggttttgttgagtatcgagggcgcgaaggtgaggaaggagttcgagcgggaggtggaggtataggtgaagttcgaggcggcggtagttcggggcgttagttcgttggtcgggtcgttgtgataggcgaggtaggagtaggggtcgtcggtagaggcgtttagttcgtgcgcgggttcggggtagagcggcgggtggcggaaggcgtatagtagttcgggtcgcgggtagggttgcgatagtacgcggaacgtgtcgagcgggcgtagcgagtcgttgaagggcgaggcggcggcggaggcggcggatgcggcgtttaggtttatcggcgagtagtagggtaggggtaggtgcgatgggaaggggtagggtaggtcgttcgcggtcgtcgtatggtttattatgtaagtgtagaaggcggggttcgtcgggtgcggttacgttatggtt

SEQ ID NO: 1024 - DNA, 553 bp, Artificial Sequence
  chemically treated genomic DNA (Homo sapiens) CpG-island No: 1024
aaccataacgtaaccgcacccgacgaaccccgccttctacacttacataataaaccatacgacgaccgcgaacgacctaccctaccccttcccatcgcacctacccctaccctactactcgccgataaacctaaacgccgcatccgccgcctccgccgccgcctcgcccttcaacgactcgctacgcccgctcgacacgttccgcgtactatcgcaaccctacccgcgacccgaactactatacgccttccgccacccgccgctctaccccgaacccgcgcacgaactaaacgcctctaccgacgacccctactcctacctcgcctatcacaacgacccgaccaacgaactaacgccccgaactaccgccgcctcgaacttcacctatacctccacctcccgctcgaactccttcctcaccttcgcgccctcgatactcaacaaaacctcctccgtcgcgctaaaccaaaaaaaaaaaatacccctcactaaataaaaaaccgccgactaactaccgactccataacgcccgtaaaatcaccccccgaccccg

SEQ ID NO: 1025 - DNA, 779 bp, Artificial Sequence
  chemically treated genomic DNA (Homo sapiens) CpG-island No: 1025
ggttttttcggcggttttatttgtttcgggtttgacgggtattttcggggttgtcgtagtcggaattcggggaggtaggaaatgaatggggattcgaggggtgggggcgcggtggggtcggttttcggtttttggagggcgaggggacgaggagggaatcggtttttaatttcgattcggggcgggagttcgaagttcggtcggggcgttttttttcggacggggttaatcgaacgcggcggtggtcgggtcgaggttcgcgtcgggtttttcggggttttttattttcgcgatgttatgtttttttcgtttttcggtttcgcgacggattcgttttttgtttaggtttcgttgggttcggttatatcgggttggttcgagggaggttcgttcgggatcggacgcggggtagagttagtcggtcgcgtatagatttttttttaggtttggggatttcggagattgtgtagttgtttttcggttcggttcgtttttttttcgttttcgtttttcgtcgtcgtcgttttcgtgatgttatcgttcgcgacgttcgtcgttattttttgtttttcgttagcggaggatcgagcgacggtcgggaatggtagcgcgggggtttcgcggaggcgttacgtatagtgtttaaagtatttttgtttttttttggaaatcgcggtcgttaggtgtgagttgcgcgtttcgcgtttacgttatcgattcgttcgggttcgttgttatatcgattttatttatttcgttttataaatcgtcgttttatt

SEQ ID NO: 1026 - DNA, 779 bp, Artificial Sequence
  chemically treated genomic DNA (Homo sapiens) CpG-island No: 1026
aataaaacgacgatttataaaacgaaataaataaaatcgatataacaacgaacccgaacgaatcgataacgtaaacgcgaaacgcgcaactcacacctaacgaccgcgatttccaaaaaaaaacaaaaatactttaaacactatacgtaacgcctccgcgaaacccccgcgctaccattcccgaccgtcgctcgatcctccgctaacgaaaaacaaaaaataacgacgaacgtcgcgaacgataacatcacgaaaacgacgacgacgaaaaacgaaaacgaaaaaaaaacgaaccgaaccgaaaaacaactacacaatctccgaaatccccaaacctaaaaaaaaatctatacgcgaccgactaactctaccccgcgtccgatcccgaacgaacctccctcgaaccaacccgatataaccgaacccaacgaaacctaaacaaaaaacgaatccgtcgcgaaaccgaaaaacgaaaaaaacataacatcgcgaaaataaaaaaccccgaaaaacccgacgcgaacctcgacccgaccaccgccgcgttcgattaaccccgtccgaaaaaaaacgccccgaccgaacttcgaactcccgccccgaatcgaaattaaaaaccgattccctcctcgtcccctcgccctccaaaaaccgaaaaccgaccccaccgcgcccccacccctcgaatccccattcatttcctacctccccgaattccgactacgacaaccccgaaaatacccgtcaaacccgaaacaaataaaaccgccgaaaaaacc

SEQ ID NO: 1027 - DNA, 779 bp, Artificial Sequence
  chemically treated genomic DNA (Homo sapiens) CpG-island No: 1027
agtggagcggcgatttgtggaacgaaatgaatgaaatcgatgtggtagcgggttcggacgggtcggtggcgtagacgcggagcgcgtagtttatatttggcggtcgcggtttttaggaggaagtaaggatgttttggatattgtgcgtggcgttttcgcggagttttcgcgttgttattttcggtcgtcgttcggtttttcgttgacgggaagtaggaagtggcggcgggcgtcgcgagcggtgatattacgggggcgacggcggcgaagggcgggggcggaggaggagcgagtcgggtcggggggtagttgtatagttttcgggatttttaggtttggaggggggtttgtgcgcggtcggttggttttgtttcgcgttcggtttcgagcgggtttttttcgggttagttcgatgtgatcgagtttagcggagtttgagtaaggagcgggttcgtcgcggagtcggagggcgggaggaatatgatatcgcggaggtgaggagtttcgaggggttcggcgcgggtttcggttcggttatcgtcgcgttcggttagtttcgttcggaagggggcgtttcggtcgggtttcgggttttcgtttcgggtcggggttgggggtcggtttttttttcgttttttcgttttttaggggtcgggggtcggttttatcgcgtttttatttttcgggtttttatttattttttgttttttcgagtttcggttgcggtagtttcggggatgttcgttaggttcggggtaggtagagtcgtcgagggaatt

SEQ ID NO: 1028 - DNA, 779 bp, Artificial Sequence
  chemically treated genomic DNA (Homo sapiens) CpG-island No: 1028
aattccctcgacgactctacctaccccgaacctaacgaacatccccgaaactaccgcaaccgaaactcgaaaaaacaaaaaataaataaaaacccgaaaaataaaaacgcgataaaaccgacccccgacccctaaaaaacgaaaaaacgaaaaaaaaaccgacccccaaccccgacccgaaacgaaaacccgaaacccgaccgaaacgcccccttccgaacgaaactaaccgaacgcgacgataaccgaaccgaaacccgcgccgaacccctcgaaactcctcacctccgcgatatcatattcctcccgccctccgactccgcgacgaacccgctccttactcaaactccgctaaactcgatcacatcgaactaacccgaaaaaaacccgctcgaaaccgaacgcgaaacaaaaccaaccgaccgcgcacaaacccccctccaaacctaaaaatcccgaaaactatacaactaccccccgacccgactcgctcctcctccgcccccgcccttcgccgccgtcgcccccgtaatatcaccgctcgcgacgcccgccgccacttcctacttcccgtcaacgaaaaaccgaacgacgaccgaaaataacaacgcgaaaactccgcgaaaacgccacgcacaatatccaaaacatccttacttcctcctaaaaaccgcgaccgccaaatataaactacgcgctccgcgtctacgccaccgacccgtccgaacccgctaccacatcgatttcattcatttcgttccacaaatcgccgctccact

SEQ ID NO: 1029 - DNA, 910 bp, Artificial Sequence
  chemically treated genomic DNA (Homo sapiens) CpG-island No: 1029
tattcgggtggtttcgttcgcggagcggtgggcggagcggcgggcggggtttgtattgttcgtttcgcgaggtatgtcgggagtttcgtttttaatatggcgttttattgatagttggttgtcgagcggtagaggcggattttgtttttgagggcggcggcggcggcggcggcggcggcggcggtagggtcggggtttttcgggtcggggtcgggggtatggcgattcggatcgtttagggcggagttgtacgggcgaggtagtaagtggggcgtcgttggcgggcgcggcggtcgttgttatggattggtgatcgcggcggtttttgtttcgtttttttcggtcgggcgtttgttttttagcgttaagtttttagtcggggttatgggttcgtcggcggtcgcggcggcggcggcggcggcggtcgttgattcggcgtagtggttttcggtgaaggaagagattatttttttgtacgacgggttgattcgggttatcgatttggtcgagttgtttagcgagattttcggggttttagaggtcgcggatatcgatttggaggtgagcgaggcggttttcggttttcgttatcggattgatttattcgttcggtattttcgggtcgggtttttttttcgttttagtcgcggtttcgtttttcggcggttgtcggggtaggtgtgtgtgggcgcggggcgggtaggtggggtcgcggtcgtaggtttgcggatcgttcgtttcgtttttttttttttttttttcggggtttggcgttcgtaggggattttatttgtggtttttttttgagcgtttcgatattcggtattttattaggttagcgtttggttcggtttttatgttttagaggagttatcgttattattcgggttttttttttttttttttacgg

SEQ ID NO: 1030 - DNA, 910 bp, Artificial Sequence
  chemically treated genomic DNA (Homo sapiens) CpG-island No: 1030
ccgtaaaaaaaaaaaaaaaaaacccgaataataacgataactcctctaaaacataaaaaccgaaccaaacgctaacctaataaaataccgaatatcgaaacgctcaaaaaaaaaccacaaataaaatcccctacgaacgccaaaccccgaaaaaaaaaaaaaaaaaaacgaaacgaacgatccgcaaacctacgaccgcgaccccacctacccgccccgcgcccacacacacctaccccgacaaccgccgaaaaacgaaaccgcgactaaaacgaaaaaaaaacccgacccgaaaataccgaacgaataaatcaatccgataacgaaaaccgaaaaccgcctcgctcacctccaaatcgatatccgcgacctctaaaaccccgaaaatctcgctaaacaactcgaccaaatcgataacccgaatcaacccgtcgtacaaaaaaataatctcttccttcaccgaaaaccactacgccgaatcaacgaccgccgccgccgccgccgccgcgaccgccgacgaacccataaccccgactaaaaacttaacgctaaaaaacaaacgcccgaccgaaaaaaacgaaacaaaaaccgccgcgatcaccaatccataacaacgaccgccgcgcccgccaacgacgccccacttactacctcgcccgtacaactccgccctaaacgatccgaatcgccatacccccgaccccgacccgaaaaaccccgaccctaccgccgccgccgccgccgccgccgccgccgccctcaaaaacaaaatccgcctctaccgctcgacaaccaactatcaataaaacgccatattaaaaacgaaactcccgacatacctcgcgaaacgaacaatacaaaccccgcccgccgctccgcccaccgctccgcgaacgaaaccacccgaata

SEQ ID NO: 1031 - DNA, 910 bp, Artificial Sequence
  chemically treated genomic DNA (Homo sapiens) CpG-island No: 1031
tcgtgggggaggggagggagggttcgggtggtggcggtggtttttttggggtatgaaggtcgagttaggcgttagtttaataaaatgtcgggtgtcggaacgtttaaaagaaaattataaatgaaattttttgcgggcgttaggtttcgaggagggagggagggagagcggggcgggcggttcgtagatttgcggtcgcggttttatttgttcgtttcgcgtttatatatatttgtttcggtagtcgtcgggaggcgaggtcgcggttgaggcgaggagggggttcgattcgggggtgtcgggcgagtgggttagttcgatggcgggggtcgggggtcgtttcgtttatttttaggtcggtgttcgcggtttttggggtttcgaggatttcgttgggtagttcggttaggtcggtgattcggattagttcgtcgtgtaggaagatggtttttttttttatcgagagttattgcgtcgagttagcggtcgtcgtcgtcgtcgtcgtcgcggtcgtcgacgagtttatggtttcggttgaaggtttggcgttgaggagtagacgttcggtcgggggaaacggagtaggagtcgtcgcgattattagtttatggtagcggtcgtcgcgttcgttagcggcgttttatttgttgtttcgttcgtgtaatttcgttttaggcggttcgagtcgttatattttcgatttcggttcgggagatttcggttttgtcgtcgtcgtcgtcgtcgtcgtcgtcgtcgtttttaggagtaggattcgtttttgtcgttcggtaattaattgttagtgagacgttatgttgggggcggggttttcggtatgtttcgcggagcggataatataggtttcgttcgtcgtttcgtttatcgtttcgcggacgaggttattcgggtg

SEQ ID NO: 1032 - DNA, 910 bp, Artificial Sequence
  chemically treated genomic DNA (Homo sapiens) CpG-island No: 1032
cacccgaataacctcgtccgcgaaacgataaacgaaacgacgaacgaaacctatattatccgctccgcgaaacataccgaaaaccccgcccccaacataacgtctcactaacaattaattaccgaacgacaaaaacgaatcctactcctaaaaacgacgacgacgacgacgacgacgacgacgacaaaaccgaaatctcccgaaccgaaatcgaaaatataacgactcgaaccgcctaaaacgaaattacacgaacgaaacaacaaataaaacgccgctaacgaacgcgacgaccgctaccataaactaataatcgcgacgactcctactccgtttcccccgaccgaacgtctactcctcaacgccaaaccttcaaccgaaaccataaactcgtcgacgaccgcgacgacgacgacgacgacgaccgctaactcgacgcaataactctcgataaaaaaaaaaaccatcttcctacacgacgaactaatccgaatcaccgacctaaccgaactacccaacgaaatcctcgaaaccccaaaaaccgcgaacaccgacctaaaaataaacgaaacgacccccgacccccgccatcgaactaacccactcgcccgacacccccgaatcgaaccccctcctcgcctcaaccgcgacctcgcctcccgacgactaccgaaacaaatatatataaacgcgaaacgaacaaataaaaccgcgaccgcaaatctacgaaccgcccgccccgctctccctccctccctcctcgaaacctaacgcccgcaaaaaatttcatttataattttcttttaaacgttccgacacccgacattttattaaactaacgcctaactcgaccttcataccccaaaaaaaccaccgccaccacccgaaccctccctcccctcccccacga

SEQ ID NO: 1033 - DNA, 1463 bp, Artificial Sequence
  chemically treated genomic DNA (Homo sapiens) CpG-island No: 1033
gcggtcgtttttcgcggtttttacgtttttttgagttatttatagaggggttcgttttatttttaacgacgggagggcgaagagtgtagagttggtttcgttcgcgtttcgcgtttgcgttgttagggtcgatcgaggacggcggtaagggggttcgacgtttcgcgtttagttgtgttttcggtttcggggttttagtcgcgtcgtttattcgttttaattttagacgttttagttttgggggcgtttcggggaagaggggtcgagggcgggtttatagggcgggcgtttttcgttttcggtcggtttgcggtttttcgcggcggtagcggcgttcgggtttcgggtcgcgttgggtttttagtttcgggaacgcgggggcggcgggggcggggcggggattagtttgggagcggcgttgatagtttcgttgtgtttttttcgttcggcggggttcgttgggtcgtttaattcgtttttgttcgcgcggtgttatatcgtattattcgtataatgcggtcgtcgggttcgggtcgtcgggtcggtcgttatcgcgtagtaacgggcggttttcgcggtcgggtcgcgttttcggtttcggcgtcgggtcgcgaaatttttattgaagcggcgtttttcgttttcgcgtcgcgtcgcgtcgcgtcgaatggttagagggcgtgtgaatggcgcggcggtcgcgcggtgggggggcggtgttcgggcgttttttaggtcgtttaggttttttcggcgttcgttttcgtttttgttttcgttttcgtttggggaagcgtttcgggttcgtcgcgtcgtcgtcgcgtttcgtttttttcggtcgtcgatttcgtcgtttttagattcgcggaagacgcgcgtttcgggttgttcgattcgttgcgtttcgggttttaaagcgcggggtagagattaatttttggtcgtttacgcggcggtggtgtggggattcgtcgggggcggggtgtaaacgtggggtcggagttgggcgcgaatttgggtttaaggttcgggttttgggtatcgatcggggcgcgtatgcgttcgcggcgtttttcgggatgtttttttcgtcgtcgttagtaaatttttaaattttcgggtatatatcgttttttttttcgtaatttaaatttgttttcgggttatttagggatcggggcgtgtgttagaatttacggtggtgatttaaaacgtttaacgcggagtgaatgggtagcgtttttagagtcgtttttttttggtttttggtcggagacgggaagagcgattagaggtgattcgtttttggggagcgcgtttagacgtagggttgtttgatttagcgttatttggttcgaggaggggtatcggaaagcgttgagattaatatatcgataagaacgagtttgaaatgtaaatcgtcgttatttggttttagttaagaggttaaattttttatgtta

SEQ ID NO: 1034 - DNA, 1463 bp, Artificial Sequence
  chemically treated genomic DNA (Homo sapiens) CpG-island No: 1034
taacataaaaaatttaacctcttaactaaaaccaaataacgacgatttacatttcaaactcgttcttatcgatatattaatctcaacgctttccgatacccctcctcgaaccaaataacgctaaatcaaacaaccctacgtctaaacgcgctccccaaaaacgaatcacctctaatcgctcttcccgtctccgaccaaaaaccaaaaaaaaacgactctaaaaacgctacccattcactccgcgttaaacgttttaaatcaccaccgtaaattctaacacacgccccgatccctaaataacccgaaaacaaatttaaattacgaaaaaaaaaacgatatatacccgaaaatttaaaaatttactaacgacgacgaaaaaaacatcccgaaaaacgccgcgaacgcatacgcgccccgatcgatacccaaaacccgaaccttaaacccaaattcgcgcccaactccgaccccacgtttacaccccgcccccgacgaatccccacaccaccgccgcgtaaacgaccaaaaattaatctctaccccgcgctttaaaacccgaaacgcaacgaatcgaacaacccgaaacgcgcgtcttccgcgaatctaaaaacgacgaaatcgacgaccgaaaaaaacgaaacgcgacgacgacgcgacgaacccgaaacgcttccccaaacgaaaacgaaaacaaaaacgaaaacgaacgccgaaaaaacctaaacgacctaaaaaacgcccgaacaccgcccccccaccgcgcgaccgccgcgccattcacacgccctctaaccattcgacgcgacgcgacgcgacgcgaaaacgaaaaacgccgcttcaataaaaatttcgcgacccgacgccgaaaccgaaaacgcgacccgaccgcgaaaaccgcccgttactacgcgataacgaccgacccgacgacccgaacccgacgaccgcattatacgaataatacgatataacaccgcgcgaacaaaaacgaattaaacgacccaacgaaccccgccgaacgaaaaaaacacaacgaaactatcaacgccgctcccaaactaatccccgccccgcccccgccgcccccgcgttcccgaaactaaaaacccaacgcgacccgaaacccgaacgccgctaccgccgcgaaaaaccgcaaaccgaccgaaaacgaaaaacgcccgccctataaacccgccctcgacccctcttccccgaaacgcccccaaaactaaaacgtctaaaattaaaacgaataaacgacgcgactaaaaccccgaaaccgaaaacacaactaaacgcgaaacgtcgaacccccttaccgccgtcctcgatcgaccctaacaacgcaaacgcgaaacgcgaacgaaaccaactctacactcttcgccctcccgtcgttaaaaataaaacgaacccctctataaataactcaaaaaaacgtaaaaaccgcgaaaaacgaccgc

SEQ ID NO: 1035 - DNA, 1463 bp, Artificial Sequence
  chemically treated genomic DNA (Homo sapiens) CpG-island No: 1035
tgatataaaagatttggttttttaattggggttaagtggcggcggtttgtattttaaattcgtttttgtcggtgtgttggttttagcgtttttcggtgttttttttcgggttaggtagcgttgaattaaataattttgcgtttagacgcgttttttaaaagcgagttatttttgatcgtttttttcgttttcggttaagagttaggggaaagcggttttgggagcgttatttatttatttcgcgttgaacgttttaagttattatcgtaggttttggtatacgtttcggtttttagatggttcgaggataggtttgggttgcggggggaggggcgatgtgtgttcgagagtttgggaatttgttggcggcggcgaggagagtatttcggaagacgtcgcgagcgtatacgcgtttcggtcggtgtttagagttcggattttgaatttaggttcgcgtttagtttcggttttacgtttgtatttcgttttcggcgagtttttatattatcgtcgcgtgggcggttaagggttaatttttgtttcgcgttttgagattcggggcgtagcgggtcgggtagttcggggcgcgcgtttttcgcgagtttgggggcggcggggtcggcggtcggaaggggcgaggcgcggcggcggcgcggcgggttcgaggcgtttttttaggcgggggcgggggtaggggcgggggcgggcgtcggaggggtttgggcggtttgaaaagcgttcgagtatcgtttttttatcgcgcggtcgtcgcgttatttatacgttttttggttattcggcgcggcgcggcgcggcgcgggggcggggggcgtcgttttaatggggatttcgcggttcggcgtcggggtcgggggcgcggttcggtcgcgggagtcgttcgttgttacgcggtggcggtcggttcggcggttcgggttcggcggtcgtattatgcgggtaatgcggtgtgatatcgcgcgaataaaggcggattgagcggtttagcgggtttcgtcggacggggaaggtatagcggggttgttagcgtcgtttttaggttaattttcgtttcgttttcgtcgttttcgcgttttcggggttgggaatttagcgcggttcggggttcgggcgtcgttgtcgtcgcgagaggtcgtaggtcggtcggaaacgaggggcgttcgttttgtgaattcgttttcggtttttttttttcgaggcgtttttagggttggggcgtttaggattggggcgagtgagcggcgcggttgggatttcgaggtcgggagtataattggacgcgggacgtcgggtttttttgtcgtcgttttcggtcggttttggtagcgtaggcgcggggcgcgggcgggattagttttgtatttttcgttttttcgtcgttggaagtgggacgggtttttttgtaggtggtttaggagggcgtgggggtcgcggagagcggtcgt

SEQ ID NO: 1036 - DNA, 1463 bp, Artificial Sequence
  chemically treated genomic DNA (Homo sapiens) CpG-island No: 1036
acgaccgctctccgcgacccccacgccctcctaaaccacctacaaaaaaacccgtcccacttccaacgacgaaaaaacgaaaaatacaaaactaatcccgcccgcgccccgcgcctacgctaccaaaaccgaccgaaaacgacgacaaaaaaacccgacgtcccgcgtccaattatactcccgacctcgaaatcccaaccgcgccgctcactcgccccaatcctaaacgccccaaccctaaaaacgcctcgaaaaaaaaaaaccgaaaacgaattcacaaaacgaacgcccctcgtttccgaccgacctacgacctctcgcgacgacaacgacgcccgaaccccgaaccgcgctaaattcccaaccccgaaaacgcgaaaacgacgaaaacgaaacgaaaattaacctaaaaacgacgctaacaaccccgctataccttccccgtccgacgaaacccgctaaaccgctcaatccgcctttattcgcgcgatatcacaccgcattacccgcataatacgaccgccgaacccgaaccgccgaaccgaccgccaccgcgtaacaacgaacgactcccgcgaccgaaccgcgcccccgaccccgacgccgaaccgcgaaatccccattaaaacgacgccccccgcccccgcgccgcgccgcgccgcgccgaataaccaaaaaacgtataaataacgcgacgaccgcgcgataaaaaaacgatactcgaacgcttttcaaaccgcccaaacccctccgacgcccgcccccgcccctacccccgcccccgcctaaaaaaacgcctcgaacccgccgcgccgccgccgcgcctcgccccttccgaccgccgaccccgccgcccccaaactcgcgaaaaacgcgcgccccgaactacccgacccgctacgccccgaatctcaaaacgcgaaacaaaaattaacccttaaccgcccacgcgacgataatataaaaactcgccgaaaacgaaatacaaacgtaaaaccgaaactaaacgcgaacctaaattcaaaatccgaactctaaacaccgaccgaaacgcgtatacgctcgcgacgtcttccgaaatactctcctcgccgccgccaacaaattcccaaactctcgaacacacatcgcccctccccccgcaacccaaacctatcctcgaaccatctaaaaaccgaaacgtataccaaaacctacgataataacttaaaacgttcaacgcgaaataaataaataacgctcccaaaaccgctttcccctaactcttaaccgaaaacgaaaaaaacgatcaaaaataactcgcttttaaaaaacgcgtctaaacgcaaaattatttaattcaacgctacctaacccgaaaaaaaacaccgaaaaacgctaaaaccaacacaccgacaaaaacgaatttaaaatacaaaccgccgccacttaaccccaattaaaaaaccaaatcttttatatca

SEQ ID NO: 1037 - DNA, 1204 bp, Artificial Sequence
  chemically treated genomic DNA (Homo sapiens) CpG-island No: 1037
tcgagattcggacggtattttggcgtggcgagagtaggtggagatgcgtacggaggttgtatgtttattttcgggtttcgggcgttacggttgttcgtatttgttttagtaagcgttagttaggaattgtcgcgttattgatttttttttcgtttttgggttttaattttcgggtttttcgggttagggaggcggtggggtggggtcgaggtcgtttcgagttattcgcggcggttttatatttgtatcggatttgttttttcgtttttaattttttttaatttcgaaagtattttagtagagcgttttcgtagttcgtttcgagttcggtttatacgtagacgttgattggggaagcgaggggtcgtcggtgtgtgaggtagggtaagagattaggggatttgtacggaggagcgttttaggggaggttgttgtttcgggagttagggcgcgttcggattatatcgtacggcgtagaagtttagcgcgtacgcgcgtcgtttgtcgtttcgcgcgttttttcgtttcgcgtcgcgtttttttatttcgggagagggcggttaggcgtagggagcgtgcgcgcggttcgtttcgggcgcgggcggagggaggaggaggcggcgcgcgcggcgtttagttcgtagaagtcggtggtcgcgtaggaggacggagttttaatcgtaattcgcgtcgcgtcgcgtcgcgtcggtaggggattcgtaggttcgggggtgggggttgtggggaaggtgttggggtggggcgggagggcgggatttcgcgtttcgggtttttgggcgtagggggatttagaggttcgcgcgatttcgtttttggaaattttgtgtcggcgtttttatttgttttttggcggtttttgatttttcggggcggttcgcggaggagaggttcgagatttttcgtagcgtattttcgtcggttttgagcgtgcgttttttgtcgttttttcgtcgcgtcgcgtcgttttcgcgattttgtttttgtgtttcggggttttagtagtttcggtcgcgtttttttcgtcgtttttcgatttcgttgaggtcgtttattttcgttggtatttattcgttttggagcgcgtcgtcgttttttgtattttttcgaggtttttggtgtatggatagaagtaatttgatttttagcgatgttaagtgtttaatttgagtttttttttgcggtg

SEQ ID NO: 1038 - DNA, 1204 bp, Artificial Sequence
  chemically treated genomic DNA (Homo sapiens) CpG-island No: 1038
caccgcaaaaaaaaactcaaattaaacacttaacatcgctaaaaatcaaattacttctatccatacaccaaaaacctcgaaaaaatacaaaaaacgacgacgcgctccaaaacgaataaataccaacgaaaataaacgacctcaacgaaatcgaaaaacgacgaaaaaaacgcgaccgaaactactaaaaccccgaaacacaaaaacaaaatcgcgaaaacgacgcgacgcgacgaaaaaacgacaaaaaacgcacgctcaaaaccgacgaaaatacgctacgaaaaatctcgaacctctcctccgcgaaccgccccgaaaaatcaaaaaccgccaaaaaacaaataaaaacgccgacacaaaatttccaaaaacgaaatcgcgcgaacctctaaatccccctacgcccaaaaacccgaaacgcgaaatcccgccctcccgccccaccccaacaccttccccacaacccccacccccgaacctacgaatcccctaccgacgcgacgcgacgcgacgcgaattacgattaaaactccgtcctcctacgcgaccaccgacttctacgaactaaacgccgcgcgcgccgcctcctcctccctccgcccgcgcccgaaacgaaccgcgcgcacgctccctacgcctaaccgccctctcccgaaataaaaaaacgcgacgcgaaacgaaaaaacgcgcgaaacgacaaacgacgcgcgtacgcgctaaacttctacgccgtacgatataatccgaacgcgccctaactcccgaaacaacaacctcccctaaaacgctcctccgtacaaatcccctaatctcttaccctacctcacacaccgacgacccctcgcttccccaatcaacgtctacgtataaaccgaactcgaaacgaactacgaaaacgctctactaaaatactttcgaaattaaaaaaaattaaaaacgaaaaaacaaatccgatacaaatataaaaccgccgcgaataactcgaaacgacctcgaccccaccccaccgcctccctaacccgaaaaacccgaaaattaaaacccaaaaacgaaaaaaaaatcaataacgcgacaattcctaactaacgcttactaaaacaaatacgaacaaccgtaacgcccgaaacccgaaaataaacatacaacctccgtacgcatctccacctactctcgccacgccaaaataccgtccgaatctcga

SEQ ID NO: 1039 - DNA, 1204 bp, Artificial Sequence
  chemically treated genomic DNA (Homo sapiens) CpG-island No: 1039
tatcgtagagaaagatttaagttggatatttggtatcgttgaaagttaagttgtttttatttatgtattagaaatttcggggagatgtaaaaagcggcggcgcgttttagagcgggtggatgttagcgagagtaggcggttttagcggggtcggaaggcgacggaggaggcgcggtcgaggttgttggagtttcggggtatagggatagggtcgcgggggcggcgcggcgcggcgggggagcggtagggggcgtacgtttagggtcggcgagggtgcgttgcggaaggtttcgggtttttttttcgcgggtcgtttcgaagagttaaggatcgttagggagtaggtgggggcgtcggtataaagtttttagaggcggggtcgcgcgggtttttgggtttttttgcgtttagggattcgaagcgcgaagtttcgttttttcgttttattttaatattttttttataatttttattttcgggtttgcgggttttttatcggcgcggcgcggcgcggcgcgggttgcggttagggtttcgtttttttgcgcggttatcggtttttgcgggttgggcgtcgcgcgcgtcgttttttttttttttcgttcgcgttcggggcgggtcgcgcgtacgttttttgcgtttggtcgttttttttcgaggtggggggacgcgacgcggggcggggggacgcgcggggcggtaggcggcgcgcgtgcgcgttgggtttttgcgtcgtgcggtgtggttcgggcgcgttttagttttcgaggtagtagttttttttagagcgttttttcgtgtaggttttttggttttttattttgttttatatatcggcgatttttcgtttttttagttagcgtttgcgtatgagtcgggttcgaggcgggttgcgggggcgttttgttggggtgttttcgggattggagaggattaaaggcgagaaagtaaattcgatataggtgtgaagtcgtcgcgggtggttcgggacggtttcgattttattttatcgtttttttagttcggagagttcgggggttgggatttaagagcgaagggaaaattagtagcgcggtagtttttggttgacgtttgttggaataggtacgggtagtcgtggcgttcgagattcggaggtgaatatgtaattttcgtgcgtatttttatttgttttcgttacgttaaggtgtcgttcgagtttcgg

SEQ ID NO: 1040 - DNA, 1204 bp, Artificial Sequence
  chemically treated genomic DNA (Homo sapiens) CpG-island No: 1040
ccgaaactcgaacgacaccttaacgtaacgaaaacaaataaaaatacgcacgaaaattacatattcacctccgaatctcgaacgccacgactacccgtacctattccaacaaacgtcaaccaaaaactaccgcgctactaattttcccttcgctcttaaatcccaacccccgaactctccgaactaaaaaaacgataaaataaaatcgaaaccgtcccgaaccacccgcgacgacttcacacctatatcgaatttactttctcgcctttaatcctctccaatcccgaaaacaccccaacaaaacgcccccgcaacccgcctcgaacccgactcatacgcaaacgctaactaaaaaaacgaaaaatcgccgatatataaaacaaaataaaaaaccaaaaaacctacacgaaaaaacgctctaaaaaaaactactacctcgaaaactaaaacgcgcccgaaccacaccgcacgacgcaaaaacccaacgcgcacgcgcgccgcctaccgccccgcgcgtccccccgccccgcgtcgcgtccccccacctcgaaaaaaaacgaccaaacgcaaaaaacgtacgcgcgacccgccccgaacgcgaacgaaaaaaaaaaaaaacgacgcgcgcgacgcccaacccgcaaaaaccgataaccgcgcaaaaaaacgaaaccctaaccgcaacccgcgccgcgccgcgccgcgccgataaaaaacccgcaaacccgaaaataaaaattataaaaaaaatattaaaataaaacgaaaaaacgaaacttcgcgcttcgaatccctaaacgcaaaaaaacccaaaaacccgcgcgaccccgcctctaaaaactttataccgacgcccccacctactccctaacgatccttaactcttcgaaacgacccgcgaaaaaaaaacccgaaaccttccgcaacgcaccctcgccgaccctaaacgtacgccccctaccgctcccccgccgcgccgcgccgcccccgcgaccctatccctataccccgaaactccaacaacctcgaccgcgcctcctccgtcgccttccgaccccgctaaaaccgcctactctcgctaacatccacccgctctaaaacgcgccgccgctttttacatctccccgaaatttctaatacataaataaaaacaacttaactttcaacgataccaaatatccaacttaaatctttctctacgata

SEQ ID NO: 1041 - DNA, 954 bp, Artificial Sequence
  chemically treated genomic DNA (Homo sapiens) CpG-island No: 1041
cgtaggtagagttcgaagttagcgggtcggtcgcgcgtttttttaagttgtttcggcgtttcgggaattagtgcggggcgcgtcgagtaggcggtgcggggcgagagtttggtgcgtagttttttgtttggagttggttcggtaaagtttcgtattagttgcgcgatgttaggattaggtatttttaatcgggcggagcgagaggggcgcgggggtaaggacgagaaatgcgtattcgttcgggttagagtagaataaaagttcgtttcgcggagatttatttacgtcgtatttttcgtgtttcgtaggtatttatatggttaaaggggtttcggggtttttaggttttgtaattttcgcgtttttttttcggtttataataatgtatagttttcgagtagcgttgtagtgtcggagtttagcggtttcgcgcgggttgcgggcgttgggtaggatttgcgttggaggttttcgagtttagcgttgatattgcgtcgttcgtagttttttcggcggcggttgtttatagtttttcgacgcgttttcgggtattcggcggcgtagttattgttttgatttattgaattaagcgaatacgtcggggtatttttcggcgtattttcgttcgttagcgtttagtttagttttttcgttttagggtttcgtagtacgttgggaattgtagtttttggtttttttatttcggaagtgggcgcggtaaatgtggttcggggcggggatttagttttattgattgcgttttattggtttagagcgcggcgtaggtgtggagaaaatattacgtcgacggggagttcgtttttagtagcgtttttattggtgttatttcgttttcgattcgttttgcggttttttttttttttttttgtcgggtaatggttgtttttaagatttagggggttgtcgttcgaatgtaggaagatcgtgatggga

SEQ ID NO: 1042 - DNA, 954 bp, Artificial Sequence
  chemically treated genomic DNA (Homo sapiens) CpG-island No: 1042
tcccatcacgatcttcctacattcgaacgacaaccccctaaatcttaaaaacaaccattacccgacaaaaaaaaaaaaaaaaaaccgcaaaacgaatcgaaaacgaaataacaccaataaaaacgctactaaaaacgaactccccgtcgacgtaatattttctccacacctacgccgcgctctaaaccaataaaacgcaatcaataaaactaaatccccgccccgaaccacatttaccgcgcccacttccgaaataaaaaaaccaaaaactacaattcccaacgtactacgaaaccctaaaacgaaaaaactaaactaaacgctaacgaacgaaaatacgccgaaaaataccccgacgtattcgcttaattcaataaatcaaaacaataactacgccgccgaatacccgaaaacgcgtcgaaaaactataaacaaccgccgccgaaaaaactacgaacgacgcaatatcaacgctaaactcgaaaacctccaacgcaaatcctacccaacgcccgcaacccgcgcgaaaccgctaaactccgacactacaacgctactcgaaaactatacattattataaaccgaaaaaaaaacgcgaaaattacaaaacctaaaaaccccgaaacccctttaaccatataaatacctacgaaacacgaaaaatacgacgtaaataaatctccgcgaaacgaacttttattctactctaacccgaacgaatacgcatttctcgtccttacccccgcgcccctctcgctccgcccgattaaaaatacctaatcctaacatcgcgcaactaatacgaaactttaccgaaccaactccaaacaaaaaactacgcaccaaactctcgccccgcaccgcctactcgacgcgccccgcactaattcccgaaacgccgaaacaacttaaaaaaacgcgcgaccgacccgctaacttcgaactctacctacg

SEQ ID NO: 1043 - DNA, 954 bp, Artificial Sequence
  chemically treated genomic DNA (Homo sapiens) CpG-island No: 1043
ttttattacggtttttttgtattcgggcgatagttttttgggttttggaagtagttattattcggtagaaaagaaaagggagggtcgtagggcgggtcggaggcggggtggtattagtagaaacgttattggaggcgaatttttcgtcgacgtaatgttttttttatatttacgtcgcgttttggattaataggacgtaattagtaaaattgaattttcgtttcgaattatatttgtcgcgtttattttcgggatggggaggttaagaattataatttttagcgtgttgcggggttttgggacgggagggttggattaggcgttggcgggcgggggtgcgtcggagagtgtttcggcgtgttcgtttagtttagtgaattagaataatgattgcgtcgtcgggtattcgggagcgcgtcggaggattgtgagtagtcgtcgtcgggagagttgcgggcggcgtagtgttaacgttgggttcgggagtttttagcgtagattttgtttagcgttcgtagttcgcgcgaagtcgttgggtttcggtattgtagcgttgttcggggattgtgtattgttgtgagtcggagaaggggcgcggggattataaagtttgaagatttcggagtttttttagttatgtggatatttacggagtacgagaaatacggcgtgggtgagttttcgcggggcgaatttttattttgttttggttcgagcgagtgcgtatttttcgtttttgttttcgcgtttttttcgtttcgttcggttgaaaatgtttaattttggtatcgcgtagttggtacggggttttgtcgagttagttttaggtagagggttgcgtattaggttttcgtttcgtatcgtttgttcggcgcgtttcgtattggttttcgaagcgtcgggatagtttgggggagcgcgcggtcggttcgttagtttcgggttttgtttgcg

SEQ ID NO: 1044 - DNA, 954 bp, Artificial Sequence
  chemically treated genomic DNA (Homo sapiens) CpG-island No: 1044
cgcaaacaaaacccgaaactaacgaaccgaccgcgcgctcccccaaactatcccgacgcttcgaaaaccaatacgaaacgcgccgaacaaacgatacgaaacgaaaacctaatacgcaaccctctacctaaaactaactcgacaaaaccccgtaccaactacgcgataccaaaattaaacattttcaaccgaacgaaacgaaaaaaacgcgaaaacaaaaacgaaaaatacgcactcgctcgaaccaaaacaaaataaaaattcgccccgcgaaaactcacccacgccgtatttctcgtactccgtaaatatccacataactaaaaaaactccgaaatcttcaaactttataatccccgcgccccttctccgactcacaacaatacacaatccccgaacaacgctacaataccgaaacccaacgacttcgcgcgaactacgaacgctaaacaaaatctacgctaaaaactcccgaacccaacgttaacactacgccgcccgcaactctcccgacgacgactactcacaatcctccgacgcgctcccgaatacccgacgacgcaatcattattctaattcactaaactaaacgaacacgccgaaacactctccgacgcacccccgcccgccaacgcctaatccaaccctcccgtcccaaaaccccgcaacacgctaaaaattataattcttaacctccccatcccgaaaataaacgcgacaaatataattcgaaacgaaaattcaattttactaattacgtcctattaatccaaaacgcgacgtaaatataaaaaaaacattacgtcgacgaaaaattcgcctccaataacgtttctactaataccaccccgcctccgacccgccctacgaccctcccttttcttttctaccgaataataactacttccaaaacccaaaaaactatcgcccgaatacaaaaaaaccgtaataaaa

SEQ ID NO: 1045 - DNA, 674 bp, Artificial Sequence
  chemically treated genomic DNA (Homo sapiens) CpG-island No: 1045
aggcgggcgcgtgttcggtgtttttgaggtagtcgcgggttcggtgttttagaggcggacgtatgttcggtgtttttgaggcgggcgcgtgttcggtggttttaaggcgggcgcgtgttcggtgtttttgaggtagtcgcgggttcggtgttttagaggcggacgcgtgttcggtgttttagaggcggacgtatgttcggtggttttaaggcgggcgcgtgttcggtgtttttgaggtagtcgcgggtttagtgttttagaggcggacgcgtgttcggtgtttttgaggcgggcgtatgttcggtggttttaaggcgggcgcgtgttcggtgtttttgaggtagtcgcgggttcggtgttttagaggcggacgcgtgttcggtgtttttgaggcgggcgcgtgttcggtgttttagaggtagtcgcgggttcggtgttttagaggcggacgcgtgttcggtgttttagaggcggacgtatgttcggtggttttaaggcgggtacgtgttcggtgtttttgaggtagtcgcgggtttagtgttttagaggcggacgcgtgttcggtgtttttgaggcgggcgtatgttcggtggttttaaggcgggcgcgtgttcggtgtttttgaggtagtcgcgggtttagtgttttagaggcggacgcgtgttcggtgtttt

SEQ ID NO: 1046 - DNA, 674 bp, Artificial Sequence
  chemically treated genomic DNA (Homo sapiens) CpG-island No: 1046
aaaacaccgaacacgcgtccgcctctaaaacactaaacccgcgactacctcaaaaacaccgaacacgcgcccgccttaaaaccaccgaacatacgcccgcctcaaaaacaccgaacacgcgtccgcctctaaaacactaaacccgcgactacctcaaaaacaccgaacacgtacccgccttaaaaccaccgaacatacgtccgcctctaaaacaccgaacacgcgtccgcctctaaaacaccgaacccgcgactacctctaaaacaccgaacacgcgcccgcctcaaaaacaccgaacacgcgtccgcctctaaaacaccgaacccgcgactacctcaaaaacaccgaacacgcgcccgccttaaaaccaccgaacatacgcccgcctcaaaaacaccgaacacgcgtccgcctctaaaacactaaacccgcgactacctcaaaaacaccgaacacgcgcccgccttaaaaccaccgaacatacgtccgcctctaaaacaccgaacacgcgtccgcctctaaaacaccgaacccgcgactacctcaaaaacaccgaacacgcgcccgccttaaaaccaccgaacacgcgcccgcctcaaaaacaccgaacatacgtccgcctctaaaacaccgaacccgcgactacctcaaaaacaccgaacacgcgcccgcct

SEQ ID NO: 1047 - DNA, 674 bp, Artificial Sequence
  chemically treated genomic DNA (Homo sapiens) CpG-island No: 1047
gaaatatcgggtacgcgttcgtttttgaaatattgggttcgcggttgttttagaaatatcgggtacgcgttcgttttagagttatcgggtatgcgttcgttttagaaatatcgggtacgcgttcgtttttgaaatattgggttcgcggttgttttagaaatatcgggtacgtgttcgttttagagttatcgggtatgcgttcgtttttgaaatatcgggtacgcgttcgtttttgaaatatcgggttcgcggttgtttttgaaatatcgggtacgcgttcgttttagaaatatcgggtacgcgttcgtttttgaaatatcgggttcgcggttgttttagaaatatcgggtacgcgttcgttttagagttatcgggtatgcgttcgttttagaaatatcgggtacgcgttcgtttttgaaatattgggttcgcggttgttttagaaatatcgggtacgcgttcgttttagagttatcgggtatgcgttcgtttttgaaatatcgggtacgcgttcgtttttgaaatatcgggttcgcggttgttttagaaatatcgggtacgcgttcgttttagagttatcgggtacgcgttcgttttagaaatatcgggtatgcgttcgtttttgaaatatcgggttcgcggttgttttagaaatatcgggtacgcgttcgttt

SEQ ID NO: 1048 - DNA, 674 bp, Artificial Sequence
  chemically treated genomic DNA (Homo sapiens) CpG-island No: 1048
aaacgaacgcgtacccgatatttctaaaacaaccgcgaacccgatatttcaaaaacgaacgcatacccgatatttctaaaacgaacgcgtacccgataactctaaaacgaacgcgtacccgatatttctaaaacaaccgcgaacccgatatttcaaaaacgaacgcgtacccgatatttcaaaaacgaacgcatacccgataactctaaaacgaacgcgtacccgatatttctaaaacaaccgcgaacccaatatttcaaaaacgaacgcgtacccgatatttctaaaacgaacgcatacccgataactctaaaacgaacgcgtacccgatatttctaaaacaaccgcgaacccgatatttcaaaaacgaacgcgtacccgatatttctaaaacgaacgcgtacccgatatttcaaaaacaaccgcgaacccgatatttcaaaaacgaacgcgtacccgatatttcaaaaacgaacgcatacccgataactctaaaacgaacacgtacccgatatttctaaaacaaccgcgaacccaatatttcaaaaacgaacgcgtacccgatatttctaaaacgaacgcatacccgataactctaaaacgaacgcgtacccgatatttctaaaacaaccgcgaacccaatatttcaaaaacgaacgcgtacccgatatttc

SEQ ID NO: 1049 - DNA, 606 bp, Artificial Sequence
  chemically treated genomic DNA (Homo sapiens) CpG-island No: 1049
cgcgtcgcgcgttcgggagtagtttcgcgtgttcggggagcgttagtcgttgttgtttcgcggtgcgcggggttttcgacggtggcggcgggcggcgggcgcggtcgtgttgttggtggagatgttggagcgcgtcgtttttttcggcgttatcgttaatttcgtgttgtattttaatagtattaattttaattggatcggcgagtaggcgacgcgcgtcgcgttggtatttttgggcgttttttatttgttggcgttcgtgggcggttggttggtcgacgtgtatttgggtcgttatcgcgcggtcgcgtttagtttgttgttttatttggtcgtttcgggtttgttgttcgttatcgtttttttcgacggtcgtagttttttttgcggagagatgttcgcgtcgtcgttgggatttgtttgtttttcggtcggttgttcgcgtttttcgtttagtttttattgcgcgttcgttttttacgcgggtttgttgttattcggtttggtcgttagtttcgttcggagtaattttatttttttcggtgtcgattaggtgagtggtaggaggtttgtttcggtatatttcggcgggtgtggagggaagga

SEQ ID NO: 1050 - DNA, 606 bp, Artificial Sequence
  chemically treated genomic DNA (Homo sapiens) CpG-island No: 1050
tccttccctccacacccgccgaaatataccgaaacaaacctcctaccactcacctaatcgacaccgaaaaaaataaaattactccgaacgaaactaacgaccaaaccgaataacaacaaacccgcgtaaaaaacgaacgcgcaataaaaactaaacgaaaaacgcgaacaaccgaccgaaaaacaaacaaatcccaacgacgacgcgaacatctctccgcaaaaaaaactacgaccgtcgaaaaaaacgataacgaacaacaaacccgaaacgaccaaataaaacaacaaactaaacgcgaccgcgcgataacgacccaaatacacgtcgaccaaccaaccgcccacgaacgccaacaaataaaaaacgcccaaaaataccaacgcgacgcgcgtcgcctactcgccgatccaattaaaattaatactattaaaatacaacacgaaattaacgataacgccgaaaaaaacgacgcgctccaacatctccaccaacaacacgaccgcgcccgccgcccgccgccaccgtcgaaaaccccgcgcaccgcgaaacaacaacgactaacgctccccgaacacgcgaaactactcccgaacgcgcgacgcg

SEQ ID NO: 1051 - DNA, 606 bp, Artificial Sequence
  chemically treated genomic DNA (Homo sapiens) CpG-island No: 1051
tttttttttttatattcgtcggagtatgtcggggtaggttttttgttatttatttggtcggtatcgaaggaggtgaggttgtttcggacggagttggcggttaggtcgagtagtagtaggttcgcgtagaggacgggcgcgtagtaggggttgggcgaggagcgcgggtagtcggtcgaggggtaggtaggttttagcggcgacgcgggtattttttcgtagaaggagttgcggtcgtcggggaaggcggtggcgggtagtaggttcgaggcggttaggtagagtagtaggttgagcgcgatcgcgcggtagcggtttaggtatacgtcggttagttagtcgtttacgggcgttagtaggtaggaggcgtttaggaatattagcgcggcgcgcgtcgtttgttcgtcggtttagttgaagttggtgttgttgaggtatagtacgaggttggcggtgacgtcgaagaaggcggcgcgttttagtatttttattagtagtacggtcgcgttcgtcgttcgtcgttatcgtcgagggtttcgcgtatcgcgaggtagtagcggttggcgtttttcgggtacgcggggttgttttcgggcgcgcggcgcg

SEQ ID NO: 1052 - DNA, 606 bp, Artificial Sequence
  chemically treated genomic DNA (Homo sapiens) CpG-island No: 1052
cgcgccgcgcgcccgaaaacaaccccgcgtacccgaaaaacgccaaccgctactacctcgcgatacgcgaaaccctcgacgataacgacgaacgacgaacgcgaccgtactactaataaaaatactaaaacgcgccgccttcttcgacgtcaccgccaacctcgtactatacctcaacaacaccaacttcaactaaaccgacgaacaaacgacgcgcgccgcgctaatattcctaaacgcctcctacctactaacgcccgtaaacgactaactaaccgacgtatacctaaaccgctaccgcgcgatcgcgctcaacctactactctacctaaccgcctcgaacctactacccgccaccgccttccccgacgaccgcaactccttctacgaaaaaatacccgcgtcgccgctaaaacctacctacccctcgaccgactacccgcgctcctcgcccaacccctactacgcgcccgtcctctacgcgaacctactactactcgacctaaccgccaactccgtccgaaacaacctcacctccttcgataccgaccaaataaataacaaaaaacctaccccgacatactccgacgaatataaaaaaaaaaa

SEQ ID NO: 1053 - DNA, 754 bp, Artificial Sequence
  chemically treated genomic DNA (Homo sapiens) CpG-island No: 1053
tttttcggagatagggtgttagtggtatgtgttatttcgaacggcgcgttttttgttaagcgttgaggggtagcgtcgttggtaaggaacgtggcgcgatttatgagtttggggtttttcgaagggttcgagtcgaggttgtaggaggttgggtcgtgggtcggggttcgggggttcgggtttggcgttggtttggtttttacgttcgggagtcgttttatttttgtcggatttcggaatttcgtcgtaattttttttttttcggaaacgtgcgtttttcgggttgtttggaaacgacgttttcggttgtatagtaacggggattcgggttttcggtttgtttcgtacgttgggcgcgcggatttttttttattcggattttttaggtttcgcggtttcgtttggtgtcgtttgtagcggttgttgtttttttttttcgtgcgttgttttatatttcgatttcggttcgtttttattttttttaggttattgttattttttacgtgcgatttcgttgaaacgcgttattaaattcgcgttttaattcggggcgttggtttatttttttcgtatgcgtaaggcgggatgagttcggagattagtcggttttttttataatcgaagtttgtgtcgggagcgtatgcgtttcgttttatttattgcgtttttttttttttttataagtatttttatcgagagaagaatgggatcggaagttttagtagggaacggaagtttttggttggaaagggga

SEQ ID NO: 1054 - DNA, 754 bp, Artificial Sequence
  chemically treated genomic DNA (Homo sapiens) CpG-island No: 1054
tcccctttccaaccaaaaacttccgttccctactaaaacttccgatcccattcttctctcgataaaaatacttataaaaaaaaaaaaaaacgcaataaataaaacgaaacgcatacgctcccgacacaaacttcgattataaaaaaaaccgactaatctccgaactcatcccgccttacgcatacgaaaaaaataaaccaacgccccgaattaaaacgcgaatttaataacgcgtttcaacgaaatcgcacgtaaaaaataacaataacctaaaaaaaataaaaacgaaccgaaatcgaaatataaaacaacgcacgaaaaaaaaaaacaacaaccgctacaaacgacaccaaacgaaaccgcgaaacctaaaaaatccgaataaaaaaaaatccgcgcgcccaacgtacgaaacaaaccgaaaacccgaatccccgttactatacaaccgaaaacgtcgtttccaaacaacccgaaaaacgcacgtttccgaaaaaaaaaaaattacgacgaaattccgaaatccgacaaaaataaaacgactcccgaacgtaaaaaccaaaccaacgccaaacccgaacccccgaaccccgacccacgacccaacctcctacaacctcgactcgaacccttcgaaaaaccccaaactcataaatcgcgccacgttccttaccaacgacgctacccctcaacgcttaacaaaaaacgcgccgttcgaaataacacataccactaacaccctatctccgaaaaa

SEQ ID NO: 1055 - DNA, 754 bp, Artificial Sequence
  chemically treated genomic DNA (Homo sapiens) CpG-island No: 1055
ttttttttttagttagagattttcgttttttgttggaattttcgattttatttttttttcggtgggaatgtttgtggggggaaaaagaaacgtaatagataaagcggggcgtatgcgttttcggtataggtttcgattgtgaggaaggtcggttagttttcgagtttatttcgttttgcgtatgcggagaaggtaaattagcgtttcgagttgaggcgcgggtttggtggcgcgttttagcgaagtcgtacgtgaaggatagtagtggtttgagaaaggtgagagcgggtcgaggtcggaatgtggggtagcgtacgggaaggggagatagtagtcgttgtaggcggtattaggcggagtcgcgaggtttggagagttcgagtggggaggggttcgcgcgtttagcgtgcgaaataaatcggggattcggattttcgttgttatgtaatcgggggcgtcgtttttaggtaattcgggaggcgtacgttttcggggagaagagggttgcggcgaggtttcgaggttcggtagaggtggagcggttttcgggcgtggggattaggttagcgttaagttcgagttttcgaatttcgatttacggtttagttttttgtagtttcggttcgagtttttcggggggttttaaatttatgggtcgcgttacgttttttgttagcgacgttattttttagcgtttggtaggggacgcgtcgttcgaaatagtatatgttattgatattttgttttcgggagg

SEQ ID NO: 1056 - DNA, 754 bp, Artificial Sequence
  chemically treated genomic DNA (Homo sapiens) CpG-island No: 1056
cctcccgaaaacaaaatatcaataacatatactatttcgaacgacgcgtcccctaccaaacgctaaaaaataacgtcgctaacaaaaaacgtaacgcgacccataaatttaaaaccccccgaaaaactcgaaccgaaactacaaaaaactaaaccgtaaatcgaaattcgaaaactcgaacttaacgctaacctaatccccacgcccgaaaaccgctccacctctaccgaacctcgaaacctcgccgcaaccctcttctccccgaaaacgtacgcctcccgaattacctaaaaacgacgcccccgattacataacaacgaaaatccgaatccccgatttatttcgcacgctaaacgcgcgaacccctccccactcgaactctccaaacctcgcgactccgcctaataccgcctacaacgactactatctccccttcccgtacgctaccccacattccgacctcgacccgctctcacctttctcaaaccactactatccttcacgtacgacttcgctaaaacgcgccaccaaacccgcgcctcaactcgaaacgctaatttaccttctccgcatacgcaaaacgaaataaactcgaaaactaaccgaccttcctcacaatcgaaacctataccgaaaacgcatacgccccgctttatctattacgtttctttttccccccacaaacattcccaccgaaaaaaaaataaaatcgaaaattccaacaaaaaacgaaaatctctaactaaaaaaaaaa

SEQ ID NO: 1057 - DNA, 588 bp, Artificial Sequence
  chemically treated genomic DNA (Homo sapiens) CpG-island No: 1057
tcggcgttttacggaacgagtcgagttaattcggaaataatcgagtgttcgtggcgggtttttttttgttcggttgtattttgggaaagggtaattttcgttaggtgttgaaggttgtggcgcgcggttgtttttatttttacgtgaagcgttacgttagtatcgttcggttggcggtttttagttcgtcgcggagtagtttcggtagtagcgggggatcggaagtggttcgcggaggtttagaagttagtttcggagttcggcgtgtggcgtttcggagtacggtgacggcgttatgtttttaatttgttttagtgagtgttggttgcggttaagcgcgggttttaggaggttagagagcggcgcgggagcgtgtgcggttcgttgcggcgttcgggtcggggtggaggcgggaatggggcgtttcggaggtcgagcggcggtttgttagtatcggagtttttttcgtcggagcggggtgtatttgcgtagtgtttcgtagtttatatagtgtttgaggtttattgtcgtagatattattgaggtcggtcgttttattttatagagtggaaataggtttggatagag

SEQ ID NO: 1058 - DNA, 588 bp, Artificial Sequence
  chemically treated genomic DNA (Homo sapiens) CpG-island No: 1058
ctctatccaaacctatttccactctataaaataaaacgaccgacctcaataatatctacgacaataaacctcaaacactatataaactacgaaacactacgcaaatacaccccgctccgacgaaaaaaactccgatactaacaaaccgccgctcgacctccgaaacgccccattcccgcctccaccccgacccgaacgccgcaacgaaccgcacacgctcccgcgccgctctctaacctcctaaaacccgcgcttaaccgcaaccaacactcactaaaacaaattaaaaacataacgccgtcaccgtactccgaaacgccacacgccgaactccgaaactaacttctaaacctccgcgaaccacttccgatcccccgctactaccgaaactactccgcgacgaactaaaaaccgccaaccgaacgatactaacgtaacgcttcacgtaaaaataaaaacaaccgcgcgccacaaccttcaacacctaacgaaaattaccctttcccaaaatacaaccgaacaaaaaaaaacccgccacgaacactcgattatttccgaattaactcgactcgttccgtaaaacgccga

SEQ ID NO: 1059 - DNA, 588 bp, Artificial Sequence
  chemically treated genomic DNA (Homo sapiens) CpG-island No: 1059
ttttgtttagatttgtttttattttgtagaatgaggcgatcggttttagtaatgtttgcgataataaattttaggtattatgtaaattgcggggtattgcgtaaatgtatttcgtttcgacggggggggtttcggtgttgataggtcgtcgttcggttttcggagcgttttattttcgtttttatttcggttcgggcgtcgtagcggatcgtatacgttttcgcgtcgttttttggttttttgagattcgcgtttggtcgtagttaatatttattggagtagattagggatatggcgtcgttatcgtgtttcgaggcgttatacgtcgggtttcgggattagtttttgagttttcgcgagttattttcggtttttcgttgttgtcgggattgtttcgcggcgagttgggagtcgttagtcgagcgatgttagcgtagcgttttacgtgggaatggggatagtcgcgcgttatagtttttagtatttaacggaaattgtttttttttagaatgtagtcgggtaggaaagggttcgttacgaatattcggttattttcggattgattcggttcgtttcgtaaagcgtcgg

SEQ ID NO: 1060 - DNA, 588 bp, Artificial Sequence
  chemically treated genomic DNA (Homo sapiens) CpG-island No: 1060
ccgacgctttacgaaacgaaccgaatcaatccgaaaataaccgaatattcgtaacgaaccctttcctacccgactacattctaaaaaaaaacaatttccgttaaatactaaaaactataacgcgcgactatccccattcccacgtaaaacgctacgctaacatcgctcgactaacgactcccaactcgccgcgaaacaatcccgacaacaacgaaaaaccgaaaataactcgcgaaaactcaaaaactaatcccgaaacccgacgtataacgcctcgaaacacgataacgacgccatatccctaatctactccaataaatattaactacgaccaaacgcgaatctcaaaaaaccaaaaaacgacgcgaaaacgtatacgatccgctacgacgcccgaaccgaaataaaaacgaaaataaaacgctccgaaaaccgaacgacgacctatcaacaccgaaaccccccccgtcgaaacgaaatacatttacgcaataccccgcaatttacataatacctaaaatttattatcgcaaacattactaaaaccgatcgcctcattctacaaaataaaaacaaatctaaacaaaa

SEQ ID NO: 1061 - DNA, 890 bp, Artificial Sequence
  chemically treated genomic DNA (Homo sapiens) CpG-island No: 1061
gcggtcggtgtgggcgtagaattatcgtatcgtggtcgcggcgtataaagtttgtttggtgttttgggtattagcggtgtttaatacggtgttttatttcgtgtttcgggatattatttcgcggttggacgggcgtattatgtgttattataatgtgttgtttttgaattcggggtttgatcgcgatgttacgtgtaattcgcgttaggcggttttggtcgttagtaagtttttgttggtttttttggtgtcgttggcgattatcgtttcgagttacgcggtcgtgagtttgcggttgtagtatcgcggtcgtcggcggttaggtcgtttcgtgcgtttggtggcggtcgtcgtggtcgttttcgcgttttgttgggggttttattacgtgtttagtttgttggaggcgcgggcgtacgtaaattcggggttgcggtcgttcgtgtggcgcgggttgtttttcgttattagtttggttttttttaatagcgtggttaattcggtgttttacgtgtttatttgtttcgatatgttgcgtaagttgcggcgttcgttgcgtacggtgttggagagcgtgttggtggacgatagcgagttgggtggcgcgggaagtagtcgtcgtcgtcgtattttttttatcgttcgttcggttttttttttagttttttgtagtcgttcggaggaatcgcggggtttcgcgcgttttttcggttggttgttgggtagttgcgtagcgttttcgtagacgggttttttgaatcgggcgttgagtagtatttcgagttagaattcggtttacgtagggcggtatttatacgcgaaagtattattagggtgtcgcggtttaattcgatattcggatttttgtcgtagtgattaaagttcgaggg

SEQ ID NO: 1062 - DNA, 890 bp, Artificial Sequence
  chemically treated genomic DNA (Homo sapiens) CpG-island No: 1062
ccctcgaactttaatcactacgacaaaaatccgaatatcgaattaaaccgcgacaccctaataatactttcgcgtataaataccgccctacgtaaaccgaattctaactcgaaatactactcaacgcccgattcaaaaaacccgtctacgaaaacgctacgcaactacccaacaaccaaccgaaaaaacgcgcgaaaccccgcgattcctccgaacgactacaaaaaactaaaaaaaaaaccgaacgaacgataaaaaaaatacgacgacgacgactacttcccgcgccacccaactcgctatcgtccaccaacacgctctccaacaccgtacgcaacgaacgccgcaacttacgcaacatatcgaaacaaataaacacgtaaaacaccgaattaaccacgctattaaaaaaaaccaaactaataacgaaaaacaacccgcgccacacgaacgaccgcaaccccgaatttacgtacgcccgcgcctccaacaaactaaacacgtaataaaacccccaacaaaacgcgaaaacgaccacgacgaccgccaccaaacgcacgaaacgacctaaccgccgacgaccgcgatactacaaccgcaaactcacgaccgcgtaactcgaaacgataatcgccaacgacaccaaaaaaaccaacaaaaacttactaacgaccaaaaccgcctaacgcgaattacacgtaacatcgcgatcaaaccccgaattcaaaaacaacacattataataacacataatacgcccgtccaaccgcgaaataatatcccgaaacacgaaataaaacaccgtattaaacaccgctaatacccaaaacaccaaacaaactttatacgccgcgaccacgatacgataattctacgcccacaccgaccgc

SEQ ID NO: 1063 - DNA, 890 bp, Artificial Sequence
  chemically treated genomic DNA (Homo sapiens) CpG-island No: 1063
ttttcggattttgattattgcggtaggagttcggatatcgaattgaatcgcggtattttggtgatattttcgcgtgtgagtgtcgttttacgtgggtcgggttttaattcgaggtgttgtttagcgttcggtttagggggttcgtttgcggggacgttgcgtagttgtttagtagttagtcgaggagacgcgcggggtttcgcggttttttcgggcggttgtagagagttaaaggggaggtcgagcgggcggtggaggaggtgcggcggcggcggttgtttttcgcgttatttagttcgttgtcgtttattagtacgttttttagtatcgtgcgtagcgagcgtcgtagtttgcgtagtatgtcggggtaggtgagtacgtagagtatcgggttggttacgttgttgaagaaggttaggttggtgacgaagggtagttcgcgttatacgagcggtcgtagtttcgggtttgcgtgcgttcgcgtttttagtaggttgaatacgtggtagggtttttagtagagcgcgaaggcggttacgacggtcgttattaggcgtacgaagcggtttggtcgtcggcggtcgcggtgttgtaatcgtaggtttacggtcgcgtggttcgaggcgatgatcgttagcggtattaggaaggttagtaggaatttgttgacggttagggtcgtttggcgcgagttgtacgtggtatcgcggttaggtttcgggtttaggagtagtatattgtagtagtatataatgcgttcgtttagtcgcgagatggtgtttcggaatacgaaatagggtatcgtgttgagtatcgttagtgtttaaagtattaggtagattttgtgcgtcgcggttacggtgcggtggttttgcgtttatatcggtcgt

SEQ ID NO: 1064 - DNA, 890 bp, Artificial Sequence
  chemically treated genomic DNA (Homo sapiens) CpG-island No: 1064
acgaccgatataaacgcaaaaccaccgcaccgtaaccgcgacgcacaaaatctacctaatactttaaacactaacgatactcaacacgataccctatttcgtattccgaaacaccatctcgcgactaaacgaacgcattatatactactacaatatactactcctaaacccgaaacctaaccgcgataccacgtacaactcgcgccaaacgaccctaaccgtcaacaaattcctactaaccttcctaataccgctaacgatcatcgcctcgaaccacgcgaccgtaaacctacgattacaacaccgcgaccgccgacgaccaaaccgcttcgtacgcctaataacgaccgtcgtaaccgccttcgcgctctactaaaaaccctaccacgtattcaacctactaaaaacgcgaacgcacgcaaacccgaaactacgaccgctcgtataacgcgaactacccttcgtcaccaacctaaccttcttcaacaacgtaaccaacccgatactctacgtactcacctaccccgacatactacgcaaactacgacgctcgctacgcacgatactaaaaaacgtactaataaacgacaacgaactaaataacgcgaaaaacaaccgccgccgccgcacctcctccaccgcccgctcgacctcccctttaactctctacaaccgcccgaaaaaaccgcgaaaccccgcgcgtctcctcgactaactactaaacaactacgcaacgtccccgcaaacgaaccccctaaaccgaacgctaaacaacacctcgaattaaaacccgacccacgtaaaacgacactcacacgcgaaaatatcaccaaaataccgcgattcaattcgatatccgaactcctaccgcaataatcaaaatccgaaaa

SEQ ID NO: 1065 - DNA, 1696 bp, Artificial Sequence
  chemically treated genomic DNA (Homo sapiens) CpG-island No: 1065
  unsure (34, 121, 289, 298, 542, 778, 921, 1054, 1090, 1092, 1132)
  unsure (1166, 1170, 1172, 1174, 1201, 1216, 1219, 1228, 1252, 1273)
  unsure (1307, 1323, 1331, 1346, 1406, 1420, 1422, 1444, 1453, 1455)
  unsure (1465, 1475, 1491, 1516, 1584, 1643, 1685, 1688, 1691)
gagacgtagagtatcggtgattgcgggagcgagncgttgcgtagaggcgaggtgagcgagagtgtagatcgagtagtttgcgaggtagtgagacgttgagcgattgtgtgtgtgcgtgagncgtgagggtgaaggacgcgtggtgcgtgtgtgtggtgtgtgtgtggtgtgtgtgcggcgcgtagggagatgtgtggtgtgagagagagagtgggtgtgggatgatgtggtgcgagacgaagagcgtagcggtcgatgagtgagtagagtggtgcgagatgtagagcgnaggtagagncgtgtgcgatgaggcgagaggagcgagtggtgtgtggtgttgtgtgggtaggtggtgtgagagtgggtgtggttggggggaggagagtgagtgggtgcgtagagtgcgagagcgatgtgagagagatgagtagtggacgttgggcggcgagagttgtgtggttgagtggagcgtgtgtgcgtgtgagggtgtgtgcgtgtgagcgtgagcgcgagcgtgcgagcgagcgtggcgcgcgcgtgtnagcgtgagtgagggagcgcgtgagcgagggagcgtggtgaggtagagtgcgtgggagcgtgtgagagtgtgtgcgagcgtgtgcgagcgagcgtgtgtgtgtgtgtgtgtgtgtgtgtgagagagggcgcgagggagggtgtgcgagagagtgggggcgagcgtgagtgagggcgcgagcgagcgcgagtgcgtgtggggtgttggagcgtgggggtgagcgagagagcgtgcgtngagcggtggcgcgcggagtagtgtggagagagcggagtgtggcgtgcgtgtggtgtgtgggagagtgcgtgcgcgtgagagagtgagggcgtggggtcgtgtgaggagaggatgcgtggtagtgtagagtagtgggcgcgtangagtgagatgtgtgtgtcgtgagggtggtgtgtggtgaggagcgagtagggggattgtgtagcgcggtggtgtgtagcgtagcgggcgtgggatgttacgagagcgttggcgtgagggcgcgtggcgagggtnggaatcgtgttgtgcgcgagcggttgtggaagcggntngcggtagagaagatgggcgtgggggcggtgtgaggaatgngtagtgggagtgcgtagttgggggtggcgcgagnggtngntntaagggttgcgagcgtgtatgcgtgtntgaaagcggagggtnagngggtgcgtnaggtagaggcgaagagaaggcgantgagtgcgtaatgggtagganagatatgttgtgcgatggcgcgcgagcgaggatnggtgtggcggagagantgagtgangagcgagcgtgaggngcgagggaggcgagatggtagaattggcgggcggtttgaggatgaagtcgcggtcgatgnggcgttgtgtgtgngngagtggggggcgtgcgagaggngatgtgtgnantgagagggtngattttcganaggggacgatttgtgngtggcgtggtcggcgaaggggaagngtagtgtgtcgtgggagtaggatgcgtgtaggatggtcgttcgttgtttgagggcgagagatgtcgtngggcgaagtgcgtaggagaagaagtgcggtgttgagaaaagtgtaggaggcgtagttgngatcgtcgagagttgaagtataaagagaaaagttcgtggtanagnggnagatg

SEQ ID NO: 1066 - DNA, 1696 bp, Artificial Sequence
  chemically treated genomic DNA (Homo sapiens) CpG-island No: 1066
  unsure (6, 9, 12, 54, 113, 181, 206, 222, 232, 242, 244, 253, 275)
  unsure (277, 291, 351, 366, 374, 390, 424, 445, 469, 478, 481, 496)
  unsure (523, 525, 527, 531, 565, 605, 607, 643, 776, 919, 1155, 1399)
  unsure (1408, 1576, 1663)
catctnccnctntaccacgaacttttctctttatacttcaactctcgacgatcncaactacgcctcctacacttttctcaacaccgcacttcttctcctacgcacttcgcccnacgacatctctcgccctcaaacaacgaacgaccatcctacacgcatcctactcccacgacacactacncttccccttcgccgaccacgccacncacaaatcgtcccctntcgaaaatcnaccctctcantncacacatcncctctcgcacgccccccactcncncacacacaacgccncatcgaccgcgacttcatcctcaaaccgcccgccaattctaccatctcgcctccctcgcncctcacgctcgctcntcactcantctctccgccacaccnatcctcgctcgcgcgccatcgcacaacatatctntcctacccattacgcactcantcgccttctcttcgcctctacctnacgcacccnctnaccctccgctttcanacacgcatacacgctcgcaacccttanancnaccnctcgcgccacccccaactacgcactcccactacncattcctcacaccgcccccacgcccatcttctctaccgcnanccgcttccacaaccgctcgcgcacaacacgattccnaccctcgccacgcgccctcacgccaacgctctcgtaacatcccacgcccgctacgctacacaccaccgcgctacacaatccccctactcgctcctcaccacacaccaccctcacgacacacacatctcactcntacgcgcccactactctacactaccacgcatcctctcctcacacgaccccacgccctcactctctcacgcgcacgcactctcccacacaccacacgcacgccacactccgctctctccacactactccgcgcgccaccgctcnacgcacgctctctcgctcacccccacgctccaacaccccacacgcactcgcgctcgctcgcgccctcactcacgctcgcccccactctctcgcacaccctccctcgcgccctctctcacacacacacacacacacacacacacgctcgctcgcacacgctcgcacacactctcacacgctcccacgcactctacctcaccacgctccctcgctcacgcgctccctcactcacgctnacacgcgcgcgccacgctcgctcgcacgctcgcgctcacgctcacacgcacacaccctcacacgcacacacgctccactcaaccacacaactctcgccgcccaacgtccactactcatctctctcacatcgctctcgcactctacgcacccactcactctcctccccccaaccacacccactctcacaccacctacccacacaacaccacacaccactcgctcctctcgcctcatcgcacacgnctctacctncgctctacatctcgcaccactctactcactcatcgaccgctacgctcttcgtctcgcaccacatcatcccacacccactctctctctcacaccacacatctccctacgcgccgcacacacaccacacacacaccacacacacgcaccacgcgtccttcaccctcacgnctcacgcacacacacaatcgctcaacgtctcactacctcgcaaactactcgatctacactctcgctcacctcgcctctacgcaacgnctcgctcccgcaatcaccgatactctacgtctc

SEQ ID NO: 1067 - DNA, 1696 bp, Artificial Sequence
  chemically treated genomic DNA (Homo sapiens) CpG-island No: 1067
  unsure (6, 9, 12, 54, 113, 181, 206, 222, 232, 242, 244, 253, 275)
  unsure (277, 291, 351, 366, 374, 390, 424, 445, 469, 478, 481, 496)
  unsure (523, 525, 527, 531, 565, 605, 607, 643, 776, 919, 1155, 1399)
  unsure (1408, 1576, 1663)
tatttnttnttntattacggatttttttttttatattttagttttcggcggttntagttgcgttttttatattttttttagtatcgtatttttttttttgcgtatttcgtttnacgatatttttcgtttttaagtaacggacgattattttatacgtattttatttttacgatatattgtntttttttttcgtcggttacgttatntataggtcgttttttntcggaagttngtttttttantntatatattntttttcgtacgttttttatttntntatatatagcgttntatcggtcgcgattttatttttaagtcgttcgttaattttgttatttcgtttttttcgtnttttacgttcgtttnttatttanttttttcgttatattnattttcgttcgcgcgttatcgtatagtatatttnttttgtttattacgtatttantcgtttttttttcgtttttgtttngcgtatttnttngtttttcgtttttanatacgtatgtacgttcgtagtttttgnantnattnttcgcgttatttttagttgcgtatttttattgtntattttttatatcgtttttacgtttattttttttgtcgtnantcgtttttatagtcgttcgcgtatagtacgattttnattttcgttacgcgtttttacgttagcgttttcgtagtattttacgttcgttgcgttgtatattatcgcgttgtataatttttttgttcgttttttattatatattatttttacgatatatatattttatttntgcgcgtttattgttttgtattattacgtattttttttttatacgattttacgtttttatttttttacgcgtacgtatttttttatatattatacgtacgttatatttcgttttttttatattgtttcgcgcgttatcgtttnacgtacgttttttcgtttatttttacgttttagtattttatacgtattcgcgttcgttcgcgtttttatttacgttcgtttttattttttcgtatattttttttcgcgtttttttttatatatatatatatatatatatatacgttcgttcgtatacgttcgtatatatttttatacgtttttacgtattttgttttattacgttttttcgtttacgcgtttttttatttacgttngtacgcgcgcgttacgttcgttcgtacgttcgcgtttacgtttatacgtatatatttttatacgtatatacgttttatttagttatatagttttcgtcgtttagcgtttattgtttattttttttatatcgttttcgtattttgcgtatttatttatttttttttttttagttatatttatttttatattatttgtttatatagtattatatattattcgtttttttcgttttatcgtatacgnttttgtttncgttttgtatttcgtattattttgtttatttatcgatcgttgcgtttttcgtttcgtattatattattttatatttatttttttttttatattatatatttttttgcgcgtcgtatatatattatatatatattatatatacgtattacgcgttttttatttttacgntttacgtatatatataatcgtttagcgttttattgtttcgtaagttgttcgatttgtattttcgtttatttcgtttttgcgtagcgnttcgttttcgtaattatcgatgttttgcgtttt

SEQ ID NO: 1068 - DNA, 1696 bp, Artificial Sequence
  chemically treated genomic DNA (Homo sapiens) CpG-island No: 1068
  unsure (34, 121, 289, 298, 542, 778, 921, 1054, 1090, 1092, 1132)
  unsure (1166, 1170, 1172, 1174, 1201, 1216, 1219, 1228, 1252, 1273)
  unsure (1307, 1323, 1331, 1346, 1406, 1420, 1422, 1444, 1453, 1455)
  unsure (1465, 1475, 1491, 1516, 1584, 1643, 1685, 1688, 1691)
aaaacgcaaaacatcgataattacgaaaacgaancgctacgcaaaaacgaaataaacgaaaatacaaatcgaacaacttacgaaacaataaaacgctaaacgattatatatatacgtaaancgtaaaaataaaaaacgcgtaatacgtatatataatatatatataatatatatacgacgcgcaaaaaaatatataatataaaaaaaaaaataaatataaaataatataatacgaaacgaaaaacgcaacgatcgataaataaacaaaataatacgaaatacaaaacgnaaacaaaancgtatacgataaaacgaaaaaaacgaataatatataatactatataaacaaataatataaaaataaatataactaaaaaaaaaaaaataaataaatacgcaaaatacgaaaacgatataaaaaaaataaacaataaacgctaaacgacgaaaactatataactaaataaaacgtatatacgtataaaaatatatacgtataaacgtaaacgcgaacgtacgaacgaacgtaacgcgcgcgtacnaacgtaaataaaaaaacgcgtaaacgaaaaaacgtaataaaacaaaatacgtaaaaacgtataaaaatatatacgaacgtatacgaacgaacgtatatatatatatatatatatatataaaaaaaaacgcgaaaaaaaatatacgaaaaaataaaaacgaacgtaaataaaaacgcgaacgaacgcgaatacgtataaaatactaaaacgtaaaaataaacgaaaaaacgtacgtnaaacgataacgcgcgaaacaatataaaaaaaacgaaatataacgtacgtataatatataaaaaaatacgtacgcgtaaaaaaataaaaacgtaaaatcgtataaaaaaaaaatacgtaataatacaaaacaataaacgcgcanaaataaaatatatatatcgtaaaaataatatataataaaaaacgaacaaaaaaattatacaacgcgataatatacaacgcaacgaacgtaaaatactacgaaaacgctaacgtaaaaacgcgtaacgaaaatnaaaatcgtactatacgcgaacgactataaaaacgantnacgacaaaaaaaataaacgtaaaaacgatataaaaaatanacaataaaaatacgcaactaaaaataacgcgaanaatnantncaaaaactacgaacgtacatacgtatntaaaaacgaaaaacnaanaaatacgcnaaacaaaaacgaaaaaaaaacgantaaatacgtaataaacaaaanaaatatactatacgataacgcgcgaacgaaaatnaatataacgaaaaaantaaataanaaacgaacgtaaaanacgaaaaaaacgaaataacaaaattaacgaacgacttaaaaataaaatcgcgaccgatanaacgctatatatananaaataaaaaacgtacgaaaaanaatatatanantaaaaaaacnaacttccganaaaaaacgacctatanataacgtaaccgacgaaaaaaaaanacaatatatcgtaaaaataaaatacgtataaaataatcgtccgttacttaaaaacgaaaaatatcgtnaaacgaaatacgcaaaaaaaaaaatacgatactaaaaaaaatataaaaaacgcaactanaaccgccgaaaactaaaatataaaaaaaaaaatccgtaatanaanaanaaata

SEQ ID NO: 1069 - DNA, 564 bp, Artificial Sequence
  chemically treated genomic DNA (Homo sapiens) CpG-island No: 1069
cgtatttatatttttttattagtacggtttatggaggaataatcgtattattataattatttttagtcgagatatattatatttcgttttatattcgtaggttaataatatttttcgtgattattttgtcgtataaatatatttttttttcgtgcgcgacgtttagataattttatttattcgggtataggcgatttttattattatttttttaatttttcgttacgcgtatttatattagaagagaattttcgagcgacgtcgttattttatgttttttacgttattttataagtacgattttatttattattatttcgtcgttaattacgtttttttttttatagagacgtttatttattttttcgttaacgatatattgtttttagagaattatatttttttcgacgcgcggagttatagtacgtattttatacgtagcgttagttatggataatattttttttattttatatttagatatatcggcggtttcggtatatatattttttaggtcgtttttaaattattttttttgttatggtatttttgttatataaaaga

SEQ ID NO: 1070 - DNA, 564 bp, Artificial Sequence
  chemically treated genomic DNA (Homo sapiens) CpG-island No: 1070
tcttttatataacaaaaataccataacaaaaaaaataatttaaaaacgacctaaaaaatatatataccgaaaccgccgatatatctaaatataaaataaaaaaaatattatccataactaacgctacgtataaaatacgtactataactccgcgcgtcgaaaaaaatataattctctaaaaacaatatatcgttaacgaaaaaataaataaacgtctctataaaaaaaaaaacgtaattaacgacgaaataataataaataaaatcgtacttataaaataacgtaaaaaacataaaataacgacgtcgctcgaaaattctcttctaatataaatacgcgtaacgaaaaattaaaaaaataataataaaaatcgcctatacccgaataaataaaattatctaaacgtcgcgcacgaaaaaaaaatatatttatacgacaaaataatcacgaaaaatattattaacctacgaatataaaacgaaatataatatatctcgactaaaaataattataataatacgattattcctccataaaccgtactaataaaaaaatataaatacg

SEQ ID NO: 1071 - DNA, 564 bp, Artificial Sequence
  chemically treated genomic DNA (Homo sapiens) CpG-island No: 1071
ttttttatgtggtaaaaatattatagtaagaggagtggtttgagagcgatttggggagtgtgtgtgtcgaggtcgtcgatgtgtttaagtgtgaggtgagagaggtgttgtttatgattggcgttacgtgtggggtgcgtattgtagtttcgcgcgtcgaggagagtgtgattttttagaggtagtgtgtcgttggcggggaggtagatgagcgtttttgtgaaggagagggcgtagttggcggcgagatagtggtaggtagagtcgtgtttgtgaagtggcgtgagaggtatggagtggcgacgtcgttcggagatttttttttaatgtggatgcgcgtgacgagggattgagaaaatggtggtagggatcgtttgtgttcgagtggatggagttgtttagacgtcgcgtacgggagggaggtgtgtttgtgcgatagggtggttacggagagtgttgttggtttgcgagtgtgaggcggggtgtgatgtgtttcggttgagagtggttgtaatggtacgattgtttttttatagatcgtgttgatgagagagtatgagtgcg

SEQ ID NO: 1072 - DNA, 564 bp, Artificial Sequence
  chemically treated genomic DNA (Homo sapiens) CpG-island No: 1072
cgcactcatactctctcatcaacacgatctataaaaaaacaatcgtaccattacaaccactctcaaccgaaacacatcacaccccgcctcacactcgcaaaccaacaacactctccgtaaccaccctatcgcacaaacacacctccctcccgtacgcgacgtctaaacaactccatccactcgaacacaaacgatccctaccaccattttctcaatccctcgtcacgcgcatccacattaaaaaaaaatctccgaacgacgtcgccactccatacctctcacgccacttcacaaacacgactctacctaccactatctcgccgccaactacgccctctccttcacaaaaacgctcatctacctccccgccaacgacacactacctctaaaaaatcacactctcctcgacgcgcgaaactacaatacgcaccccacacgtaacgccaatcataaacaacacctctctcacctcacacttaaacacatcgacgacctcgacacacacactccccaaatcgctctcaaaccactcctcttactataatatttttaccacataaaaaa

SEQ ID NO: 1073 - DNA, 554 bp, Artificial Sequence
  chemically treated genomic DNA (Homo sapiens) CpG-island No: 1073
gggtaggggcggttcggtcgagtttggtacgaaaagtttaggggttcggcgttttttcgcgttttttttcgttttcggttcggatttgttggggttttagttttttcggggacgttaattcgcgtttatcgtcgttcgtttttaagtttcggcgtcgaaggaggatgtttatttcgttttcgggaaaatgtttattttcgtttattttattcgttttttcgcgtttcgggcggttgtttcgggagggtcgtcgatttatttagggtatcgtaggacgcggacgtcgagatttttagttgggtcgagttagtttcgtagtcgttcggtatcgtcgtttttcgacgtcggttcgaaatcgtttagttcgttatcgttttggttataacggttttgcgtttgcgtacgagggcgggatcgtcgtacggtttagtttttataaagtttcgaagggtcggttggcgcgtatttgttttattttttttaagagtttacgtttttggtcggttcgagttttttggtggtacgcggggaattttttgtttttgattaggtta

SEQ ID NO: 1074 - DNA, 554 bp, Artificial Sequence
  chemically treated genomic DNA (Homo sapiens) CpG-island No: 1074
taacctaatcaaaaacaaaaaattccccgcgtaccaccaaaaaactcgaaccgaccaaaaacgtaaactcttaaaaaaaataaaacaaatacgcgccaaccgacccttcgaaactttataaaaactaaaccgtacgacgatcccgccctcgtacgcaaacgcaaaaccgttataaccaaaacgataacgaactaaacgatttcgaaccgacgtcgaaaaacgacgataccgaacgactacgaaactaactcgacccaactaaaaatctcgacgtccgcgtcctacgataccctaaataaatcgacgaccctcccgaaacaaccgcccgaaacgcgaaaaaacgaataaaataaacgaaaataaacattttcccgaaaacgaaataaacatcctccttcgacgccgaaacttaaaaacgaacgacgataaacgcgaattaacgtccccgaaaaaactaaaaccccaacaaatccgaaccgaaaacgaaaaaaaacgcgaaaaaacgccgaacccctaaacttttcgtaccaaactcgaccgaaccgcccctaccc

SEQ ID NO: 1075 - DNA, 554 bp, Artificial Sequence
  chemically treated genomic DNA (Homo sapiens) CpG-island No: 1075
tagtttggttaggagtaggaggtttttcgcgtgttattaggaagttcgggtcggttaagagcgtagatttttgagaggagtgagataggtgcgcgttagtcggtttttcggggttttatgggaattgggtcgtgcggcggtttcgttttcgtgcgtaggcgtagaatcgttgtgattagagcggtggcgggttgagcggtttcgagtcggcgtcggggagcggcggtatcgggcggttgcggggttggttcgatttagttggaggtttcggcgttcgcgttttgcggtgttttgggtaagtcggcggttttttcggagtagtcgttcgagacgcgggagggcgaatgaaataaacgaaaatagatattttttcgaaggcgaaatagatattttttttcggcgtcggggtttggaggcgggcggcggtgggcgcgggttaacgttttcggggaaattgagattttagtaggttcgggtcgggggcggagaggaacgcgggagggcgtcgggtttttgggtttttcgtattaagttcgatcgagtcgtttttattt

SEQ ID NO: 1076 - DNA, 554 bp, Artificial Sequence
  chemically treated genomic DNA (Homo sapiens) CpG-island No: 1076
aaataaaaacgactcgatcgaacttaatacgaaaaacccaaaaacccgacgccctcccgcgttcctctccgcccccgacccgaacctactaaaatctcaatttccccgaaaacgttaacccgcgcccaccgccgcccgcctccaaaccccgacgccgaaaaaaaatatctatttcgccttcgaaaaaatatctattttcgtttatttcattcgccctcccgcgtctcgaacgactactccgaaaaaaccgccgacttacccaaaacaccgcaaaacgcgaacgccgaaacctccaactaaatcgaaccaaccccgcaaccgcccgataccgccgctccccgacgccgactcgaaaccgctcaacccgccaccgctctaatcacaacgattctacgcctacgcacgaaaacgaaaccgccgcacgacccaattcccataaaaccccgaaaaaccgactaacgcgcacctatctcactcctctcaaaaatctacgctcttaaccgacccgaacttcctaataacacgcgaaaaacctcctactcctaaccaaacta

SEQ ID NO: 1077 - DNA, 544 bp, Artificial Sequence
  chemically treated genomic DNA (Homo sapiens) CpG-island No: 1077
cgtcgtcgttagagggcgtttgggggcggggcgcgggtggggtaaggcggggttcgattggaggtagggcggtgagtcgagaggggcggggtaagggatcgggaggcggggttaggggtcgtaaggcggaagagtttttttcgttttcgattcggcgtttcgtatttcgtttattttcggttttttttcgtatttttgttagtttcgtagcgttgggttggtttttttcgaggtttttaagagttttttattgcgtttcgttcgtcgttcggaagtttttagttttttaaggacgtattatttaatgtcgcggttacggttatcgttataagcgtttttagttttattttatttcggtttgttcgtcgtttttttttcgttttcgtttttgtttgttagttttatcgggtcgtaggtgcggacgattttaaaatttttcggttcgcgaaggtcgttagttgcggggaggggaggggaggcgcggtttcgtagcgtttttaggtttatgttttaggtatgtttagattttcgaggtatcgtttgt

SEQ ID NO: 1078 - DNA, 544 bp, Artificial Sequence
  chemically treated genomic DNA (Homo sapiens) CpG-island No: 1078
acaaacgatacctcgaaaatctaaacatacctaaaacataaacctaaaaacgctacgaaaccgcgcctcccctcccctccccgcaactaacgaccttcgcgaaccgaaaaattttaaaatcgtccgcacctacgacccgataaaactaacaaacaaaaacgaaaacgaaaaaaaaacgacgaacaaaccgaaataaaataaaactaaaaacgcttataacgataaccgtaaccgcgacattaaataatacgtccttaaaaaactaaaaacttccgaacgacgaacgaaacgcaataaaaaactcttaaaaacctcgaaaaaaaccaacccaacgctacgaaactaacaaaaatacgaaaaaaaaccgaaaataaacgaaatacgaaacgccgaatcgaaaacgaaaaaaactcttccgccttacgacccctaaccccgcctcccgatcccttaccccgcccctctcgactcaccgccctacctccaatcgaaccccgccttaccccacccgcgccccgcccccaaacgccctctaacgacgacg

SEQ ID NO: 1079 - DNA, 544 bp, Artificial Sequence
  chemically treated genomic DNA (Homo sapiens) CpG-island No: 1079
gtaagcggtgtttcgggggtttggatatatttgggatatgagtttgggggcgttgcgggatcgcgttttttttttttttttcgtagttggcggttttcgcgggtcgaggaattttgaggtcgttcgtatttacggttcggtggagttggtaggtaggggcgggggcgggagaaggacggcgggtaggtcggggtggggtggggttgggggcgtttgtgacggtggtcgtgatcgcggtattaggtgatgcgtttttgaggggttgggggttttcgggcggcgagcggggcgtagtaggaggtttttagagatttcggaggaaattagtttagcgttacgggattggtaagaatgcgaagaggaatcgagagtgaacggagtgcgaggcgtcgggtcggaggcgagaggggttttttcgttttgcgatttttggtttcgtttttcggttttttgtttcgtttttttcggtttatcgttttgtttttagtcggatttcgttttgttttattcgcgtttcgtttttaggcgttttttagcggcggcg

SEQ ID NO: 1080 - DNA, 544 bp, Artificial Sequence
  chemically treated genomic DNA (Homo sapiens) CpG-island No: 1080
cgccgccgctaaaaaacgcctaaaaacgaaacgcgaataaaacaaaacgaaatccgactaaaaacaaaacgataaaccgaaaaaaacgaaacaaaaaaccgaaaaacgaaaccaaaaatcgcaaaacgaaaaaacccctctcgcctccgacccgacgcctcgcactccgttcactctcgattcctcttcgcattcttaccaatcccgtaacgctaaactaatttcctccgaaatctctaaaaacctcctactacgccccgctcgccgcccgaaaacccccaacccctcaaaaacgcatcacctaataccgcgatcacgaccaccgtcacaaacgcccccaaccccaccccaccccgacctacccgccgtccttctcccgcccccgcccctacctaccaactccaccgaaccgtaaatacgaacgacctcaaaattcctcgacccgcgaaaaccgccaactacgaaaaaaaaaaaaaaaacgcgatcccgcaacgcccccaaactcatatcccaaatatatccaaacccccgaaacaccgcttac

SEQ ID NO: 1081 - DNA, 769 bp, Artificial Sequence
  chemically treated genomic DNA (Homo sapiens) CpG-island No: 1081
cggtaaaacgttttgtttaaagtttattatattattacgtttaagaattgatattttagtagggtaacgtattaattaagcgatttcgttttatttttttcgtttttttagtatacgtaagcgtatagaggttcgcgagtgacgttatttttttcgatattatttcgttgtcgtacgattaaaggtttgtcgtaacggtcgggaaaagtttcgagaagaagggtacgtacgtcgtatattttaatatgttcgttagtatgcgcgcgtaggtttttggcgtaggtattgggattggagttaatgaggtgcggcgacgttattgcgtagtcgttagttcggtcgtacgttagggcgcgggagcgcggagcgagtttggttgtatttatatcggtatttaagcgcggatcggcgtgtttttggatttagagagtggggacgttcggtttcggagcgggagtgttcgttgtgttagcgattaaaaagaggtgagagcgggtcgcggaggtcgtatttggttagaggtagagttgtgggaggcgcgtatttgcgagcgatcgaaatttaagcggggagtattcgagtggagttcgcgttgggtgggagggcggggagtgaagattttggattgtggttagatcgagttgggcgagtaacggtttgaggtgcggcggagttttaattagggataggtatggtttcggttagggattggaggcggtttggatatagattcgaggaggaggcggtttttttcgtagtggttgttgaa

SEQ ID NO: 1082 - DNA, 769 bp, Artificial Sequence
  chemically treated genomic DNA (Homo sapiens) CpG-island No: 1082
ttcaacaaccactacgaaaaaaaccgcctcctcctcgaatctatatccaaaccgcctccaatccctaaccgaaaccatacctatccctaattaaaactccgccgcacctcaaaccgttactcgcccaactcgatctaaccacaatccaaaatcttcactccccgccctcccacccaacgcgaactccactcgaatactccccgcttaaatttcgatcgctcgcaaatacgcgcctcccacaactctacctctaaccaaatacgacctccgcgacccgctctcacctctttttaatcgctaacacaacgaacactcccgctccgaaaccgaacgtccccactctctaaatccaaaaacacgccgatccgcgcttaaataccgatataaatacaaccaaactcgctccgcgctcccgcgccctaacgtacgaccgaactaacgactacgcaataacgtcgccgcacctcattaactccaatcccaatacctacgccaaaaacctacgcgcgcatactaacgaacatattaaaatatacgacgtacgtacccttcttctcgaaacttttcccgaccgttacgacaaacctttaatcgtacgacaacgaaataatatcgaaaaaaataacgtcactcgcgaacctctatacgcttacgtatactaaaaaaacgaaaaaaataaaacgaaatcgcttaattaatacgttaccctactaaaatatcaattcttaaacgtaataatataataaactttaaacaaaacgttttaccg

SEQ ID NO: 1083 - DNA, 769 bp, Artificial Sequence
  chemically treated genomic DNA (Homo sapiens) CpG-island No: 1083
tttagtaattattacggaagaggtcgtttttttttcggatttgtatttaagtcgtttttagtttttgatcgagattatatttgtttttagttagggtttcgtcgtattttaagtcgttattcgtttagttcggtttgattatagtttagggtttttatttttcgtttttttatttagcgcgggttttattcgaatgtttttcgtttgggtttcggtcgttcgtaagtgcgcgttttttatagttttgtttttaattaggtgcggttttcgcgattcgtttttatttttttttagtcgttggtataacgaatattttcgtttcgaagtcggacgtttttattttttaagtttaaggatacgtcggttcgcgtttaagtatcggtgtaagtgtaattaaattcgtttcgcgttttcgcgttttgacgtgcggtcgagttggcggttacgtagtaacgtcgtcgtattttattggttttagttttaatgtttgcgttaaggatttgcgcgcgtatgttggcgagtatgttagggtgtacggcgtgcgtgttttttttttcgaggtttttttcggtcgttacgataggtttttggtcgtacgataacgaggtggtgtcgggagaggtgacgttattcgcgggtttttgtgcgtttgcgtgtgttggaggagcggggagggtggggcggagtcgtttggttggtgcgttgttttgttaaagtattagtttttgggcgtggtgatgtaatgagttttgagtagggcgttttgtcg

SEQ ID NO: 1084 - DNA, 769 bp, Artificial Sequence
  chemically treated genomic DNA (Homo sapiens) CpG-island No: 1084
cgacaaaacgccctactcaaaactcattacatcaccacgcccaaaaactaatactttaacaaaacaacgcaccaaccaaacgactccgccccaccctccccgctcctccaacacacgcaaacgcacaaaaacccgcgaataacgtcacctctcccgacaccacctcgttatcgtacgaccaaaaacctatcgtaacgaccgaaaaaaacctcgaaaaaaaaaacacgcacgccgtacaccctaacatactcgccaacatacgcgcgcaaatccttaacgcaaacattaaaactaaaaccaataaaatacgacgacgttactacgtaaccgccaactcgaccgcacgtcaaaacgcgaaaacgcgaaacgaatttaattacacttacaccgatacttaaacgcgaaccgacgtatccttaaacttaaaaaataaaaacgtccgacttcgaaacgaaaatattcgttataccaacgactaaaaaaaaataaaaacgaatcgcgaaaaccgcacctaattaaaaacaaaactataaaaaacgcgcacttacgaacgaccgaaacccaaacgaaaaacattcgaataaaacccgcgctaaataaaaaaacgaaaaataaaaaccctaaactataatcaaaccgaactaaacgaataacgacttaaaatacgacgaaaccctaactaaaaacaaatataatctcgatcaaaaactaaaaacgacttaaatacaaatccgaaaaaaaaacgacctcttccgtaataattactaaa

SEQ ID NO: 1085 - DNA, 600 bp, Artificial Sequence
  chemically treated genomic DNA (Homo sapiens) CpG-island No: 1085
atttcgcgaggaaatacgcggttttattagtgtgtttatatcgattattattaattcggatcgaatcgattcggattaaggggtcggaggtaggttttgggtattagcggtttcgatattttcgtttttcgcgtcgtattcgagtggtttttagtcgagcgggtttttattttttgattcggtttgggtttttttgcgttttttttggtttttgttcggcgttaggaggtcggtttcgcgtttttcgcggtcgttcgggttcggggtcgcgtcgggcgtttggttttgtacgcgagttcggggatttgcggttttcgtgttttttttttttcgttcgttttttcgtggagttcggcgtcggcggtggttgttcgggcggggggttgcggcgtttaggagaggtttcggtttcgtttcgggtttgtttagggggagagcggagcggttcgtagtcgggtcgggtcggggtttttttagggaggagcgtggagcggtagcggcggcggcggtagtagaaatgatggaagaattgtatagtttggatttacgacggtagaaattattggaggttaggtttattggagtaggtgttagtaaggg

SEQ ID NO: 1086 - DNA, 600 bp, Artificial Sequence
  chemically treated genomic DNA (Homo sapiens) CpG-island No: 1086
cccttactaacacctactccaataaacctaacctccaataatttctaccgtcgtaaatccaaactatacaattcttccatcatttctactaccgccgccgccgctaccgctccacgctcctccctaaaaaaaccccgacccgacccgactacgaaccgctccgctctccccctaaacaaacccgaaacgaaaccgaaacctctcctaaacgccgcaaccccccgcccgaacaaccaccgccgacgccgaactccacgaaaaaacgaacgaaaaaaaaaaaacacgaaaaccgcaaatccccgaactcgcgtacaaaaccaaacgcccgacgcgaccccgaacccgaacgaccgcgaaaaacgcgaaaccgacctcctaacgccgaacaaaaaccaaaaaaaacgcaaaaaaacccaaaccgaatcaaaaaataaaaacccgctcgactaaaaaccactcgaatacgacgcgaaaaacgaaaatatcgaaaccgctaatacccaaaacctacctccgaccccttaatccgaatcgattcgatccgaattaataataatcgatataaacacactaataaaaccgcgtatttcctcgcgaaat

SEQ ID NO: 1087 - DNA, 600 bp, Artificial Sequence
  chemically treated genomic DNA (Homo sapiens) CpG-island No: 1087
tttttattaatatttattttagtaaatttggtttttaataatttttgtcgtcgtgggtttaggttatgtaatttttttattatttttattgtcgtcgtcgtcgttgtcgttttacgtttttttttggagggatttcgattcgattcggttgcggatcgtttcgttttttttttgggtaggttcggggcggagtcggggttttttttgagcgtcgtaatttttcgttcgggtagttatcgtcggcgtcgggttttacgagagggcgggcgggggagggggggtacgaaggtcgtagattttcgggttcgcgtatagagttaggcgttcgacgcggtttcgggttcgggcggtcgcggggggcgcgggatcggttttttggcgtcggataaaggttaagggaggcgtaggagggtttaggtcgggttaggaggtgggggttcgttcggttgggggttattcgggtgcggcgcggagggcgggggtgtcggaatcgttggtgtttaggatttgttttcggttttttaattcggatcggttcggttcggattagtagtgatcggtgtaaatatattagtgaaatcgcgtgttttttcgcgagat

SEQ ID NO: 1088 - DNA, 600 bp, Artificial Sequence
  chemically treated genomic DNA (Homo sapiens) CpG-island No: 1088
atctcgcgaaaaaacacgcgatttcactaatatatttacaccgatcactactaatccgaaccgaaccgatccgaattaaaaaaccgaaaacaaatcctaaacaccaacgattccgacacccccgccctccgcgccgcacccgaataacccccaaccgaacgaacccccacctcctaacccgacctaaaccctcctacgcctcccttaacctttatccgacgccaaaaaaccgatcccgcgccccccgcgaccgcccgaacccgaaaccgcgtcgaacgcctaactctatacgcgaacccgaaaatctacgaccttcgtaccccccctcccccgcccgccctctcgtaaaacccgacgccgacgataactacccgaacgaaaaattacgacgctcaaaaaaaaccccgactccgccccgaacctacccaaaaaaaaaacgaaacgatccgcaaccgaatcgaatcgaaatccctccaaaaaaaaacgtaaaacgacaacgacgacgacgacaataaaaataataaaaaaattacataacctaaacccacgacgacaaaaattattaaaaaccaaatttactaaaataaatattaataaaaa

SEQ ID NO: 1089 - DNA, 578 bp, Artificial Sequence
  chemically treated genomic DNA (Homo sapiens) CpG-island No: 1089
cggttcgttaaattttatcgtcggtgtgtagcgagtcgtagttatagttataggcgtagggttcgcgaggtcgtaggaggttcggtcgtcgttcggaatttgcgcgtacgttgagtagttcgaagggtcgggtgtatagtcggggtgtcggttgtaggagttgtcggaaaggcgaggcgggcgcggtagcgcggaggtcggcgacggaggagtttagtatacggggtacgtagcgtagtagaggtagtatcgcggaaacgattgcgaatacgtgtagatgtaaaggataatttaggtttaggcgtttcgcgatttgaggcgtcgtcggaagtttcgtttttgttcggaagcgtttttcgcgtcggcgttttgacgatttaaggttagcgggcggaatcgcgttttttgttggagatttcggtgtagttcgggaagtttcgaattcggatttcggagtttttttgttgcgttgtcgagttcgttgttcgaagttgtttaattttttttagtggtcgtttatttattttttatttgttgtttttaaagtacgtaaggtttttgggttgcgtggaatgtat

SEQ ID NO: 1090 - DNA, 578 bp, Artificial Sequence
  chemically treated genomic DNA (Homo sapiens) CpG-island No: 1090
atacattccacgcaacccaaaaaccttacgtactttaaaaacaacaaataaaaaataaataaacgaccactaaaaaaaattaaacaacttcgaacaacgaactcgacaacgcaacaaaaaaactccgaaatccgaattcgaaacttcccgaactacaccgaaatctccaacaaaaaacgcgattccgcccgctaaccttaaatcgtcaaaacgccgacgcgaaaaacgcttccgaacaaaaacgaaacttccgacgacgcctcaaatcgcgaaacgcctaaacctaaattatcctttacatctacacgtattcgcaatcgtttccgcgatactacctctactacgctacgtaccccgtatactaaactcctccgtcgccgacctccgcgctaccgcgcccgcctcgcctttccgacaactcctacaaccgacaccccgactatacacccgacccttcgaactactcaacgtacgcgcaaattccgaacgacgaccgaacctcctacgacctcgcgaaccctacgcctataactataactacgactcgctacacaccgacgataaaatttaacgaaccg

SEQ ID NO: 1091 - DNA, 578 bp, Artificial Sequence
  chemically treated genomic DNA (Homo sapiens) CpG-island No: 1091
gtgtattttacgtagtttaaaagttttgcgtgttttgagaatagtaggtggaaagtgggtaagcggttattagagggaattaaatagtttcggatagcggattcggtagcgtagtaagaaagtttcggaattcggattcgaggtttttcgggttgtatcggagtttttagtagagggcgcgatttcgttcgttggttttaggtcgttagagcgtcggcgcgggaagcgttttcgggtaggggcggggttttcggcggcgttttaggtcgcggggcgtttaggtttgggttgttttttgtatttgtacgtgttcgtagtcgttttcgcgatgttgtttttgttgcgttgcgtgtttcgtgtgttgggttttttcgtcgtcggttttcgcgttgtcgcgttcgtttcgttttttcggtagtttttgtagtcggtatttcggttgtgtattcggtttttcgggttgtttagcgtgcgcgtaggtttcgagcggcggtcgggttttttgcggtttcgcggattttgcgtttgtggttgtggttgcggttcgttgtatatcgacggtgaggtttagcgggtcg

SEQ ID NO: 1092 - DNA, 578 bp, Artificial Sequence
  chemically treated genomic DNA (Homo sapiens) CpG-island No: 1092
cgacccgctaaacctcaccgtcgatatacaacgaaccgcaaccacaaccacaaacgcaaaatccgcgaaaccgcaaaaaacccgaccgccgctcgaaacctacgcgcacgctaaacaacccgaaaaaccgaatacacaaccgaaataccgactacaaaaactaccgaaaaaacgaaacgaacgcgacaacgcgaaaaccgacgacgaaaaaacccaacacacgaaacacgcaacgcaacaaaaacaacatcgcgaaaacgactacgaacacgtacaaatacaaaaaacaacccaaacctaaacgccccgcgacctaaaacgccgccgaaaaccccgcccctacccgaaaacgcttcccgcgccgacgctctaacgacctaaaaccaacgaacgaaatcgcgccctctactaaaaactccgatacaacccgaaaaacctcgaatccgaattccgaaactttcttactacgctaccgaatccgctatccgaaactatttaattccctctaataaccgcttacccactttccacctactattctcaaaacacgcaaaacttttaaactacgtaaaatacac

SEQ ID NO: 1093 - DNA, 724 bp, Artificial Sequence
  chemically treated genomic DNA (Homo sapiens) CpG-island No: 1093
tttttcgtttttattcgcggttttttttttttttcgtcgttacgcgcgtcgtattagtttaagtcgtttatttatttttaagtatcgtatttagacgtttcgaaattttttttttttttcgttgtcggtttaggtcgggtttagcgtttggtattttcggcgatttttgggtttttcgtatcggttcggttttttatcgttgttgtttcgacgagagtacgaggagacgtcgtgttcgattttatttcgggtttttatattcgtcgttcgcgttttcgtttttaatattaggcgcggtttatttgtatgatggttttgcggattttttagagtcggtacgtttttttttcgtcgtttatggtagttttcgtcgtcgtcgtcgttcgtatttttttttcgcgcgagaattcgcgcggattgcgtttgcgtcgaattcgaattaggtttttttcgtttaatttcgtttcgcgttggtttgtcgtcggcgaatgtttgaatgtagtaacgtttcggatcggtagcgttaagggtagttcgagttttacgagagcggtagttggttgagcgagtttttcgttttcgtagttttcgtgtgtttttggtcgtatagtttttcgggagttgtagttttcgtttaatttttattttggagtaatagtttagaattttacgaggcgggggcgaagtgtgagcggggaaattgaggtttggatggggttaaggg

SEQ ID NO: 1094 - DNA, 724 bp, Artificial Sequence
  chemically treated genomic DNA (Homo sapiens) CpG-island No: 1094
cccttaaccccatccaaacctcaatttccccgctcacacttcgcccccgcctcgtaaaattctaaactattactccaaaataaaaattaaacgaaaactacaactcccgaaaaactatacgaccaaaaacacacgaaaactacgaaaacgaaaaactcgctcaaccaactaccgctctcgtaaaactcgaactacccttaacgctaccgatccgaaacgttactacattcaaacattcgccgacgacaaaccaacgcgaaacgaaattaaacgaaaaaaacctaattcgaattcgacgcaaacgcaatccgcgcgaattctcgcgcgaaaaaaaaatacgaacgacgacgacgacgaaaactaccataaacgacgaaaaaaaaacgtaccgactctaaaaaatccgcaaaaccatcatacaaataaaccgcgcctaatattaaaaacgaaaacgcgaacgacgaatataaaaacccgaaataaaatcgaacacgacgtctcctcgtactctcgtcgaaacaacaacgataaaaaaccgaaccgatacgaaaaacccaaaaatcgccgaaaataccaaacgctaaacccgacctaaaccgacaacgaaaaaaaaaaaaaatttcgaaacgtctaaatacgatacttaaaaataaataaacgacttaaactaatacgacgcgcgtaacgacgaaaaaaaaaaaaaaccgcgaataaaaacgaaaaa

SEQ ID NO: 1095 - DNA, 724 bp, Artificial Sequence
  chemically treated genomic DNA (Homo sapiens) CpG-island No: 1095
tttttgattttatttaggttttagttttttcgtttatatttcgttttcgtttcgtgggattttaaattgttgttttaaggtgggagttgaacggaaattataattttcgagaggttgtgcggttaaagatatacgagaattacggaggcgagagattcgtttagttaattgtcgttttcgtaaggttcgggttgtttttggcgttgtcgattcgagacgttgttgtatttaggtattcgtcgacgatagattagcgcggggcggggttaggcggagggggtttgattcggattcggcgtaggcgtagttcgcgcgggttttcgcgcggagaaggggtgcgagcggcggcggcggcggaggttgttatggacgacgaggaggagacgtatcggttttggaaaattcgtaagattattatgtaggtgagtcgcgtttggtgttgggggcgggggcgcgggcggcgggtgtaggggttcgaggtggggtcgagtacggcgttttttcgtattttcgtcggagtagtagcgatgaagggtcgggtcgatacgggaggtttagaggtcgtcggggatattaggcgttggattcgatttgagtcggtagcggggaagggagggggtttcgagacgtttgggtgcggtgtttaggggtgggtgggcggtttgggttggtgcggcgcgcgtggcggcgagaggaggaggaagtcgcgaatggggacgggggg

SEQ ID NO: 1096 - DNA, 724 bp, Artificial Sequence
  chemically treated genomic DNA (Homo sapiens) CpG-island No: 1096
ccccccgtccccattcgcgacttcctcctcctctcgccgccacgcgcgccgcaccaacccaaaccgcccacccacccctaaacaccgcacccaaacgtctcgaaaccccctcccttccccgctaccgactcaaatcgaatccaacgcctaatatccccgacgacctctaaacctcccgtatcgacccgacccttcatcgctactactccgacgaaaatacgaaaaaacgccgtactcgaccccacctcgaacccctacacccgccgcccgcgcccccgcccccaacaccaaacgcgactcacctacataataatcttacgaattttccaaaaccgatacgtctcctcctcgtcgtccataacaacctccgccgccgccgccgctcgcaccccttctccgcgcgaaaacccgcgcgaactacgcctacgccgaatccgaatcaaaccccctccgcctaaccccgccccgcgctaatctatcgtcgacgaatacctaaatacaacaacgtctcgaatcgacaacgccaaaaacaacccgaaccttacgaaaacgacaattaactaaacgaatctctcgcctccgtaattctcgtatatctttaaccgcacaacctctcgaaaattataatttccgttcaactcccaccttaaaacaacaatttaaaatcccacgaaacgaaaacgaaatataaacgaaaaaactaaaacctaaataaaatcaaaaa

SEQ ID NO: 1097 - DNA, 544 bp, Artificial Sequence
  chemically treated genomic DNA (Homo sapiens) CpG-island No: 1097
cgttgttgttaattagtcggataattgcgttgtttttcgacgcgtcgttagttaggttacggttttttagatataagcgagtatgcgtagtcgttaataataagttcgtacgttcggtttcgttttttttttttcgttttttttttatttcggttttttattggttgacgtcggcgcgagcgtttaatatcgacgcgtttgattaatgagcgttttggagggcgtggtcgtgggaaaggaggcgcggaaagtcgacgcgcgtttattggtcggttggacgaggggaggagtcgttggtttttagtttcgtcgcgatgagtttcggtcgtttttgtcgtttattgaagtcggcgttgttttgtggggttttggtcgcgtttggtttggtcgggattatggtgagttagcgtcgcggtcgttgtcggttcggtgatcgttggggcgggcgcgcgatttttgttttcgttcgtcggcgtggggaatttttaggttttagtgattttggtggggggcgtttgggggttttttttttttattttcggtt

SEQ ID NO: 1098 - DNA, 544 bp, Artificial Sequence
  chemically treated genomic DNA (Homo sapiens) CpG-island No: 1098
aaccgaaaataaaaaaaaaaaacccccaaacgccccccaccaaaatcactaaaacctaaaaattccccacgccgacgaacgaaaacaaaaatcgcgcgcccgccccaacgatcaccgaaccgacaacgaccgcgacgctaactcaccataatcccgaccaaaccaaacgcgaccaaaaccccacaaaacaacgccgacttcaataaacgacaaaaacgaccgaaactcatcgcgacgaaactaaaaaccaacgactcctcccctcgtccaaccgaccaataaacgcgcgtcgactttccgcgcctcctttcccacgaccacgccctccaaaacgctcattaatcaaacgcgtcgatattaaacgctcgcgccgacgtcaaccaataaaaaaccgaaataaaaaaaaaacgaaaaaaaaaaaacgaaaccgaacgtacgaacttattattaacgactacgcatactcgcttatatctaaaaaaccgtaacctaactaacgacgcgtcgaaaaacaacgcaattatccgactaattaacaacaacg

SEQ ID NO: 1099 - DNA, 544 bp, Artificial Sequence
  chemically treated genomic DNA (Homo sapiens) CpG-island No: 1099
ggtcgggggtggggagggggagtttttagacgttttttattaaggttattggagtttgagggttttttacgtcggcgagcggaggtagggatcgcgcgttcgttttaacggttatcgggtcggtaacggtcgcggcgttagtttattatggtttcggttaggttaggcgcggttagagttttatagagtagcgtcggttttagtaggcggtaaaggcggtcgaggtttatcgcggcggggttgggagttagcggttttttttttcgtttagtcgattaatggacgcgcgtcggtttttcgcgtttttttttttacggttacgttttttagagcgtttattggttagacgcgtcggtgttgagcgttcgcgtcgacgttagttaatgggaggtcggagtgggaagaaggcggggaagggggggcgggatcggacgtgcggatttgttgttggcgattgcgtatgttcgtttgtgtttaggaggtcgtggtttggttggcggcgcgtcgggaggtagcgtagttattcggttggttgatagtagcg

SEQ ID NO: 1100 - DNA, 544 bp, Artificial Sequence
  chemically treated genomic DNA (Homo sapiens) CpG-island No: 1100
cgctactatcaaccaaccgaataactacgctacctcccgacgcgccgccaaccaaaccacgacctcctaaacacaaacgaacatacgcaatcgccaacaacaaatccgcacgtccgatcccgcccccccttccccgccttcttcccactccgacctcccattaactaacgtcgacgcgaacgctcaacaccgacgcgtctaaccaataaacgctctaaaaaacgtaaccgtaaaaaaaaaaacgcgaaaaaccgacgcgcgtccattaatcgactaaacgaaaaaaaaaaccgctaactcccaaccccgccgcgataaacctcgaccgcctttaccgcctactaaaaccgacgctactctataaaactctaaccgcgcctaacctaaccgaaaccataataaactaacgccgcgaccgttaccgacccgataaccgttaaaacgaacgcgcgatccctacctccgctcgccgacgtaaaaaaccctcaaactccaataaccttaataaaaaacgtctaaaaactccccctccccacccccgacc

SEQ ID NO: 1101 - DNA, 1288 bp, Artificial Sequence
  chemically treated genomic DNA (Homo sapiens) CpG-island No: 1101
ggacgcgggtgatcgtattgcgacgcgtttcgcggttttttaggtcgttgtaggcgcgcgggttggggtcggggaaggggaaggggttgttttacgcgcgcgggtcgtggtcggggaaggggtcgtttaggtcgttgtaggcgcgcgtgtcggggtcggggtcgggggtttaggtttgtagggggcggggttcgggacggttggggcggagttggatcgttgagggttacggcggggcgttttcgggtcgagcggggttgttgcgttcgagcggttgggggcgcggagggttggaaatttcggattacgcgttttcgggcgtcgtttcgttttcgtattttggtttagcgcggtggcgttatagtcgcgtagttttgattacggttttcgggttttttgttttcgttagcggcgttcggggtgggggagttaggaggggcgggagacgggcgggtatgggtcgcgcgggcgtaggttttttcgggcgtcgtaggtagcggtgttagagtcggggtaggcggcggtcgcgagtttttcggcggcggaaggttttagcgtgtaggcgtaggagggcgcggcgtcggcggaagaagttttgttttcgtagtttgcgatcggagatttacgaatgttttaagttttaggattcggtgcgcgcggggtttttatatcggttaatgtggtatattttggggttggaattttttttcggttttcgggttttcggtaaaatcggattagaagtataagggggcgtgtgcgtttaaggaggaggagcgtttaggtttttagggtcgtagggtttcggtgttttcgttatcgattcgttttcgatttttttttgttttagggtttcgggtttagtttttcgtttacgttttttgtttagttttttttgttttgtagtgcgcgtttcgggacgattggcgttgtgcgcgttttatgtacgagtttttcgttaaggatatcgacgggtatatggttaatttggataagtatcggtgggcgttcgtttggggtggggcgcggggtcgggttttgggagggggtcgtgtttttttgcgttgacgtcgtcgattttcgtaggggtttcgtgtgtatcgttattaacgtggttttttagtgaggtaagatcgaagtaaattatatttagttcgtcgatttgtacgttcgatacgttgagtgtggtttgcggattttggttttttcgtgtaattagttcgggaagtaggtgggttgttgcgttttcggggttcgtagaggcgggtgggtgggggtcggggtgggt

SEQ ID NO: 1102 - DNA, 1288 bp, Artificial Sequence
  chemically treated genomic DNA (Homo sapiens) CpG-island No: 1102
acccaccccgacccccacccacccgcctctacgaaccccgaaaacgcaacaacccacctacttcccgaactaattacacgaaaaaaccaaaatccgcaaaccacactcaacgtatcgaacgtacaaatcgacgaactaaatataatttacttcgatcttacctcactaaaaaaccacgttaataacgatacacacgaaacccctacgaaaatcgacgacgtcaacgcaaaaaaacacgaccccctcccaaaacccgaccccgcgccccaccccaaacgaacgcccaccgatacttatccaaattaaccatatacccgtcgatatccttaacgaaaaactcgtacataaaacgcgcacaacgccaatcgtcccgaaacgcgcactacaaaacaaaaaaaactaaacaaaaaacgtaaacgaaaaactaaacccgaaaccctaaaacaaaaaaaaatcgaaaacgaatcgataacgaaaacaccgaaaccctacgaccctaaaaacctaaacgctcctcctccttaaacgcacacgcccccttatacttctaatccgattttaccgaaaacccgaaaaccgaaaaaaaattccaaccccaaaatataccacattaaccgatataaaaaccccgcgcgcaccgaatcctaaaacttaaaacattcgtaaatctccgatcgcaaactacgaaaacaaaacttcttccgccgacgccgcgccctcctacgcctacacgctaaaaccttccgccgccgaaaaactcgcgaccgccgcctaccccgactctaacaccgctacctacgacgcccgaaaaaacctacgcccgcgcgacccatacccgcccgtctcccgcccctcctaactcccccaccccgaacgccgctaacgaaaacaaaaaacccgaaaaccgtaatcaaaactacgcgactataacgccaccgcgctaaaccaaaatacgaaaacgaaacgacgcccgaaaacgcgtaatccgaaatttccaaccctccgcgcccccaaccgctcgaacgcaacaaccccgctcgacccgaaaacgccccgccgtaaccctcaacgatccaactccgccccaaccgtcccgaaccccgccccctacaaacctaaacccccgaccccgaccccgacacgcgcgcctacaacgacctaaacgaccccttccccgaccacgacccgcgcgcgtaaaacaaccccttccccttccccgaccccaacccgcgcgcctacaacgacctaaaaaaccgcgaaacgcgtcgcaatacgatcacccgcgtcc

SEQ ID NO: 1103 - DNA, 1288 bp, Artificial Sequence
  chemically treated genomic DNA (Homo sapiens) CpG-island No: 1103
gtttatttcgatttttatttattcgtttttgcgggtttcggggacgtagtagtttatttgtttttcgaattggttatacgggaaggttaggattcgtaaattatatttagcgtatcgggcgtgtaggtcgacgagttgagtgtagtttatttcggttttgttttattgggaggttacgttggtgacgatgtatacgaagtttttgcgaggatcggcggcgttagcgtagaagaatacggtttttttttagggttcgatttcgcgttttattttaggcgagcgtttatcggtatttgtttaggttaattatgtgttcgtcgatgtttttggcggaaaattcgtgtatggagcgcgtatagcgttagtcgtttcgggacgcgtattgtaaggtaaaggaagttgagtagggagcgtggacgggaggttgagttcgggattttgaggtaggaagggatcgggagcgggtcggtggcggggatatcgaggttttgcggttttgaagatttgaacgttttttttttttaaacgtatacgtttttttgtatttttggttcggttttatcggagattcggaggtcgggagagggttttaattttaaaatgtgttatattagtcggtgtgggggtttcgcgcgtatcgggttttgggatttgggatattcgtggattttcggtcgtaagttgcggggatagggtttttttcgtcggcgtcgcgtttttttgcgtttgtacgttggggtttttcgtcgtcgaggggttcgcggtcgtcgtttgtttcggttttggtatcgttgtttgcggcgttcgggggagtttgcgttcgcgcggtttatattcgttcgtttttcgttttttttggtttttttatttcgagcgtcgttagcggggataaagggttcggaggtcgtagttaggattgcgcgattgtgacgttatcgcgttaggttaaggtgcgggggcggggcggcgttcgggggcgcgtgattcgggatttttagtttttcgcgtttttaatcgttcgggcgtagtagtttcgttcggttcggagacgtttcgtcgtggtttttaacggtttagtttcgttttagtcgtttcggatttcgttttttgtaagtttggattttcgatttcggtttcggtacgcgcgtttgtaacggtttggacggtttttttttcgattacgattcgcgcgcgtggaataatttttttttttttttcgattttagttcgcgcgtttataacggtttggagggtcgcggagcgcgtcgtagtacggttattcgcgttt

SEQ ID NO: 1104 - DNA, 1288 bp, Artificial Sequence
  chemically treated genomic DNA (Homo sapiens) CpG-island No: 1104
aaacgcgaataaccgtactacgacgcgctccgcgaccctccaaaccgttataaacgcgcgaactaaaatcgaaaaaaaaaaaaaaattattccacgcgcgcgaatcgtaatcgaaaaaaaaaccgtccaaaccgttacaaacgcgcgtaccgaaaccgaaatcgaaaatccaaacttacaaaaaacgaaatccgaaacgactaaaacgaaactaaaccgttaaaaaccacgacgaaacgtctccgaaccgaacgaaactactacgcccgaacgattaaaaacgcgaaaaactaaaaatcccgaatcacgcgcccccgaacgccgccccgcccccgcaccttaacctaacgcgataacgtcacaatcgcgcaatcctaactacgacctccgaaccctttatccccgctaacgacgctcgaaataaaaaaaccaaaaaaaacgaaaaacgaacgaatataaaccgcgcgaacgcaaactcccccgaacgccgcaaacaacgataccaaaaccgaaacaaacgacgaccgcgaacccctcgacgacgaaaaaccccaacgtacaaacgcaaaaaaacgcgacgccgacgaaaaaaaccctatccccgcaacttacgaccgaaaatccacgaatatcccaaatcccaaaacccgatacgcgcgaaacccccacaccgactaatataacacattttaaaattaaaaccctctcccgacctccgaatctccgataaaaccgaaccaaaaatacaaaaaaacgtatacgtttaaaaaaaaaaaacgttcaaatcttcaaaaccgcaaaacctcgatatccccgccaccgacccgctcccgatcccttcctacctcaaaatcccgaactcaacctcccgtccacgctccctactcaacttcctttaccttacaatacgcgtcccgaaacgactaacgctatacgcgctccatacacgaattttccgccaaaaacatcgacgaacacataattaacctaaacaaataccgataaacgctcgcctaaaataaaacgcgaaatcgaaccctaaaaaaaaaccgtattcttctacgctaacgccgccgatcctcgcaaaaacttcgtatacatcgtcaccaacgtaacctcccaataaaacaaaaccgaaataaactacactcaactcgtcgacctacacgcccgatacgctaaatataatttacgaatcctaaccttcccgtataaccaattcgaaaaacaaataaactactacgtccccgaaacccgcaaaaacgaataaataaaaatcgaaataaac

SEQ ID NO: 1105 - DNA, 573 bp, Artificial Sequence
  chemically treated genomic DNA (Homo sapiens) CpG-island No: 1105
attttttttttcggcggtttcgcggttttgtttttcgtgcggtcgcgttttcggcggcgcggggggcgtggtttgggcgtagtatttataaaggcgggcggcggtagaggcgttattttgcgaacggcgagtagcggcggcggcgcggagagacgtagcggaggtttttttggtttcggattttagcggtcggatggtgaaattttttttgtagcggatttttaatagttattgtttcgttagagagaaggaaggggataaatttagcgttattatttacgttagtcgtattatgtcgtttttaagtttgtatagtcgcggcggtagtagtagtgagaggtaagtgtttcgttttcgttcgaagtttttagaagcgtcggtcgcgtaggtttgcggggggtcgttttcggggcgttagataggttttcggcgcgcgagattcgtttttttgttaaggttagaatcgcgtcggggacgaggtaggcgtagggcgggtttggaggtttttttcggttttagtagtgttttcgggggagtcgggtttggggggtaagggtgcggagttggatttgg

SEQ ID NO: 1106 - DNA, 573 bp, Artificial Sequence
  chemically treated genomic DNA (Homo sapiens) CpG-island No: 1106
ccaaatccaactccgcacccttaccccccaaacccgactcccccgaaaacactactaaaaccgaaaaaaacctccaaacccgccctacgcctacctcgtccccgacgcgattctaaccttaacaaaaaaacgaatctcgcgcgccgaaaacctatctaacgccccgaaaacgaccccccgcaaacctacgcgaccgacgcttctaaaaacttcgaacgaaaacgaaacacttacctctcactactactaccgccgcgactatacaaacttaaaaacgacataatacgactaacgtaaataataacgctaaatttatccccttccttctctctaacgaaacaataactattaaaaatccgctacaaaaaaaatttcaccatccgaccgctaaaatccgaaaccaaaaaaacctccgctacgtctctccgcgccgccgccgctactcgccgttcgcaaaataacgcctctaccgccgcccgcctttataaatactacgcccaaaccacgccccccgcgccgccgaaaacgcgaccgcacgaaaaacaaaaccgcgaaaccgccgaaaaaaaaaat

SEQ ID NO: 1107 - DNA, 573 bp, Artificial Sequence
  chemically treated genomic DNA (Homo sapiens) CpG-island No: 1107
ttaaatttaatttcgtatttttgttttttaaattcgattttttcgagagtattgttaaggtcgggggggatttttaggttcgttttgcgtttatttcgttttcggcgcgattttggttttgataaaggggcggatttcgcgcgtcggggatttatttggcgtttcgaggacggtttttcgtaggtttgcgcggtcggcgtttttggaagtttcggacgggggcggggtatttattttttattgttgttgtcgtcgcggttgtgtaggtttaggagcggtatggtgcggttggcgtggatggtggcgttgggtttatttttttttttttttttggcgaagtagtggttattgaggattcgttgtagggaggattttattattcggtcgttggggttcgaaattaggaaaattttcgttgcgttttttcgcgtcgtcgtcgttgttcgtcgttcgtaaaatggcgtttttgtcgtcgttcgtttttatagatgttgcgtttaggttacgtttttcgcgtcgtcgggaacgcgatcgtacgaggggtagagtcgcggggtcgtcgggaaaaaaagt

SEQ ID NO: 1108 - DNA, 573 bp, Artificial Sequence
  chemically treated genomic DNA (Homo sapiens) CpG-island No: 1108
actttttttcccgacgaccccgcgactctacccctcgtacgatcgcgttcccgacgacgcgaaaaacgtaacctaaacgcaacatctataaaaacgaacgacgacaaaaacgccattttacgaacgacgaacaacgacgacgacgcgaaaaaacgcaacgaaaattttcctaatttcgaaccccaacgaccgaataataaaatcctccctacaacgaatcctcaataaccactacttcgccaaaaaaaaaaaaaaaaataaacccaacgccaccatccacgccaaccgcaccataccgctcctaaacctacacaaccgcgacgacaacaacaataaaaaataaataccccgcccccgtccgaaacttccaaaaacgccgaccgcgcaaacctacgaaaaaccgtcctcgaaacgccaaataaatccccgacgcgcgaaatccgcccctttatcaaaaccaaaatcgcgccgaaaacgaaataaacgcaaaacgaacctaaaaatcccccccgaccttaacaatactctcgaaaaaatcgaatttaaaaaacaaaaatacgaaattaaatttaa

SEQ ID NO: 1109 - DNA, 1136 bp, Artificial Sequence
  chemically treated genomic DNA (Homo sapiens) CpG-island No: 1109
gttcggggcgtttgatttgcgggaggggtatgggtcggaggtcggatttgggcgtaggacggggagtcgggggaggcgtgtgttttttgcggggttcgcgggatgggattcggtttcggaggaggggagaggtttttggtcgagggttggatttgcggggcgtagattgggaattcggtttggaggaagggtgtgcggtcgggtcggatttgggaggcgtacgatggggtaatttggttgggggcggggtcggttttggggggttggttcgcggataggtagggttcgcggggttggtgaatttgtatttttcggtttcggtcgtcgagcgtgcgttgcgggagcggggagcgttttgcggtggacgagttttcgcgggtttttgttgtttcgatgtggtttttgtacgcgacggatttcgtgggtttcgtttttcgtttttgagcgagtcggtttggatggttcgggacgcgtcgggcgaggtcgcgtacgtagacggtatttagggttttttcgcgggggtcgtcggggagttgggggtggcgtatttcgatagttcggtagcgttttgggaagattttcgtcgtttttcgggaagacgcgtttcgttttcgggggcgcgggtgttagttgcggttgtgggggagttcgcggggtttcggtcgagttttttcgattgcgtttttcgaggtgggcgtcgtttagtttcggatcgggaggttgggtcgcggtgttggcggtgtcgcggtttgggggtcgtgtaaaatggaggtaattttggggtttgtttattttgcgtagtaaatggttgttggcgttgtcggttgcgcgattgtgaaaatttttttcggggcgcgaggtcgcgtttgtttggatgacgtaatcgggagggttcgggtttggagcgggggcgggggggcgggcggtcgggagtcggagcggggcgcgttttttatgaggttaggttaggttcgttcggttttcgcggggataagtaagagttttagattttggtcgtagtgtagggtggaaaggggaagtcgcgatagaattgaaaaggggaagcgttggttgttttggtggtcggggggtgaggttttgtttcggcggggttgcgtgaggggaaggggtttttt

SEQ ID NO: 1110 - DNA, 1136 bp, Artificial Sequence
  chemically treated genomic DNA (Homo sapiens) CpG-island No: 1110
aaaaaaccccttcccctcacgcaaccccgccgaaacaaaacctcaccccccgaccaccaaaacaaccaacgcttccccttttcaattctatcgcgacttcccctttccaccctacactacgaccaaaatctaaaactcttacttatccccgcgaaaaccgaacgaacctaacctaacctcataaaaaacgcgccccgctccgactcccgaccgcccgcccccccgcccccgctccaaacccgaaccctcccgattacgtcatccaaacaaacgcgacctcgcgccccgaaaaaaattttcacaatcgcgcaaccgacaacgccaacaaccatttactacgcaaaataaacaaaccccaaaattacctccattttacacgacccccaaaccgcgacaccgccaacaccgcgacccaacctcccgatccgaaactaaacgacgcccacctcgaaaaacgcaatcgaaaaaactcgaccgaaaccccgcgaactcccccacaaccgcaactaacacccgcgcccccgaaaacgaaacgcgtcttcccgaaaaacgacgaaaatcttcccaaaacgctaccgaactatcgaaatacgccacccccaactccccgacgacccccgcgaaaaaaccctaaataccgtctacgtacgcgacctcgcccgacgcgtcccgaaccatccaaaccgactcgctcaaaaacgaaaaacgaaacccacgaaatccgtcgcgtacaaaaaccacatcgaaacaacaaaaacccgcgaaaactcgtccaccgcaaaacgctccccgctcccgcaacgcacgctcgacgaccgaaaccgaaaaatacaaattcaccaaccccgcgaaccctacctatccgcgaaccaaccccccaaaaccgaccccgcccccaaccaaattaccccatcgtacgcctcccaaatccgacccgaccgcacacccttcctccaaaccgaattcccaatctacgccccgcaaatccaaccctcgaccaaaaacctctcccctcctccgaaaccgaatcccatcccgcgaaccccgcaaaaaacacacgcctcccccgactccccgtcctacgcccaaatccgacctccgacccatacccctcccgcaaatcaaacgccccgaac

SEQ ID NO: 1111 - DNA, 1136 bp, Artificial Sequence
  chemically treated genomic DNA (Homo sapiens) CpG-island No: 1111
ggggggttttttttttttacgtagtttcgtcggggtagagttttatttttcggttattaagatagttagcgttttttttttttagttttgtcgcggttttttttttttattttgtattacggttaaaatttgggatttttgtttgttttcgcgaagatcgggcgggtttagtttgattttatggaggacgcgtttcgtttcggttttcggtcgttcgttttttcgttttcgttttaggttcgggttttttcggttgcgttatttaggtagacgcggtttcgcgtttcgggggagatttttataatcgcgtagtcggtagcgttagtagttatttgttgcgtagggtaaataggttttaaagttgtttttattttgtacggtttttaaatcgcggtatcgttagtatcgcggtttaatttttcgattcggggttgagcgacgtttatttcgggggacgtagtcgggaaagttcgatcgagatttcgcgggtttttttataatcgtagttggtattcgcgttttcggaagcgggacgcgttttttcgggaagcggcgggggtttttttagggcgttgtcgggttgtcggagtgcgttatttttagtttttcggcggttttcgcggagaagttttgggtgtcgtttacgtgcgcggtttcgttcggcgcgtttcgggttatttagatcgattcgtttaggggcgaaaaacggggtttacgaggttcgtcgcgtgtaggggttatatcgaggtaatagggattcgcgggagttcgtttatcgtaaagcgtttttcgttttcgtagcgtacgttcgacggtcgggatcgaaaagtgtagatttattagtttcgcgggttttgtttgttcgcggattagttttttaaggtcgatttcgtttttaattagattgttttatcgtgcgttttttaaattcgattcgatcgtatattttttttttaaatcgaatttttagtttgcgtttcgtaaatttaattttcgattagaagttttttttttttttcgaagtcgagttttatttcgcgaatttcgtaaaagatatacgtttttttcgatttttcgttttgcgtttaaattcgattttcgatttatgtttttttcgtaaattaggcgtttcggat

SEQ ID NO: 1112 - DNA, 1136 bp, Artificial Sequence
  chemically treated genomic DNA (Homo sapiens) CpG-island No: 1112
atccgaaacgcctaatttacgaaaaaaacataaatcgaaaatcgaatttaaacgcaaaacgaaaaatcgaaaaaaacgtatatcttttacgaaattcgcgaaataaaactcgacttcgaaaaaaaaaaaaaacttctaatcgaaaattaaatttacgaaacgcaaactaaaaattcgatttaaaaaaaaaatatacgatcgaatcgaatttaaaaaacgcacgataaaacaatctaattaaaaacgaaatcgaccttaaaaaactaatccgcgaacaaacaaaacccgcgaaactaataaatctacacttttcgatcccgaccgtcgaacgtacgctacgaaaacgaaaaacgctttacgataaacgaactcccgcgaatccctattacctcgatataacccctacacgcgacgaacctcgtaaaccccgtttttcgcccctaaacgaatcgatctaaataacccgaaacgcgccgaacgaaaccgcgcacgtaaacgacacccaaaacttctccgcgaaaaccgccgaaaaactaaaaataacgcactccgacaacccgacaacgccctaaaaaaacccccgccgcttcccgaaaaaacgcgtcccgcttccgaaaacgcgaataccaactacgattataaaaaaacccgcgaaatctcgatcgaactttcccgactacgtcccccgaaataaacgtcgctcaaccccgaatcgaaaaattaaaccgcgatactaacgataccgcgatttaaaaaccgtacaaaataaaaacaactttaaaacctatttaccctacgcaacaaataactactaacgctaccgactacgcgattataaaaatctcccccgaaacgcgaaaccgcgtctacctaaataacgcaaccgaaaaaacccgaacctaaaacgaaaacgaaaaaacgaacgaccgaaaaccgaaacgaaacgcgtcctccataaaatcaaactaaacccgcccgatcttcgcgaaaacaaacaaaaatcccaaattttaaccgtaatacaaaataaaaaaaaaaaaccgcgacaaaactaaaaaaaaaaaacgctaactatcttaataaccgaaaaataaaactctaccccgacgaaactacgtaaaaaaaaaaaacccccc

SEQ ID NO: 1113 - DNA, 623 bp, Artificial Sequence
  chemically treated genomic DNA (Homo sapiens) CpG-island No: 1113
cggttcgttttgttaggcgtaggattagtagttcgcggcgtattcgtagttagggttcgagcgttcggagttagggattaagcggtgtttcgcggtcgcgtagtttaggttcgggtttttagagtagcgtttgtagcgcgtttcgcgttcgggacgtcgagggtcgtaagcgggttagttgtgttgttaggagttttaggttcgcggttaaaggcgtggtcgagggcgtagtaaggttgagtagcgttcggaggaggttgtttagttgcggcgcgtgggggttcggggatttcgggggtttagggggttgtagatagacgcggttaaagttagtgaggagtaggcgtgggggtttcgtcgtcgtatagtttcgaggtgttattagtagtaagtttttcggtcgtaattcgattagggtcgcgttttacgtttttaggaattttagggtcgcgtttagttgtagtagtagtagggttatagtttatacgaattttttcggcggttgcgtgtaggttttcgttagttattgcgttatcgtgcgttttggaatttcggttgttagcgttattgcgtttttttagggcgtttcgggtagtgtgtttttaggtattaggttatatagt

SEQ ID NO: 1114 - DNA, 623 bp, Artificial Sequence
  chemically treated genomic DNA (Homo sapiens) CpG-island No: 1114
actatataacctaatacctaaaaacacactacccgaaacgccctaaaaaaacgcaataacgctaacaaccgaaattccaaaacgcacgataacgcaataactaacgaaaacctacacgcaaccgccgaaaaaattcgtataaactataaccctactactactacaactaaacgcgaccctaaaattcctaaaaacgtaaaacgcgaccctaatcgaattacgaccgaaaaacttactactaataacacctcgaaactatacgacgacgaaacccccacgcctactcctcactaactttaaccgcgtctatctacaaccccctaaacccccgaaatccccgaacccccacgcgccgcaactaaacaacctcctccgaacgctactcaaccttactacgccctcgaccacgcctttaaccgcgaacctaaaactcctaacaacacaactaacccgcttacgaccctcgacgtcccgaacgcgaaacgcgctacaaacgctactctaaaaacccgaacctaaactacgcgaccgcgaaacaccgcttaatccctaactccgaacgctcgaaccctaactacgaatacgccgcgaactactaatcctacgcctaacaaaacgaaccg

SEQ ID NO: 1115 - DNA, 623 bp, Artificial Sequence
  chemically treated genomic DNA (Homo sapiens) CpG-island No: 1115
gttgtgtggtttggtgtttgaaggtatattgttcggggcgttttggagaggcgtagtggcgttggtagtcgaggttttagagcgtacggtggcgtagtggttggcggaggtttgtacgtagtcgtcggaggagttcgtgtgggttgtggttttgttgttgttgtagttgagcgcggttttgaagtttttggaggcgtggggcgcggttttagtcgagttgcggtcggagaatttgttgttggtggtatttcggggttgtgcgacgacggggtttttacgtttgttttttattgattttggtcgcgtttgtttgtagttttttggattttcgggattttcgggtttttacgcgtcgtagttgggtagtttttttcgagcgttgtttagttttgttgcgttttcgattacgtttttggtcgcgggtttggagtttttggtagtatagttgattcgtttgcggttttcggcgtttcggacgcggggcgcgttgtaggcgttgttttgggggttcgggtttgagttgcgcggtcgcggagtatcgtttggtttttggtttcgagcgttcgggttttggttgcgggtgcgtcgcgggttgttggttttgcgtttagtagagcgggtcg

SEQ ID NO: 1116 - DNA, 623 bp, Artificial Sequence
  chemically treated genomic DNA (Homo sapiens) CpG-island No: 1116
cgacccgctctactaaacgcaaaaccaacaacccgcgacgcacccgcaaccaaaacccgaacgctcgaaaccaaaaaccaaacgatactccgcgaccgcgcaactcaaacccgaacccccaaaacaacgcctacaacgcgccccgcgtccgaaacgccgaaaaccgcaaacgaatcaactatactaccaaaaactccaaacccgcgaccaaaaacgtaatcgaaaacgcaacaaaactaaacaacgctcgaaaaaaactacccaactacgacgcgtaaaaacccgaaaatcccgaaaatccaaaaaactacaaacaaacgcgaccaaaatcaataaaaaacaaacgtaaaaaccccgtcgtcgcacaaccccgaaataccaccaacaacaaattctccgaccgcaactcgactaaaaccgcgccccacgcctccaaaaacttcaaaaccgcgctcaactacaacaacaacaaaaccacaacccacacgaactcctccgacgactacgtacaaacctccgccaaccactacgccaccgtacgctctaaaacctcgactaccaacgccactacgcctctccaaaacgccccgaacaatataccttcaaacaccaaaccacacaac

SEQ ID NO: 1117 - DNA, 942 bp, Artificial Sequence
  chemically treated genomic DNA (Homo sapiens) CpG-island No: 1117
gtcgtgtagtcgtttttttttttttcgggaaatgtataggtggatacgcgagcggtcggttcgcgggggaggggaggggagggttcgttttggggattttttagattatttttatgttgaatttgcgcgcgtttttttggttcgtcgcggcggtcggtttatttattttgcggaaggagtattttatcgagaagttgtttttgtgttgttcgcggtcgcggttttatacgaatagtagtacgaagtagaagaggattacgtttaggaaggtgatgtagtttatggcggtggatattaggatggtggtgaggtcgagcggcgcgcgtagggtcgttagcgtttcgttgtgggtttcgttcggggttcggttggcggtcggttcggggcgtacggttagcgtggcgaagtaggtgtcgttgtcgttcgcgttgttggttacgtacgtgtaggtgtcgttgttttgcggtcgcgcgttttggatttttagcgttttttcggggagtacgcgcgttcggttcgcgttggtggtcgttatcggtcggtgttggggggttatttaggttacggtgggcgtcggttcgttttcggcgcggtagaggaagcggacgttttcgttcgcggtggtcgtgacgcgttgtagtcgtcgttttcggattttgggtttgcggtatacgaagtattcgaatagtacggagttcggtaggtttcgtagcgcgtcgtcgcgtatttcggtcggggtggcgtaggtcggtagtcgttcgtcgaagttgagggttttgcgacgttgtacgatttatagtaggcgatagtcgtaggttagcgggttttcgtttacgcgtagcgtttttagcgtgtttatcgagtggaaggtgtttttttttaacgtggagagtaggttgttggagaggttgagtaggcggatttggcgtaggtttaggaagg

SEQ ID NO: 1118 - DNA, 942 bp, Artificial Sequence
  chemically treated genomic DNA (Homo sapiens) CpG-island No: 1118
ccttcctaaacctacgccaaatccgcctactcaacctctccaacaacctactctccacgttaaaaaaaaacaccttccactcgataaacacgctaaaaacgctacgcgtaaacgaaaacccgctaacctacgactatcgcctactataaatcgtacaacgtcgcaaaaccctcaacttcgacgaacgactaccgacctacgccaccccgaccgaaatacgcgacgacgcgctacgaaacctaccgaactccgtactattcgaatacttcgtataccgcaaacccaaaatccgaaaacgacgactacaacgcgtcacgaccaccgcgaacgaaaacgtccgcttcctctaccgcgccgaaaacgaaccgacgcccaccgtaacctaaataaccccccaacaccgaccgataacgaccaccaacgcgaaccgaacgcgcgtactccccgaaaaaacgctaaaaatccaaaacgcgcgaccgcaaaacaacgacacctacacgtacgtaaccaacaacgcgaacgacaacgacacctacttcgccacgctaaccgtacgccccgaaccgaccgccaaccgaaccccgaacgaaacccacaacgaaacgctaacgaccctacgcgcgccgctcgacctcaccaccatcctaatatccaccgccataaactacatcaccttcctaaacgtaatcctcttctacttcgtactactattcgtataaaaccgcgaccgcgaacaacacaaaaacaacttctcgataaaatactccttccgcaaaataaataaaccgaccgccgcgacgaaccaaaaaaacgcgcgcaaattcaacataaaaataatctaaaaaatccccaaaacgaaccctcccctcccctcccccgcgaaccgaccgctcgcgtatccacctatacatttcccgaaaaaaaaaaaaacgactacacgac

SEQ ID NO: 1119 - DNA, 942 bp, Artificial Sequence
  chemically treated genomic DNA (Homo sapiens) CpG-island No: 1119
tttttttgggtttgcgttagattcgtttgtttaatttttttaataatttgttttttacgttggaggagagtattttttattcggtgaatacgttagagacgttgcgcgtggacgggaattcgttggtttgcgattgtcgtttgttgtggatcgtgtagcgtcgtaagatttttaatttcgacgggcggttgtcggtttgcgttatttcggtcgaggtgcgcggcgacgcgttgcgaaatttgtcggatttcgtgttgttcgagtatttcgtgtgtcgtaaatttaagattcgggagcggcggttgtagcgcgttacggttatcgcgggcgaagacgttcgttttttttgtcgcgtcgagggcgagtcggcgtttatcgtggtttgggtgattttttagtatcggtcggtgacggttattagcgcgggtcgggcgcgcgtgtttttcggggggacgttggagatttaggacgcgcggtcgtaggatagcggtatttatacgtgcgtggttagtaacgcgggcggtaacgatatttatttcgttacgttgatcgtgcgtttcgagtcggtcgttaatcggatttcgggcgaggtttataacgagacgttggcggttttgcgcgcgtcgttcgattttattattattttggtgtttatcgttatgggttgtattatttttttgggcgtggtttttttttgtttcgtgttgttgttcgtgtggagtcgcggtcgcgggtagtataaaaataatttttcggtggagtatttttttcgtaaggtggatgggtcggtcgtcgcggcgggttagggaggcgcgcgtaagtttaatatgaagatgatttgaggggtttttagggcggattttttttttttttttttcgcgggtcggtcgttcgcgtgtttatttatgtatttttcggaggggaaggggacggttgtacggt

SEQ ID NO: 1120 - DNA, 942 bp, Artificial Sequence
  chemically treated genomic DNA (Homo sapiens) CpG-island No: 1120
accgtacaaccgtccccttcccctccgaaaaatacataaataaacacgcgaacgaccgacccgcgaaaaaaaaaaaaaaaaaatccgccctaaaaacccctcaaatcatcttcatattaaacttacgcgcgcctccctaacccgccgcgacgaccgacccatccaccttacgaaaaaaatactccaccgaaaaattatttttatactacccgcgaccgcgactccacacgaacaacaacacgaaacaaaaaaaaaccacgcccaaaaaaataatacaacccataacgataaacaccaaaataataataaaatcgaacgacgcgcgcaaaaccgccaacgtctcgttataaacctcgcccgaaatccgattaacgaccgactcgaaacgcacgatcaacgtaacgaaataaatatcgttaccgcccgcgttactaaccacgcacgtataaataccgctatcctacgaccgcgcgtcctaaatctccaacgtccccccgaaaaacacgcgcgcccgacccgcgctaataaccgtcaccgaccgatactaaaaaatcacccaaaccacgataaacgccgactcgccctcgacgcgacaaaaaaaacgaacgtcttcgcccgcgataaccgtaacgcgctacaaccgccgctcccgaatcttaaatttacgacacacgaaatactcgaacaacacgaaatccgacaaatttcgcaacgcgtcgccgcgcacctcgaccgaaataacgcaaaccgacaaccgcccgtcgaaattaaaaatcttacgacgctacacgatccacaacaaacgacaatcgcaaaccaacgaattcccgtccacgcgcaacgtctctaacgtattcaccgaataaaaaatactctcctccaacgtaaaaaacaaattattaaaaaaattaaacaaacgaatctaacgcaaacccaaaaaaa

SEQ ID NO: 1121 - DNA, 1060 bp, Artificial Sequence
  chemically treated genomic DNA (Homo sapiens) CpG-island No: 1121
cggcgggtcgcggtcggatttcgggatagtgtttggggcgtttcgggtttgggtttgtttttaaggcggcggttagggttttacgaggcgagtttgtagcgaggcgtcggcgtttttaattacgcgttcggcgggggttttttggcgttattttcggggttcgagtttcgttaggtttagtttttgtttcgcgtcgcgttatcgggtaatattttttttttgttcgtcgggttttagttttttcgtttgtaaaattaggtttatcgggtttagggattttatttgggattttcgcggtttttcgggtcgggaacgtcgcggatgtggggttattcggtcgcgatttcgttgcgtcgtttcggttaggttttgtttttcgttcgggttttagtttttcgtatgtataggacggggttcgcgcgcgtatcgttcgggtttttcgcggatttagtttgggtcggcgttgtttcgagttttagttttttcgtcgtggttagttcgcgtaagaggcgggcgtaagcgatttttatttcggtttcggttttgttttaggtttgcggcgtagattttgtcgttcgtcgtttcggttcgggttttatcggtaggcgcgggacgatttttacggagtagtagtggtagaagtatcgttcgggatgcggcgacgtttcggttatggtcgtcgttatttatttcgcgtcgttcgtttttcgcgcggtattcgtcgtcggtcgtttgttgttttttcgtcggtcgacgcgttcgcgtacgtttacgtacggtacgtacggtacgcggggcggagcgggggcgcgggagcggcgaaagttgcgtattcggcgggtagcggttcgggcgacggtggtcgttgagagataaattaggttcggtcgttgggcggggttttaagcgggggcggggttttcggcgggggcggggttaaagtaggcggcggaagagacgagaagcggggcgtgcgcggggcggggtcgaggttttttttttttttcgaagttgtttaggttttcgtgttttttagtgtttttttattttatcgtcgttt

SEQ ID NO: 1122 - DNA, 1060 bp, Artificial Sequence
  chemically treated genomic DNA (Homo sapiens) CpG-island No: 1122
aaacgacgataaaataaaaaaacactaaaaaacacgaaaacctaaacaacttcgaaaaaaaaaaaaaacctcgaccccgccccgcgcacgccccgcttctcgtctcttccgccgcctactttaaccccgcccccgccgaaaaccccgcccccgcttaaaaccccgcccaacgaccgaacctaatttatctctcaacgaccaccgtcgcccgaaccgctacccgccgaatacgcaactttcgccgctcccgcgcccccgctccgccccgcgtaccgtacgtaccgtacgtaaacgtacgcgaacgcgtcgaccgacgaaaaaacaacaaacgaccgacgacgaataccgcgcgaaaaacgaacgacgcgaaataaataacgacgaccataaccgaaacgtcgccgcatcccgaacgatacttctaccactactactccgtaaaaatcgtcccgcgcctaccgataaaacccgaaccgaaacgacgaacgacaaaatctacgccgcaaacctaaaacaaaaccgaaaccgaaataaaaatcgcttacgcccgcctcttacgcgaactaaccacgacgaaaaaactaaaactcgaaacaacgccgacccaaactaaatccgcgaaaaacccgaacgatacgcgcgcgaaccccgtcctatacatacgaaaaactaaaacccgaacgaaaaacaaaacctaaccgaaacgacgcaacgaaatcgcgaccgaataaccccacatccgcgacgttcccgacccgaaaaaccgcgaaaatcccaaataaaatccctaaacccgataaacctaattttacaaacgaaaaaactaaaacccgacgaacaaaaaaaaaatattacccgataacgcgacgcgaaacaaaaactaaacctaacgaaactcgaaccccgaaaataacgccaaaaaacccccgccgaacgcgtaattaaaaacgccgacgcctcgctacaaactcgcctcgtaaaaccctaaccgccgccttaaaaacaaacccaaacccgaaacgccccaaacactatcccgaaatccgaccgcgacccgccg

SEQ ID NO: 1123 - DNA, 1060 bp, Artificial Sequence
  chemically treated genomic DNA (Homo sapiens) CpG-island No: 1123
agacggcgatgaggtagggaagtattgagggatacgaaggtttgggtagtttcgggaggggaggagggtttcggtttcgtttcgcgtacgtttcgtttttcgtttttttcgtcgtttgttttggtttcgttttcgtcggaagtttcgttttcgtttggagtttcgtttaacggtcgggtttagtttgttttttagcggttatcgtcgttcgggtcgttgttcgtcgagtacgtagttttcgtcgttttcgcgttttcgtttcgtttcgcgtgtcgtgcgtgtcgtgcgtgagcgtgcgcgggcgcgtcggtcggcgagggagtagtaaacggtcggcggcgggtgtcgcgcggggggcgggcggcgcggagtaggtggcggcggttatggtcgaggcgtcgtcgtatttcggacggtatttttgttattgttgtttcgtggagatcgtttcgcgtttgtcggtgaggttcgggtcggggcggcgggcggtagggtttgcgtcgtaggtttgaggtaaggtcggggtcggggtgggggtcgtttgcgttcgttttttgcgcgagttgattacgacgggaaaattgaggttcggggtagcgtcggtttaggttgaattcgcggggagttcgggcggtgcgcgcgcgaatttcgttttgtatatgcgggagattgaggttcgggcgggaggtagggtttggtcggagcggcgtagcgggatcgcggtcgggtgattttatattcgcggcgttttcgattcgagaggtcgcgaggattttaggtgggatttttaagttcggtgagtttggttttgtaaacggagaaattgaggttcggcgagtagagagagggtattgttcggtggcgcggcgcggggtaggggttgggtttggcggggttcggatttcgagaataacgttaggggattttcgtcgagcgcgtggttgggggcgtcggcgtttcgttgtaggttcgtttcgtggagttttggtcgtcgttttggaggtaggtttaggttcggaacgttttaggtattgtttcggggttcgatcgcggttcgtcg

SEQ ID NO: 1124 - DNA, 1060 bp, Artificial Sequence
  chemically treated genomic DNA (Homo sapiens) CpG-island No: 1124
cgacgaaccgcgatcgaaccccgaaacaatacctaaaacgttccgaacctaaacctacctccaaaacgacgaccaaaactccacgaaacgaacctacaacgaaacgccgacgcccccaaccacgcgctcgacgaaaatcccctaacgttattctcgaaatccgaaccccgccaaacccaacccctaccccgcgccgcgccaccgaacaataccctctctctactcgccgaacctcaatttctccgtttacaaaaccaaactcaccgaacttaaaaatcccacctaaaatcctcgcgacctctcgaatcgaaaacgccgcgaatataaaatcacccgaccgcgatcccgctacgccgctccgaccaaaccctacctcccgcccgaacctcaatctcccgcatatacaaaacgaaattcgcgcgcgcaccgcccgaactccccgcgaattcaacctaaaccgacgctaccccgaacctcaattttcccgtcgtaatcaactcgcgcaaaaaacgaacgcaaacgacccccaccccgaccccgaccttacctcaaacctacgacgcaaaccctaccgcccgccgccccgacccgaacctcaccgacaaacgcgaaacgatctccacgaaacaacaataacaaaaataccgtccgaaatacgacgacgcctcgaccataaccgccgccacctactccgcgccgcccgccccccgcgcgacacccgccgccgaccgtttactactccctcgccgaccgacgcgcccgcgcacgctcacgcacgacacgcacgacacgcgaaacgaaacgaaaacgcgaaaacgacgaaaactacgtactcgacgaacaacgacccgaacgacgataaccgctaaaaaacaaactaaacccgaccgttaaacgaaactccaaacgaaaacgaaacttccgacgaaaacgaaaccaaaacaaacgacgaaaaaaacgaaaaacgaaacgtacgcgaaacgaaaccgaaaccctcctcccctcccgaaactacccaaaccttcgtatccctcaatacttccctacctcatcgccgtct

SEQ ID NO: 1125 - DNA, 530 bp, Artificial Sequence
  chemically treated genomic DNA (Homo sapiens) CpG-island No: 1125
aggttttcgcgcggttttacgttcgggattttttcgcgttcggttttacgcgcgtgttttttgttcgtagattcgtgcgacggcgtggagtgcggttcgggtaaggcgtgtcgtatgttggggggtcgttcgcgttgcgagtgcgcgttcgattgttcggggttttcggcgcggttgtaggtttgcggtttagacggcgttatttatcgcgacgagtgcgagttgcgcgtcgcgcgttgtcgcggttattcggatttgagcgttatgtatcggggtcgttgtcgtagtacgtgggggcgtggtttgtggaggggcggggcgggatttatcggatttgcgcgttatgtatcgaggttgttgtcgtagtaggcgggggcggggtttggggcgggattattcggatttgagcgtgacgtatcggggttgttatcgtaatgcgtgagggttaggtttgcgggggcggggtttgttggaggggcggggtttgttggaggggcggggtcgttgtcgtagtgcgtaggggcggggtt

SEQ ID NO: 1126 - DNA, 530 bp, Artificial Sequence
  chemically treated genomic DNA (Homo sapiens) CpG-island No: 1126
aaccccgcccctacgcactacgacaacgaccccgcccctccaacaaaccccgcccctccaacaaaccccgcccccgcaaacctaaccctcacgcattacgataacaaccccgatacgtcacgctcaaatccgaataatcccgccccaaaccccgcccccgcctactacgacaacaacctcgatacataacgcgcaaatccgataaatcccgccccgcccctccacaaaccacgcccccacgtactacgacaacgaccccgatacataacgctcaaatccgaataaccgcgacaacgcgcgacgcgcaactcgcactcgtcgcgataaataacgccgtctaaaccgcaaacctacaaccgcgccgaaaaccccgaacaatcgaacgcgcactcgcaacgcgaacgaccccccaacatacgacacgccttacccgaaccgcactccacgccgtcgcacgaatctacgaacaaaaaacacgcgcgtaaaaccgaacgcgaaaaaatcccgaacgtaaaaccgcgcgaaaacct

SEQ ID NO: 1127 - DNA, 530 bp, Artificial Sequence
  chemically treated genomic DNA (Homo sapiens) CpG-island No: 1127
ggtttcgtttttacgtattgcggtagcggtttcgtttttttagtaggtttcgtttttttagtaggtttcgttttcgtaggtttggtttttacgtattgcggtagtagtttcgatacgttacgtttaggttcgggtggtttcgttttaggtttcgttttcgtttattgcggtagtagtttcgatatatgacgcgtaggttcggtaggtttcgtttcgtttttttatagattacgtttttacgtattgcggtagcggtttcggtatatgacgtttaggttcgggtggtcgcggtagcgcgcggcgcgtagttcgtattcgtcgcggtaggtggcgtcgtttgagtcgtagatttgtagtcgcgtcgggagtttcgagtagtcgggcgcgtattcgtagcgcgggcggttttttagtatgcggtacgttttgttcgggtcgtattttacgtcgtcgtacgaatttgcggatagaggatacgcgcgtggggtcgggcgcgggagggtttcgggcgtggggtcgcgcgaaggttt

SEQ ID NO: 1128 - DNA, 530 bp, Artificial Sequence
  chemically treated genomic DNA (Homo sapiens) CpG-island No: 1128
aaaccttcgcgcgaccccacgcccgaaaccctcccgcgcccgaccccacgcgcgtatcctctatccgcaaattcgtacgacgacgtaaaatacgacccgaacaaaacgtaccgcatactaaaaaaccgcccgcgctacgaatacgcgcccgactactcgaaactcccgacgcgactacaaatctacgactcaaacgacgccacctaccgcgacgaatacgaactacgcgccgcgcgctaccgcgaccacccgaacctaaacgtcatataccgaaaccgctaccgcaatacgtaaaaacgtaatctataaaaaaacgaaacgaaacctaccgaacctacgcgtcatatatcgaaactactaccgcaataaacgaaaacgaaacctaaaacgaaaccacccgaacctaaacgtaacgtatcgaaactactaccgcaatacgtaaaaaccaaacctacgaaaacgaaacctactaaaaaaacgaaacctactaaaaaaacgaaaccgctaccgcaatacgtaaaaacgaaacc

SEQ ID NO: 1129 - DNA, 1086 bp, Artificial Sequence
  chemically treated genomic DNA (Homo sapiens) CpG-island No: 1129
gtggcgcggcgtcggggttcggggtcggggggcgttgttcgagggtacgtgcgcgggcgcgcgttttgggagtggtcgcggggtggtgggaggggcgggtaggggcggggtcgcggcggcgcgcggaggtcgagttcggttgggtttggcgaggttgcggcgcggttatcggcgggagtgtagcggttattgtatttagagatttaaaattttaaattcgggatttgggggcgttgagtcgggtcgggaagtagagtttggtcgtgaggaatagtcgttcgttgttgtttgtttttttgcggatagcgtttttttcgatttcgtttaggaagtggtgggggcggcgtggttttcgtcgggaggcgttcgaacgttcgttaggagagagaaaggatttttttgtgtttggagttcgtattcgggcgcggagggagcggcggtaggttttcgttttcggtattatgggttgtacgttgagcgtcgaggataaggcggcggtggagcggagtaagatgatcgatcgtaattttcgtgaggacggcgagaaggcggcgcgcgaggttaagttgttgttgttcggtaagggcggtcgggtcggggttcgggggtcggcgggggatcgggtgcggcgttgcgcggttttcggcgtttggaaattcggagggaagggggaggaagcgttcgaggaggtttttgagcgggagttgggttcggcggtgcggaggtaaggcgggtttttttttttcggtgtttggttttttttcgtttcggcgggcgaggatttttcgcggcggggcgggcgcgttattttattcggatgttttcgtgcgatttagtaaagagtttaggcgcgagttcgaggcggcgggtcgcgtggaaattttttgttttgaagtttagtttagttttgtaaagatgaaggggtattcgcggttagaaaatgaaaatattttttttttcgcgttattaattttttttcggaaaattttttttcgtgtgcggtgtaggttgtgtttcgattgtggtttttttatgtttagagtgttacgtttggtgaaattagtgtattttttgtggggtttttga

SEQ ID NO: 1130 - DNA, 1086 bp, Artificial Sequence
  chemically treated genomic DNA (Homo sapiens) CpG-island No: 1130
tcaaaaaccccacaaaaaatacactaatttcaccaaacgtaacactctaaacataaaaaaaccacaatcgaaacacaacctacaccgcacacgaaaaaaaattttccgaaaaaaaattaataacgcgaaaaaaaaaatattttcattttctaaccgcgaataccccttcatctttacaaaactaaactaaacttcaaaacaaaaaatttccacgcgacccgccgcctcgaactcgcgcctaaactctttactaaatcgcacgaaaacatccgaataaaataacgcgcccgccccgccgcgaaaaatcctcgcccgccgaaacgaaaaaaaaccaaacaccgaaaaaaaaaaacccgccttacctccgcaccgccgaacccaactcccgctcaaaaacctcctcgaacgcttcctcccccttccctccgaatttccaaacgccgaaaaccgcgcaacgccgcacccgatcccccgccgacccccgaaccccgacccgaccgcccttaccgaacaacaacaacttaacctcgcgcgccgccttctcgccgtcctcacgaaaattacgatcgatcatcttactccgctccaccgccgccttatcctcgacgctcaacgtacaacccataataccgaaaacgaaaacctaccgccgctccctccgcgcccgaatacgaactccaaacacaaaaaaatcctttctctctcctaacgaacgttcgaacgcctcccgacgaaaaccacgccgcccccaccacttcctaaacgaaatcgaaaaaaacgctatccgcaaaaaaacaaacaacaacgaacgactattcctcacgaccaaactctacttcccgacccgactcaacgcccccaaatcccgaatttaaaattttaaatctctaaatacaataaccgctacactcccgccgataaccgcgccgcaacctcgccaaacccaaccgaactcgacctccgcgcgccgccgcgaccccgcccctacccgcccctcccaccaccccgcgaccactcccaaaacgcgcgcccgcgcacgtaccctcgaacaacgccccccgaccccgaaccccgacgccgcgccac

SEQ ID NO: 1131 - DNA, 1086 bp, Artificial Sequence
  chemically treated genomic DNA (Homo sapiens) CpG-island No: 1131
ttagaggttttataaaaggtgtattgattttattaaacgtggtattttgggtatgagaaaattatagtcgaaatataatttatatcgtatacgaagaagggtttttcgggagggggttggtggcgcgggggggggggtgtttttattttttagtcgcgaatgtttttttatttttataaggttgagttaaattttaaagtaaagggtttttacgcgattcgtcgtttcggattcgcgtttgggttttttgttgggtcgtacgaaagtattcgagtgaagtgacgcgttcgtttcgtcgcggggagttttcgttcgtcggggcggagagagattagatatcgggagagggggattcgttttgttttcgtatcgtcggatttagttttcgtttagaagttttttcgggcgttttttttttttttttttcgggtttttaaacgtcgagggtcgcgtagcgtcgtattcggtttttcgtcgattttcgggtttcgattcggtcgtttttatcgagtagtagtagtttgatttcgcgcgtcgttttttcgtcgtttttacggaggttgcggtcgattattttatttcgttttatcgtcgttttgttttcggcgtttagcgtgtagtttatggtgtcgaaagcgagagtttgtcgtcgtttttttcgcgttcgagtgcgggttttaagtataggggaatttttttttttttttagcgggcgttcgaacgtttttcgacgggggttacgtcgtttttattattttttaagcggagtcgagggagacgttgttcgtaaaggggtagatagtaacgggcggttgttttttacgattaggttttgtttttcggttcggtttagcgtttttaagtttcgggtttggggttttgaatttttgggtatagtggtcgttgtattttcgtcggtggtcgcgtcgtagtttcgttaagtttagtcgagttcggttttcgcgcgtcgtcgcggtttcgtttttgttcgttttttttattatttcgcgattatttttagagcgcgcgttcgcgtacgtgttttcggatagcgtttttcggtttcggatttcggcgtcgcgttat

SEQ ID NO: 1132 - DNA, 1086 bp, Artificial Sequence
  chemically treated genomic DNA (Homo sapiens) CpG-island No: 1132
ataacgcgacgccgaaatccgaaaccgaaaaacgctatccgaaaacacgtacgcgaacgcgcgctctaaaaataatcgcgaaataataaaaaaaacgaacaaaaacgaaaccgcgacgacgcgcgaaaaccgaactcgactaaacttaacgaaactacgacgcgaccaccgacgaaaatacaacgaccactatacccaaaaattcaaaaccccaaacccgaaacttaaaaacgctaaaccgaaccgaaaaacaaaacctaatcgtaaaaaacaaccgcccgttactatctacccctttacgaacaacgtctccctcgactccgcttaaaaaataataaaaacgacgtaacccccgtcgaaaaacgttcgaacgcccgctaaaaaaaaaaaaaaattcccctatacttaaaacccgcactcgaacgcgaaaaaaacgacgacaaactctcgctttcgacaccataaactacacgctaaacgccgaaaacaaaacgacgataaaacgaaataaaataatcgaccgcaacctccgtaaaaacgacgaaaaaacgacgcgcgaaatcaaactactactactcgataaaaacgaccgaatcgaaacccgaaaatcgacgaaaaaccgaatacgacgctacgcgaccctcgacgtttaaaaacccgaaaaaaaaaaaaaaaaaacgcccgaaaaaacttctaaacgaaaactaaatccgacgatacgaaaacaaaacgaatccccctctcccgatatctaatctctctccgccccgacgaacgaaaactccccgcgacgaaacgaacgcgtcacttcactcgaatactttcgtacgacccaacaaaaaacccaaacgcgaatccgaaacgacgaatcgcgtaaaaaccctttactttaaaatttaactcaaccttataaaaataaaaaaacattcgcgactaaaaaataaaaacacccccccccccgcgccaccaaccccctcccgaaaaacccttcttcgtatacgatataaattatatttcgactataattttctcatacccaaaataccacgtttaataaaatcaatacaccttttataaaacctctaa

SEQ ID NO: 1133 - DNA, 781 bp, Artificial Sequence
  chemically treated genomic DNA (Homo sapiens) CpG-island No: 1133
gtttattcgtaacgcgtatagtatttattagcggtcgcggaagcgttttagttaggacgtttatcgtcgtaatagcgttcgttttttgtagtagcgacgtcgttaggcgcggtcgggatcgtagagtttcgggagttcgttcggtgagtgtagcgggagagggtaggaagggtaagtcgtagaggcggagttagcgggagaggcggggttagaggtagggttagagtagcggggcgggattagagggcggaattagagggagaggcggggattggaggcggggttagaggaggagttagcgttagggggcggagcgatttttaagaggcggagttagagggagaggtataagcgggaggcgaggttagagcgcggagtaggagttggagaacgcggcggggcgaggttagagagcgttgtgggcggggttagtgggcggggcggggcgtttgattcggtttcgttttttgttcgtagaggaggagcggtagacgtagcgttttaaatcgtagtcggcggtgttttcgcggtcgagcgtcgattttattttgaatcgttgtagcgagagtattaagcggaagttggcgtttgtcgtttgaggttggagcgtagtttttagttagcgtttcggtttttgtcgtttcgtgtttgtatatacgtgttttatagagtttggcgtttggacgtcgagggtagtttcgatttttgtttagcgcggttttcgttatttttaataaatgttgtttggagtggatcgaggttttgtaggaatgtagggagg

SEQ ID NO: 1134 - DNA, 781 bp, Artificial Sequence
  chemically treated genomic DNA (Homo sapiens) CpG-island No: 1134
cctccctacattcctacaaaacctcgatccactccaaacaacatttattaaaaataacgaaaaccgcgctaaacaaaaatcgaaactaccctcgacgtccaaacgccaaactctataaaacacgtatatacaaacacgaaacgacaaaaaccgaaacgctaactaaaaactacgctccaacctcaaacgacaaacgccaacttccgcttaatactctcgctacaacgattcaaaataaaatcgacgctcgaccgcgaaaacaccgccgactacgatttaaaacgctacgtctaccgctcctcctctacgaacaaaaaacgaaaccgaatcaaacgccccgccccgcccactaaccccgcccacaacgctctctaacctcgccccgccgcgttctccaactcctactccgcgctctaacctcgcctcccgcttatacctctccctctaactccgcctcttaaaaatcgctccgccccctaacgctaactcctcctctaaccccgcctccaatccccgcctctccctctaattccgccctctaatcccgccccgctactctaaccctacctctaaccccgcctctcccgctaactccgcctctacgacttacccttcctaccctctcccgctacactcaccgaacgaactcccgaaactctacgatcccgaccgcgcctaacgacgtcgctactacaaaaaacgaacgctattacgacgataaacgtcctaactaaaacgcttccgcgaccgctaataaatactatacgcgttacgaataaac

SEQ ID NO: 1135 - DNA, 781 bp, Artificial Sequence
  chemically treated genomic DNA (Homo sapiens) CpG-island No: 1135
tttttttgtatttttgtagagtttcggtttattttaagtaatatttattgagggtggcgggagtcgcgttggataggggtcggggttgttttcggcgtttagacgttaggttttatagaatacgtatgtataggtacggggcggtaagggtcgagacgttagttggggattgcgttttagttttagacggtagacgttagttttcgtttggtgttttcgttgtagcggtttaggatgaggtcggcgttcggtcgcgggggtatcgtcggttgcggtttagagcgttgcgtttgtcgttttttttttgcgggtagagagcggggtcgagttagacgtttcgtttcgtttattggtttcgtttatagcgttttttggtttcgtttcgtcgcgttttttaatttttgtttcgcgttttggtttcgtttttcgtttgtgtttttttttttgatttcgttttttagggatcgtttcgttttttagcgttggttttttttttgatttcgtttttagttttcgtttttttttttgatttcgttttttggtttcgtttcgttattttggttttatttttggtttcgtttttttcgttgatttcgtttttacggtttgttttttttgttttttttcgttgtatttatcgagcgggttttcggggttttgcggtttcggtcgcgtttggcggcgtcgttgttgtagaaaacggacgttgttgcggcgataggcgttttggttgaggcgttttcgcgatcgttggtggatgttgtgcgcgttgcggatggat

SEQ ID NO: 1136 - DNA, 781 bp, Artificial Sequence
  chemically treated genomic DNA (Homo sapiens) CpG-island No: 1136
atccatccgcaacgcgcacaacatccaccaacgatcgcgaaaacgcctcaaccaaaacgcctatcgccgcaacaacgtccgttttctacaacaacgacgccgccaaacgcgaccgaaaccgcaaaaccccgaaaacccgctcgataaatacaacgaaaaaaaacaaaaaaaacaaaccgtaaaaacgaaatcaacgaaaaaaacgaaaccaaaaataaaaccaaaataacgaaacgaaaccaaaaaacgaaatcaaaaaaaaaaacgaaaactaaaaacgaaatcaaaaaaaaaaccaacgctaaaaaacgaaacgatccctaaaaaacgaaatcaaaaaaaaaaacacaaacgaaaaacgaaaccaaaacgcgaaacaaaaattaaaaaacgcgacgaaacgaaaccaaaaaacgctataaacgaaaccaataaacgaaacgaaacgtctaactcgaccccgctctctacccgcaaaaaaaaaacgacaaacgcaacgctctaaaccgcaaccgacgatacccccgcgaccgaacgccgacctcatcctaaaccgctacaacgaaaacaccaaacgaaaactaacgtctaccgtctaaaactaaaacgcaatccccaactaacgtctcgacccttaccgccccgtacctatacatacgtattctataaaacctaacgtctaaacgccgaaaacaaccccgacccctatccaacgcgactcccgccaccctcaataaatattacttaaaataaaccgaaactctacaaaaatacaaaaaaa

SEQ ID NO: 1137 - DNA, 684 bp, Artificial Sequence
  chemically treated genomic DNA (Homo sapiens) CpG-island No: 1137
gtcgtcgcgattttcggcgtcggagaggcgaaataagagggggttttcgggtttttaggtatggtttagtcgtttaaggcgaagcgtacgtggtagttggcgggaaatttttggggggtggagtttcggttcgaggttcggtcgtttcgtattacgttatcgagtagttttttttttttttgttataagtcgtacgcgcggaagtaaatatttttacgttattagggcgcgttttcgtttttttttttttatttttttagatcggtggacgtgttcgtttttattcggggttaggtttatgtttcggtttttcgtagtcgcgggtagggcgttaaggcggtaggaggagggtgagcggttaagagatttttaggaagagcggttttcggttgtttgtatcgtcgatagaggtgcggttcgcgggacggtacggaagttagcgggagttacggcgtgggggttttggtggggggatgaaagtacgtttttggtaggttgagaagagtagtgaggaagtcgtggcgtttttttggttttttaagttcgaggcgaattttgcgtttaatgagtattttgttttagaggggggcggttttagatttaagttaggcgaaaattttattggggggcgaaaaagtgaattttaacgttcgaaatgtattttgtttttaaataggtttatag

SEQ ID NO: 1138 - DNA, 684 bp, Artificial Sequence
  chemically treated genomic DNA (Homo sapiens) CpG-island No: 1138
ctataaacctatttaaaaacaaaatacatttcgaacgttaaaattcactttttcgccccccaataaaattttcgcctaacttaaatctaaaaccgcccccctctaaaacaaaatactcattaaacgcaaaattcgcctcgaacttaaaaaaccaaaaaaacgccacgacttcctcactactcttctcaacctaccaaaaacgtactttcatccccccaccaaaacccccacgccgtaactcccgctaacttccgtaccgtcccgcgaaccgcacctctatcgacgatacaaacaaccgaaaaccgctcttcctaaaaatctcttaaccgctcaccctcctcctaccgccttaacgccctacccgcgactacgaaaaaccgaaacataaacctaaccccgaataaaaacgaacacgtccaccgatctaaaaaaataaaaaaaaaaaaacgaaaacgcgccctaataacgtaaaaatatttacttccgcgcgtacgacttataacaaaaaaaaaaaaaactactcgataacgtaatacgaaacgaccgaacctcgaaccgaaactccaccccccaaaaatttcccgccaactaccacgtacgcttcgccttaaacgactaaaccatacctaaaaacccgaaaaccccctcttatttcgcctctccgacgccgaaaatcgcgacgac

SEQ ID NO: 1139 - DNA, 684 bp, Artificial Sequence
  chemically treated genomic DNA (Homo sapiens) CpG-island No: 1139
ttatgagtttgtttaagaatagaatgtatttcgggcgttggggtttattttttcgttttttagtaaggttttcgtttaatttgaatttgggatcgtttttttttaaggtaaagtgtttattggacgtaaagttcgtttcgggtttggaaagttaggagaacgttacggtttttttattattttttttagtttgttaaaggcgtatttttatttttttattaaaatttttacgtcgtaattttcgttggttttcgtatcgtttcgcggatcgtatttttatcggcgatgtaaatagtcgagagtcgttttttttggaggttttttgatcgtttattttttttttgtcgttttggcgttttgttcgcgattgcgggaaatcgggatatagatttggtttcgagtggaggcgagtacgtttatcgatttgaggagatgggaggggaaagacgaggacgcgttttgatgacgtagaggtgtttattttcgcgcgtgcgatttgtagtaaggggagggggagttgttcgatgacgtggtacggggcggtcggatttcgagtcgaggttttattttttagggatttttcgttaattgttacgtgcgtttcgttttgggcggttgagttatatttgagggttcgaagatttttttttgtttcgttttttcggcgtcgaaggtcgcgacgat

SEQ ID NO: 1140 - DNA, 684 bp, Artificial Sequence
  chemically treated genomic DNA (Homo sapiens) CpG-island No: 1140
atcgtcgcgaccttcgacgccgaaaaaacgaaacaaaaaaaaatcttcgaaccctcaaatataactcaaccgcccaaaacgaaacgcacgtaacaattaacgaaaaatccctaaaaaataaaacctcgactcgaaatccgaccgccccgtaccacgtcatcgaacaactccccctccccttactacaaatcgcacgcgcgaaaataaacacctctacgtcatcaaaacgcgtcctcgtctttcccctcccatctcctcaaatcgataaacgtactcgcctccactcgaaaccaaatctatatcccgatttcccgcaatcgcgaacaaaacgccaaaacgacaaaaaaaaaataaacgatcaaaaaacctccaaaaaaaacgactctcgactatttacatcgccgataaaaatacgatccgcgaaacgatacgaaaaccaacgaaaattacgacgtaaaaattttaataaaaaaataaaaatacgcctttaacaaactaaaaaaaataataaaaaaaccgtaacgttctcctaactttccaaacccgaaacgaactttacgtccaataaacactttaccttaaaaaaaaacgatcccaaattcaaattaaacgaaaaccttactaaaaaacgaaaaaataaaccccaacgcccgaaatacattctattcttaaacaaactcataa

SEQ ID NO: 1141 - DNA, 783 bp, Artificial Sequence
  chemically treated genomic DNA (Homo sapiens) CpG-island No: 1141
gttgttggcggtgcgcgattcgcgtttgtatacgtttatgtattattttttttgttatttggttttggtagacgcgggttttattattagcgtggtgtcgtcgttgttggttaatttgcgcggattagcgttttggttgtcgcgtagttattgtacggtttagttgtgcgtatcgttggttttgggttcggtcgaatgcgtttttttggcggtgatggttttggatcgcgcggtcgtagtgtgtcgttcgttgcgttatgcggggttcgttttttcgcgtttatgtcgtacgttggttagcgttttttggttaagcggttttattaattcggttgcgtaaatcgcgtttttggttgagcggtcgttgtgcgcgtttcgtttgttggattattttatttgtgagttgtcggcgttgtttaagttggtttgcggaggcgacggagatattatcgagaattagatgttcgtcgttcgcgtggttattttgttgttgtcgtttgtcgttattttggttttttacggtgtcgtggttcgagttgtttgttgtatgcggtttagcggaggtcggaggagggcggtgggtacgtgtgggttttatttgatagtcgtttgtttgttttacggttcggttatttatatttatttgtagttcgcgtagcgttataattaggtacggggtaagttcgtatcgtttttttatatcgtggttatatttgtttttaattcgtttatttatatttttaggaataagaaagtgaagggggtagcgaggaggttgttgcg

SEQ ID NO: 1142 - DNA, 783 bp, Artificial Sequence
  chemically treated genomic DNA (Homo sapiens) CpG-island No: 1142
cgcaacaacctcctcgctacccccttcactttcttattcctaaaaatataaataaacgaattaaaaacaaatataaccacgatataaaaaaacgatacgaacttaccccgtacctaattataacgctacgcgaactacaaataaatataaataaccgaaccgtaaaacaaacaaacgactatcaaataaaacccacacgtacccaccgccctcctccgacctccgctaaaccgcatacaacaaacaactcgaaccacgacaccgtaaaaaaccaaaataacgacaaacgacaacaacaaaataaccacgcgaacgacgaacatctaattctcgataatatctccgtcgcctccgcaaaccaacttaaacaacgccgacaactcacaaataaaataatccaacaaacgaaacgcgcacaacgaccgctcaaccaaaaacgcgatttacgcaaccgaattaataaaaccgcttaaccaaaaaacgctaaccaacgtacgacataaacgcgaaaaaacgaaccccgcataacgcaacgaacgacacactacgaccgcgcgatccaaaaccatcaccgccaaaaaaacgcattcgaccgaacccaaaaccaacgatacgcacaactaaaccgtacaataactacgcgacaaccaaaacgctaatccgcgcaaattaaccaacaacgacgacaccacgctaataataaaacccgcgtctaccaaaaccaaataacaaaaaaaataatacataaacgtatacaaacgcgaatcgcgcaccgccaacaac

SEQ ID NO: 1143 - DNA, 783 bp, Artificial Sequence
  chemically treated genomic DNA (Homo sapiens) CpG-island No: 1143
cgtagtagttttttcgttgttttttttatttttttatttttgagggtgtagatgagcgggttgagagtaggtgtgattacggtgtagaagagcgatacgaatttgtttcgtgtttggttgtagcgttgcgcgggttgtaggtaggtgtagatggtcgagtcgtagaataggtagacggttgttaggtgggatttatacgtgtttatcgttttttttcggttttcgttgaatcgtatgtaatagatagttcgggttacggtatcgtaggaggttaggatgacggtaaacggtagtagtaggatgattacgcgggcggcgaatatttggttttcggtagtgttttcgtcgttttcgtaggttagtttgagtaacgtcggtagtttatagatgaagtggtttagtaggcggggcgcgtatagcggtcgtttagttaggagcgcggtttgcgtaatcgagttggtgaggtcgtttagttaggaggcgttggttagcgtgcgatataggcgcggggagacgagtttcgtatagcgtagcgggcggtatattgcggtcgcgcggtttagagttattatcgttaggaggacgtattcggtcgaatttagagttagcgatgcgtatagttgggtcgtgtagtggttgcgcggtagttagagcgttggttcgcgtaggttggttagtagcggcggtattacgttagtagtgaagttcgcgtttattaaggttaggtggtagaggaagtagtatatgggcgtgtgtaggcgcgggtcgcgtatcgttagtagt

SEQ ID NO: 1144 - DNA, 783 bp, Artificial Sequence
  chemically treated genomic DNA (Homo sapiens) CpG-island No: 1144
actactaacgatacgcgacccgcgcctacacacgcccatatactacttcctctaccacctaaccttaataaacgcgaacttcactactaacgtaataccgccgctactaaccaacctacgcgaaccaacgctctaactaccgcgcaaccactacacgacccaactatacgcatcgctaactctaaattcgaccgaatacgtcctcctaacgataataactctaaaccgcgcgaccgcaatataccgcccgctacgctatacgaaactcgtctccccgcgcctatatcgcacgctaaccaacgcctcctaactaaacgacctcaccaactcgattacgcaaaccgcgctcctaactaaacgaccgctatacgcgccccgcctactaaaccacttcatctataaactaccgacgttactcaaactaacctacgaaaacgacgaaaacactaccgaaaaccaaatattcgccgcccgcgtaatcatcctactactaccgtttaccgtcatcctaacctcctacgataccgtaacccgaactatctattacatacgattcaacgaaaaccgaaaaaaaacgataaacacgtataaatcccacctaacaaccgtctacctattctacgactcgaccatctacacctacctacaacccgcgcaacgctacaaccaaacacgaaacaaattcgtatcgctcttctacaccgtaatcacacctactctcaacccgctcatctacaccctcaaaaataaaaaaataaaaaaaacaacgaaaaaactactacg

SEQ ID NO: 1145 - DNA, 949 bp, Artificial Sequence
  chemically treated genomic DNA (Homo sapiens) CpG-island No: 1145
gggcgtaggattcggggagtcgcgtcgggaggagggtcgggcgggttttagttttttttcgtttttaggtttttattttatgaggtatttttatatcgttatgtttcggttcggtcgcggggagtttcgttttattatcgtgggttacgtggacgatacgttgttcgtgaggttcgatagcgacgttacgagttcgaggaaggagtcgcgggcgttatggatagagtaggaggggtcggagtattgggatcgggagatatagatttttaagattaatatatagatttatcgagagaatttgcgtatcgcgtttcgttattataattagagcgaggtcggtgagtgatttcggttcggggcgtaggttacgattttttattttttacgtacggttcgggtcgtttcgagttttcgggttcgagattcgttttcgaggtcgcgggattcgtttagattttcgatcggcgagagttttaggcgcgtttattcggttttatttttagttgaggttaaaattttcgcgggttggtcggggcggggcggggttcgggggacggggttgatcgcggggtcggggttagggttttatattatttagaggatgtacggttgcgacgtggggtcggacgggcgtttttttcgcgggtatgattaggacgtttacgacggtaaggattatatcgttttgaacgaggatttgagtttttggatcgcggcggatatcgcggtttagattatttagcgtaagtgggaggcggttcgtgtggcggagtagttgagagtttatttggagggtttgtgcgtggagtcgtttcgtagatatttggagaacgggaaggagacgttgtagcgcgcgggtattaggggtagtggggagttttttttattttttataggtcgtcggggatggttttttacgagaagaggaggaaaatgggattagcgttag

SEQ ID NO: 1146 - DNA, 949 bp, Artificial Sequence
  chemically treated genomic DNA (Homo sapiens) CpG-island No: 1146
ctaacgctaatcccattttcctcctcttctcgtaaaaaaccatccccgacgacctataaaaaataaaaaaaactccccactacccctaatacccgcgcgctacaacgtctccttcccgttctccaaatatctacgaaacgactccacgcacaaaccctccaaataaactctcaactactccgccacacgaaccgcctcccacttacgctaaataatctaaaccgcgatatccgccgcgatccaaaaactcaaatcctcgttcaaaacgatataatccttaccgtcgtaaacgtcctaatcatacccgcgaaaaaaacgcccgtccgaccccacgtcgcaaccgtacatcctctaaataatataaaaccctaaccccgaccccgcgatcaaccccgtcccccgaaccccgccccgccccgaccaacccgcgaaaattttaacctcaactaaaaataaaaccgaataaacgcgcctaaaactctcgccgatcgaaaatctaaacgaatcccgcgacctcgaaaacgaatctcgaacccgaaaactcgaaacgacccgaaccgtacgtaaaaaataaaaaatcgtaacctacgccccgaaccgaaatcactcaccgacctcgctctaattataataacgaaacgcgatacgcaaattctctcgataaatctatatattaatcttaaaaatctatatctcccgatcccaatactccgacccctcctactctatccataacgcccgcgactccttcctcgaactcgtaacgtcgctatcgaacctcacgaacaacgtatcgtccacgtaacccacgataataaaacgaaactccccgcgaccgaaccgaaacataacgatataaaaatacctcataaaataaaaacctaaaaacgaaaaaaaactaaaacccgcccgaccctcctcccgacgcgactccccgaatcctacgccc

SEQ ID NO: 1147 - DNA, 949 bp, Artificial Sequence
  chemically treated genomic DNA (Homo sapiens) CpG-island No: 1147
ttagcgttgattttatttttttttttttttcgtgggaggttattttcggcgatttataggagatggggaaggttttttattgtttttggtattcgcgcgttgtagcgtttttttttcgttttttaggtatttgcggagcgattttacgtataggttttttaggtaggtttttagttgtttcgttatacgggtcgttttttatttgcgttgggtgatttgagtcgcggtgttcgtcgcggtttaggagtttaggttttcgtttagggcgatgtaatttttgtcgtcgtaggcgttttggttatattcgcggaggaggcgttcgttcggttttacgtcgtagtcgtatattttttggatgatgtgagattttggtttcggtttcgcggttagtttcgtttttcgagtttcgtttcgtttcgattaattcgcggggattttggttttaattgaaaatgaaatcgggtaaacgcgtttggggttttcgtcggtcgagggtttgggcgggtttcgcggtttcgggggcggatttcggattcggagattcggggcgattcgggtcgtacgtgggggatggggagtcgtgatttgcgtttcgggtcggggttatttatcggtttcgttttggttgtagtagcggagcgcggtgcgtaggttttttcggtaagtttgtgtgttggttttggagatttgtgtttttcggttttaatatttcggttttttttgttttatttatggcgttcgcggtttttttttcggattcgtggcgtcgttgtcgaattttacgaatagcgtgtcgtttacgtagtttacggtgatgaagcggggtttttcgcggtcgggtcgggatatggcggtgtagaaatattttatggagtgggagtttgggggcgaggaggggttgagattcgttcgatttttttttcggcgcggtttttcgggttttgcgttt

SEQ ID NO: 1148 - DNA, 949 bp, Artificial Sequence
  chemically treated genomic DNA (Homo sapiens) CpG-island No: 1148
aaacgcaaaacccgaaaaaccgcgccgaaaaaaaaatcgaacgaatctcaacccctcctcgcccccaaactcccactccataaaatatttctacaccgccatatcccgacccgaccgcgaaaaaccccgcttcatcaccgtaaactacgtaaacgacacgctattcgtaaaattcgacaacgacgccacgaatccgaaaaaaaaaccgcgaacgccataaataaaacaaaaaaaaccgaaatattaaaaccgaaaaacacaaatctccaaaaccaacacacaaacttaccgaaaaaacctacgcaccgcgctccgctactacaaccaaaacgaaaccgataaataaccccgacccgaaacgcaaatcacgactccccatcccccacgtacgacccgaatcgccccgaatctccgaatccgaaatccgcccccgaaaccgcgaaacccgcccaaaccctcgaccgacgaaaaccccaaacgcgtttacccgatttcattttcaattaaaaccaaaatccccgcgaattaatcgaaacgaaacgaaactcgaaaaacgaaactaaccgcgaaaccgaaaccaaaatctcacatcatccaaaaaatatacgactacgacgtaaaaccgaacgaacgcctcctccgcgaatataaccaaaacgcctacgacgacaaaaattacatcgccctaaacgaaaacctaaactcctaaaccgcgacgaacaccgcgactcaaatcacccaacgcaaataaaaaacgacccgtataacgaaacaactaaaaacctacctaaaaaacctatacgtaaaatcgctccgcaaatacctaaaaaacgaaaaaaaaacgctacaacgcgcgaataccaaaaacaataaaaaaccttccccatctcctataaatcgccgaaaataacctcccacgaaaaaaaaaaaaaaataaaatcaacgctaa

SEQ ID NO: 1149 - DNA, 570 bp, Artificial Sequence
  chemically treated genomic DNA (Homo sapiens) CpG-island No: 1149
aggtgtgacgtgtagatgggatgttcgtcgttatgacgttgtcgagattcgcggtgattgcgttagagttttattcggggaggtgagtagtagcgggacgggggaacggcggggtagttaagtaacgtcggacgcgttgacgtcgtcggggcggtaaaacgttcgttcgggttcgaggcgggcggaggtagttgtggttacgtgcggggggtcggtgacgtagtcgcggggcgttgggacgcggtttgcggagtcggtcggcgagcgtaggttttaggttcgggcgcggcggcgggatagtatttattttttcggtttcgggttcgggagtgcggggcgcggagtcgtcggagcgttgttttttttttttttttttttttcgttttcgtttcgcggcgcgatatataatattcgtcggaagcggaagtcgcgtcgaggttcgtgttagtggaagttggggtgtcggcgggcggtcgcggtcgggtttagcggtgtttgcggaagaaggaggaggagggttggcgatgagaagtagtagggggaattaagggtaagaagggatttagaggg

SEQ ID NO: 1150 - DNA, 570 bp, Artificial Sequence
  chemically treated genomic DNA (Homo sapiens) CpG-island No: 1150
ccctctaaatcccttcttacccttaattccccctactacttctcatcgccaaccctcctcctccttcttccgcaaacaccgctaaacccgaccgcgaccgcccgccgacaccccaacttccactaacacgaacctcgacgcgacttccgcttccgacgaatattatatatcgcgccgcgaaacgaaaacgaaaaaaaaaaaaaaaaaaaaaacaacgctccgacgactccgcgccccgcactcccgaacccgaaaccgaaaaaataaatactatcccgccgccgcgcccgaacctaaaacctacgctcgccgaccgactccgcaaaccgcgtcccaacgccccgcgactacgtcaccgaccccccgcacgtaaccacaactacctccgcccgcctcgaacccgaacgaacgttttaccgccccgacgacgtcaacgcgtccgacgttacttaactaccccgccgttcccccgtcccgctactactcacctccccgaataaaactctaacgcaatcaccgcgaatctcgacaacgtcataacgacgaacatcccatctacacgtcacacct

SEQ ID NO: 1151 - DNA, 570 bp, Artificial Sequence
  chemically treated genomic DNA (Homo sapiens) CpG-island No: 1151
ttttttgggtttttttttgtttttgattttttttgttgttttttatcgttagttttttttttttttttttcgtaggtatcgttagattcggtcgcggtcgttcgtcgatattttagtttttattgatacgagtttcggcgcggttttcgttttcggcgagtattgtgtgtcgcgtcgcggggcgggggcgaggggaggaggaaggagggaggtagcgtttcggcggtttcgcgtttcgtattttcggattcgaagtcgggaaggtaggtgttgtttcgtcgtcgcgttcgagtttggggtttgcgttcgtcggtcggtttcgtaagtcgcgttttagcgtttcgcgattgcgttatcggtttttcgtacgtaattatagttgttttcgttcgtttcgggttcgggcggacgttttgtcgtttcggcgacgttagcgcgttcggcgttgtttggttatttcgtcgttttttcgtttcgttgttgtttattttttcgggtgaaattttgacgtagttatcgcgggtttcggtagcgttatagcggcgggtattttatttgtacgttatattt

SEQ ID NO: 1152 - DNA, 570 bp, Artificial Sequence
  chemically treated genomic DNA (Homo sapiens) CpG-island No: 1152
aaatataacgtacaaataaaatacccgccgctataacgctaccgaaacccgcgataactacgtcaaaatttcacccgaaaaaataaacaacaacgaaacgaaaaaacgacgaaataaccaaacaacgccgaacgcgctaacgtcgccgaaacgacaaaacgtccgcccgaacccgaaacgaacgaaaacaactataattacgtacgaaaaaccgataacgcaatcgcgaaacgctaaaacgcgacttacgaaaccgaccgacgaacgcaaaccccaaactcgaacgcgacgacgaaacaacacctaccttcccgacttcgaatccgaaaatacgaaacgcgaaaccgccgaaacgctacctccctccttcctcctcccctcgcccccgccccgcgacgcgacacacaatactcgccgaaaacgaaaaccgcgccgaaactcgtatcaataaaaactaaaatatcgacgaacgaccgcgaccgaatctaacgatacctacgaaaaaaaaaaaaaaaaaactaacgataaaaaacaacaaaaaaaatcaaaaacaaaaaaaaacccaaaaaa

SEQ ID NO: 1153 - DNA, 839 bp, Artificial Sequence
  chemically treated genomic DNA (Homo sapiens) CpG-island No: 1153
ttcgcgcgttgtagcgtttttttttcgttttttaggtatttgcggagttattttacgaattcgttttttaggtaggtttttagttgtttcgttatacgggtcgttttttatttgcgtttggtgatttgagttgttatgttcgtcgcggtttaggagcgtaggttttcgtttagagcgatgtaatttttgtcgtcgtaggcgtgttgtttatattcgcggaggaagcgttcgtcgggttttacgtcgtagttatatattatttgtatggtgtgggaatttggtttcgttttcgcggttagttcggtttttcgagtttcgttttgtttcgattaattcgcggggattttggtttaaattgaaaatgaaatcgggtaaaggcgtttgggttttttttaggttaagggtttcggggtttcgcggtttcggggaggatttcggatttagagattcgaggcgattcggtttttcgtgggggatggggaggggtcgtgatttgcgtttcgggtcggggttatttatcgttttcgttttggttgtagtagcggagcgcgattcgtaggttttttcgtttagttcgtgtttgggttttgtagatttgtgtgtttcggttttaatatttcggtttttttcgttttatttacggcgttcgcggtttttttttcggattcgcgtcgtcgttgtcgaatcgtacgaattgcgtatagtttacgtagtcgacggagatgaagcggggtttttcgcggtcgggtcgggatatggtggtgtagaaatattttatggagtgggagtttgggagcgaggaggagttgagattcgttcgatttttttttttgcgcggt

SEQ ID NO: 1154 - DNA, 839 bp, Artificial Sequence
  chemically treated genomic DNA (Homo sapiens) CpG-island No: 1154
accgcgcaaaaaaaaaaatcgaacgaatctcaactcctcctcgctcccaaactcccactccataaaatatttctacaccaccatatcccgacccgaccgcgaaaaaccccgcttcatctccgtcgactacgtaaactatacgcaattcgtacgattcgacaacgacgacgcgaatccgaaaaaaaaaccgcgaacgccgtaaataaaacgaaaaaaaccgaaatattaaaaccgaaacacacaaatctacaaaacccaaacacgaactaaacgaaaaaacctacgaatcgcgctccgctactacaaccaaaacgaaaacgataaataaccccgacccgaaacgcaaatcacgacccctccccatcccccacgaaaaaccgaatcgcctcgaatctctaaatccgaaatcctccccgaaaccgcgaaaccccgaaacccttaacctaaaaaaaacccaaacgcctttacccgatttcattttcaatttaaaccaaaatccccgcgaattaatcgaaacaaaacgaaactcgaaaaaccgaactaaccgcgaaaacgaaaccaaattcccacaccatacaaataatatataactacgacgtaaaacccgacgaacgcttcctccgcgaatataaacaacacgcctacgacgacaaaaattacatcgctctaaacgaaaacctacgctcctaaaccgcgacgaacataacaactcaaatcaccaaacgcaaataaaaaacgacccgtataacgaaacaactaaaaacctacctaaaaaacgaattcgtaaaataactccgcaaatacctaaaaaacgaaaaaaaaacgctacaacgcgcgaa

SEQ ID NO: 1155 - DNA, 839 bp, Artificial Sequence
  chemically treated genomic DNA (Homo sapiens) CpG-island No: 1155
gtcgcgtagggaggagggtcgggcgggttttagttttttttcgtttttaggtttttattttatgaggtatttttatattattatgtttcggttcggtcgcggggagtttcgttttattttcgtcggttacgtggattatacgtagttcgtgcggttcgatagcgacgacgcgagttcgagagaggagtcgcgggcgtcgtggatggagcgggaggggtcggagtattgggatcggaatatatagatttgtaaggtttaagtacggattgaacgagagaatttgcggatcgcgtttcgttattataattagagcgagggcggtgagtgatttcggttcgggacgtaggttacgatttttttttattttttacggagggtcgggtcgtttcgagtttttgggttcgagatttttttcgaaatcgcgggatttcgagatttttgatttgggagaggtttaggcgtttttattcggttttatttttagtttaggttaaaattttcgcgggttggtcggggtagggcggggttcgggggatcgggttgatcgcgggggcggggttaggtttttatattatgtaggtgatgtatggttgcgacgtggggttcgacgggcgtttttttcgcgggtatgaatagtacgtttacgacggtaaggattatatcgttttgaacgaggatttgcgtttttggatcgcggcggatatggtagtttagattattaagcgtaagtgggaggcggttcgtgtggcggagtagttgagagtttatttggagggcgagttcgtggagtggtttcgtagatatttggagaacgggaaggagacgttgtagcgcgcggg

SEQ ID NO: 1156 - DNA, 839 bp, Artificial Sequence
  chemically treated genomic DNA (Homo sapiens) CpG-island No: 1156
cccgcgcgctacaacgtctccttcccgttctccaaatatctacgaaaccactccacgaactcgccctccaaataaactctcaactactccgccacacgaaccgcctcccacttacgcttaataatctaaactaccatatccgccgcgatccaaaaacgcaaatcctcgttcaaaacgatataatccttaccgtcgtaaacgtactattcatacccgcgaaaaaaacgcccgtcgaaccccacgtcgcaaccatacatcacctacataatataaaaacctaaccccgcccccgcgatcaacccgatcccccgaaccccgccctaccccgaccaacccgcgaaaattttaacctaaactaaaaataaaaccgaataaaaacgcctaaacctctcccaaatcaaaaatctcgaaatcccgcgatttcgaaaaaaatctcgaacccaaaaactcgaaacgacccgaccctccgtaaaaaataaaaaaaaatcgtaacctacgtcccgaaccgaaatcactcaccgccctcgctctaattataataacgaaacgcgatccgcaaattctctcgttcaatccgtacttaaaccttacaaatctatatattccgatcccaatactccgacccctcccgctccatccacgacgcccgcgactcctctctcgaactcgcgtcgtcgctatcgaaccgcacgaactacgtataatccacgtaaccgacgaaaataaaacgaaactccccgcgaccgaaccgaaacataataatataaaaatacctcataaaataaaaacctaaaaacgaaaaaaaactaaaacccgcccgaccctcctccctacgcgac

SEQ ID NO: 1157 - DNA, 948 bp, Artificial Sequence
  chemically treated genomic DNA (Homo sapiens) CpG-island No: 1157
cgtgcgttgtagcgtttttttttcgttttttaggtatttgcggagttattttacgtacgtgttttttaggtaggtttttaattgtttcgttatacgggtcgttttttatttgcgttgggtgatttgagtcgttatgttcgtcgcggtttaagagcgtaggttttcgtttaaggcgatgtaatttttgtcgtcgtaggcgttttgtcggtattcgcggaggaagcgttcgttcgattttacgtcgtagttatatattatttggatggtgtgagaatttggtttcgattttacggttagtttagtttttcgagtttcgttcggtttcgattaattcggggggatttttggtttaaattgaaaatgaaatcgggtaaaggcgtttgggtttttttcggggtaagggtttcggggtttcgcggtttcggggtggatttcggattcggagattgtgggcgattcggttcgttcgtgggggatgagaggtcgtgatttgcgtttcgggtcggggttatttatcggtttcgttttggttgtagtagtcgcgtagggtttttaggttcgttcggttagtttgtgattgggtttttatatttcgtgtttgtaggttttaatatttcggttttttttgttttatttacggtgttcgcggttttattttttggttcgcggcgtcgttgttaaatcgtacgaattgcgtgtcgtttacgtagtttacggcgatgaagcggggtttttcgcggtcgggtcgggatacggatgtggtgaaatattttatggagtgggagtttgggggcgaggagtggttgagatttattcgatttttttttcggcgcggttattcgggttttgcgttttcgtcgggcgggttttttgttttttttcgtagaggcggtttttttacgatttcgtatttattcgtttaggtttgggttagggttagggttttta

SEQ ID NO: 1158 - DNA, 948 bp, Artificial Sequence
  chemically treated genomic DNA (Homo sapiens) CpG-island No: 1158
taaaaaccctaaccctaacccaaacctaaacgaataaatacgaaatcgtaaaaaaaccgcctctacgaaaaaaaacaaaaaacccgcccgacgaaaacgcaaaacccgaataaccgcgccgaaaaaaaaatcgaataaatctcaaccactcctcgcccccaaactcccactccataaaatatttcaccacatccgtatcccgacccgaccgcgaaaaaccccgcttcatcgccgtaaactacgtaaacgacacgcaattcgtacgatttaacaacgacgccgcgaaccaaaaaataaaaccgcgaacaccgtaaataaaacaaaaaaaaccgaaatattaaaacctacaaacacgaaatataaaaacccaatcacaaactaaccgaacgaacctaaaaaccctacgcgactactacaaccaaaacgaaaccgataaataaccccgacccgaaacgcaaatcacgacctctcatcccccacgaacgaaccgaatcgcccacaatctccgaatccgaaatccaccccgaaaccgcgaaaccccgaaacccttaccccgaaaaaaacccaaacgcctttacccgatttcattttcaatttaaaccaaaaatccccccgaattaatcgaaaccgaacgaaactcgaaaaactaaactaaccgtaaaatcgaaaccaaattctcacaccatccaaataatatataactacgacgtaaaatcgaacgaacgcttcctccgcgaataccgacaaaacgcctacgacgacaaaaattacatcgccttaaacgaaaacctacgctcttaaaccgcgacgaacataacgactcaaatcacccaacgcaaataaaaaacgacccgtataacgaaacaattaaaaacctacctaaaaaacacgtacgtaaaataactccgcaaatacctaaaaaacgaaaaaaaaacgctacaacgcacg

SEQ ID NO: 1159 - DNA, 948 bp, Artificial Sequence
  chemically treated genomic DNA (Homo sapiens) CpG-island No: 1159
tgggggttttggttttgatttagatttgggcgggtgagtgcggggtcgtggggaaatcgtttttgcggggagaagtaaggggttcgttcggcggggacgtaggattcgggtagtcgcgtcgggaggagggtcgggtgggttttagttatttttcgtttttaggtttttattttatgaggtattttattatattcgtgtttcggttcggtcgcggggagtttcgttttatcgtcgtgggttacgtggacgatacgtagttcgtgcggtttgatagcgacgtcgcgagttagaggatggagtcgcgggtatcgtggatagagtaggaggggtcggagtattgggatttgtagatacggaatgtgaaggtttagttatagattgatcgagcgaatttggggattttgcgcggttattataattagagcgaggtcggtgagtgatttcggttcggggcgtaggttacgattttttattttttacggacgggtcgggtcgtttatagttttcgggttcgagatttatttcgaagtcgcgggatttcgagatttttgtttcgggagaggtttaggcgtttttattcggttttatttttagtttaggttaaaaattttttcgggttggtcggggtcggacggggttcgggggattgggttgatcgtggggtcggggttaggtttttatattatttagatgatgtatggttgcgacgtggggtcggacgggcgtttttttcgcgggtatcggtaggacgtttacgacggtaaggattatatcgttttgaacgaggatttgcgtttttggatcgcggcggatatggcggtttagattatttagcgtaagtgggaggcggttcgtgtggcggagtagttgagagtttatttggagggtacgtgcgtggagtggtttcgtagatatttggagaacgggaaggagacgttgtagcgtacg

SEQ ID NO: 1160 - DNA, 948 bp, Artificial Sequence
  chemically treated genomic DNA (Homo sapiens) CpG-island No: 1160
cgtacgctacaacgtctccttcccgttctccaaatatctacgaaaccactccacgcacgtaccctccaaataaactctcaactactccgccacacgaaccgcctcccacttacgctaaataatctaaaccgccatatccgccgcgatccaaaaacgcaaatcctcgttcaaaacgatataatccttaccgtcgtaaacgtcctaccgatacccgcgaaaaaaacgcccgtccgaccccacgtcgcaaccatacatcatctaaataatataaaaacctaaccccgaccccacgatcaacccaatcccccgaaccccgtccgaccccgaccaacccgaaaaaatttttaacctaaactaaaaataaaaccgaataaaaacgcctaaacctctcccgaaacaaaaatctcgaaatcccgcgacttcgaaataaatctcgaacccgaaaactataaacgacccgacccgtccgtaaaaaataaaaaatcgtaacctacgccccgaaccgaaatcactcaccgacctcgctctaattataataaccgcgcaaaatccccaaattcgctcgatcaatctataactaaaccttcacattccgtatctacaaatcccaatactccgacccctcctactctatccacgatacccgcgactccatcctctaactcgcgacgtcgctatcaaaccgcacgaactacgtatcgtccacgtaacccacgacgataaaacgaaactccccgcgaccgaaccgaaacacgaatataataaaatacctcataaaataaaaacctaaaaacgaaaaataactaaaacccacccgaccctcctcccgacgcgactacccgaatcctacgtccccgccgaacgaaccccttacttctccccgcaaaaacgatttccccacgaccccgcactcacccgcccaaatctaaatcaaaaccaaaaccccca

SEQ ID NO: 1161 - DNA, 631 bp, Artificial Sequence
  chemically treated genomic DNA (Homo sapiens) CpG-island No: 1161
cgttcggcgagggcgtaggattcggggagtcgcgtagggaggagggtcgggcgggttttagttttttttcgtttttaggtttttattttatgaggtatttttatatcgtcgtgtttcggttcggtcgcggagagtttcgttttatcgtagtgggttacgtggacgatacgtagttcgtgtagttcgatagcgacgtcgcgagtttaagaggggagtcgcgggcgtcgtgggtggagtaggaggggtcggagtattgggatcgggagatatagaagtataagcgttaggtatagattgatcgagtgagtttgcggaatttgcgcggttattataattagagcgaggtcggtgagtgatttcggttcggggcgtaggttacgatttttttttattttttacggacggttcgggtcgtttcgagtttttcggtttgagatttatttcgaggttgcggaattcgtttagattttcgatcggagagagttttagttatttttattcggttttatttttagtttaggttaaaattttcgcgggttggtcggggttggggcggggttcgggggacggggttgattacgggggcggggttagggttttatattttttagaggatgtatggttgcgattt

SEQ ID NO: 1162 - DNA, 631 bp, Artificial Sequence
  chemically treated genomic DNA (Homo sapiens) CpG-island No: 1162
aaatcgcaaccatacatcctctaaaaaatataaaaccctaaccccgcccccgtaatcaaccccgtcccccgaaccccgccccaaccccgaccaacccgcgaaaattttaacctaaactaaaaataaaaccgaataaaaataactaaaactctctccgatcgaaaatctaaacgaattccgcaacctcgaaataaatctcaaaccgaaaaactcgaaacgacccgaaccgtccgtaaaaaataaaaaaaaatcgtaacctacgccccgaaccgaaatcactcaccgacctcgctctaattataataaccgcgcaaattccgcaaactcactcgatcaatctatacctaacgcttatacttctatatctcccgatcccaatactccgacccctcctactccacccacgacgcccgcgactcccctcttaaactcgcgacgtcgctatcgaactacacgaactacgtatcgtccacgtaacccactacgataaaacgaaactctccgcgaccgaaccgaaacacgacgatataaaaatacctcataaaataaaaacctaaaaacgaaaaaaaactaaaacccgcccgaccctcctccctacgcgactccccgaatcctacgccctcgccgaacg

SEQ ID NO: 1163 - DNA, 631 bp, Artificial Sequence
  chemically treated genomic DNA (Homo sapiens) CpG-island No: 1163
aggtcgtagttatatattttttggagggtgtgagattttggtttcgttttcgtggttagtttcgtttttcgagtttcgttttagtttcgattaattcgcggggattttggtttaaattgaaaatgaaatcgggtaaaggtgattggggtttttttcggtcgagggtttgggcgggtttcgtagtttcggggtggattttagatcgggagattcggggcgattcgggtcgttcgtgggggatggggaggggtcgtgatttgcgtttcgggtcggggttatttatcggtttcgttttggttgtagtagtcgcgtaggtttcgtaggtttattcggttagtttgtgtttggcgtttgtatttttgtgtttttcggttttaatatttcggttttttttgttttatttacggcgttcgcggttttttttttggattcgcggcgtcgttgtcgaattgtacgaattgcgtgtcgtttacgtagtttattgcgatgaagcggggtttttcgcggtcgggtcgggatacggcggtgtagaaatattttatggagtgggagtttgggggcgaggaggggttgagattcgttcgatttttttttttgcgcggtttttcgggttttgcgttttcgtcgggcg

SEQ ID NO: 1164 - DNA, 631 bp, Artificial Sequence
  chemically treated genomic DNA (Homo sapiens) CpG-island No: 1164
cgcccgacgaaaacgcaaaacccgaaaaaccgcgcaaaaaaaaaaatcgaacgaatctcaacccctcctcgcccccaaactcccactccataaaatatttctacaccgccgtatcccgacccgaccgcgaaaaaccccgcttcatcgcaataaactacgtaaacgacacgcaattcgtacaattcgacaacgacgccgcgaatccaaaaaaaaaaccgcgaacgccgtaaataaaacaaaaaaaaccgaaatattaaaaccgaaaaacacaaaaatacaaacgccaaacacaaactaaccgaataaacctacgaaacctacgcgactactacaaccaaaacgaaaccgataaataaccccgacccgaaacgcaaatcacgacccctccccatcccccacgaacgacccgaatcgccccgaatctcccgatctaaaatccaccccgaaactacgaaacccgcccaaaccctcgaccgaaaaaaaccccaatcacctttacccgatttcattttcaatttaaaccaaaatccccgcgaattaatcgaaactaaaacgaaactcgaaaaacgaaactaaccacgaaaacgaaaccaaaatctcacaccctccaaaaaatatataactacgacct

SEQ ID NO: 1165 - DNA, 656 bp, Artificial Sequence
  chemically treated genomic DNA (Homo sapiens) CpG-island No: 1165
ggttttttcgggagcgtaaggtagtgatgatacgcgttttttttttttcgaacgcgagttggtagcgttcgtgacggagttagtttggtttttttacgcgcgttttttttttcgtcgtcggggcgttttttcggtgttattggtttttacgtgttagtagtttatttcgtattattttttcgtttcgtttttggagggaagtgattatatttttttcgttcgttttttatcgtcgtcgcggcggtaattttgtcgggttcgttcgttgacgttatttgttagtttcgttttttttagggtttcgggtttttgcggcgggggttgtttcggggggtagttagttgaggcggcgggagttcggcggagggcgggttaggtgattggttcgggttatgtcgaggaagaagttatttagcgtgaagtagaagaagaagtagttgtaggataaacgggagcggaagagaggttagtgcgggagcgggaggagggggcggggttcgggttttcgtatatttggaaggaggggtgtgttcgttgtatttttggggatcgtgggagggggtcgtgggatcgcgttaattttcgcggtttatcgcggaggggattttttattttttttatatttggaaggggtggggaaggatggagagttgggg

SEQ ID NO: 1166 - DNA, 656 bp, Artificial Sequence
  chemically treated genomic DNA (Homo sapiens) CpG-island No: 1166
ccccaactctccatccttccccaccccttccaaatataaaaaaaataaaaaatcccctccgcgataaaccgcgaaaattaacgcgatcccacgaccccctcccacgatccccaaaaatacaacgaacacacccctccttccaaatatacgaaaacccgaaccccgccccctcctcccgctcccgcactaacctctcttccgctcccgtttatcctacaactacttcttcttctacttcacgctaaataacttcttcctcgacataacccgaaccaatcacctaacccgccctccgccgaactcccgccgcctcaactaactaccccccgaaacaacccccgccgcaaaaacccgaaaccctaaaaaaaacgaaactaacaaataacgtcaacgaacgaacccgacaaaattaccgccgcgacgacgataaaaaacgaacgaaaaaaatataatcacttccctccaaaaacgaaacgaaaaaataatacgaaataaactactaacacgtaaaaaccaataacaccgaaaaaacgccccgacgacgaaaaaaaaaacgcgcgtaaaaaaaccaaactaactccgtcacgaacgctaccaactcgcgttcgaaaaaaaaaaaacgcgtatcatcactaccttacgctcccgaaaaaacc

SEQ ID NO: 1167 - DNA, 656 bp, Artificial Sequence
  chemically treated genomic DNA (Homo sapiens) CpG-island No: 1167
ttttaattttttatttttttttattttttttagatgtagggggggtgggggatttttttcgcgataggtcgcgagggttgacgcggttttacgatttttttttacgatttttagaggtgtagcgggtatatttttttttttagatgtgcggaagttcgagtttcgtttttttttttcgttttcgtattgatttttttttcgttttcgtttgttttgtaattgtttttttttttgttttacgttgaatggtttttttttcggtatggttcggattagttatttggttcgtttttcgtcgagttttcgtcgttttaattgattgtttttcggggtagttttcgtcgtaggggttcgggattttagaggaggcggggttagtaggtgacgttagcgggcgggttcgatagaattatcgtcgcggcggcgatggaaggcggacgggggagatatagttatttttttttaggagcgaggcgagaggatgatgcggggtgggttattggtacgtgagagttagtggtatcgagagggcgtttcggcggcgaggaaggaggcgcgcgtgggaggattaggttaatttcgttacggacgttattaattcgcgttcggaggagggggggcgcgtgttattattattttgcgttttcgggagaatt

SEQ ID NO: 1168 - DNA, 656 bp, Artificial Sequence
  chemically treated genomic DNA (Homo sapiens) CpG-island No: 1168
aattctcccgaaaacgcaaaataataataacacgcgccccccctcctccgaacgcgaattaataacgtccgtaacgaaattaacctaatcctcccacgcgcgcctccttcctcgccgccgaaacgccctctcgataccactaactctcacgtaccaataacccaccccgcatcatcctctcgcctcgctcctaaaaaaaaataactatatctcccccgtccgccttccatcgccgccgcgacgataattctatcgaacccgcccgctaacgtcacctactaaccccgcctcctctaaaatcccgaacccctacgacgaaaactaccccgaaaaacaatcaattaaaacgacgaaaactcgacgaaaaacgaaccaaataactaatccgaaccataccgaaaaaaaaaccattcaacgtaaaacaaaaaaaaaaacaattacaaaacaaacgaaaacgaaaaaaaaatcaatacgaaaacgaaaaaaaaaaacgaaactcgaacttccgcacatctaaaaaaaaaaatatacccgctacacctctaaaaatcgtaaaaaaaaatcgtaaaaccgcgtcaaccctcgcgacctatcgcgaaaaaaatcccccaccccccctacatctaaaaaaaataaaaaaaaataaaaaattaaaa

SEQ ID NO: 1169 - DNA, 1980 bp, Artificial Sequence
  chemically treated genomic DNA (Homo sapiens) CpG-island No: 1169
tgtagacgcggcggggattcggagggtgtcgtgcgggcgaggtcgtttaaatttggtaataaataaagtttgggaagtttggatttggtcgtttgggttttgttcgcgttttaacgtggatggggcggtagcggggcgggcgtcgttgatatgcggagggtagtggggattcggggcgcgggagggtcggggtcggtttttttagggtcggcggtagtagcggtggcggcgcggttattgttcggaggcggcgcgggttgtcgttagtatacgtcgtagtgaggtaaacggtttcggaggtcggtagttacggtgttgagtcgtttttcggtttagggcggcgaattcgtttgcgatcgttagcgtttcgcggttttcgttcgggcgagttcgcgtacgcgttcggtacgcggcggttttatcgggtttagtgggttgcgcgattttcgggtggcgggttttgcgattaagcggtcgtttcgttcgggattgagggcgagtgatcgttgtttttaggagttcgaagttgagagtcgtttacgttttttttttttcgtttagtcggggttttcgcggttcgcgttttacgacgtttagtattcggtaagtatcggaaagagtagtgtatatttcggcggcgcgagggcggtcggggttttgcgtttgcgttttgaagcggcgagcgcgttttcgtcgttcggcgcgtgcgcgaagggttcgcggttttcgcgtattcgcgtcggggcgtcgcgtttttacgtttttttcgtcgtcgaggtttcgtgcggcgtcggagaagttgttagagagatgggtttaggacgcgggatttaggtcgggttgtggtcgggggacgtgggggcggcggcgattaacgcgggagtcgttacgacgggttcggcgaggcgcggcggaaagagtttttcgtcgaggttagtcgttagtttgtttagtatcgattcggatggtaggacgtataggttcgagtcggggtatttttcgtcgttcggttttttttcgatgacggggatggcggggtcgtcgtcggcgtcgtttagggtgcgatcgtcgggcgggtcgtttacgttgtcgtcgcgtcgtaagggcgtacgcgcgggtcgggtcgcgtcggtaggcggtgtcggggtttcggttagggtcggggtcgcgcgggcgtcggggtcgttgtgttgtcggttacgttgttattgtttgcgggcgtgcgggtgcgcgcgggcgcggtgtcgcgcggtagtcggcgtgtcgtcgaagtgcgggtcgtggcgtaggaattcgtggaatagcgcgttcgttttttcgtcgatgttgtagtcgcggcgcgggcggcggggttaggcgcgcgggttgcggggtcgggcgggcgcggtaggtggttcggtgtcgtcgtttgcgtcgcggttttcgatgttggcgtagttattgtttatttgtagtagtcggcgcgtttcgtcgtttttgggtcgcggcgcgggcggggagggcggcgggaaggcgggcgtcgcgttttcggagtttgagttcgagttgtcgtcgttgcgtatcgagtcgcggtcgttgtcgttgttgttgtggttcgaggcggtcgtatgtagtttaagcgaggcgcgtaggttttataggtcgcggtagttggtttgggtttgttcggggttcgcgtttcgttcggcgttcggttttagtggcggttgttgttgtttaggtttcgcgttgttcgcgtcgcgtttcgggggggaatcggggttcgtttttttcgttgtttcggtcgtttttagtttgtaagttaggtcgcgtcgttagagtttcgtcgagtttcgcgttttttattcggtcggttatttcgtttttggattagggagggtggacgcgggtgggatttgggattcgggcgggttttggaaggtgagagttttaaaatgagttagtgtgttttgtaggggatgcgttttgtattgattttga

SEQ ID NO: 1170 - DNA, 1980 bp, Artificial Sequence
  chemically treated genomic DNA (Homo sapiens) CpG-island No: 1170
tcaaaatcaatacaaaacgcatcccctacaaaacacactaactcattttaaaactctcaccttccaaaacccgcccgaatcccaaatcccacccgcgtccaccctccctaatccaaaaacgaaataaccgaccgaataaaaaacgcgaaactcgacgaaactctaacgacgcgacctaacttacaaactaaaaacgaccgaaacaacgaaaaaaacgaaccccgattcccccccgaaacgcgacgcgaacaacgcgaaacctaaacaacaacaaccgccactaaaaccgaacgccgaacgaaacgcgaaccccgaacaaacccaaaccaactaccgcgacctataaaacctacgcgcctcgcttaaactacatacgaccgcctcgaaccacaacaacaacgacaacgaccgcgactcgatacgcaacgacgacaactcgaactcaaactccgaaaacgcgacgcccgccttcccgccgccctccccgcccgcgccgcgacccaaaaacgacgaaacgcgccgactactacaaataaacaataactacgccaacatcgaaaaccgcgacgcaaacgacgacaccgaaccacctaccgcgcccgcccgaccccgcaacccgcgcgcctaaccccgccgcccgcgccgcgactacaacatcgacgaaaaaacgaacgcgctattccacgaattcctacgccacgacccgcacttcgacgacacgccgactaccgcgcgacaccgcgcccgcgcgcacccgcacgcccgcaaacaataacaacgtaaccgacaacacaacgaccccgacgcccgcgcgaccccgaccctaaccgaaaccccgacaccgcctaccgacgcgacccgacccgcgcgtacgcccttacgacgcgacgacaacgtaaacgacccgcccgacgatcgcaccctaaacgacgccgacgacgaccccgccatccccgtcatcgaaaaaaaaccgaacgacgaaaaataccccgactcgaacctatacgtcctaccatccgaatcgatactaaacaaactaacgactaacctcgacgaaaaactctttccgccgcgcctcgccgaacccgtcgtaacgactcccgcgttaatcgccgccgcccccacgtcccccgaccacaacccgacctaaatcccgcgtcctaaacccatctctctaacaacttctccgacgccgcacgaaacctcgacgacgaaaaaaacgtaaaaacgcgacgccccgacgcgaatacgcgaaaaccgcgaacccttcgcgcacgcgccgaacgacgaaaacgcgctcgccgcttcaaaacgcaaacgcaaaaccccgaccgccctcgcgccgccgaaatatacactactctttccgatacttaccgaatactaaacgtcgtaaaacgcgaaccgcgaaaaccccgactaaacgaaaaaaaaaaaacgtaaacgactctcaacttcgaactcctaaaaacaacgatcactcgccctcaatcccgaacgaaacgaccgcttaatcgcaaaacccgccacccgaaaatcgcgcaacccactaaacccgataaaaccgccgcgtaccgaacgcgtacgcgaactcgcccgaacgaaaaccgcgaaacgctaacgatcgcaaacgaattcgccgccctaaaccgaaaaacgactcaacaccgtaactaccgacctccgaaaccgtttacctcactacgacgtatactaacgacaacccgcgccgcctccgaacaataaccgcgccgccaccgctactaccgccgaccctaaaaaaaccgaccccgaccctcccgcgccccgaatccccactaccctccgcatatcaacgacgcccgccccgctaccgccccatccacgttaaaacgcgaacaaaacccaaacgaccaaatccaaacttcccaaactttatttattaccaaatttaaacgacctcgcccgcacgacaccctccgaatccccgccgcgtctaca

SEQ ID NO: 1171 - DNA, 1980 bp, Artificial Sequence
  chemically treated genomic DNA (Homo sapiens) CpG-island No: 1171
ttagggttaatgtaagacgtattttttgtaaaatatattggtttattttaaagtttttattttttaaggttcgttcgagttttaagttttattcgcgtttattttttttgatttagaggcgggatggtcggtcgggtagggggcgcggggttcggcggggttttgacggcgcggtttggtttgtaggttagaggcggtcgaggtagcgggaggagcgagtttcgattttttttcggagcgcggcgcgggtagcgcggggtttgagtagtagtagtcgttattggagtcggacgtcgagcgggacgcgggtttcgagtaggtttagattagttatcgcgatttgtggagtttgcgcgtttcgtttgagttgtatgcggtcgtttcggattatagtagtagcggtaacgatcgcgattcggtgcgtagcggcgatagttcgggtttaggtttcgggggcgcggcgttcgttttttcgtcgtttttttcgttcgcgtcgcggtttaaggacggcgaggcgcgtcggttgttgtagatggatagtggttacgttagtatcgagggtcgcggcgtaggcgacgatatcgagttatttgtcgcgttcgttcggtttcgtagttcgcgcgtttggtttcgtcgttcgcgtcgcgattatagtatcgacgagaagacggacgcgttgttttacgagtttttgcgttacgattcgtatttcgacgatacgtcggttgtcgcgcgatatcgcgttcgcgcgtattcgtacgttcgtaaatagtggtagcgtggtcggtagtatagcgatttcggcgttcgcgcggtttcggttttggtcggaatttcggtatcgtttgtcggcgcggttcgattcgcgcgtgcgtttttgcggcgcggcgatagcgtggacggttcgttcgacggtcgtattttgggcggcgtcggcgacgatttcgttattttcgttatcgaggaggagtcgggcggcggggggtgtttcggttcgggtttgtgcgttttattattcgggtcggtgttggataagttggcggttggtttcgacgagagatttttttcgtcgcgtttcgtcgagttcgtcgtggcgattttcgcgttggtcgtcgtcgtttttacgtttttcgattatagttcggtttaagtttcgcgttttgggtttatttttttggtagttttttcggcgtcgtacggggtttcggcggcgggagagacgtgggggcgcgacgtttcgacgcgaatgcgcggggatcgcgggtttttcgcgtacgcgtcgggcgacggaggcgcgttcgtcgttttagggcgtaggcgtagagtttcggtcgttttcgcgtcgtcgaagtgtgtattgtttttttcggtgtttgtcgggtgttgggcgtcgtgaggcgcgggtcgcggagatttcggttgggcgggaaggaaggggcgtgaacggtttttagtttcgggtttttgaggataacgattattcgtttttagtttcggacggggcggtcgtttagtcgtagggttcgttattcgagggtcgcgtagtttattgggttcgatggagtcgtcgcgtgtcgggcgcgtgcgcgagttcgttcgggcgggggtcgcggggcgttaacggtcgtagacgagttcgtcgttttgggtcgggaggcggtttaatatcgtgattgtcgattttcgagatcgtttattttattgcggcgtgtgttggcggtagttcgcgtcgttttcgagtaataatcgcgtcgttatcgttgttgtcgtcggttttgagggagtcggtttcggttttttcgcgtttcgagtttttattgtttttcgtatgttaacggcgttcgtttcgttgtcgttttatttacgttgagacgcgaataaaatttagacggttaggtttaagttttttaagttttatttattgttaaatttgggcggtttcgttcgtacggtatttttcgagttttcgtcgcgtttgta

SEQ ID NO: 1172 - DNA, 1980 bp, Artificial Sequence
  chemically treated genomic DNA (Homo sapiens) CpG-island No: 1172
tacaaacgcgacgaaaactcgaaaaataccgtacgaacgaaaccgcccaaatttaacaataaataaaacttaaaaaacttaaacctaaccgtctaaattttattcgcgtctcaacgtaaataaaacgacaacgaaacgaacgccgttaacatacgaaaaacaataaaaactcgaaacgcgaaaaaaccgaaaccgactccctcaaaaccgacgacaacaacgataacgacgcgattattactcgaaaacgacgcgaactaccgccaacacacgccgcaataaaataaacgatctcgaaaatcgacaatcacgatattaaaccgcctcccgacccaaaacgacgaactcgtctacgaccgttaacgccccgcgacccccgcccgaacgaactcgcgcacgcgcccgacacgcgacgactccatcgaacccaataaactacgcgaccctcgaataacgaaccctacgactaaacgaccgccccgtccgaaactaaaaacgaataatcgttatcctcaaaaacccgaaactaaaaaccgttcacgccccttccttcccgcccaaccgaaatctccgcgacccgcgcctcacgacgcccaacacccgacaaacaccgaaaaaaacaatacacacttcgacgacgcgaaaacgaccgaaactctacgcctacgccctaaaacgacgaacgcgcctccgtcgcccgacgcgtacgcgaaaaacccgcgatccccgcgcattcgcgtcgaaacgtcgcgcccccacgtctctcccgccgccgaaaccccgtacgacgccgaaaaaactaccaaaaaaataaacccaaaacgcgaaacttaaaccgaactataatcgaaaaacgtaaaaacgacgacgaccaacgcgaaaatcgccacgacgaactcgacgaaacgcgacgaaaaaaatctctcgtcgaaaccaaccgccaacttatccaacaccgacccgaataataaaacgcacaaacccgaaccgaaacaccccccgccgcccgactcctcctcgataacgaaaataacgaaatcgtcgccgacgccgcccaaaatacgaccgtcgaacgaaccgtccacgctatcgccgcgccgcaaaaacgcacgcgcgaatcgaaccgcgccgacaaacgataccgaaattccgaccaaaaccgaaaccgcgcgaacgccgaaatcgctatactaccgaccacgctaccactatttacgaacgtacgaatacgcgcgaacgcgatatcgcgcgacaaccgacgtatcgtcgaaatacgaatcgtaacgcaaaaactcgtaaaacaacgcgtccgtcttctcgtcgatactataatcgcgacgcgaacgacgaaaccaaacgcgcgaactacgaaaccgaacgaacgcgacaaataactcgatatcgtcgcctacgccgcgaccctcgatactaacgtaaccactatccatctacaacaaccgacgcgcctcgccgtccttaaaccgcgacgcgaacgaaaaaaacgacgaaaaaacgaacgccgcgcccccgaaacctaaacccgaactatcgccgctacgcaccgaatcgcgatcgttaccgctactactataatccgaaacgaccgcatacaactcaaacgaaacgcgcaaactccacaaatcgcgataactaatctaaacctactcgaaacccgcgtcccgctcgacgtccgactccaataacgactactactactcaaaccccgcgctacccgcgccgcgctccgaaaaaaaatcgaaactcgctcctcccgctacctcgaccgcctctaacctacaaaccaaaccgcgccgtcaaaaccccgccgaaccccgcgccccctacccgaccgaccatcccgcctctaaatcaaaaaaaataaacgcgaataaaacttaaaactcgaacgaaccttaaaaaataaaaactttaaaataaaccaatatattttacaaaaaatacgtcttacattaaccctaa

SEQ ID NO: 1173 - DNA, 680 bp, Artificial Sequence
  chemically treated genomic DNA (Homo sapiens) CpG-island No: 1173
cgtcggattttttcgcgtttttttttcggtcgtttagtttatagtcggttgcgattttcggtttgtttttcgttcgtttttcgtagtttcgagttcgtcgcgtttattttagcgtcgggacgagcggtttatgggcggcgggttggcggcgggcggttgcgtggcgttcgcggttggtttcggcgttcggtggtcgcggagtaggcggagaatttatgaatggagagcgcggcgcgggggaggtcggcgcgagaggaggggtcgcgtacgtgatcgcgttggcggcgcgttcgtttcgcgcgttcggtgttgttcggttttcggttcgtcgttttcgttgcgttcgtcgttgggtttggttggtttcgcgtcggttatcgtttttttttttttttcggcggggcggggggcggagtttgcgttttcgggcgtttatttcgtacgcggagtcgtttttcgtattcgtcgcggcggtcgagtttcgttttcggtttatcggtacgatttatttcgttcggttttgaggttttagggacgtagttgggggtgttttggaatttacgattttgtagttcgaggtgcgtcgcgtgcgtaggagggggtggggttcgggggggtacggattttttttttacgttgtttggttcgtgggggttttggggcggtatagttagggtttt

SEQ ID NO: 1174 - DNA, 680 bp, Artificial Sequence
  chemically treated genomic DNA (Homo sapiens) CpG-island No: 1174
aaaaccctaactataccgccccaaaacccccacgaaccaaacaacgtaaaaaaaaaatccgtacccccccgaaccccaccccctcctacgcacgcgacgcacctcgaactacaaaatcgtaaattccaaaacacccccaactacgtccctaaaacctcaaaaccgaacgaaataaatcgtaccgataaaccgaaaacgaaactcgaccgccgcgacgaatacgaaaaacgactccgcgtacgaaataaacgcccgaaaacgcaaactccgccccccgccccgccgaaaaaaaaaaaaaaacgataaccgacgcgaaaccaaccaaacccaacgacgaacgcaacgaaaacgacgaaccgaaaaccgaacaacaccgaacgcgcgaaacgaacgcgccgccaacgcgatcacgtacgcgacccctcctctcgcgccgacctcccccgcgccgcgctctccattcataaattctccgcctactccgcgaccaccgaacgccgaaaccaaccgcgaacgccacgcaaccgcccgccgccaacccgccgcccataaaccgctcgtcccgacgctaaaataaacgcgacgaactcgaaactacgaaaaacgaacgaaaaacaaaccgaaaatcgcaaccgactataaactaaacgaccgaaaaaaaaacgcgaaaaaatccgacg

SEQ ID NO: 1175 - DNA, 680 bp, Artificial Sequence
  chemically treated genomic DNA (Homo sapiens) CpG-island No: 1175
ggggttttggttgtgtcgttttagaatttttacggattaagtaacgtgagaggggagttcgtgttttttcggattttatttttttttgcgtacgcggcgtatttcgggttgtagagtcgtgaattttaggatatttttagttgcgtttttgggattttaggatcgggcgaggtgaatcgtgtcgatgggtcgggggcggggttcggtcgtcgcggcgggtgcggggggcggtttcgcgtgcggagtgggcgttcgggagcgtaggtttcgtttttcgtttcgtcggaagggaaggggaggcggtggtcggcgcggagttagttagatttagcggcgagcgtagcgggggcggcgggtcggggatcgggtagtatcgggcgcgcggagcgggcgcgtcgttaacgcggttacgtgcgcggttttttttttcgcgtcggtttttttcgcgtcgcgttttttatttataaatttttcgtttgtttcgcggttatcgggcgtcggagttagtcgcgagcgttacgtagtcgttcgtcgttagttcgtcgtttatgggtcgttcgtttcggcgttgaggtaggcgcggcgggttcggggttgcggggggcggacgggggataggtcggggatcgtagtcggttgtgggttaagcggtcggagggagggcgcggaggagttcggcg

SEQ ID NO: 1176 - DNA, 680 bp, Artificial Sequence
  chemically treated genomic DNA (Homo sapiens) CpG-island No: 1176
cgccgaactcctccgcgccctccctccgaccgcttaacccacaaccgactacgatccccgacctatcccccgtccgccccccgcaaccccgaacccgccgcgcctacctcaacgccgaaacgaacgacccataaacgacgaactaacgacgaacgactacgtaacgctcgcgactaactccgacgcccgataaccgcgaaacaaacgaaaaatttataaataaaaaacgcgacgcgaaaaaaaccgacgcgaaaaaaaaaaccgcgcacgtaaccgcgttaacgacgcgcccgctccgcgcgcccgatactacccgatccccgacccgccgcccccgctacgctcgccgctaaatctaactaactccgcgccgaccaccgcctccccttcccttccgacgaaacgaaaaacgaaacctacgctcccgaacgcccactccgcacgcgaaaccgccccccgcacccgccgcgacgaccgaaccccgcccccgacccatcgacacgattcacctcgcccgatcctaaaatcccaaaaacgcaactaaaaatatcctaaaattcacgactctacaacccgaaatacgccgcgtacgcaaaaaaaaataaaatccgaaaaaacacgaactcccctctcacgttacttaatccgtaaaaattctaaaacgacacaaccaaaacccc

SEQ ID NO: 1177 - DNA, 609 bp, Artificial Sequence
  chemically treated genomic DNA (Homo sapiens) CpG-island No: 1177
gtagttcgggtcggaataaaattgtaatttttagaatattttacgacggggtattgcgtcgttaacgtcgcgtgcgttttgtcgggagtcgtagttcgcgtttgcgttttcgtcgggatttttttttttagacgtttttgcgcgtcgtttttttcgttttttaggtcgttcgcgtcgcgtcggagttcgttgttcgttagttattcgttttttgtcgttcgtcgttgttatgttgttcgtcgcgttgtttcgtcgttcgggatttggtcgtttcgttcgttacgttcgtgtttatgtcgaggtcgtcgtcgtttcggttgtcgtttttggttttaattagatgttttttattttcgttttttttacgtaggttcgggcgttgcgggtcgggatttttcgtggtcgtcgttttcggagtttagggtttttatttttagggcgcgattttcgttttcgggttttcggattcgcgcgtttcggaagtcgaggttatttagttttggattttcggttttgtttttgttgttcgagttttgcgttgttttcgtttcgggtattttttcgagataagcgttttttgggtgtttttttcgatttttttggttaaag

SEQ ID NO: 1178 - DNA, 609 bp, Artificial Sequence
  chemically treated genomic DNA (Homo sapiens) CpG-island No: 1178
ctttaaccaaaaaaatcgaaaaaaacacccaaaaaacgcttatctcgaaaaaatacccgaaacgaaaacaacgcaaaactcgaacaacaaaaacaaaaccgaaaatccaaaactaaataacctcgacttccgaaacgcgcgaatccgaaaacccgaaaacgaaaatcgcgccctaaaaataaaaaccctaaactccgaaaacgacgaccacgaaaaatcccgacccgcaacgcccgaacctacgtaaaaaaaacgaaaataaaaaacatctaattaaaaccaaaaacgacaaccgaaacgacgacgacctcgacataaacacgaacgtaacgaacgaaacgaccaaatcccgaacgacgaaacaacgcgacgaacaacataacaacgacgaacgacaaaaaacgaataactaacgaacaacgaactccgacgcgacgcgaacgacctaaaaaacgaaaaaaacgacgcgcaaaaacgtctaaaaaaaaaaatcccgacgaaaacgcaaacgcgaactacgactcccgacaaaacgcacgcgacgttaacgacgcaataccccgtcgtaaaatattctaaaaattacaattttattccgacccgaactac

SEQ ID NO: 1179 - DNA, 609 bp, Artificial Sequence
  chemically treated genomic DNA (Homo sapiens) CpG-island No: 1179
ttttggttagggagatcggggagggtatttaggagacgtttatttcggggaggtgttcgggacgagggtagcgtagggttcgggtagtagaggtagggtcgagggtttagggttgagtagtttcggttttcggggcgcgcgggttcgggggttcggaagcgggggtcgcgttttgggggtggggattttggatttcgggggcggcggttacggagggtttcgattcgtagcgttcgaatttgcgtgggagaggcgaaggtgaaggatatttggttggggttagaggcggtagtcggggcggcggcggtttcggtataggtacgggcgtggcggacgaggcggttaagtttcgggcggcggagtagcgcggcgggtagtatggtagcggcgggcggtaggaagcgggtagttggcggatagcggatttcggcgcggcgcgggcggtttggagggcgaggaggacgacgcgtagggacgtttgggaggaggagtttcggcgagagcgtaagcgcgaattacgattttcggtagggcgtacgcgacgttgacgacgtagtgtttcgtcgtgaggtattttgggggttgtagttttgtttcggttcgggttgt

SEQ ID NO: 1180 - DNA, 609 bp, Artificial Sequence
  chemically treated genomic DNA (Homo sapiens) CpG-island No: 1180
acaacccgaaccgaaacaaaactacaacccccaaaatacctcacgacgaaacactacgtcgtcaacgtcgcgtacgccctaccgaaaatcgtaattcgcgcttacgctctcgccgaaactcctcctcccaaacgtccctacgcgtcgtcctcctcgccctccaaaccgcccgcgccgcgccgaaatccgctatccgccaactacccgcttcctaccgcccgccgctaccatactacccgccgcgctactccgccgcccgaaacttaaccgcctcgtccgccacgcccgtacctataccgaaaccgccgccgccccgactaccgcctctaaccccaaccaaatatccttcaccttcgcctctcccacgcaaattcgaacgctacgaatcgaaaccctccgtaaccgccgcccccgaaatccaaaatccccacccccaaaacgcgacccccgcttccgaacccccgaacccgcgcgccccgaaaaccgaaactactcaaccctaaaccctcgaccctacctctactacccgaaccctacgctaccctcgtcccgaacacctccccgaaataaacgtctcctaaataccctccccgatctccctaaccaaaa

SEQ ID NO: 1181 - DNA, 2166 bp, Artificial Sequence
  chemically treated genomic DNA (Homo sapiens) CpG-island No: 1181
ttttatcgcgggtgattttgaattggttgtcgtttcgtttttcgttgtttagttatacggttttagtttttcgattatagtttttcgttttcgatcggggtttttttttcgcgcgtagtttagtcgttttttttttttgttaggggtagcgcggcgtttttttttcgggatttcgggcggcgtttttaggcgggttcggtagagggcgcgttcgagttgttgatttatcgtattttcgagcgcgcgcgggcgtagtcggggacgtcgcgttacgttacggttcgagcgggcgcgtttcggggaaacgggttttgttcgcggtcggcgggtgggcgcgcggggttttcggcggtagttattcggttacgttatcgaggtgcgggcgtttcgtttcggttataatttcgtttttacgtattacgtttttttcggggtcgcggttttagttttatcgtcgttcgttcgtttcgggatttcggttacgaggcgcggatttcgcgttttcgttttcgttcgcggtttttttcggacgaaggcggcggggtggttttacgattttttgtttttttcggcgtcgggaataatggttcgcgttttttttcgttttcggtcgtttttttgggatcgcgaggggtattagattcgtttttagatttgggtttcgcgtttttcggggcgcgttcgttttttgttgcgggtttcgggcgtttatgaatggttgcgggcgcgggcggggcgggggcgggcgcggagaggcgttagtttcgttttcgttgcgttttttttggtcgtttgggcgttgggggcggggcgagggggcgggttcggttgttacgtggggcggtgtcgcggcggtttttataggttcgggttcgcggtcgattgggcgttcggcgcgcggcgattggtcggcgttcggtcggcggagtaagtagtgaatgggagggggcggcggtttcgttttttggaacgttgatatattataattttttttttttgttatttttatttttagatttttcgagcggcggcgacggttgttgttaagggaggggacgcgcgaggaagcgcgattcgggcggtagacggtatttagcgttattagtcgagcggcgttttttttttaggatttttaatcgcgtcgcgtttcggtcgcgttcgtcgttttttgaaggagaagtaagtgtcgtttttattttcggaaggcgtttttaggagtcggagcgatttcggagcgttattcggattttggatttcggtttcgtatttcgcggtcgggattttttcgaggaggacgcgcgttgtttcgcgttttcgagtgttcggaggattcggtattcggggagtttttcgtttttgtttcggaggcgcggcgaggattggcggcgttcgtcgtttttagttttttagcgcgcgtcggggatggagtcgtagttcggcggcgttcggagttgtcggcgcggggttttcggcggcgtttgcgagttgggttcggcggtcgaggcggcgtttatgagtttcgttatttatagtattacgggtattcgttacgatttggtcgtgtcgttcgacgagacggtggaggggttgcgtaagcggttgttttagcgttttaaagtgtttaaggagcgtttggtttttttttataaagatacgtaggtatcgcgcgttttcggtcggtcgttttttcgggtttcggttttcgggcgggaataaagagcgcgtcgcgcggggaaggtagggggcggttagatagggggcgggggcgcgtcgcgcgttttcgggcgttttttgttcggtttcgtttgtttcggttttttttttcgttcggggtcgtcgtataaaggcggttgcgagggcgtttcgggtcgggtttcggcggttttttttgggggcgggtaggaattttagggcgttgcgggggtttcggttgcgggtgtgggggtcgttatcgttttttttcgtttgcgttcgcgtcggttttcgtatttgttcggcggttttttttgcgtttggttgtttttttttatttgcgtttttttttttttttttgttttcgttttcgagcgtttttcgtagtttttttttttttttggtatttaaatcgtttgtaggttcggagtttttttttcgcgggttttcggggatacgtagtgtttattttag

SEQ ID NO: 1182 - DNA, 2166 bp, Artificial Sequence
  chemically treated genomic DNA (Homo sapiens) CpG-island No: 1182
ctaaaataaacactacgtatccccgaaaacccgcgaaaaaaaaactccgaacctacaaacgatttaaataccaaaaaaaaaaaaaaactacgaaaaacgctcgaaaacgaaaacaaaaaaaaaaaaaaaaacgcaaataaaaaaaaacaaccaaacgcaaaaaaaaccgccgaacaaatacgaaaaccgacgcgaacgcaaacgaaaaaaaacgataacgacccccacacccgcaaccgaaacccccgcaacgccctaaaattcctacccgcccccaaaaaaaaccgccgaaacccgacccgaaacgccctcgcaaccgcctttatacgacgaccccgaacgaaaaaaaaaaccgaaacaaacgaaaccgaacaaaaaacgcccgaaaacgcgcgacgcgcccccgccccctatctaaccgccccctaccttccccgcgcgacgcgctctttattcccgcccgaaaaccgaaacccgaaaaaacgaccgaccgaaaacgcgcgatacctacgtatctttataaaaaaaaaccaaacgctccttaaacactttaaaacgctaaaacaaccgcttacgcaacccctccaccgtctcgtcgaacgacacgaccaaatcgtaacgaatacccgtaatactataaataacgaaactcataaacgccgcctcgaccgccgaacccaactcgcaaacgccgccgaaaaccccgcgccgacaactccgaacgccgccgaactacgactccatccccgacgcgcgctaaaaaactaaaaacgacgaacgccgccaatcctcgccgcgcctccgaaacaaaaacgaaaaactccccgaataccgaatcctccgaacactcgaaaacgcgaaacaacgcgcgtcctcctcgaaaaaatcccgaccgcgaaatacgaaaccgaaatccaaaatccgaataacgctccgaaatcgctccgactcctaaaaacgccttccgaaaataaaaacgacacttacttctccttcaaaaaacgacgaacgcgaccgaaacgcgacgcgattaaaaatcctaaaaaaaaaacgccgctcgactaataacgctaaataccgtctaccgcccgaatcgcgcttcctcgcgcgtcccctcccttaacaacaaccgtcgccgccgctcgaaaaatctaaaaataaaaataacaaaaaaaaaaaattataatatatcaacgttccaaaaaacgaaaccgccgccccctcccattcactacttactccgccgaccgaacgccgaccaatcgccgcgcgccgaacgcccaatcgaccgcgaacccgaacctataaaaaccgccgcgacaccgccccacgtaacaaccgaacccgccccctcgccccgcccccaacgcccaaacgaccaaaaaaaacgcaacgaaaacgaaactaacgcctctccgcgcccgcccccgccccgcccgcgcccgcaaccattcataaacgcccgaaacccgcaacaaaaaacgaacgcgccccgaaaaacgcgaaacccaaatctaaaaacgaatctaatacccctcgcgatcccaaaaaaacgaccgaaaacgaaaaaaaacgcgaaccattattcccgacgccgaaaaaaacaaaaaatcgtaaaaccaccccgccgccttcgtccgaaaaaaaccgcgaacgaaaacgaaaacgcgaaatccgcgcctcgtaaccgaaatcccgaaacgaacgaacgacgataaaactaaaaccgcgaccccgaaaaaaacgtaatacgtaaaaacgaaattataaccgaaacgaaacgcccgcacctcgataacgtaaccgaataactaccgccgaaaaccccgcgcgcccacccgccgaccgcgaacaaaacccgtttccccgaaacgcgcccgctcgaaccgtaacgtaacgcgacgtccccgactacgcccgcgcgcgctcgaaaatacgataaatcaacaactcgaacgcgccctctaccgaacccgcctaaaaacgccgcccgaaatcccgaaaaaaaaacgccgcgctacccctaacaaaaaaaaaaaacgactaaactacgcgcgaaaaaaaaaccccgatcgaaaacgaaaaactataatcgaaaaactaaaaccgtataactaaacaacgaaaaacgaaacgacaaccaattcaaaatcacccgcgataaaa

SEQ ID NO: 1183 - DNA, 2166 bp, Artificial Sequence
  chemically treated genomic DNA (Homo sapiens) CpG-island No: 1183
ttgggatggatattgcgtgttttcggaggttcgcggggggagggtttcgggtttgtaggcgatttaaatattaggggggaggggaggttgcggggagcgttcggaggcgagaataaagggggggagagagacgtaagtggggggagatagttagacgtagaggaggtcgtcgagtagatgcggaagtcggcgcggacgtaggcgggagggggcggtggcggtttttatattcgtagtcgggattttcgtaacgttttgggatttttgttcgtttttaaggggggtcgtcgaagttcggttcgggacgttttcgtagtcgtttttgtgcggcgatttcgggcgggggagggggtcgaggtaggcgaggtcgagtagagggcgttcgagagcgcgcggcgcgttttcgttttttgtttggtcgttttttgtttttttcgcgcggcgcgttttttgttttcgttcgggggtcggggttcgagggggcggtcggtcgggggcgcgcggtatttacgtgtttttgtggagaagagttaggcgttttttgggtattttgaggcgttgggataatcgtttgcgtagtttttttatcgtttcgtcgggcggtacggttaggtcgtagcgggtgttcgtggtgttgtggatggcgaggtttatgggcgtcgtttcggtcgtcgggtttagttcgtaggcgtcgtcgggggtttcgcgtcggtagtttcgggcgtcgtcgggttgcggttttattttcggcgcgcgttggggggttgggggcggcgggcgtcgttaattttcgtcgcgttttcgggataggggcgagaggtttttcggatgtcgggtttttcgggtattcgggggcgcggagtagcgcgcgtttttttcgagaaagtttcggtcgcggaatgcgagatcgaaatttaaaattcgagtggcgtttcgaggtcgtttcggtttttgggggcgtttttcgggggtggggacggtatttgttttttttttaaagggcggcgggcgcgatcgggacgcggcgcggttaagggttttggggagggggcgtcgttcggttggtggcgttgggtgtcgtttgtcgttcgggtcgcgttttttcgcgcgtttttttttttagtaatagtcgtcgtcgtcgttcggaggatttgggggtgaaagtaataagaaaaaaaagttataatgtattaacgttttagggggcggggtcgtcgtttttttttatttattatttatttcgtcggtcgggcgtcggttaatcgtcgcgcgtcgagcgtttagtcggtcgcgagttcgggtttatgagagtcgtcgcggtatcgttttacgtggtagtcgggttcgttttttcgtttcgtttttagcgtttaggcgattaaggggagcgtagcgggggcggggttggcgttttttcgcgttcgttttcgtttcgttcgcgttcgtagttatttataagcgttcggagttcgtaataaagggcgggcgcgtttcggggggcgcgggatttaggtttggagacgggtttggtatttttcgcgattttaagggagcggtcgggagcgggagggggcgcgggttattgttttcggcgtcgggaggggtaggaagtcgtggggttatttcgtcgttttcgttcgggaaaagtcgcgagcggaagcgggagcgcgaagttcgcgtttcgtggtcggggtttcggggcgggcgggcgacggtgaggttagggtcgcggtttcggggagggcgtggtgcgtgggggcggagttgtggtcggggcggggcgttcgtatttcggtgacgtggtcgggtggttgtcgtcgggggtttcgcgcgtttattcgtcggtcgcgggtagaattcgttttttcgaggcgcgttcgttcgagtcgtgacgtgacgcggcgttttcggttgcgttcgcgcgcgttcggggatgcggtgagttagtagttcgggcgcgttttttgtcgggttcgtttgggagcgtcgttcggagtttcggggagggggcgtcgcgttgtttttggtaggggaggaagacgattgggttgcgcgcgggggaggaatttcgatcgggaacgaaagattgtagtcgggagattgggatcgtgtggttgggtaacggagggcggaacggtaattagtttaaggttattcgcggtgaag

SEQ ID NO: 1184 - DNA, 2166 bp, Artificial Sequence
  chemically treated genomic DNA (Homo sapiens) CpG-island No: 1184
cttcaccgcgaataaccttaaactaattaccgttccgccctccgttacccaaccacacgatcccaatctcccgactacaatctttcgttcccgatcgaaattcctcccccgcgcgcaacccaatcgtcttcctcccctaccaaaaacaacgcgacgccccctccccgaaactccgaacgacgctcccaaacgaacccgacaaaaaacgcgcccgaactactaactcaccgcatccccgaacgcgcgcgaacgcaaccgaaaacgccgcgtcacgtcacgactcgaacgaacgcgcctcgaaaaaacgaattctacccgcgaccgacgaataaacgcgcgaaacccccgacgacaaccacccgaccacgtcaccgaaatacgaacgccccgccccgaccacaactccgcccccacgcaccacgccctccccgaaaccgcgaccctaacctcaccgtcgcccgcccgccccgaaaccccgaccacgaaacgcgaacttcgcgctcccgcttccgctcgcgacttttcccgaacgaaaacgacgaaataaccccacgacttcctacccctcccgacgccgaaaacaataacccgcgccccctcccgctcccgaccgctcccttaaaatcgcgaaaaataccaaacccgtctccaaacctaaatcccgcgccccccgaaacgcgcccgccctttattacgaactccgaacgcttataaataactacgaacgcgaacgaaacgaaaacgaacgcgaaaaaacgccaaccccgcccccgctacgctccccttaatcgcctaaacgctaaaaacgaaacgaaaaaacgaacccgactaccacgtaaaacgataccgcgacgactctcataaacccgaactcgcgaccgactaaacgctcgacgcgcgacgattaaccgacgcccgaccgacgaaataaataataaataaaaaaaaacgacgaccccgccccctaaaacgttaatacattataacttttttttcttattactttcacccccaaatcctccgaacgacgacgacgactattactaaaaaaaaaaacgcgcgaaaaaacgcgacccgaacgacaaacgacacccaacgccaccaaccgaacgacgccccctccccaaaacccttaaccgcgccgcgtcccgatcgcgcccgccgccctttaaaaaaaaaacaaataccgtccccacccccgaaaaacgcccccaaaaaccgaaacgacctcgaaacgccactcgaattttaaatttcgatctcgcattccgcgaccgaaactttctcgaaaaaaacgcgcgctactccgcgcccccgaatacccgaaaaacccgacatccgaaaaacctctcgcccctatcccgaaaacgcgacgaaaattaacgacgcccgccgcccccaaccccccaacgcgcgccgaaaataaaaccgcaacccgacgacgcccgaaactaccgacgcgaaacccccgacgacgcctacgaactaaacccgacgaccgaaacgacgcccataaacctcgccatccacaacaccacgaacacccgctacgacctaaccgtaccgcccgacgaaacgataaaaaaactacgcaaacgattatcccaacgcctcaaaatacccaaaaaacgcctaactcttctccacaaaaacacgtaaataccgcgcgcccccgaccgaccgccccctcgaaccccgacccccgaacgaaaacaaaaaacgcgccgcgcgaaaaaaacaaaaaacgaccaaacaaaaaacgaaaacgcgccgcgcgctctcgaacgccctctactcgacctcgcctacctcgaccccctcccccgcccgaaatcgccgcacaaaaacgactacgaaaacgtcccgaaccgaacttcgacgaccccccttaaaaacgaacaaaaatcccaaaacgttacgaaaatcccgactacgaatataaaaaccgccaccgccccctcccgcctacgtccgcgccgacttccgcatctactcgacgacctcctctacgtctaactatctccccccacttacgtctctctccccccctttattctcgcctccgaacgctccccgcaacctcccctcccccctaatatttaaatcgcctacaaacccgaaaccctccccccgcgaacctccgaaaacacgcaatatccatcccaa

SEQ ID NO: 1185 - DNA, 540 bp, Artificial Sequence
  chemically treated genomic DNA (Homo sapiens) CpG-island No: 1185
ggagggggcggttttcggaaattcgtcgggatggaaacgcggtttttagggtaacgcgtcgcgaaaggagtttgacgttatttcgggtagggcgttttgttcgttttcgttcgcgcgtcgcgcggtttaggtttcgtttattagcggggaagttttattggtgatcgtatcgttcgtttatcggcgtgttttagtagtagcgcgacgaagtttttagaaggcgggattttagttcggtagcgtcgagtgcgtaggcgtaagcgcggaggcgttgtagtttcgttttttttttcgcgcgtttgtaaagttgggggcgggaggcgtagtcgagggtttgacggttgcggcggggtttggacggaagagggggcgagtttcggggcgtcgtacgtggattttcggtacgggtacgtttacgtgtattcgtttttttacgttaacgcgttttttgttgtttttatttttgtattattgtacgttttagatttcggtttagttttttcgcggtttttaggttgggggagtttagataggaggtta

SEQ ID NO: 1186 - DNA, 540 bp, Artificial Sequence
  chemically treated genomic DNA (Homo sapiens) CpG-island No: 1186
taacctcctatctaaactcccccaacctaaaaaccgcgaaaaaactaaaccgaaatctaaaacgtacaataatacaaaaataaaaacaacaaaaaacgcgttaacgtaaaaaaacgaatacacgtaaacgtacccgtaccgaaaatccacgtacgacgccccgaaactcgccccctcttccgtccaaaccccgccgcaaccgtcaaaccctcgactacgcctcccgcccccaactttacaaacgcgcgaaaaaaaaaacgaaactacaacgcctccgcgcttacgcctacgcactcgacgctaccgaactaaaatcccgccttctaaaaacttcgtcgcgctactactaaaacacgccgataaacgaacgatacgatcaccaataaaacttccccgctaataaacgaaacctaaaccgcgcgacgcgcgaacgaaaacgaacaaaacgccctacccgaaataacgtcaaactcctttcgcgacgcgttaccctaaaaaccgcgtttccatcccgacgaatttccgaaaaccgccccctcc

SEQ ID NO: 1187 - DNA, 540 bp, Artificial Sequence
  chemically treated genomic DNA (Homo sapiens) CpG-island No: 1187
tagttttttgtttgagtttttttagtttagggatcgcggggaggttgggtcggggtttgggacgtgtagtggtgtaggggtgggggtagtaggaaacgcgttggcgtgaaaggacgggtgtacgtgagcgtgttcgtgtcgggggtttacgtgcggcgtttcggggttcgttttttttttcgtttaggtttcgtcgtagtcgttagattttcggttgcgtttttcgtttttaattttgtagacgcgcggggagagaggcggggttgtagcgttttcgcgtttgcgtttgcgtattcggcgttgtcgggttgaagtttcgttttttggaggtttcgtcgcgttgttattggggtacgtcgatgagcgagcggtgcgattattaatgaggttttttcgttggtgggcggggtttgggtcgcgcgacgcgcggacgggggcgggtagggcgttttattcggggtgacgttaggtttttttcgcggcgcgttgttttggaaatcgcgtttttatttcggcgggttttcgggggtcgtttttttt

SEQ ID NO: 1188 - DNA, 540 bp, Artificial Sequence
  chemically treated genomic DNA (Homo sapiens) CpG-island No: 1188
aaaaaaaacgacccccgaaaacccgccgaaataaaaacgcgatttccaaaacaacgcgccgcgaaaaaaacctaacgtcaccccgaataaaacgccctacccgcccccgtccgcgcgtcgcgcgacccaaaccccgcccaccaacgaaaaaacctcattaataatcgcaccgctcgctcatcgacgtaccccaataacaacgcgacgaaacctccaaaaaacgaaacttcaacccgacaacgccgaatacgcaaacgcaaacgcgaaaacgctacaaccccgcctctctccccgcgcgtctacaaaattaaaaacgaaaaacgcaaccgaaaatctaacgactacgacgaaacctaaacgaaaaaaaaaacgaaccccgaaacgccgcacgtaaacccccgacacgaacacgctcacgtacacccgtcctttcacgccaacgcgtttcctactacccccacccctacaccactacacgtcccaaaccccgacccaacctccccgcgatccctaaactaaaaaaactcaaacaaaaaacta

SEQ ID NO: 1189 - DNA, 838 bp, Artificial Sequence
  chemically treated genomic DNA (Homo sapiens) CpG-island No: 1189
cggtcgttaggtgtacggtttcggttttcgtttggttaggaggaggcggtaattatgcggtttcggggttttttttacgcgttttttattttcggttacgttcgtcgtaggtttagacgttttttatcgtttttcgttcggttattagtcggggtcgggggaggatttggcgttcggcgggcggggtttcgtggggagggcggagtgggcggtgcgggagcgagggagtttcgttttcgtttttatggcgacgtttcgtaggggaggaggttcgggaggagtattagggtgtaggaggtgcgcgtttttttcgagacggtaggttggaaagggggcggatttgtgaatgggtttacggggtttaagatagacgcgcggggagtaggttcggggattttgattgattttcgcgtttcgtcgggtaggggcgagtttcgcgcgtcgggttcggaatagtagtttcgttttcgttcggcgcggttattttgagttttttcgttggggtcgaggcgcgggggcggcgggaggttgggggtcgatacgtaggttgcgttttcgtttcgcgagattggatttttcgaggattgtgcgttgtggtcgcgtagggttgggcggcggggtttttttttttacgcgaggcgtttgcgtggagcggcggtatcgggagttcggtcgttcgagttaaacgtcgcggacggagcgaggtcgtagcgttttttggtgttcgtaacgggtagcgcgtttcggtcgggtttcgtatggttagtggttagtaggggtggatgaaggggttttagtcgtttgagattttcggtggggatataggatcgcggtgaga

SEQ ID NO: 1190 - DNA, 838 bp, Artificial Sequence
  chemically treated genomic DNA (Homo sapiens) CpG-island No: 1190
tctcaccgcgatcctatatccccaccgaaaatctcaaacgactaaaaccccttcatccacccctactaaccactaaccatacgaaacccgaccgaaacgcgctacccgttacgaacaccaaaaaacgctacgacctcgctccgtccgcgacgtttaactcgaacgaccgaactcccgataccgccgctccacgcaaacgcctcgcgtaaaaaaaaaaaccccgccgcccaaccctacgcgaccacaacgcacaatcctcgaaaaatccaatctcgcgaaacgaaaacgcaacctacgtatcgacccccaacctcccgccgcccccgcgcctcgaccccaacgaaaaaactcaaaataaccgcgccgaacgaaaacgaaactactattccgaacccgacgcgcgaaactcgcccctacccgacgaaacgcgaaaatcaatcaaaatccccgaacctactccccgcgcgtctatcttaaaccccgtaaacccattcacaaatccgccccctttccaacctaccgtctcgaaaaaaacgcgcacctcctacaccctaatactcctcccgaacctcctcccctacgaaacgtcgccataaaaacgaaaacgaaactccctcgctcccgcaccgcccactccgccctccccacgaaaccccgcccgccgaacgccaaatcctcccccgaccccgactaataaccgaacgaaaaacgataaaaaacgtctaaacctacgacgaacgtaaccgaaaataaaaaacgcgtaaaaaaaaccccgaaaccgcataattaccgcctcctcctaaccaaacgaaaaccgaaaccgtacacctaacgaccg

SEQ ID NO: 1191 - DNA, 838 bp, Artificial Sequence
  chemically treated genomic DNA (Homo sapiens) CpG-island No: 1191
ttttatcgcgattttgtgtttttatcgggggttttaggcggttgggatttttttatttatttttgttggttattgattatgcgggattcgatcgggacgcgttgttcgttgcggatattagggggcgttgcggtttcgtttcgttcgcggcgtttggttcgagcggtcgggttttcggtgtcgtcgttttacgtagacgtttcgcgtgggagagggggtttcgtcgtttagttttgcgcggttatagcgtatagttttcgaggggtttaatttcgcggggcgaggacgtagtttgcgtgtcgatttttagtttttcgtcgttttcgcgtttcggttttaacggaggagtttaaaatagtcgcgtcgggcgggggcgagattgttatttcgggttcgacgcgcggggttcgtttttgttcggcgaggcgcggggattagttagagttttcgaatttgtttttcgcgcgtttgttttgggtttcgtgggtttatttataaattcgttttttttttagtttgtcgtttcggaaggggcgcgtattttttgtattttgatatttttttcgggtttttttttttgcggggcgtcgttatggagacgagggcggagttttttcgttttcgtatcgtttatttcgttttttttacggggtttcgttcgtcggacgttaggttttttttcgatttcgattaatgatcgggcgggaggcggtagagagcgtttaggtttgcgacgggcgtggtcgaggatgaaaggcgcgtgggggggatttcggggtcgtataattatcgtttttttttagttaggcgggggtcgggatcgtgtatttggcggtcg

SEQ ID NO: 1192 - DNA, 838 bp, Artificial Sequence
  chemically treated genomic DNA (Homo sapiens) CpG-island No: 1192
cgaccgccaaatacacgatcccgacccccgcctaactaaaaaaaaacgataattatacgaccccgaaatcccccccacgcgcctttcatcctcgaccacgcccgtcgcaaacctaaacgctctctaccgcctcccgcccgatcattaatcgaaatcgaaaaaaaacctaacgtccgacgaacgaaaccccgtaaaaaaaacgaaataaacgatacgaaaacgaaaaaactccgccctcgtctccataacgacgccccgcaaaaaaaaaaacccgaaaaaaatatcaaaatacaaaaaatacgcgccccttccgaaacgacaaactaaaaaaaaaacgaatttataaataaacccacgaaacccaaaacaaacgcgcgaaaaacaaattcgaaaactctaactaatccccgcgcctcgccgaacaaaaacgaaccccgcgcgtcgaacccgaaataacaatctcgcccccgcccgacgcgactattttaaactcctccgttaaaaccgaaacgcgaaaacgacgaaaaactaaaaatcgacacgcaaactacgtcctcgccccgcgaaattaaacccctcgaaaactatacgctataaccgcgcaaaactaaacgacgaaaccccctctcccacgcgaaacgtctacgtaaaacgacgacaccgaaaacccgaccgctcgaaccaaacgccgcgaacgaaacgaaaccgcaacgccccctaatatccgcaacgaacaacgcgtcccgatcgaatcccgcataatcaataaccaacaaaaataaataaaaaaatcccaaccgcctaaaacccccgataaaaacacaaaatcgcgataaaa

SEQ ID NO: 1193 - DNA, 564 bp, Artificial Sequence
  chemically treated genomic DNA (Homo sapiens) CpG-island No: 1193
aaacgacgttttttacggttttacggtttaggttagttcggtttcgtcgtcgggagttttagtttcgttagggggcgcgagcggaggtcgcgttcgaggtcgtcgggcgtttcgtttttttttatggtggttcgggcgcggcgggagcggaggcgcgatttcgagagggggcggggtcgagttaggggcggggtcgcgcggagggcgggagcggtcgggtcgggtcgggtcggttggggatgggtgggagggggggtcgattttttggggtcgttcgtgaggatgtcgcgatcgttttcgggtgttttttagttttagagacgtcgtcgcggcggagttcgtagtttttttgtttgaggcgttcgcggtcgggattcggttttttttttcgtttttttttttaggtgtcggtcgggagggcggtcgtagtaggtgaggaggcggcggcggcggcgttgggggtcgttgggcgttcggtttggggaaggacgggaagggggacggtcgggtgtcgttaggttgtggtttgggggttttttttttgtgtggggcgcggtttgggat

SEQ ID NO: 1194 - DNA, 564 bp, Artificial Sequence
  chemically treated genomic DNA (Homo sapiens) CpG-island No: 1194
atcccaaaccgcgccccacacaaaaaaaaaacccccaaaccacaacctaacgacacccgaccgtcccccttcccgtccttccccaaaccgaacgcccaacgacccccaacgccgccgccgccgcctcctcacctactacgaccgccctcccgaccgacacctaaaaaaaaaaacgaaaaaaaaaaccgaatcccgaccgcgaacgcctcaaacaaaaaaactacgaactccgccgcgacgacgtctctaaaactaaaaaacacccgaaaacgatcgcgacatcctcacgaacgaccccaaaaaatcgaccccccctcccacccatccccaaccgacccgacccgacccgaccgctcccgccctccgcgcgaccccgcccctaactcgaccccgccccctctcgaaatcgcgcctccgctcccgccgcgcccgaaccaccataaaaaaaaacgaaacgcccgacgacctcgaacgcgacctccgctcgcgccccctaacgaaactaaaactcccgacgacgaaaccgaactaacctaaaccgtaaaaccgtaaaaaacgtcgttt

SEQ ID NO: 1195 - DNA, 564 bp, Artificial Sequence
  chemically treated genomic DNA (Homo sapiens) CpG-island No: 1195
gttttaggtcgcgttttatatagaggaagggtttttagattatagtttgacggtattcgatcgttttttttttcgtttttttttaggtcgggcgtttagcggtttttagcgtcgtcgtcgtcgtttttttatttgttgcggtcgttttttcggtcggtatttaggagaggaggcgaggggaggggtcggatttcggtcgcggacgttttaggtagggaggttgcggatttcgtcgcggcggcgtttttggggttgaggggtattcgggggcggtcgcgatatttttacgggcggttttaggaagtcggtttttttttttatttatttttagtcggttcggttcggttcggtcgttttcgtttttcgcgcggtttcgtttttgattcggtttcgttttttttcgggatcgcgttttcgttttcgtcgcgttcgagttattatagagaagagcgaggcgttcggcggtttcgagcgcggttttcgttcgcgttttttggcggagttgaggttttcgacggcggggtcgggttggtttgagtcgtggggtcgtaggaggcgtcgttt

SEQ ID NO: 1196 - DNA, 564 bp, Artificial Sequence
  chemically treated genomic DNA (Homo sapiens) CpG-island No: 1196
aaacgacgcctcctacgaccccacgactcaaaccaacccgaccccgccgtcgaaaacctcaactccgccaaaaaacgcgaacgaaaaccgcgctcgaaaccgccgaacgcctcgctcttctctataataactcgaacgcgacgaaaacgaaaacgcgatcccgaaaaaaaacgaaaccgaatcaaaaacgaaaccgcgcgaaaaacgaaaacgaccgaaccgaaccgaaccgactaaaaataaataaaaaaaaaaaccgacttcctaaaaccgcccgtaaaaatatcgcgaccgcccccgaatacccctcaaccccaaaaacgccgccgcgacgaaatccgcaacctccctacctaaaacgtccgcgaccgaaatccgacccctcccctcgcctcctctcctaaataccgaccgaaaaaacgaccgcaacaaataaaaaaacgacgacgacgacgctaaaaaccgctaaacgcccgacctaaaaaaaaacgaaaaaaaaaacgatcgaataccgtcaaactataatctaaaaacccttcctctatataaaacgcgacctaaaac

SEQ ID NO: 1197 - DNA, 770 bp, Artificial Sequence
  chemically treated genomic DNA (Homo sapiens) CpG-island No: 1197
attaggcgttttcgggttttttttcgaattagtcggtgtttggttcggagtgcgtaattttgttttttttgtatttagttttcggtttcgtttttttttgtgttttcgtttggttgcgtttatcgtggtattttgttcggcgtagtggttgatgattcgggagttttttggatgtcggcgggtgaattcgttgatgttgtatattttacggtcgattattagttatcgtttttcgtattttgagcgttgggttatttcgttttaggtgaagtagcgcggggtaggtttttgagtcgcggtttcggcggttatcgggtcgggggttatagttggtttggcgacgtcgcgcgtcgggttagtaggggttgttaggcgcgtgttcggggttcgcgggttttaggagtggatttgttggcgcgcgtttagagttagtcgtttgcgcgtcgggtttttagtatcgtagggtagatcggcgggtttcgtagcgcgcgtttttattggtcgagtttcgtggcgcggggagcgagatttcgtttttcggtgggttttgggtaatttatagttgggttgttaatacgcgttttttcgcgggttttttaaaggcgtcgtcgtcggattcgattttttgacgttaggcgggtatcgcggcgttggtttttagggggcgtcgcggtaggaatagcggttttagtgtaggttttgggtgcggggtcgcgttgtaggagtggatggattgaggggttagggttgcggggtggtcgtaggaaggg

SEQ ID NO: 1198 - DNA, 770 bp, Artificial Sequence
  chemically treated genomic DNA (Homo sapiens) CpG-island No: 1198
cccttcctacgaccaccccgcaaccctaacccctcaatccatccactcctacaacgcgaccccgcacccaaaacctacactaaaaccgctattcctaccgcgacgccccctaaaaaccaacgccgcgatacccgcctaacgtcaaaaaatcgaatccgacgacgacgcctttaaaaaacccgcgaaaaaacgcgtattaacaacccaactataaattacccaaaacccaccgaaaaacgaaatctcgctccccgcgccacgaaactcgaccaataaaaacgcgcgctacgaaacccgccgatctaccctacgatactaaaaacccgacgcgcaaacgactaactctaaacgcgcgccaacaaatccactcctaaaacccgcgaaccccgaacacgcgcctaacaacccctactaacccgacgcgcgacgtcgccaaaccaactataacccccgacccgataaccgccgaaaccgcgactcaaaaacctaccccgcgctacttcacctaaaacgaaataacccaacgctcaaaatacgaaaaacgataactaataatcgaccgtaaaatatacaacatcaacgaattcacccgccgacatccaaaaaactcccgaatcatcaaccactacgccgaacaaaataccacgataaacgcaaccaaacgaaaacacaaaaaaaaacgaaaccgaaaactaaatacaaaaaaaacaaaattacgcactccgaaccaaacaccgactaattcgaaaaaaaacccgaaaacgcctaat

SEQ ID NO: 1199 - DNA, 770 bp, Artificial Sequence
  chemically treated genomic DNA (Homo sapiens) CpG-island No: 1199
ttttttttgcggttatttcgtagttttggttttttagtttatttatttttgtagcgcggtttcgtatttagggtttgtattagaatcgttgtttttatcgcggcgttttttgggagttaacgtcgcgatgttcgtttgacgttaggaagtcgaattcggcggcgacgtttttagggagttcgcgagggggcgcgtgttggtagtttagttgtgagttgtttaagatttatcgggggacgggatttcgtttttcgcgttacgaggttcggttaatgggaacgcgcgttgcgaggttcgtcggtttgttttgcggtgttgaaaattcggcgcgtaggcggttggttttgggcgcgcgttagtaaatttatttttggagttcgcggatttcgagtacgcgtttgatagtttttgttggttcggcgcgcggcgtcgttaggttagttatggttttcgattcggtggtcgtcgagatcgcggtttagggatttatttcgcgttattttatttgggacgaggtggtttagcgtttagggtgcgaggagcggtggttagtgatcgatcgtaaggtgtataatattagcgagtttattcgtcggtatttagggggttttcgggttattagttattacgtcgggtaggatgttacggtgagcgtagttaggcgggggtataggagagggcgggatcggaggttgagtgtaggggagatagagttacgtatttcgagttaaatatcgattaattcggaggaaagttcggaggcgtttgat

SEQ ID NO: 1200 - DNA, 770 bp, Artificial Sequence
  chemically treated genomic DNA (Homo sapiens) CpG-island No: 1200
atcaaacgcctccgaactttcctccgaattaatcgatatttaactcgaaatacgtaactctatctcccctacactcaacctccgatcccgccctctcctatacccccgcctaactacgctcaccgtaacatcctacccgacgtaataactaataacccgaaaaccccctaaataccgacgaataaactcgctaatattatacaccttacgatcgatcactaaccaccgctcctcgcaccctaaacgctaaaccacctcgtcccaaataaaataacgcgaaataaatccctaaaccgcgatctcgacgaccaccgaatcgaaaaccataactaacctaacgacgccgcgcgccgaaccaacaaaaactatcaaacgcgtactcgaaatccgcgaactccaaaaataaatttactaacgcgcgcccaaaaccaaccgcctacgcgccgaattttcaacaccgcaaaacaaaccgacgaacctcgcaacgcgcgttcccattaaccgaacctcgtaacgcgaaaaacgaaatcccgtcccccgataaatcttaaacaactcacaactaaactaccaacacgcgccccctcgcgaactccctaaaaacgtcgccgccgaattcgacttcctaacgtcaaacgaacatcgcgacgttaactcccaaaaaacgccgcgataaaaacaacgattctaatacaaaccctaaatacgaaaccgcgctacaaaaataaataaactaaaaaaccaaaactacgaaataaccgcaaaaaaaa

SEQ ID NO: 1201 - DNA, 591 bp, Artificial Sequence
  chemically treated genomic DNA (Homo sapiens) CpG-island No: 1201
agtttcgattgtcgcgcgttaaggaagggcgttatttagttaagtcggttttggagttgagtgtttcgtagttcgtcggtttattcgttcggtcgtttgttggtattttggtggtcgcgtcggttttgtgtcggtattaggtgtaaatttttagagcgtcgggcgtgcgcgtacgcgtttcggagcgcgcggagtttattcgttgtttttatcgggattttttttaggatttttttcggcgttcggggtcggagagtgggggagggaggaggtcggatacgtagtttgtttcgtagtagggttcgattttacgcgggagggcgggggagtcggggattcgtcgttttagttcgttggttttcgaaagatttttttgggttaatggtaggcggggcgacgcgatcggattggtgtaggcgttttgttgatcgttgtggaaattcgggcggcggggaacgcgggaggatgtggaattcgaggcggggggagtcggaggggcgggtagaggaggtgtcgaggttttgagttttcggggagtttttattggaggtaaaagtttatagcgggagggttgagggaggggcggaggaa

SEQ ID NO: 1202 - DNA, 591 bp, Artificial Sequence
  chemically treated genomic DNA (Homo sapiens) CpG-island No: 1202
ttcctccgcccctccctcaaccctcccgctataaacttttacctccaataaaaactccccgaaaactcaaaacctcgacacctcctctacccgcccctccgactccccccgcctcgaattccacatcctcccgcgttccccgccgcccgaatttccacaacgatcaacaaaacgcctacaccaatccgatcgcgtcgccccgcctaccattaacccaaaaaaatctttcgaaaaccaacgaactaaaacgacgaatccccgactcccccgccctcccgcgtaaaatcgaaccctactacgaaacaaactacgtatccgacctcctccctcccccactctccgaccccgaacgccgaaaaaaatcctaaaaaaaatcccgataaaaacaacgaataaactccgcgcgctccgaaacgcgtacgcgcacgcccgacgctctaaaaatttacacctaataccgacacaaaaccgacgcgaccaccaaaataccaacaaacgaccgaacgaataaaccgacgaactacgaaacactcaactccaaaaccgacttaactaaataacgcccttccttaacgcgcgacaatcgaaact

SEQ ID NO: 1203 - DNA, 591 bp, Artificial Sequence
  chemically treated genomic DNA (Homo sapiens) CpG-island No: 1203
ttttttcgttttttttttagttttttcgttatggatttttgtttttagtaaaaatttttcgggagtttagggtttcgatattttttttgttcgttttttcggtttttttcgtttcgggttttatattttttcgcgtttttcgtcgttcgagtttttatagcgattagtagagcgtttgtattaattcggtcgcgtcgtttcgtttgttattggtttaggaggatttttcgaaggttagcgggttggagcggcgggttttcggttttttcgttttttcgcgtggagtcgagttttgttgcgaggtaggttacgtgttcgatttttttttttttttatttttcggtttcgggcgtcggaggagattttagaggagatttcggtgggggtaacgaatgggtttcgcgcgtttcggggcgcgtgcgcgtacgttcggcgttttgggggtttgtatttgatgtcgatataaagtcggcgcggttattagggtgttagtaagcggtcgggcgggtggatcggcgggttgcggggtatttaattttagggtcggtttggttaggtgacgtttttttttggcgcgcggtagtcgagatt

SEQ ID NO: 1204 - DNA, 591 bp, Artificial Sequence
  chemically treated genomic DNA (Homo sapiens) CpG-island No: 1204
aatctcgactaccgcgcgccaaaaaaaaacgtcacctaaccaaaccgaccctaaaattaaataccccgcaacccgccgatccacccgcccgaccgcttactaacaccctaataaccgcgccgactttatatcgacatcaaatacaaacccccaaaacgccgaacgtacgcgcacgcgccccgaaacgcgcgaaacccattcgttacccccaccgaaatctcctctaaaatctcctccgacgcccgaaaccgaaaaataaaaaaaaaaaaaaatcgaacacgtaacctacctcgcaacaaaactcgactccacgcgaaaaaacgaaaaaaccgaaaacccgccgctccaacccgctaaccttcgaaaaatcctcctaaaccaataacaaacgaaacgacgcgaccgaattaatacaaacgctctactaatcgctataaaaactcgaacgacgaaaaacgcgaaaaaatataaaacccgaaacgaaaaaaaccgaaaaaacgaacaaaaaaaatatcgaaaccctaaactcccgaaaaatttttactaaaaacaaaaatccataacgaaaaaactaaaaaaaaaacgaaaaaa

SEQ ID NO: 1205 - DNA, 567 bp, Artificial Sequence
  chemically treated genomic DNA (Homo sapiens) CpG-island No: 1205
atcggttatgtagtcgtttacggcggtgggtttttgggtcgttattacgtagttgtacgatatgtcgaggtttggagcggttcgtcgggattcgagcgcgatattataaagagggatataagcgaaaagataggtggtttttaatagcgcgtagcgaattttattgtcgttgttttcgttttagagatacgttgtaggttagagcggtcggggcgcggggtattacgggacggttttatttggttttttggaggattttcgaagttcgaggtcgttaatcgaaggaggtttcgttttcggaggtatcgtttcgttttttttcgttagcgttcgtaggattcggatgagagcgtacgtttcggggttttcgggaagtcgcggcgttttcggatgtggcggatgcggtcgtgagtcggcgggggaggtgcgttagtgtttttcgagttcgttcgtagattttttatttcgtttcgcgttttttgttttttttcgtatttagtttttttttcgttgttttaggagttttcgggttgttttttttttggggaacgggaaggattgcggagg

SEQ ID NO: 1206 - DNA, 567 bp, Artificial Sequence
  chemically treated genomic DNA (Homo sapiens) CpG-island No: 1206
cctccgcaatccttcccgttccccaaaaaaaaaacaacccgaaaactcctaaaacaacgaaaaaaaaactaaatacgaaaaaaaacaaaaaacgcgaaacgaaataaaaaatctacgaacgaactcgaaaaacactaacgcacctcccccgccgactcacgaccgcatccgccacatccgaaaacgccgcgacttcccgaaaaccccgaaacgtacgctctcatccgaatcctacgaacgctaacgaaaaaaaacgaaacgatacctccgaaaacgaaacctccttcgattaacgacctcgaacttcgaaaatcctccaaaaaaccaaataaaaccgtcccgtaataccccgcgccccgaccgctctaacctacaacgtatctctaaaacgaaaacaacgacaataaaattcgctacgcgctattaaaaaccacctatcttttcgcttatatccctctttataatatcgcgctcgaatcccgacgaaccgctccaaacctcgacatatcgtacaactacgtaataacgacccaaaaacccaccgccgtaaacgactacataaccgat

SEQ ID NO: 1207 - DNA, 567 bp, Artificial Sequence
  chemically treated genomic DNA (Homo sapiens) CpG-island No: 1207
ttttcgtagtttttttcgttttttaaaggaggaatagttcgagggtttttggagtaacggaaggaggattggatgcggggaagggtaaagggcgcggaacggggtggggagtttgcgggcgagttcggaggatattggcgtatttttttcgtcggtttacggtcgtattcgttatattcgaaggcgtcgcgatttttcggagatttcgaagcgtgcgtttttattcgggttttgcgggcgttggcggaaagaggcgaggcggtgttttcgggggcggggtttttttcggttggcggtttcgggtttcgggagttttttaagaggttaggtgaggtcgtttcgtgatgtttcgcgtttcggtcgttttggtttgtaacgtgtttttggggcggaggtagcggtagtggagttcgttgcgcgttgttgggggttatttgttttttcgtttgtgtttttttttgtagtgtcgcgttcgagtttcgacgggtcgttttaagtttcgatatgtcgtataattacgtggtaacggtttagaagtttatcgtcgtgaacggttgtatgatcggt

SEQ ID NO: 1208 - DNA, 567 bp, Artificial Sequence
  chemically treated genomic DNA (Homo sapiens) CpG-island No: 1208
accgatcatacaaccgttcacgacgataaacttctaaaccgttaccacgtaattatacgacatatcgaaacttaaaacgacccgtcgaaactcgaacgcgacactacaaaaaaaaacacaaacgaaaaaacaaataacccccaacaacgcgcaacgaactccactaccgctacctccgccccaaaaacacgttacaaaccaaaacgaccgaaacgcgaaacatcacgaaacgacctcacctaacctcttaaaaaactcccgaaacccgaaaccgccaaccgaaaaaaaccccgcccccgaaaacaccgcctcgcctctttccgccaacgcccgcaaaacccgaataaaaacgcacgcttcgaaatctccgaaaaatcgcgacgccttcgaatataacgaatacgaccgtaaaccgacgaaaaaaatacgccaatatcctccgaactcgcccgcaaactccccaccccgttccgcgccctttacccttccccgcatccaatcctccttccgttactccaaaaaccctcgaactattcctcctttaaaaaacgaaaaaaactacgaaaa

SEQ ID NO: 1209 - DNA, 652 bp, Artificial Sequence
  chemically treated genomic DNA (Homo sapiens) CpG-island No: 1209
tttgtcgttgtcgttggttttcgtggttttggaggttgcgtggttcggggttgtggcgttggttgatttcgtttttggtgggggttttttttggtttttcgtgggtcgtttttttgttgtgttttcgtttggggggtgggcgttttggtgtttcgtttttttgcgtgttttttttgtcgtggaggggggttaggggcgttttttttgttgttcgggggtgcgttgttgtcgtcgcggttcgttggggttttcgttttcgcggttcgagcggttcggcggttttttcggagtgtcgtggggtgtcggtggtgcgcgttcgcggttggcgtggttttgggggtgttggtggggggtgggggtttcgtcgtgttgggcgtggttgggcgtttggcgttttggtcgtcgggtggtgttggtcgtcgttggtcgtcgttgggtgtcggggggtgcggggggtagcggtcgggggtgtgggcgcgtcgtggtttttcgtggaggtgggagtcgatggtcgggcggggggtggtacgttttggtggtcgtcgtgtggttcgtatgtgaggtggttgtgttagtgttgtgtgtgatggggtgtgtgtcgggtgggcgttggggagtggggttgtgggttgtggaggtgatggttgtgggg

SEQ ID NO: 1210 - DNA, 652 bp, Artificial Sequence
  chemically treated genomic DNA (Homo sapiens) CpG-island No: 1210
ccccacaaccatcacctccacaacccacaaccccactccccaacgcccacccgacacacaccccatcacacacaacactaacacaaccacctcacatacgaaccacacgacgaccaccaaaacgtaccaccccccgcccgaccatcgactcccacctccacgaaaaaccacgacgcgcccacacccccgaccgctaccccccgcaccccccgacacccaacgacgaccaacgacgaccaacaccacccgacgaccaaaacgccaaacgcccaaccacgcccaacacgacgaaacccccaccccccaccaacacccccaaaaccacgccaaccgcgaacgcgcaccaccgacaccccacgacactccgaaaaaaccgccgaaccgctcgaaccgcgaaaacgaaaaccccaacgaaccgcgacgacaacaacgcacccccgaacaacaaaaaaaacgcccctaacccccctccacgacaaaaaaaacacgcaaaaaaacgaaacaccaaaacgcccaccccccaaacgaaaacacaacaaaaaaacgacccacgaaaaaccaaaaaaaacccccaccaaaaacgaaatcaaccaacgccacaaccccgaaccacgcaacctccaaaaccacgaaaaccaacgacaacgacaaa

SEQ ID NO: 1211 - DNA, 652 bp, Artificial Sequence
  chemically treated genomic DNA (Homo sapiens) CpG-island No: 1211
ttttataattattatttttatagtttataattttattttttaacgtttattcgatatatattttattatatataatattggtataattattttatatacgggttatacggcggttattagggcgtgttatttttcgttcggttatcgatttttatttttacgaggagttacggcgcgtttatattttcggtcgttatttttcgtatttttcggtatttaacggcggttaacggcggttagtattattcgacggttaggacgttaagcgtttagttacgtttaatacggcgaaatttttattttttattaatatttttaaaattacgttagtcgcgggcgcgtattatcggtattttacggtatttcgggagggtcgtcggatcgttcgaatcgcggaggcggaggttttagcgaatcgcgacggtaataacgtattttcgggtaatagagggagcgtttttggtttttttttacgataaaaaaaatacgtaagaagacgagatattagagcgtttattttttaagcgaggatatagtaagaagacggtttacggaaagttaggaagagtttttattagaaacggaattagttagcgttataatttcggattacgtagtttttagaattacgagaattaacgatagcggtaga

SEQ ID NO: 1212 - DNA, 652 bp, Artificial Sequence
  chemically treated genomic DNA (Homo sapiens) CpG-island No: 1212
tctaccgctatcgttaattctcgtaattctaaaaactacgtaatccgaaattataacgctaactaattccgtttctaataaaaactcttcctaactttccgtaaaccgtcttcttactatatcctcgcttaaaaaataaacgctctaatatctcgtcttcttacgtattttttttatcgtaaaaaaaaaccaaaaacgctccctctattacccgaaaatacgttattaccgtcgcgattcgctaaaacctccgcctccgcgattcgaacgatccgacgaccctcccgaaataccgtaaaataccgataatacgcgcccgcgactaacgtaattttaaaaatattaataaaaaataaaaatttcgccgtattaaacgtaactaaacgcttaacgtcctaaccgtcgaataatactaaccgccgttaaccgccgttaaataccgaaaaatacgaaaaataacgaccgaaaatataaacgcgccgtaactcctcgtaaaaataaaaatcgataaccgaacgaaaaataacacgccctaataaccgccgtataacccgtatataaaataattataccaatattatatataataaaatatatatcgaataaacgttaaaaaataaaattataaactataaaaataataattataaaa

SEQ ID NO: 1213 - DNA, 853 bp, Artificial Sequence
  chemically treated genomic DNA (Homo sapiens) CpG-island No: 1213
ttggcgtcgtgggttcgaatttttacggtttttatttcgttataataaggcgtttcgggttttatcgataggggttatgttcggggcgcgtagtttttggtgttagttttgttttcgaagtttgttttttttcggggtttcggtttgacgtttttagttagcgtttcgtaggaagtcgatttttaaatcggggtagggggtgtgggtcgagggcgaaatttcgtttttaggggtttttgatttttgttttcgtttcgggtttcgcgtttttcggagaggtattagtaggcgggcggcgttgtttttgtgtgtttcgtttcgaggtgttagagattttttttataatcgttcgtcgcgttttttcgcggttttcggttttttttttcggcgttttaagtttttttgtttagttttgcgtgttatttcggggatcgttggttcgttttttacggcgttaggaggaggggcgagggtcggtagttttttttttcgcgcgcggcgtaggagtcgagtttagttcgggggattcgtcgtcgtcggttatgtgggtcggattgttttttcgggtcgtttgtgtcgcgtttttgttgtcgggggtattagttcgaggttatatcgggaggaagtcgttcgggtatttcgcggtcgagaggtaagcgttcggagttttttttcgttttttcgttcgggagagcgttatcggcgtgtagtcgagaggcgcggaggggcgtttaggagtcgtaggtagtcgcgtgtcggggttttttttggggtgttattagcgcgggtatagttcggggacggtataaagagttagtaatttgtgtttttaggcgggtgtttatcgtgtttt

SEQ ID NO: 1214 - DNA, 853 bp, Artificial Sequence
  chemically treated genomic DNA (Homo sapiens) CpG-island No: 1214
aaaacacgataaacacccgcctaaaaacacaaattactaactctttataccgtccccgaactatacccgcgctaataacaccccaaaaaaaaccccgacacgcgactacctacgactcctaaacgcccctccgcgcctctcgactacacgccgataacgctctcccgaacgaaaaaacgaaaaaaaactccgaacgcttacctctcgaccgcgaaatacccgaacgacttcctcccgatataacctcgaactaatacccccgacaacaaaaacgcgacacaaacgacccgaaaaaacaatccgacccacataaccgacgacgacgaatcccccgaactaaactcgactcctacgccgcgcgcgaaaaaaaaaactaccgaccctcgcccctcctcctaacgccgtaaaaaacgaaccaacgatccccgaaataacacgcaaaactaaacaaaaaaacttaaaacgccgaaaaaaaaaaccgaaaaccgcgaaaaaacgcgacgaacgattataaaaaaaatctctaacacctcgaaacgaaacacacaaaaacaacgccgcccgcctactaatacctctccgaaaaacgcgaaacccgaaacgaaaacaaaaatcaaaaacccctaaaaacgaaatttcgccctcgacccacaccccctaccccgatttaaaaatcgacttcctacgaaacgctaactaaaaacgtcaaaccgaaaccccgaaaaaaaacaaacttcgaaaacaaaactaacaccaaaaactacgcgccccgaacataacccctatcgataaaacccgaaacgccttattataacgaaataaaaaccgtaaaaattcgaacccacgacgccaa

SEQ ID NO: 1215 - DNA, 853 bp, Artificial Sequence
  chemically treated genomic DNA (Homo sapiens) CpG-island No: 1215
ggggtacgatgagtattcgtttagaggtataagttgttgattttttgtgtcgttttcgagttgtgttcgcgttgatagtattttagaggaagtttcgatacgcggttgtttgcggtttttgagcgttttttcgcgtttttcgattgtacgtcggtagcgttttttcgggcgggggagcggggaggagtttcgggcgtttatttttcggtcgcgaagtgttcgggcggttttttttcggtgtagtttcgggttggtgttttcggtagtaggagcgcgatataggcggttcgaaggagtagttcggtttatatgatcggcggcggcgggtttttcgggttgggttcggtttttgcgtcgcgcgcgggagagggggttgtcggttttcgtttttttttttggcgtcgtggggagcgaattagcgattttcgaaatggtacgtagagttgagtaggggggtttgggacgtcgagaggaggggtcgagggtcgcgaggggacgcggcggacgattgtggggagggtttttggtatttcgaagcgaaatatataaaggtaacgtcgttcgtttgttgatgttttttcgagaggcgcggagttcggggcgggggtaaagattagggatttttgggggcggggtttcgttttcggtttatattttttgtttcggtttgggagtcggttttttgcgaagcgttgattgaaggcgttagatcgaggtttcgggaggaaatagatttcgggaataaggttagtattagaggttgcgcgtttcgggtatggtttttgtcggtgggattcgagacgttttgttgtgacgaggtgggaatcgtggaaattcgaatttacgacgttag

SEQ ID NO: 1216 - DNA, 853 bp, Artificial Sequence
  chemically treated genomic DNA (Homo sapiens) CpG-island No: 1216
ctaacgtcgtaaattcgaatttccacgattcccacctcgtcacaacaaaacgtctcgaatcccaccgacaaaaaccatacccgaaacgcgcaacctctaatactaaccttattcccgaaatctatttcctcccgaaacctcgatctaacgccttcaatcaacgcttcgcaaaaaaccgactcccaaaccgaaacaaaaaatataaaccgaaaacgaaaccccgcccccaaaaatccctaatctttacccccgccccgaactccgcgcctctcgaaaaaacatcaacaaacgaacgacgttacctttatatatttcgcttcgaaataccaaaaaccctccccacaatcgtccgccgcgtcccctcgcgaccctcgacccctcctctcgacgtcccaaacccccctactcaactctacgtaccatttcgaaaatcgctaattcgctccccacgacgccaaaaaaaaaaacgaaaaccgacaaccccctctcccgcgcgcgacgcaaaaaccgaacccaacccgaaaaacccgccgccgccgatcatataaaccgaactactccttcgaaccgcctatatcgcgctcctactaccgaaaacaccaacccgaaactacaccgaaaaaaaaccgcccgaacacttcgcgaccgaaaaataaacgcccgaaactcctccccgctcccccgcccgaaaaaacgctaccgacgtacaatcgaaaaacgcgaaaaaacgctcaaaaaccgcaaacaaccgcgtatcgaaacttcctctaaaatactatcaacgcgaacacaactcgaaaacgacacaaaaaatcaacaacttatacctctaaacgaatactcatcgtacccc

SEQ ID NO: 1217 - DNA, 805 bp, Artificial Sequence
  chemically treated genomic DNA (Homo sapiens) CpG-island No: 1217
  unsure (108, 308, 326)
gtcgttgtttggtgggtcgtgcgttcgttggggttgtcgtttggcggtgggggttgcggggtgttttttcggggggttttgttgtgggcgttgtgtttcgtgcgcgtnggttgcgtggtgcggcgtgtgcgcggcgtgttggttgtttcgttgggggcgtggcggtgcgtcgtgcggttgtggtgtcgcggtcgcgttggcgtgtcgttgtgcgtggttgtgtgtgttcgggcgttggtgcgttcggtgcgtgcgtcgggggggtggtgtcggcgggttggttggggttcgggtgtgcgtgtgtgtgntgcgcgcgtgggcggttncgggtggtgtgtgtcgcgtgcgtgtcggttggttggtgcggcgggtggggggtggcgtgtgcgttgggggcgggtgtggcgcgggcgtgcggtgcgcgttgtgtcgatttgttggcggcgtgtcgtgtgcgcgcggtggtcgtggcgtgcgtttgtgttggcgtggtgtgtggggttgttgttggtcggcgggtgggcgggtgggtcgcgcgggcgcgcgtgtgggcggtgttggcgggcggtgtgtgtgtgcgtggggtggtggtgttgggtcgtgtggttggtgcgttgtcgttcgtttggtgtcgcgtggcgggcgcgtgtgtgtgtgtggttcgcgcgtgtgtggttggggtgttggtgcgtcgtgttgggttgtggtgtgtgggtgggtgcgtgtcgtggtgtgtggttgcgtggttgtgggtgcgtggtgttgtggcggtgtcgggttgttcgttattatatttggttaattt

SEQ ID NO: 1218 - DNA, 805 bp, Artificial Sequence
  chemically treated genomic DNA (Homo sapiens) CpG-island No: 1218
  unsure (480, 498, 698)
aaattaaccaaatataataacgaacaacccgacaccgccacaacaccacgcacccacaaccacgcaaccacacaccacgacacgcacccacccacacaccacaacccaacacgacgcaccaacaccccaaccacacacgcgcgaaccacacacacacacgcgcccgccacgcgacaccaaacgaacgacaacgcaccaaccacacgacccaacaccaccaccccacgcacacacacaccgcccgccaacaccgcccacacgcgcgcccgcgcgacccacccgcccacccgccgaccaacaacaaccccacacaccacgccaacacaaacgcacgccacgaccaccgcgcgcacacgacacgccgccaacaaatcgacacaacgcgcaccgcacgcccgcgccacacccgcccccaacgcacacgccaccccccacccgccgcaccaaccaaccgacacgcacgcgacacacaccacccgnaaccgcccacgcgcgcancacacacacgcacacccgaaccccaaccaacccgccgacaccacccccccgacgcacgcaccgaacgcaccaacgcccgaacacacacaaccacgcacaacgacacgccaacgcgaccgcgacaccacaaccgcacgacgcaccgccacgcccccaacgaaacaaccaacacgccgcgcacacgccgcaccacgcaaccnacgcgcacgaaacacaacgcccacaacaaaaccccccgaaaaaacaccccgcaacccccaccgccaaacgacaaccccaacgaacgcacgacccaccaaacaacgac

SEQ ID NO: 1219 - DNA, 805 bp, Artificial Sequence
  chemically treated genomic DNA (Homo sapiens) CpG-island No: 1219
  unsure (480, 498, 698)
aaattagttaggtatgatggcgaatagttcggtatcgttataatattacgtatttatagttacgtagttatatattacgatacgtatttatttatatattatagtttagtacgacgtattagtattttagttatatacgcgcggattatatatatatacgcgttcgttacgcgatattaagcgaacgatagcgtattagttatacgatttagtattattattttacgtatatatatatcgttcgttaatatcgtttatacgcgcgttcgcgcgatttattcgtttattcgtcggttagtagtagttttatatattacgttagtataggcgtacgttacggttatcgcgcgtatacgatacgtcgttagtaggtcgatatagcgcgtatcgtacgttcgcgttatattcgtttttaacgtatacgttattttttattcgtcgtattagttagtcggtacgtacgcgatatatattattcgnggtcgtttacgcgcgtantatatatacgtatattcgggttttaattagttcgtcgatattattttttcgacgtacgtatcgagcgtattaacgttcgagtatatataattacgtataacggtacgttaacgcggtcgcggtattatagtcgtacgacgtatcgttacgtttttagcggagtaattaatacgtcgcgtatacgtcgtattacgtaattnacgcgtacgaaatataacgtttatagtaaagtttttcggggaaatatttcgtaatttttatcgttaggcggtagttttaacggacgtacgatttattaggtaacgat

SEQ ID NO: 1220 - DNA, 805 bp, Artificial Sequence
  chemically treated genomic DNA (Homo sapiens) CpG-island No: 1220
  unsure (108, 308, 326)
atcgttacctaataaatcgtacgtccgttaaaactaccgcctaacgataaaaattacgaaatatttccccgaaaaactttactataaacgttatatttcgtacgcgtnaattacgtaatacgacgtatacgcgacgtattaattactccgctaaaaacgtaacgatacgtcgtacgactataataccgcgaccgcgttaacgtaccgttatacgtaattatatatactcgaacgttaatacgctcgatacgtacgtcgaaaaaataatatcgacgaactaattaaaacccgaatatacgtatatatantacgcgcgtaaacgaccncgaataatatatatcgcgtacgtaccgactaactaatacgacgaataaaaaataacgtatacgttaaaaacgaatataacgcgaacgtacgatacgcgctatatcgacctactaacgacgtatcgtatacgcgcgataaccgtaacgtacgcctatactaacgtaatatataaaactactactaaccgacgaataaacgaataaatcgcgcgaacgcgcgtataaacgatattaacgaacgatatatatatacgtaaaataataatactaaatcgtataactaatacgctatcgttcgcttaatatcgcgtaacgaacgcgtatatatatataatccgcgcgtatataactaaaatactaatacgtcgtactaaactataatatataaataaatacgtatcgtaatatataactacgtaactataaatacgtaatattataacgataccgaactattcgccatcatacctaactaattt

SEQ ID NO: 1221 - DNA, 568 bp, Artificial Sequence
  chemically treated genomic DNA (Homo sapiens) CpG-island No: 1221
cggagcgattttttaattttaattaatttgcgttttaattttagaggtagaatttcgtttttagagagcgacgcgtcgtcgtttcgggtggtttcgtttgttttaaattgtttgaatttttatagtgatatttttaataacgcgttttgtcggagtatcgtaatttattttttcgcgattcgtttttggtgtttcggatttcgatggcgttacggtgcgtttggcgtttttatttgagggtttagttttagggtacggttatagtcggcgcgaggtttaaggttgcggtgttgcggttattggcggcgacgagtttcgtttcgggcgggtttggtagggcgggcggtgtagttttcgcggtagagtagtttcgagtggtcgggttttcgtgcgcggaggcggtttttgtaatttcggttcgggcgggcgggtttgttcggagttgtggggagagggcggggtcgggcggggtcggagcggggttgggattggcgagcggggtagattttggagggattcgggagtgggttgttggggaggggggtcgttgggggacgcggggatattt

SEQ ID NO: 1222 - DNA, 568 bp, Artificial Sequence
  chemically treated genomic DNA (Homo sapiens) CpG-island No: 1222
aaatatccccgcgtcccccaacgacccccctccccaacaacccactcccgaatccctccaaaatctaccccgctcgccaatcccaaccccgctccgaccccgcccgaccccgccctctccccacaactccgaacaaacccgcccgcccgaaccgaaattacaaaaaccgcctccgcgcacgaaaacccgaccactcgaaactactctaccgcgaaaactacaccgcccgccctaccaaacccgcccgaaacgaaactcgtcgccgccaataaccgcaacaccgcaaccttaaacctcgcgccgactataaccgtaccctaaaactaaaccctcaaataaaaacgccaaacgcaccgtaacgccatcgaaatccgaaacaccaaaaacgaatcgcgaaaaaataaattacgatactccgacaaaacgcgttattaaaaatatcactataaaaattcaaacaatttaaaacaaacgaaaccacccgaaacgacgacgcgtcgctctctaaaaacgaaattctacctctaaaattaaaacgcaaattaattaaaattaaaaaatcgctccg

SEQ ID NO: 1223 - DNA, 568 bp, Artificial Sequence
  chemically treated genomic DNA (Homo sapiens) CpG-island No: 1223
gaatgttttcgcgttttttagcggtttttttttttagtagtttattttcgggtttttttagggtttgtttcgttcgttagttttagtttcgtttcggtttcgttcggtttcgttttttttttatagtttcgggtagattcgttcgttcgagtcggagttataagagtcgttttcgcgtacgggggttcggttattcggagttgttttgtcgcggggattgtatcgttcgttttgttagattcgttcggaacggggttcgtcgtcgttagtagtcgtagtatcgtagttttgggtttcgcgtcggttatggtcgtgttttggggttgagtttttaggtaggggcgttaggcgtatcgtggcgttatcggggttcggggtattaagggcgggtcgcggggaggtgggttgcggtgtttcggtagggcgcgttgttgggggtgttattgtgaggatttaagtagtttggagtaagcggggttattcggggcggcgacgcgtcgttttttgggagcggagttttgtttttggagttggggcgtaagttggttaaagttggaaaatcgtttcg

SEQ ID NO: 1224 - DNA, 568 bp, Artificial Sequence
  chemically treated genomic DNA (Homo sapiens) CpG-island No: 1224
cgaaacgattttccaactttaaccaacttacgccccaactccaaaaacaaaactccgctcccaaaaaacgacgcgtcgccgccccgaataaccccgcttactccaaactacttaaatcctcacaataacacccccaacaacgcgccctaccgaaacaccgcaacccacctccccgcgacccgcccttaataccccgaaccccgataacgccacgatacgcctaacgcccctacctaaaaactcaaccccaaaacacgaccataaccgacgcgaaacccaaaactacgatactacgactactaacgacgacgaaccccgttccgaacgaatctaacaaaacgaacgatacaatccccgcgacaaaacaactccgaataaccgaacccccgtacgcgaaaacgactcttataactccgactcgaacgaacgaatctacccgaaactataaaaaaaaaacgaaaccgaacgaaaccgaaacgaaactaaaactaacgaacgaaacaaaccctaaaaaaacccgaaaataaactactaaaaaaaaaaaccgctaaaaaacgcgaaaacattc

SEQ ID NO: 1225 - DNA, 524 bp, Artificial Sequence
  chemically treated genomic DNA (Homo sapiens) CpG-island No: 1225
tacgcggtcgggtttacgagttttttttaatcgtcgtttcgggtttcggggttgtcgttttttttagcgtcggttttgtttttagaagcgaaggtcgttttgcgttcggtttcggtttttttttgttttttggtcggtttttttttcgcggtcgtttcgggatttgtgtttagatttttggggttacgattacgttttagtcgtttaagttatcgtttttttttttttttttagcgttttcgttcgggcggtgtatggtggtttcggtgtatggtggttttcgtacgtatagtcgtaggggtttttttttttagattcgaggcggtggcgtatttgtattttttaaaattttttcgtcggttttcgcggtttagcgggaggcgcggagggtcgagttggggtgcgtgcgagcgggcgttaggaaagcgcggggtcgttttaggggttaggtttttttttaaatagtgggaggtttacgaagtgtttgaagttcgaggtttttttttttgttttagttcgttttt

SEQ ID NO: 1226 - DNA, 524 bp, Artificial Sequence
  chemically treated genomic DNA (Homo sapiens) CpG-island No: 1226
aaaaacgaactaaaacaaaaaaaaaaacctcgaacttcaaacacttcgtaaacctcccactatttaaaaaaaaacctaacccctaaaacgaccccgcgctttcctaacgcccgctcgcacgcaccccaactcgaccctccgcgcctcccgctaaaccgcgaaaaccgacgaaaaaattttaaaaaatacaaatacgccaccgcctcgaatctaaaaaaaaaaacccctacgactatacgtacgaaaaccaccatacaccgaaaccaccatacaccgcccgaacgaaaacgctaaaaaaaaaaaaaaaaacgataacttaaacgactaaaacgtaatcgtaaccccaaaaatctaaacacaaatcccgaaacgaccgcgaaaaaaaaaccgaccaaaaaacaaaaaaaaaccgaaaccgaacgcaaaacgaccttcgcttctaaaaacaaaaccgacgctaaaaaaaacgacaaccccgaaacccgaaacgacgattaaaaaaaactcgtaaacccgaccgcgta

SEQ ID NO: 1227 - DNA, 524 bp, Artificial Sequence
  chemically treated genomic DNA (Homo sapiens) CpG-island No: 1227
gagagcgaattaaaataaaaaggggagtttcgggttttagatatttcgtgggttttttattgtttaaagaaaggtttagtttttagggcggtttcgcgtttttttggcgttcgttcgtacgtattttagttcggtttttcgcgtttttcgttagatcgcgagggtcgacgggggagttttagagggtgtaggtgcgttatcgtttcgagtttaggagaggaaatttttgcggttgtgcgtgcgagaattattatatatcggagttattatatatcgttcgggcgggaacgttggaagggaggggaggggcggtgatttgggcggttggggcgtgatcgtggttttaggggtttgggtataggtttcgggacggtcgcgggaggaggatcggttagagggtagggaaaggtcgggatcgggcgtagggcggttttcgtttttgggggtagagtcgacgttgaggggagcggtagtttcgaggttcggggcggcggttggaggaggttcgtgggttcggtcgcgtg

SEQ ID NO: 1228 - DNA, 524 bp, Artificial Sequence
  chemically treated genomic DNA (Homo sapiens) CpG-island No: 1228
cacgcgaccgaacccacgaacctcctccaaccgccgccccgaacctcgaaactaccgctcccctcaacgtcgactctacccccaaaaacgaaaaccgccctacgcccgatcccgacctttccctaccctctaaccgatcctcctcccgcgaccgtcccgaaacctatacccaaacccctaaaaccacgatcacgccccaaccgcccaaatcaccgcccctcccctcccttccaacgttcccgcccgaacgatatataataactccgatatataataattctcgcacgcacaaccgcaaaaatttcctctcctaaactcgaaacgataacgcacctacaccctctaaaactcccccgtcgaccctcgcgatctaacgaaaaacgcgaaaaaccgaactaaaatacgtacgaacgaacgccaaaaaaacgcgaaaccgccctaaaaactaaacctttctttaaacaataaaaaacccacgaaatatctaaaacccgaaactcccctttttattttaattcgctctc

SEQ ID NO: 1229 - DNA, 1009 bp, Artificial Sequence
  chemically treated genomic DNA (Homo sapiens) CpG-island No: 1229
gagtggttcgattcggataaaatgtttttttttcgaggaggcggcgacgagtttagtaatagttcgagtacggtcggtcgggtcgcgggaagttcgagaacgcggcgcgcgtagttgggaggcgatttttattcggcgaggttttcgggattaaacgtcgttcgatagttacgtagaatagacgcggtagtgcgacgttttttttattggggatacgagatagcgatagttacgcggtgagtcggtataaggttttttaggttttagcgggtttggatattcggtggtattaatttttttttatcgtcggggaagatagtagtttttttggcgaggaagtaggtcgggtttaggcgttttagttagagggcgggtttgcgttattttcggaaagcgttatttttattttcggtcggcgttttggttttgtatttggatagggttgcggtaggttagcggtgggttggcggttgcgttttttagatcggcggtttttcgggcggtggtttgcgtttgagttttagaaagcgaggagcggtttttacggaagttaagttggtcgaggtaatcgagaagcggttttttttatggtttcgattttggagtcgttggagcggcggcggtcgtagggaggtagttatttttcgtaggcggtggtcgcggcgttttcgggtcgcgcggttggagtttgaggcggggttatcgtcgggtacgagaaattatttttttttcgtttttcgtagttgtattttagaggcgcggttgaagttcgttgggatattgttcgtttgtttagtgtttacgggtacgtttgtcgtagatataggttgtggcgaattcgagtgttggcgggtagtagtgtttgtagttgcgttcgtagattttttttcgttttcgtcggtattttcgtgttcggtcgatgttatgcggtcggttgagttttagggttagtagtttttattgatgtaaaaatataggaagtgtttttttgtttttggaatcggggtgg

SEQ ID NO: 1230 - DNA, 1009 bp, Artificial Sequence
  chemically treated genomic DNA (Homo sapiens) CpG-island No: 1230
ccaccccgattccaaaaacaaaaaaacacttcctatatttttacatcaataaaaactactaaccctaaaactcaaccgaccgcataacatcgaccgaacacgaaaataccgacgaaaacgaaaaaaaatctacgaacgcaactacaaacactactacccgccaacactcgaattcgccacaacctatatctacgacaaacgtacccgtaaacactaaacaaacgaacaatatcccaacgaacttcaaccgcgcctctaaaatacaactacgaaaaacgaaaaaaaaataatttctcgtacccgacgataaccccgcctcaaactccaaccgcgcgacccgaaaacgccgcgaccaccgcctacgaaaaataactacctccctacgaccgccgccgctccaacgactccaaaatcgaaaccataaaaaaaaccgcttctcgattacctcgaccaacttaacttccgtaaaaaccgctcctcgctttctaaaactcaaacgcaaaccaccgcccgaaaaaccgccgatctaaaaaacgcaaccgccaacccaccgctaacctaccgcaaccctatccaaatacaaaaccaaaacgccgaccgaaaataaaaataacgctttccgaaaataacgcaaacccgccctctaactaaaacgcctaaacccgacctacttcctcgccaaaaaaactactatcttccccgacgataaaaaaaaattaataccaccgaatatccaaacccgctaaaacctaaaaaaccttataccgactcaccgcgtaactatcgctatctcgtatccccaataaaaaaaacgtcgcactaccgcgtctattctacgtaactatcgaacgacgtttaatcccgaaaacctcgccgaataaaaatcgcctcccaactacgcgcgccgcgttctcgaacttcccgcgacccgaccgaccgtactcgaactattactaaactcgtcgccgcctcctcgaaaaaaaaacattttatccgaatcgaaccactc

SEQ ID NO: 1231 - DNA, 1009 bp, Artificial Sequence
  chemically treated genomic DNA (Homo sapiens) CpG-island No: 1231
ttatttcggttttagaagtaaagagatattttttatgtttttgtattagtagaagttgttagttttgaggtttaatcgatcgtatgatatcggtcggatacggaaatgtcggcggaggcgggaaagagtttgcgggcgtagttgtaggtattgttgttcgttagtattcggattcgttatagtttgtgtttgcgataggcgtgttcgtgggtattgggtaagcgggtagtgttttagcgagttttagtcgcgtttttgggatatagttgcgaaaagcggggagagaatggtttttcgtgttcgacggtggtttcgttttaggttttagtcgcgcggttcggaagcgtcgcggttatcgtttacggaaaatggttgtttttttgcggtcgtcgtcgttttagcggttttagggtcgaagttataggggaagtcgtttttcggttatttcggttagtttggttttcgtggaggtcgtttttcgttttttgaggtttaaacgtaagttatcgttcgaaaggtcgtcgatttgaggagcgtaatcgttagtttatcgttggtttatcgtagttttgtttaggtatagagttagagcgtcggtcggaagtggaagtgacgtttttcgagggtggcgtaggttcgttttttggttaaggcgtttgagttcggtttattttttcgttagagaaattgttgtttttttcggcggtagggaagggttaatgttatcgagtatttagattcgttgaagtttagagggttttgtatcggtttatcgcgtggttgtcgttgtttcgtgtttttagtgggggaggcgtcgtattgtcgcgtttgttttgcgtggttgtcgggcggcgtttggtttcgggagtttcgtcgggtaagggtcgttttttagttgcgcgcgtcgcgttttcgggtttttcgcggttcggtcggtcgtgttcgagttgttgttgggttcgtcgtcgttttttcgaggaagaggtattttgttcgggtcgggttattt

SEQ ID NO: 1232 - DNA, 1009 bp, Artificial Sequence
  chemically treated genomic DNA (Homo sapiens) CpG-island No: 1232
aaataacccgacccgaacaaaatacctcttcctcgaaaaaacgacgacgaacccaacaacaactcgaacacgaccgaccgaaccgcgaaaaacccgaaaacgcgacgcgcgcaactaaaaaacgacccttacccgacgaaactcccgaaaccaaacgccgcccgacaaccacgcaaaacaaacgcgacaatacgacgcctcccccactaaaaacacgaaacaacgacaaccacgcgataaaccgatacaaaaccctctaaacttcaacgaatctaaatactcgataacattaacccttccctaccgccgaaaaaaacaacaatttctctaacgaaaaaataaaccgaactcaaacgccttaaccaaaaaacgaacctacgccaccctcgaaaaacgtcacttccacttccgaccgacgctctaactctatacctaaacaaaactacgataaaccaacgataaactaacgattacgctcctcaaatcgacgacctttcgaacgataacttacgtttaaacctcaaaaaacgaaaaacgacctccacgaaaaccaaactaaccgaaataaccgaaaaacgacttcccctataacttcgaccctaaaaccgctaaaacgacgacgaccgcaaaaaaacaaccattttccgtaaacgataaccgcgacgcttccgaaccgcgcgactaaaacctaaaacgaaaccaccgtcgaacacgaaaaaccattctctccccgcttttcgcaactatatcccaaaaacgcgactaaaactcgctaaaacactacccgcttacccaatacccacgaacacgcctatcgcaaacacaaactataacgaatccgaatactaacgaacaacaatacctacaactacgcccgcaaactctttcccgcctccgccgacatttccgtatccgaccgatatcatacgatcgattaaacctcaaaactaacaacttctactaatacaaaaacataaaaaatatctctttacttctaaaaccgaaataa

SEQ ID NO: 1233 - DNA, 832 bp, Artificial Sequence
  chemically treated genomic DNA (Homo sapiens) CpG-island No: 1233
gggagggcggcggcgcggggttgatggatagtaggcggggttttcgggaggggcgagtagggcgggatcgtcgttgggaaggggttcgaggtaagggaattaggaattggggaggacgggaggtaggggttcgcgggggcgggtttgaggggacgcgagcgggtcgtcggggaggtttgaggggtaggggtaacgtagatttggcgaggcggaggggagcggcgaggtggttacgtcgaggttttttacggcggggtttgggtttatttggggcgattgggcggggcgcgggttcgcgagggtttagatttcgggttcgcggaggttacgggatttttcgggtggtttagcgggtcggagtttgtcgtcgattgtttcggacgttcgggcggaggattttcgtgagggggaacggttcgtgaacgcgcgcggagttgttcgcgttaaaaattttaaatcggtttcgaggtttttttttttttttagtgtagttcgttaggggtgttcgggtttcgaggtttcgtttttcgtgttgcgtgcgcgtcgtcgagtcgtttcgtcgtttattgcgtaggcgtataggatttttcgcgttggttcggggcgtgggtggcggtttggttttgagtcgttgcgcggggttttagtcgtttagtttttgggacgtttattgttttttaggtttcgtattcgatatttatcgttttcgttgggttggcgtagtgtttgggtttataaaagggatcgttatttcggtgttcggagtaggcgtagttttagggttatttcgggtaggattaggaagtttttacggttttttgggtttcggtat

SEQ ID NO: 1234 - DNA, 832 bp, Artificial Sequence
  chemically treated genomic DNA (Homo sapiens) CpG-island No: 1234
ataccgaaacccaaaaaaccgtaaaaacttcctaatcctacccgaaataaccctaaaactacgcctactccgaacaccgaaataacgatcccttttataaacccaaacactacgccaacccaacgaaaacgataaatatcgaatacgaaacctaaaaaacaataaacgtcccaaaaactaaacgactaaaaccccgcgcaacgactcaaaaccaaaccgccacccacgccccgaaccaacgcgaaaaatcctatacgcctacgcaataaacgacgaaacgactcgacgacgcgcacgcaacacgaaaaacgaaacctcgaaacccgaacacccctaacgaactacactaaaaaaaaaaaaaaacctcgaaaccgatttaaaatttttaacgcgaacaactccgcgcgcgttcacgaaccgttccccctcacgaaaatcctccgcccgaacgtccgaaacaatcgacgacaaactccgacccgctaaaccacccgaaaaatcccgtaacctccgcgaacccgaaatctaaaccctcgcgaacccgcgccccgcccaatcgccccaaataaacccaaaccccgccgtaaaaaacctcgacgtaaccacctcgccgctcccctccgcctcgccaaatctacgttacccctacccctcaaacctccccgacgacccgctcgcgtcccctcaaacccgcccccgcgaacccctacctcccgtcctccccaattcctaattcccttacctcgaaccccttcccaacgacgatcccgccctactcgcccctcccgaaaaccccgcctactatccatcaaccccgcgccgccgccctccc

SEQ ID NO: 1235 - DNA, 832 bp, Artificial Sequence
  chemically treated genomic DNA (Homo sapiens) CpG-island No: 1235
gtgtcgggatttaggaggtcgtagggattttttggttttattcggagtaattttggggttacgtttgtttcgagtatcgggatggcggttttttttatggatttaaatattacgttagtttagcgagggcggtgggtgtcgggtgcgaggtttggagggtagtgggcgttttagggattgggcggttgaagtttcgcgtagcgatttagaattaggtcgttatttacgtttcgggttagcgcggagaattttgtgcgtttgcgtagtgagcggcggggcggttcggcggcgcgtacgtagtacgaggggcggagtttcggagttcgggtatttttgacgggttgtattggggagggggaggagtttcgaggtcggtttggaatttttggcgcgagtagtttcgcgcgcgtttacgggtcgtttttttttacgggagtttttcgttcgggcgttcggaatagtcgacggtagatttcggttcgttgagttattcgaggggtttcgtggttttcgcggattcggaatttgggttttcgcggattcgcgtttcgtttagtcgttttaggtgagtttagatttcgtcgtgaggggtttcggcgtggttatttcgtcgttttttttcgtttcgttaggtttgcgttatttttgttttttaggttttttcggcggttcgttcgcgtttttttaggttcgttttcgcgagtttttgtttttcgttttttttaatttttggtttttttgtttcgagtttttttttagcggcggtttcgttttattcgtttttttcggagatttcgtttgttgtttattaatttcgcgtcgtcgttttttt

SEQ ID NO: 1236 - DNA, 832 bp, Artificial Sequence
  chemically treated genomic DNA (Homo sapiens) CpG-island No: 1236
aaaaaaacgacgacgcgaaattaataaacaacaaacgaaatctccgaaaaaaacgaataaaacgaaaccgccgctaaaaaaaaactcgaaacaaaaaaaccaaaaattaaaaaaaacgaaaaacaaaaactcgcgaaaacgaacctaaaaaaacgcgaacgaaccgccgaaaaaacctaaaaaacaaaaataacgcaaacctaacgaaacgaaaaaaaacgacgaaataaccacgccgaaacccctcacgacgaaatctaaactcacctaaaacgactaaacgaaacgcgaatccgcgaaaacccaaattccgaatccgcgaaaaccacgaaacccctcgaataactcaacgaaccgaaatctaccgtcgactattccgaacgcccgaacgaaaaactcccgtaaaaaaaaacgacccgtaaacgcgcgcgaaactactcgcgccaaaaattccaaaccgacctcgaaactcctccccctccccaatacaacccgtcaaaaatacccgaactccgaaactccgcccctcgtactacgtacgcgccgccgaaccgccccgccgctcactacgcaaacgcacaaaattctccgcgctaacccgaaacgtaaataacgacctaattctaaatcgctacgcgaaacttcaaccgcccaatccctaaaacgcccactaccctccaaacctcgcacccgacacccaccgccctcgctaaactaacgtaatatttaaatccataaaaaaaaccgccatcccgatactcgaaacaaacgtaaccccaaaattactccgaataaaaccaaaaaatccctacgacctcctaaatcccgacac

SEQ ID NO: 1237 - DNA, 882 bp, Artificial Sequence
  chemically treated genomic DNA (Homo sapiens) CpG-island No: 1237
attcgtagatcgcgagcgtattggttcgtgattggttggggtgcggcggcgagtatttgcgattggttgggtcgttcggagtgcggcgtttggttatttttcgaggtattaggttacggttggcggcgcgttttggggttttgggttggcggtcgtaatcggggtggcggtcgtagttaagttggcggcgcggttgtttcgttttagttcgtattcgcggttcgttcgcgttcgcgtttattcgcgattgggtcgggttcgttcgacgttgtcgtttatttcgttgttttcgtcgtttttgtcgtattcgtcgttgttcggtttgtcgttcggtttgagtttcgggtcgtcgacgtttttcgttttcgttttggtcgagttgttatcgttgttcgcgttttcgttgcggttcgagtcgttggcgttttggggtttcggcgcgtatttggtattgttcgagttgtcgttcgaagtttgtttattcgcgtttttcgtcgtcgtgttcgtattgtaggatttgtcgcgtttgttcgcgttcgcgcgtttcgttcgcgtttttatcgttgttttcgttgttcgtgttcgtcgtcgttttagtttttgggttcgtgggcgcgttcgttcgttcgtttttggttttcgagtcgtcgtcgtattcgttttcgtcgttgttcgcgcgattttttttttttagtttgttgacggttttcgagattcgcgatttatggttgttgttcgttttttttttgttatcgttcgtgtttttgttttcgtatttttttttgtcgtcgttttgttgatttggtttttttcgcggcgggtgagtaggtagttttcgatagggttagtgttcgtagttatttttttcgggtatggatttag

SEQ ID NO: 1238 - DNA, 882 bp, Artificial Sequence
  chemically treated genomic DNA (Homo sapiens) CpG-island No: 1238
ctaaatccatacccgaaaaaaataactacgaacactaaccctatcgaaaactacctactcacccgccgcgaaaaaaaccaaatcaacaaaacgacgacaaaaaaaaatacgaaaacaaaaacacgaacgataacaaaaaaaaaacgaacaacaaccataaatcgcgaatctcgaaaaccgtcaacaaactaaaaaaaaaaaatcgcgcgaacaacgacgaaaacgaatacgacgacgactcgaaaaccaaaaacgaacgaacgaacgcgcccacgaacccaaaaactaaaacgacgacgaacacgaacaacgaaaacaacgataaaaacgcgaacgaaacgcgcgaacgcgaacaaacgcgacaaatcctacaatacgaacacgacgacgaaaaacgcgaataaacaaacttcgaacgacaactcgaacaataccaaatacgcgccgaaaccccaaaacgccaacgactcgaaccgcaacgaaaacgcgaacaacgataacaactcgaccaaaacgaaaacgaaaaacgtcgacgacccgaaactcaaaccgaacgacaaaccgaacaacgacgaatacgacaaaaacgacgaaaacaacgaaataaacgacaacgtcgaacgaacccgacccaatcgcgaataaacgcgaacgcgaacgaaccgcgaatacgaactaaaacgaaacaaccgcgccgccaacttaactacgaccgccaccccgattacgaccgccaacccaaaaccccaaaacgcgccgccaaccgtaacctaatacctcgaaaaataaccaaacgccgcactccgaacgacccaaccaatcgcaaatactcgccgccgcaccccaaccaatcacgaaccaatacgctcgcgatctacgaat

SEQ ID NO: 1239 - DNA, 882 bp, Artificial Sequence
  chemically treated genomic DNA (Homo sapiens) CpG-island No: 1239
ttgaatttatgttcggggaaggtggttacgggtattggttttgtcgggggttgtttatttattcgtcgcgggaggggttaggttagtagggcggcgataggaagaaatgcggggataggggtacgggcggtggtaggggaaaggcggatagtagttatgggtcgcgggtttcgggggtcgttagtaggttgaagggagagggtcgcgcgggtagcggcggaagcggatgcggcggcggttcggagattaggggcgggcggacgagcgcgtttacgggtttaggggttgaggcgacggcggatacgggtagcggaagtagcggtaggagcgcgggcggagcgcgcgggcgcgggtaggcgcggtaggttttgtagtgcgagtacggcggcggagagcgcgggtgagtaggtttcgggcggtagttcgggtagtgttagatgcgcgtcggggttttagggcgttagcggttcgggtcgtagcgggagcgcgggtagcggtggtagttcggttagggcgagagcggagggcgtcggcggttcggggtttaggtcgggcggtaggtcgggtaacggcgggtgcggtagggacggcgggggtagcggggtgggcggtagcgtcgagcgggttcggtttaatcgcgagtgggcgcgggcgcgggcgagtcgcgggtgcgagttggagcggggtagtcgcgtcgttagtttggttgcggtcgttatttcggttgcggtcgttagtttagggttttagagcgcgtcgttagtcgtgatttggtatttcgggaggtggttaagcgtcgtatttcgagcggtttagttaatcgtagatgttcgtcgtcgtattttaattaattacgggttagtgcgttcgcggtttacgggt

SEQ ID NO: 1240 - DNA, 882 bp, Artificial Sequence
  chemically treated genomic DNA (Homo sapiens) CpG-island No: 1240
acccgtaaaccgcgaacgcactaacccgtaattaattaaaatacgacgacgaacatctacgattaactaaaccgctcgaaatacgacgcttaaccacctcccgaaataccaaatcacgactaacgacgcgctctaaaaccctaaactaacgaccgcaaccgaaataacgaccgcaaccaaactaacgacgcgactaccccgctccaactcgcacccgcgactcgcccgcgcccgcgcccactcgcgattaaaccgaacccgctcgacgctaccgcccaccccgctacccccgccgtccctaccgcacccgccgttacccgacctaccgcccgacctaaaccccgaaccgccgacgccctccgctctcgccctaaccgaactaccaccgctacccgcgctcccgctacgacccgaaccgctaacgccctaaaaccccgacgcgcatctaacactacccgaactaccgcccgaaacctactcacccgcgctctccgccgccgtactcgcactacaaaacctaccgcgcctacccgcgcccgcgcgctccgcccgcgctcctaccgctacttccgctacccgtatccgccgtcgcctcaacccctaaacccgtaaacgcgctcgtccgcccgcccctaatctccgaaccgccgccgcatccgcttccgccgctacccgcgcgaccctctcccttcaacctactaacgacccccgaaacccgcgacccataactactatccgcctttcccctaccaccgcccgtacccctatccccgcatttcttcctatcgccgccctactaacctaacccctcccgcgacgaataaataaacaacccccgacaaaaccaatacccgtaaccaccttccccgaacataaattcaa

SEQ ID NO: 1241 - DNA, 721 bp, Artificial Sequence
  chemically treated genomic DNA (Homo sapiens) CpG-island No: 1241
gcggatgaggttgttgcgtcgttaaggatgtagagtttaaagtaaggtagtggtttttatgagtttaaatatttttttttcgtacgttcggtatcgcgacgggggagagtaaaatttttaaataaatgttttagtttttttcgtagagagtcggagttaaattcgtgaggaagttcgggggtcgtagtgaagtttaatttattggtgttgggataatttcgttcgtaattcggatttaggtcgtaggtttttcgaggtttcgtttttgacggcgatatttaatttcgggtgttttcgtttttttattgaattttggtttcgttttcgtttttcgattggtcggacgttagttttacgtcgtacgggtaagacgcggaggagcggttttagttagaagatagggtattcgcggttttgttgcgtatgttcgcgttgtgatttcggtttgaggtaatagcgcgagttgaggttggggtttttggcgcggaggttgagggattcgtcgcggcgttgtcgtcggagagggagggtatcgttgtcgtcggtgaggacgggttttggcgggcggggagggttttgcgttttcggtatggacgagttttcggttcggttttttcgggggtttcgagggttgcgggtgttgaggaggggttcgcgttttggtgtttaggtcgttttttgtggggtttttcgcgattttttttttgtttttcgttttttt

SEQ ID NO: 1242 - DNA, 721 bp, Artificial Sequence
  chemically treated genomic DNA (Homo sapiens) CpG-island No: 1242
aaaaaaacgaaaaacaaaaaaaaaatcgcgaaaaaccccacaaaaaacgacctaaacaccaaaacgcgaacccctcctcaacacccgcaaccctcgaaacccccgaaaaaaccgaaccgaaaactcgtccataccgaaaacgcaaaaccctccccgcccgccaaaacccgtcctcaccgacgacaacgataccctccctctccgacgacaacgccgcgacgaatccctcaacctccgcgccaaaaaccccaacctcaactcgcgctattacctcaaaccgaaatcacaacgcgaacatacgcaacaaaaccgcgaataccctatcttctaactaaaaccgctcctccgcgtcttacccgtacgacgtaaaactaacgtccgaccaatcgaaaaacgaaaacgaaaccaaaattcaataaaaaaacgaaaacacccgaaattaaatatcgccgtcaaaaacgaaacctcgaaaaacctacgacctaaatccgaattacgaacgaaattatcccaacaccaataaattaaacttcactacgacccccgaacttcctcacgaatttaactccgactctctacgaaaaaaactaaaacatttatttaaaaattttactctcccccgtcgcgataccgaacgtacgaaaaaaaaatatttaaactcataaaaaccactaccttactttaaactctacatccttaacgacgcaacaacctcatccgc

SEQ ID NO: 1243 - DNA, 721 bp, Artificial Sequence
  chemically treated genomic DNA (Homo sapiens) CpG-island No: 1243
ggaggggcgagaggtaaagagggaatcgcgggagattttataggaggcggtttgagtattaggacgcggatttttttttagtattcgtagttttcgggattttcgagagagtcgggtcggggattcgtttatgtcgaggacgtaggatttttttcgttcgttagggttcgtttttatcgacgatagcggtgtttttttttttcggcgatagcgtcgcggcgggttttttagttttcgcgttaagggttttagttttagttcgcgttgttattttaagtcggggttatagcgcgagtatgcgtagtaaggtcgcgggtgttttgttttttggttggggtcgttttttcgcgttttgttcgtgcggcgtagagttggcgttcggttaatcggagggcggaggcggggttaaaatttagtaagggggcggggatattcgggattgagtgtcgtcgttaggggcggagtttcgggggatttgcggtttggattcgggttgcgggcgaggttattttagtattagtgggttgggttttattgcgattttcgggtttttttacggatttgatttcggttttttgcggggaaaattggagtatttgtttaaaggttttgttttttttcgtcgcgatatcgagcgtgcggagggaaggtgtttaggtttatggaagttattgttttgttttaagttttgtatttttgacgacgtagtagttttattcgt

SEQ ID NO: 1244 - DNA, 721 bp, Artificial Sequence
  chemically treated genomic DNA (Homo sapiens) CpG-island No: 1244
acgaataaaactactacgtcgtcaaaaatacaaaacttaaaacaaaacaataacttccataaacctaaacaccttccctccgcacgctcgatatcgcgacgaaaaaaaacaaaacctttaaacaaatactccaattttccccgcaaaaaaccgaaatcaaatccgtaaaaaaacccgaaaatcgcaataaaacccaacccactaatactaaaataacctcgcccgcaacccgaatccaaaccgcaaatcccccgaaactccgcccctaacgacgacactcaatcccgaatatccccgcccccttactaaattttaaccccgcctccgccctccgattaaccgaacgccaactctacgccgcacgaacaaaacgcgaaaaaacgaccccaaccaaaaaacaaaacacccgcgaccttactacgcatactcgcgctataaccccgacttaaaataacaacgcgaactaaaactaaaacccttaacgcgaaaactaaaaaacccgccgcgacgctatcgccgaaaaaaaaaaacaccgctatcgtcgataaaaacgaaccctaacgaacgaaaaaaatcctacgtcctcgacataaacgaatccccgacccgactctctcgaaaatcccgaaaactacgaatactaaaaaaaaatccgcgtcctaatactcaaaccgcctcctataaaatctcccgcgattccctctttacctctcgcccctcc

SEQ ID NO: 1245 - DNA, 748 bp, Artificial Sequence
  chemically treated genomic DNA (Homo sapiens) CpG-island No: 1245
gaacgcggaggatatttaggggttgaggatgcggggacgaggagcgcgcggaagagtcgaggtttcggggttggggggtgcggattttagaggaatcgtcggggatgtggacggattcggaaggaaggggttttagagaggacgcgggcggttgtaggatataagaggtgcgggacgtaggaggtcgtggggtcgtgcgggagtttagggtatttcgatatggattcgttagatttgtggtttttttagcggtcgttttagagcgagaggaggtgcgtaggtcgtgaggcgggtttttttggggttttttagggaggagcggcgtttttttcgagttagtcgaggacgcgtagttagaggggggtcgggcggagagaagagtgcgggcggatcgggacgatttttgggtgataggagagtcgtagtgagtttagggtacggtgttggggtcgttttggtcgtcgtcgttaagcgttataggaaaatagtaattaggatttcgcggtttttggcgtttggatttagttcggtatcgtatcgcgttgttggagaatgtgtttttggcgcgcgttgagttaggaagggatagcgggaagggcggggttcgtgggtaggggagggattagtgggcggggatcgaattaattcgttagcggtgagttagtggtcgagggttaaattaatgggtaaggcgtggattaatgggcgagtgttggatattaatgaatggggtttgaattaatgggcg

SEQ ID NO: 1246 - DNA, 748 bp, Artificial Sequence
  chemically treated genomic DNA (Homo sapiens) CpG-island No: 1246
cgcccattaattcaaaccccattcattaatatccaacactcgcccattaatccacgccttacccattaatttaaccctcgaccactaactcaccgctaacgaattaattcgatccccgcccactaatccctcccctacccacgaaccccgcccttcccgctatcccttcctaactcaacgcgcgccaaaaacacattctccaacaacgcgatacgataccgaactaaatccaaacgccaaaaaccgcgaaatcctaattactattttcctataacgcttaacgacgacgaccaaaacgaccccaacaccgtaccctaaactcactacgactctcctatcacccaaaaatcgtcccgatccgcccgcactcttctctccgcccgacccccctctaactacgcgtcctcgactaactcgaaaaaaacgccgctcctccctaaaaaaccccaaaaaaacccgcctcacgacctacgcacctcctctcgctctaaaacgaccgctaaaaaaaccacaaatctaacgaatccatatcgaaataccctaaactcccgcacgaccccacgacctcctacgtcccgcacctcttatatcctacaaccgcccgcgtcctctctaaaaccccttccttccgaatccgtccacatccccgacgattcctctaaaatccgcaccccccaaccccgaaacctcgactcttccgcgcgctcctcgtccccgcatcctcaacccctaaatatcctccgcgttc

SEQ ID NO: 1247 - DNA, 748 bp, Artificial Sequence
  chemically treated genomic DNA (Homo sapiens) CpG-island No: 1247
cgtttattagtttaggttttatttattgatgtttagtattcgtttattggtttacgttttgtttattggtttagttttcgattattggtttatcgttagcgaattgattcggttttcgtttattggttttttttttgtttacgggtttcgtttttttcgttgtttttttttggtttagcgcgcgttaaggatatattttttagtaacgcggtgcggtatcgggttgagtttaagcgttaggagtcgcggggttttggttgttgtttttttgtgacgtttggcggcggcggttagagcggttttagtatcgtgttttgggtttattgcggtttttttattatttaggggtcgtttcggttcgttcgtattttttttttcgttcgatttttttttggttgcgcgttttcggttggttcggggagggcgtcgtttttttttgggagattttagggagattcgttttacggtttgcgtattttttttcgttttaaagcggtcgttggaggagttataggtttggcgggtttatgtcgaggtgttttgggttttcgtacgattttacggttttttgcgtttcgtattttttgtgttttgtagtcgttcgcgttttttttgggatttttttttttcgagttcgtttatattttcggcggtttttttgaaattcgtattttttaatttcggaatttcggttttttcgcgcgtttttcgttttcgtatttttagtttttagatgtttttcgcgttt

SEQ ID NO: 1248 - DNA, 748 bp, Artificial Sequence
  chemically treated genomic DNA (Homo sapiens) CpG-island No: 1248
aaacgcgaaaaacatctaaaaactaaaaatacgaaaacgaaaaacgcgcgaaaaaaccgaaattccgaaattaaaaaatacgaatttcaaaaaaaccgccgaaaatataaacgaactcgaaaaaaaaaaatcccaaaaaaaacgcgaacgactacaaaacacaaaaaatacgaaacgcaaaaaaccgtaaaatcgtacgaaaacccaaaacacctcgacataaacccgccaaacctataactcctccaacgaccgctttaaaacgaaaaaaaatacgcaaaccgtaaaacgaatctccctaaaatctcccaaaaaaaaacgacgccctccccgaaccaaccgaaaacgcgcaaccaaaaaaaaatcgaacgaaaaaaaaaatacgaacgaaccgaaacgacccctaaataataaaaaaaccgcaataaacccaaaacacgatactaaaaccgctctaaccgccgccgccaaacgtcacaaaaaaacaacaaccaaaaccccgcgactcctaacgcttaaactcaacccgataccgcaccgcgttactaaaaaatatatccttaacgcgcgctaaaccaaaaaaaaacaacgaaaaaaacgaaacccgtaaacaaaaaaaaaaccaataaacgaaaaccgaatcaattcgctaacgataaaccaataatcgaaaactaaaccaataaacaaaacgtaaaccaataaacgaatactaaacatcaataaataaaacctaaactaataaacg

SEQ ID NO: 1249 - DNA, 886 bp, Artificial Sequence
  chemically treated genomic DNA (Homo sapiens) CpG-island No: 1249
tggacgtcgtcgtttaatttcgggatggtttcgtttttttcgtgagttacgttttcgtttttatgcgttgataggttaggtttgcggttcggcgtcgcgtagggaagattcggagtagcggtttatttaaggaacgggtcgcgcggttttgttgcgtatgttttgaagtagcgcgtttgagcgtttcgtaaggtcggtttttcggcggggtcgcgcgcgcggttacggggttcgttttcgaggggtaggtcggggttgggagttggtgttcgggtcggggtggcggcggcggtttgggtcgcggggtcgacgttcgttgttgtagcggtagaggttgaaggattcgtcgcggcgttgtcgcgggagagggagggtttcgttgtcgtcggtgaggataggtttttgcgggcggggaatgtttcgcgttttcggcgtggacgcgttcgtagttcggttttttcgggggtttcgagggttgcgggtgttggggaggggtttgcgtttcggcgtttaggtcgttttttgtggggtttttcgcgattttttttttgtttttcgtttttttatttttattttttcgttttttggtttaagttcgatatttttatattaaggattttcgtattcgttcgtcgttttttggcggtgtttgtttcgtttagcgttgtttttttggattcgtagtattagtttcgttttacggttgtagttcgggcggttttagtgattttgtatttttgcgggtcgggacgtatttcgttttcgtttttgattttatagattttcggtgacggttttcgaattttgttgatttatagtcgatattgagaaatgttttttacgcgtgtattttgtgtttgtgggtttggatgattgaagtataagt

SEQ ID NO: 1250 - DNA, 886 bp, Artificial Sequence
  chemically treated genomic DNA (Homo sapiens) CpG-island No: 1250
acttatacttcaatcatccaaacccacaaacacaaaatacacgcgtaaaaaacatttctcaatatcgactataaatcaacaaaattcgaaaaccgtcaccgaaaatctataaaatcaaaaacgaaaacgaaatacgtcccgacccgcaaaaatacaaaatcactaaaaccgcccgaactacaaccgtaaaacgaaactaatactacgaatccaaaaaaacaacgctaaacgaaacaaacaccgccaaaaaacgacgaacgaatacgaaaatccttaatataaaaatatcgaacttaaaccaaaaaacgaaaaaataaaaataaaaaaacgaaaaacaaaaaaaaaatcgcgaaaaaccccacaaaaaacgacctaaacgccgaaacgcaaacccctccccaacacccgcaaccctcgaaacccccgaaaaaaccgaactacgaacgcgtccacgccgaaaacgcgaaacattccccgcccgcaaaaacctatcctcaccgacgacaacgaaaccctccctctcccgcgacaacgccgcgacgaatccttcaacctctaccgctacaacaacgaacgtcgaccccgcgacccaaaccgccgccgccaccccgacccgaacaccaactcccaaccccgacctacccctcgaaaacgaaccccgtaaccgcgcgcgcgaccccgccgaaaaaccgaccttacgaaacgctcaaacgcgctacttcaaaacatacgcaacaaaaccgcgcgacccgttccttaaataaaccgctactccgaatcttccctacgcgacgccgaaccgcaaacctaacctatcaacgcataaaaacgaaaacgtaactcacgaaaaaaacgaaaccatcccgaaattaaacgacgacgtcca

SEQ ID NO: 1251 - DNA, 886 bp, Artificial Sequence
  chemically treated genomic DNA (Homo sapiens) CpG-island No: 1251
atttgtgttttagttatttagatttataggtatagagtatacgcgtaaaaggtattttttagtgtcggttgtgggttaataaagttcgaaagtcgttatcggagatttatagggttagaagcgggagcggggtgcgtttcgattcgtaaaagtgtaaggttattgggatcgttcgagttgtaatcgtgggacggggttgatgttgcgggtttaggaaggtagcgttgggcggggtagatatcgttaggaaacggcggacgagtgcggggatttttgatgtgggggtgtcgggtttaggttaggggacgggggggtggggatggaggggcgaggagtaaggagggaatcgcgggagattttataggaggcggtttgagcgtcgggacgtagatttttttttagtattcgtaattttcgggattttcgggagagtcgggttgcgggcgcgtttacgtcggggacgcgggatatttttcgttcgtaggggtttgtttttatcgacggtagcggggttttttttttttcgcgatagcgtcgcggcggattttttagtttttgtcgttgtagtagcgagcgtcgatttcgcgatttaggtcgtcgtcgttatttcgattcgggtattagtttttagtttcgatttgtttttcgggagcgagtttcgtgatcgcgcgcgcgatttcgtcggggagtcggttttgcggaacgtttaggcgcgttattttagagtatgcgtagtaagatcgcgcggttcgttttttaggtaaatcgttgtttcgggttttttttgcgcggcgtcgagtcgtaggtttggtttgttagcgtatgggggcggggacgtaatttacggaaaaggcggggttatttcgagattggacggcggcgttta

SEQ ID NO: 1252 - DNA, 886 bp, Artificial Sequence
  chemically treated genomic DNA (Homo sapiens) CpG-island No: 1252
taaacgccgccgtccaatctcgaaataaccccgccttttccgtaaattacgtccccgcccccatacgctaacaaaccaaacctacgactcgacgccgcgcaaaaaaaacccgaaacaacgatttacctaaaaaacgaaccgcgcgatcttactacgcatactctaaaataacgcgcctaaacgttccgcaaaaccgactccccgacgaaatcgcgcgcgcgatcacgaaactcgctcccgaaaaacaaatcgaaactaaaaactaatacccgaatcgaaataacgacgacgacctaaatcgcgaaatcgacgctcgctactacaacgacaaaaactaaaaaatccgccgcgacgctatcgcgaaaaaaaaaaaaccccgctaccgtcgataaaaacaaacccctacgaacgaaaaatatcccgcgtccccgacgtaaacgcgcccgcaacccgactctcccgaaaatcccgaaaattacgaatactaaaaaaaaatctacgtcccgacgctcaaaccgcctcctataaaatctcccgcgattccctccttactcctcgcccctccatccccacccccccgtcccctaacctaaacccgacacccccacatcaaaaatccccgcactcgtccgccgtttcctaacgatatctaccccgcccaacgctaccttcctaaacccgcaacatcaaccccgtcccacgattacaactcgaacgatcccaataaccttacacttttacgaatcgaaacgcaccccgctcccgcttctaaccctataaatctccgataacgactttcgaactttattaacccacaaccgacactaaaaaataccttttacgcgtatactctatacctataaatctaaataactaaaacacaaat

SEQ ID NO: 1253 - DNA, 722 bp, Artificial Sequence
  chemically treated genomic DNA (Homo sapiens) CpG-island No: 1253
atttttcggacgagtacgggtcggatcggaattgtagttgggttttgggttcgttaggcgtcgcgttggagtttatttttcgttttttcgagttggtcgattcgcgcgatcggttggagttgcgcgacgcggtttcgggtagtttgtttcgcgttttcgatggcgttcgtttatcgtcgttcgggtcgttgcgtttgggtattgtcgcgttgttgtttatttttcgaagcgacgcgcgcggttacgcgtaaggtttcgcgtttatttatcgcggtgagttttagttcggcgcgttttgttcgttgtttttatttcgttttttttatttcgttttacgttttttttcgtagggttgtaggacgtcgttgaggatttagaggttttcgagggttcggtttagattttcgcggcgtttttcgacggggttaacgtgagttgtagttttaggtttggggtttcgtcggtcgcgattgggggtgaggcgggcgcgcgggacgggagtgagttagggagtcgttttttcgcgtttatttttatcgtagtcgtgtgttcgtagttcgggttttttcgacggtgacggttgtttcggtgttgttgttgttgtttttggggttgttgcgttcgttgcgtcgacggtgcggggcgttggggtagggtttgagggcggatcggtggtggggagttggagttttagaagggaatagagttaggaaggaattttt

SEQ ID NO: 1254 - DNA, 722 bp, Artificial Sequence
  chemically treated genomic DNA (Homo sapiens) CpG-island No: 1254
aaaaattccttcctaactctattcccttctaaaactccaactccccaccaccgatccgccctcaaaccctaccccaacgccccgcaccgtcgacgcaacgaacgcaacaaccccaaaaacaacaacaacaacaccgaaacaaccgtcaccgtcgaaaaaacccgaactacgaacacacgactacgataaaaataaacgcgaaaaaacgactccctaactcactcccgtcccgcgcgcccgcctcacccccaatcgcgaccgacgaaaccccaaacctaaaactacaactcacgttaaccccgtcgaaaaacgccgcgaaaatctaaaccgaaccctcgaaaacctctaaatcctcaacgacgtcctacaaccctacgaaaaaaaacgtaaaacgaaataaaaaaaacgaaataaaaacaacgaacaaaacgcgccgaactaaaactcaccgcgataaataaacgcgaaaccttacgcgtaaccgcgcgcgtcgcttcgaaaaataaacaacaacgcgacaatacccaaacgcaacgacccgaacgacgataaacgaacgccatcgaaaacgcgaaacaaactacccgaaaccgcgtcgcgcaactccaaccgatcgcgcgaatcgaccaactcgaaaaaacgaaaaataaactccaacgcgacgcctaacgaacccaaaacccaactacaattccgatccgacccgtactcgtccgaaaaat

SEQ ID NO: 1255 - DNA, 722 bp, Artificial Sequence
  chemically treated genomic DNA (Homo sapiens) CpG-island No: 1255
aggagtttttttttagttttgtttttttttggggttttagttttttattatcggttcgtttttaggttttgttttagcgtttcgtatcgtcggcgtagcggacgtagtagttttaggagtagtagtagtagtatcgagatagtcgttatcgtcgagaagattcgggttgcgggtatacggttgcggtgaggatgggcgcgagggggcggttttttgatttattttcgtttcgcgcgttcgttttatttttaatcgcggtcggcggagttttaggtttggggttgtagtttacgttggtttcgtcgaggggcgtcgcgggggtttgggtcgagttttcgggggtttttgggtttttagcggcgttttgtagttttgcggagaggggcgtgaggcggggtggggagagcggggtgggaatagcgggtagggcgcgtcgagttgaggtttatcgcggtaggtgagcgcgaagttttgcgcgtggtcgcgcgcgtcgtttcggaaggtgagtagtagcgcggtagtgtttaggcgtagcggttcggacggcggtgggcgggcgttatcgaaggcgcggagtaggttgttcgaagtcgcgtcgcgtagttttagtcggtcgcgcgggtcggttagttcgaagaggcggaaggtgagttttagcgcggcgtttggcgggtttagggtttagttgtagtttcggttcggttcgtattcgttcgggaagt

SEQ ID NO: 1256 - DNA, 722 bp, Artificial Sequence
  chemically treated genomic DNA (Homo sapiens) CpG-island No: 1256
acttcccgaacgaatacgaaccgaaccgaaactacaactaaaccctaaacccgccaaacgccgcgctaaaactcaccttccgcctcttcgaactaaccgacccgcgcgaccgactaaaactacgcgacgcgacttcgaacaacctactccgcgccttcgataacgcccgcccaccgccgtccgaaccgctacgcctaaacactaccgcgctactactcaccttccgaaacgacgcgcgcgaccacgcgcaaaacttcgcgctcacctaccgcgataaacctcaactcgacgcgccctacccgctattcccaccccgctctccccaccccgcctcacgcccctctccgcaaaactacaaaacgccgctaaaaacccaaaaacccccgaaaactcgacccaaacccccgcgacgcccctcgacgaaaccaacgtaaactacaaccccaaacctaaaactccgccgaccgcgattaaaaataaaacgaacgcgcgaaacgaaaataaatcaaaaaaccgccccctcgcgcccatcctcaccgcaaccgtatacccgcaacccgaatcttctcgacgataacgactatctcgatactactactactactcctaaaactactacgtccgctacgccgacgatacgaaacgctaaaacaaaacctaaaaacgaaccgataataaaaaactaaaaccccaaaaaaaaacaaaactaaaaaaaaactcct

SEQ ID NO: 1257 - DNA, 786 bp, Artificial Sequence
  chemically treated genomic DNA (Homo sapiens) CpG-island No: 1257
taggaggcgaggtttgggcggtttcggggcggagttttttcgtcggttacgtttattggttttcgttgcgtcgacgttaggagttcggcgcgcgaaacgttggtcggtcggcgggaattaggagtttgggcggagtttggcgttttttttcgcgttcggtcgcgttcgtttttttggttgtagagagattatcggttatcgtcgtcgtcgtcgtcgcgagttgtttttgcggcgcgtttgttttggcggagtcgatcgtagtgcgtttaggcgttcggtgcgtttttagttttcgtttcggcgcgggggcgacggattcgcgcgtgcgtagcgtcggaggggcgcgggttgggattttttagttagcgcgtgcgtcgatcgagcgtagggcgatgggtgggcgtcgggcgtcgggcgttaggtagtgatgggttttttcgcgttgcggttttattgaggaggaggttcggggatagtaggagtacgggttgttcgcgcggtgcggattatggcgtttttggtcgggtcgcgtttgttggattgggttagttcgtcgtcgtatttgtagtttaataagttcgtgttgatcgggtatcggttcgttagtagcggttcgggttgtttgcgtagttttttttatttgtataacgaattgggtaatatttatacgtacggtgagtcgcgtttcgtaacgcgttttttatattttcggtcgttttatttgcgttgggtcgggggtattgaggtcgaggagggttttagcgtttaagtttagggttgtttcgg

SEQ ID NO: 1258 - DNA, 786 bp, Artificial Sequence
  chemically treated genomic DNA (Homo sapiens) CpG-island No: 1258
ccgaaacaaccctaaacttaaacgctaaaaccctcctcgacctcaatacccccgacccaacgcaaataaaacgaccgaaaatataaaaaacgcgttacgaaacgcgactcaccgtacgtataaatattacccaattcgttatacaaataaaaaaaactacgcaaacaacccgaaccgctactaacgaaccgatacccgatcaacacgaacttattaaactacaaatacgacgacgaactaacccaatccaacaaacgcgacccgaccaaaaacgccataatccgcaccgcgcgaacaacccgtactcctactatccccgaacctcctcctcaataaaaccgcaacgcgaaaaaacccatcactacctaacgcccgacgcccgacgcccacccatcgccctacgctcgatcgacgcacgcgctaactaaaaaatcccaacccgcgcccctccgacgctacgcacgcgcgaatccgtcgcccccgcgccgaaacgaaaactaaaaacgcaccgaacgcctaaacgcactacgatcgactccgccaaaacaaacgcgccgcaaaaacaactcgcgacgacgacgacgacgataaccgataatctctctacaaccaaaaaaacgaacgcgaccgaacgcgaaaaaaaacgccaaactccgcccaaactcctaattcccgccgaccgaccaacgtttcgcgcgccgaactcctaacgtcgacgcaacgaaaaccaataaacgtaaccgacgaaaaaactccgccccgaaaccgcccaaacctcgcctccta

SEQ ID NO: 1259 - DNA, 786 bp, Artificial Sequence
  chemically treated genomic DNA (Homo sapiens) CpG-island No: 1259
tcggggtagttttggatttgggcgttggggtttttttcggttttagtgttttcggtttaacgtaggtagggcggtcgggggtgtgggaagcgcgttgcgggacgcggtttatcgtgcgtgtagatgttgtttagttcgttgtgtaggtagaagaggttgcgtaggtagttcgagtcgttgttggcgggtcggtattcggttagtacgaatttattgaattgtaggtgcggcggcgagttggtttagtttagtaggcgcggttcggttaggaacgttatggttcgtatcgcgcgggtagttcgtgtttttgttgttttcgagttttttttttagtggggtcgtagcgcgggaaggtttattattgtttggcgttcggcgttcggcgtttatttatcgttttgcgttcgatcggcgtacgcgttggttagggggttttagttcgcgttttttcggcgttgcgtacgcgcgagttcgtcgttttcgcgtcggggcggaggttggggacgtatcggacgtttgagcgtattgcggtcggtttcgttaaggtagacgcgtcgtagggatagttcgcggcggcggcggcggcggtggtcggtagtttttttgtagttaggaggacgggcgcggtcggacgcgggaggggacgttaggtttcgtttaggtttttagttttcgtcggtcggttagcgtttcgcgcgtcgggtttttgacgtcggcgtagcgagagttaatgggcgtggtcggcggggaggtttcgtttcgaggtcgtttaggtttcgtttttta

SEQ ID NO: 1260 - DNA, 786 bp, Artificial Sequence
  chemically treated genomic DNA (Homo sapiens) CpG-island No: 1260
taaaaaacgaaacctaaacgacctcgaaacgaaacctccccgccgaccacgcccattaactctcgctacgccgacgtcaaaaacccgacgcgcgaaacgctaaccgaccgacgaaaactaaaaacctaaacgaaacctaacgtcccctcccgcgtccgaccgcgcccgtcctcctaactacaaaaaaactaccgaccaccgccgccgccgccgccgcgaactatccctacgacgcgtctaccttaacgaaaccgaccgcaatacgctcaaacgtccgatacgtccccaacctccgccccgacgcgaaaacgacgaactcgcgcgtacgcaacgccgaaaaaacgcgaactaaaaccccctaaccaacgcgtacgccgatcgaacgcaaaacgataaataaacgccgaacgccgaacgccaaacaataataaaccttcccgcgctacgaccccactaaaaaaaaaactcgaaaacaacaaaaacacgaactacccgcgcgatacgaaccataacgttcctaaccgaaccgcgcctactaaactaaaccaactcgccgccgcacctacaattcaataaattcgtactaaccgaataccgacccgccaacaacgactcgaactacctacgcaacctcttctacctacacaacgaactaaacaacatctacacgcacgataaaccgcgtcccgcaacgcgcttcccacacccccgaccgccctacctacgttaaaccgaaaacactaaaaccgaaaaaaaccccaacgcccaaatccaaaactaccccga

SEQ ID NO: 1261 - DNA, 727 bp, Artificial Sequence
  chemically treated genomic DNA (Homo sapiens) CpG-island No: 1261
gggcgaagttagttggttgttgaaggcggtgtaggaatttttttggcgagttcgcgcgaggacgtgtcgtagcgtcgtttgtcgattattttgtttcgtcgtacgtcggcgcgttttcgggtaagttttttttttagttttggtcgagcgggaagcgaacgcgcgtttttttcggttatttttcgtttcggggaagggcgggggaagtggaagcgcgcgttcgcgagttgcgtgttcgcgtacgtcgtcggggttcggttgcgttcgtttcgtcgttcgttcgttgtcgtcgtcgtcgttgtcgtcgtgttttttttttgttcgtcgtcgtttaaggggggttggggtcggggttagttattattgtcgttgtcgggatgtcgcgggtgtatatcggtcgtttgagttattaggttcgggagcgcgatgtggagcgtttttttaagggttacgggaagattttggaggtggatttgaagaacgggtgaggagggcgaaagagggttcggtcgggcggggatagattttataggtggtggggaggtcgcggggacgggagagggacgtttggttcgcgcggagcggttatcggtttggttaggtttcgttatagtggcggcgtttcgggggcgcgggtaggtttcggtttttattgcgtttgcgcgggtgggggtggtggaggtataatgggagttgtgttgaggttttgagtgggacggggagaagg

SEQ ID NO: 1262 - DNA, 727 bp, Artificial Sequence
  chemically treated genomic DNA (Homo sapiens) CpG-island No: 1262
ccttctccccgtcccactcaaaacctcaacacaactcccattatacctccaccacccccacccgcgcaaacgcaataaaaaccgaaacctacccgcgcccccgaaacgccgccactataacgaaacctaaccaaaccgataaccgctccgcgcgaaccaaacgtccctctcccgtccccgcgacctccccaccacctataaaatctatccccgcccgaccgaaccctctttcgccctcctcacccgttcttcaaatccacctccaaaatcttcccgtaacccttaaaaaaacgctccacatcgcgctcccgaacctaataactcaaacgaccgatatacacccgcgacatcccgacaacgacaataataactaaccccgaccccaaccccccttaaacgacgacgaacaaaaaaaaaacacgacgacaacgacgacgacgacaacgaacgaacgacgaaacgaacgcaaccgaaccccgacgacgtacgcgaacacgcaactcgcgaacgcgcgcttccacttcccccgcccttccccgaaacgaaaaataaccgaaaaaaacgcgcgttcgcttcccgctcgaccaaaactaaaaaaaaaacttacccgaaaacgcgccgacgtacgacgaaacaaaataatcgacaaacgacgctacgacacgtcctcgcgcgaactcgccaaaaaaattcctacaccgccttcaacaaccaactaacttcgccc

SEQ ID NO: 1263 - DNA, 727 bp, Artificial Sequence
  chemically treated genomic DNA (Homo sapiens) CpG-island No: 1263
tttttttttcgttttatttagggttttagtatagtttttattatgtttttattatttttattcgcgtaggcgtagtgggaatcggggtttattcgcgttttcgaggcgtcgttattatggcggagtttggttaggtcggtagtcgtttcgcgcggattaggcgtttttttttcgttttcgcggtttttttattatttatggggtttgttttcgttcggtcggattttttttcgttttttttattcgttttttagatttatttttaggattttttcgtagtttttaaagaagcgttttatatcgcgttttcgggtttggtagtttaggcggtcgatgtatattcgcggtatttcggtaacggtagtgatggttggtttcggttttagttttttttaggcggcggcgggtaaagggagagtacggcggtagcggcggcggcggtaacgggcgggcggcgggacggacgtagtcgaatttcggcgacgtacgcgagtacgtagttcgcgagcgcgcgtttttatttttttcgttttttttcgaggcggaaggtaatcggagagagcgcgcgttcgtttttcgttcggttaggattgggggaggagtttgttcgggggcgcgtcgacgtgcggcggggtaaggtgatcgataggcggcgttgcggtacgttttcgcgcgagttcgttaaaggggtttttgtatcgtttttagtagttagttggtttcgttt

SEQ ID NO: 1264 - DNA, 727 bp, Artificial Sequence
  chemically treated genomic DNA (Homo sapiens) CpG-island No: 1264
aaacgaaaccaactaactactaaaaacgatacaaaaacccctttaacgaactcgcgcgaaaacgtaccgcaacgccgcctatcgatcaccttaccccgccgcacgtcgacgcgcccccgaacaaactcctcccccaatcctaaccgaacgaaaaacgaacgcgcgctctctccgattaccttccgcctcgaaaaaaaacgaaaaaaataaaaacgcgcgctcgcgaactacgtactcgcgtacgtcgccgaaattcgactacgtccgtcccgccgcccgcccgttaccgccgccgccgctaccgccgtactctccctttacccgccgccgcctaaaaaaaactaaaaccgaaaccaaccatcactaccgttaccgaaataccgcgaatatacatcgaccgcctaaactaccaaacccgaaaacgcgatataaaacgcttctttaaaaactacgaaaaaatcctaaaaataaatctaaaaaacgaataaaaaaaacgaaaaaaaatccgaccgaacgaaaacaaaccccataaataataaaaaaaccgcgaaaacgaaaaaaaaacgcctaatccgcgcgaaacgactaccgacctaaccaaactccgccataataacgacgcctcgaaaacgcgaataaaccccgattcccactacgcctacgcgaataaaaataataaaaacataataaaaactatactaaaaccctaaataaaacgaaaaaaaaa

SEQ ID NO: 1265 - DNA, 631 bp, Artificial Sequence
  chemically treated genomic DNA (Homo sapiens) CpG-island No: 1265
tgcgtacgcgcggttttagtttggcgttttaggagatggattcggaaagttttcgcgtaggcgtaatttaagggtcgagagagtttgagattgggtttggggcggggcgagttcggaatgcggttgcgtattgggcgttttcgttcgagaagtcgtagtttcgagagcgttaacgaggtgtttcggtagtttttggttattttttttgcgtattcggtgtcgttgggttgtatttcgggcggggacgttcgtcgggtacgggagggggttaagatgtcggtgaggagagtcgtttcgtttttggggtttttttttattttagcggtttggttcgggggcgcggtcgttgttatggaggcgcggagtcggtaggcggtttgggtggggcggggtaggttcggtcgtgcggtggaggtggttggagagtttggttggttagtttcggggtcgcgggggttcggtcggtttcgatagggatttggggttaggttttgtcgttttcgtcgttgttgtatttcgtggggtttgcgtcgtttattaaaaaggcgttgtgttggaggatgcgttttggttcgtagttttttttgttgagcggggcgtttgggggtggttacggtggggttttttggat

SEQ ID NO: 1266 - DNA, 631 bp, Artificial Sequence
  chemically treated genomic DNA (Homo sapiens) CpG-island No: 1266
atccaaaaaaccccaccgtaaccacccccaaacgccccgctcaacaaaaaaaactacgaaccaaaacgcatcctccaacacaacgcctttttaataaacgacgcaaaccccacgaaatacaacaacgacgaaaacgacaaaacctaaccccaaatccctatcgaaaccgaccgaacccccgcgaccccgaaactaaccaaccaaactctccaaccacctccaccgcacgaccgaacctaccccgccccacccaaaccgcctaccgactccgcgcctccataacaacgaccgcgcccccgaaccaaaccgctaaaataaaaaaaaaccccaaaaacgaaacgactctcctcaccgacatcttaaccccctcccgtacccgacgaacgtccccgcccgaaatacaacccaacgacaccgaatacgcaaaaaaaataaccaaaaactaccgaaacacctcgttaacgctctcgaaactacgacttctcgaacgaaaacgcccaatacgcaaccgcattccgaactcgccccgccccaaacccaatctcaaactctctcgacccttaaattacgcctacgcgaaaactttccgaatccatctcctaaaacgccaaactaaaaccgcgcgtacgca

SEQ ID NO: 1267 - DNA, 631 bp, Artificial Sequence
  chemically treated genomic DNA (Homo sapiens) CpG-island No: 1267
atttaaagagttttatcgtggttatttttagacgtttcgtttagtaggaagggttgcgagttagagcgtattttttagtatagcgtttttttgataagcggcgtaggttttacgggatgtagtagcgacgagggcggtagggtttgattttaggtttttgtcgaggtcggtcggattttcgcggtttcggggttgattagttaggttttttaattatttttatcgtacgatcgagtttgtttcgttttatttaggtcgtttgtcggtttcgcgtttttatggtaacggtcgcgttttcgggttaggtcgttaggatgagaagaaattttagaagcgaagcgattttttttatcggtattttggttttttttcgtgttcggcggacgttttcgttcggggtgtagtttagcgatatcgggtgcgtagaaaggatggttagagattatcgaaatatttcgttgacgttttcgagattgcggtttttcgggcgagagcgtttagtgcgtagtcgtatttcgagttcgtttcgttttaagtttagttttaggttttttcggtttttgaattacgtttgcgcggaggtttttcgagtttattttttaggacgttagattgaggtcgcgcgtgcgta

SEQ ID NO: 1268 - DNA, 631 bp, Artificial Sequence
  chemically treated genomic DNA (Homo sapiens) CpG-island No: 1268
tacgcacgcgcgacctcaatctaacgtcctaaaaaataaactcgaaaaacctccgcgcaaacgtaattcaaaaaccgaaaaaacctaaaactaaacttaaaacgaaacgaactcgaaatacgactacgcactaaacgctctcgcccgaaaaaccgcaatctcgaaaacgtcaacgaaatatttcgataatctctaaccatcctttctacgcacccgatatcgctaaactacaccccgaacgaaaacgtccgccgaacacgaaaaaaaaccaaaataccgataaaaaaaatcgcttcgcttctaaaatttcttctcatcctaacgacctaacccgaaaacgcgaccgttaccataaaaacgcgaaaccgacaaacgacctaaataaaacgaaacaaactcgatcgtacgataaaaataattaaaaaacctaactaatcaaccccgaaaccgcgaaaatccgaccgacctcgacaaaaacctaaaatcaaaccctaccgccctcgtcgctactacatcccgtaaaacctacgccgcttatcaaaaaaacgctatactaaaaaatacgctctaactcgcaacccttcctactaaacgaaacgtctaaaaataaccacgataaaactctttaaat

SEQ ID NO: 1269 - DNA, 573 bp, Artificial Sequence
  chemically treated genomic DNA (Homo sapiens) CpG-island No: 1269
aagggggcggggcgaggtcgcgggggtttgtggggaagcgtaggaggcggggttttgcgtgagttattgtcgggttcggcgtgagtcgttgcggggttgacggggtggtagtgcggcgggttacggtttggttaggtgagcgggcgttgcggttttcgttgttcggagtagcgtaggagatttttggggtggtcggtgggaggaggggtagcggttatgggtatcggtgaggcggggcgggtcggggttggcggtggaggcgcgcgttgaggcggcgcgtcggtgtttagggtagcggcgtttcgggtcgcgcgttttcggaggggttcgttttcgtaattcgggtttgcgcgttttgttttgtaggcggattttttattttgttgcgattttgtagtgttcgggaaggtagagtcgttttttcgtaaagatcgaggtggggttcgtttttttgcggcgtgggtgtgcggtgttcgtcgggatagcgggtgtgaaagtgatatttttagcgttggaagtttttgattgttggttcgtattttcgttttatcgtagggtttttgggagagtttt

SEQ ID NO: 1270 - DNA, 573 bp, Artificial Sequence
  chemically treated genomic DNA (Homo sapiens) CpG-island No: 1270
aaaactctcccaaaaaccctacgataaaacgaaaatacgaaccaacaatcaaaaacttccaacgctaaaaatatcactttcacacccgctatcccgacgaacaccgcacacccacgccgcaaaaaaacgaaccccacctcgatctttacgaaaaaacgactctaccttcccgaacactacaaaatcgcaacaaaataaaaaatccgcctacaaaacaaaacgcgcaaacccgaattacgaaaacgaacccctccgaaaacgcgcgacccgaaacgccgctaccctaaacaccgacgcgccgcctcaacgcgcgcctccaccgccaaccccgacccgccccgcctcaccgatacccataaccgctacccctcctcccaccgaccaccccaaaaatctcctacgctactccgaacaacgaaaaccgcaacgcccgctcacctaaccaaaccgtaacccgccgcactaccaccccgtcaaccccgcaacgactcacgccgaacccgacaataactcacgcaaaaccccgcctcctacgcttccccacaaacccccgcgacctcgccccgccccctt

SEQ ID NO: 1271 - DNA, 573 bp, Artificial Sequence
  chemically treated genomic DNA (Homo sapiens) CpG-island No: 1271
aaaatttttttagggattttgcgatggggcgggggtgcgagttagtaattaaaaatttttagcgttgggggtattatttttatattcgttgtttcggcgaatatcgtatatttacgtcgtaagggggcgggttttatttcggtttttgcgggagggcggttttgttttttcgagtattgtaaaatcgtagtagggtggagggttcgtttgtaaagtagagcgcgtaggttcgggttgcgggggcgagttttttcgggaacgcgcgattcgagacgtcgttgttttggatatcgacgcgtcgttttaacgcgcgtttttatcgttagtttcggttcgtttcgttttatcggtatttataatcgttatttttttttttatcggttattttaaggattttttacgttgtttcgggtagcgagaatcgtaacgttcgtttatttgattaggtcgtaattcgtcgtattgttatttcgttagtttcgtagcgatttacgtcgagttcggtagtgatttacgtaaagtttcgttttttgcgtttttttataagttttcgcggtttcgtttcgttttttt

SEQ ID NO: 1272 - DNA, 573 bp, Artificial Sequence
  chemically treated genomic DNA (Homo sapiens) CpG-island No: 1272
aaaaaaacgaaacgaaaccgcgaaaacttataaaaaaacgcaaaaaacgaaactttacgtaaatcactaccgaactcgacgtaaatcgctacgaaactaacgaaataacaatacgacgaattacgacctaatcaaataaacgaacgttacgattctcgctacccgaaacaacgtaaaaaatccttaaaataaccgataaaaaaaaaaataacgattataaataccgataaaacgaaacgaaccgaaactaacgataaaaacgcgcgttaaaacgacgcgtcgatatccaaaacaacgacgtctcgaatcgcgcgttcccgaaaaaactcgcccccgcaacccgaacctacgcgctctactttacaaacgaaccctccaccctactacgattttacaatactcgaaaaaacaaaaccgccctcccgcaaaaaccgaaataaaacccgcccccttacgacgtaaatatacgatattcgccgaaacaacgaatataaaaataatacccccaacgctaaaaatttttaattactaactcgcacccccgccccatcgcaaaatccctaaaaaaatttt

SEQ ID NO: 1273 - DNA, 818 bp, Artificial Sequence
  chemically treated genomic DNA (Homo sapiens) CpG-island No: 1273
agcgttattttttatttattaaattcgtagcggcgtttagcgggcggatagtcgtttttgttgatttagagcgtttatttacgttttcggtttttttcgtttcgtagtttcgcggtttcgcggtttggtcgtttttagttcgagcgcgagtttaaatagcgtttcgtgtcgcggggcggttcgaggtcggttagaggcgttttttcggtttcgcggttttcgtttagttcggtttcgcgatttttcgttttaggttgcggttggttgttgtttttggtttttacgcggcgtttattttcgggttggggggcgtttttcgcgcgttaggtagcggcgggtttcgagacggtttcgcggttttttgcgtttgggtttcggcggtttgaaggtttatgttttgcggttcgcggttggtcgttttggacgtcgtgggttacgtgacgcgtcggttcggttgttcgttcgaggattcgtcgtagaagcgttaattagtttggggagggggtgggtatcggttaagagggcggggcgcgggggtgttacgagtaagcgggggcggggcggcgtagggggcggggcgcgcggtttcgcggagttcgttttttttttttagcgcgaaatttgaaataatttcggagacggattttggaaatttttttcggtgtatattttaaggttgtacgattagttgcgtgtgaaacgttaagcgtattttattcggttattcggggtgtgttttagttttaaaatttcgcgtgggtaagatatatgagtaatttagtgatttttattttgagttaatgatcgtttttgaagtt

SEQ ID NO: 1274 - DNA, 818 bp, Artificial Sequence
  chemically treated genomic DNA (Homo sapiens) CpG-island No: 1274
aacttcaaaaacgatcattaactcaaaataaaaatcactaaattactcatatatcttacccacgcgaaattttaaaactaaaacacaccccgaataaccgaataaaatacgcttaacgtttcacacgcaactaatcgtacaaccttaaaatatacaccgaaaaaaatttccaaaatccgtctccgaaattatttcaaatttcgcgctaaaaaaaaaaaacgaactccgcgaaaccgcgcgccccgccccctacgccgccccgcccccgcttactcgtaacacccccgcgccccgccctcttaaccgatacccaccccctccccaaactaattaacgcttctacgacgaatcctcgaacgaacaaccgaaccgacgcgtcacgtaacccacgacgtccaaaacgaccaaccgcgaaccgcaaaacataaaccttcaaaccgccgaaacccaaacgcaaaaaaccgcgaaaccgtctcgaaacccgccgctacctaacgcgcgaaaaacgccccccaacccgaaaataaacgccgcgtaaaaaccaaaaacaacaaccaaccgcaacctaaaacgaaaaatcgcgaaaccgaactaaacgaaaaccgcgaaaccgaaaaaacgcctctaaccgacctcgaaccgccccgcgacacgaaacgctatttaaactcgcgctcgaactaaaaacgaccaaaccgcgaaaccgcgaaactacgaaacgaaaaaaaccgaaaacgtaaataaacgctctaaatcaacaaaaacgactatccgcccgctaaacgccgctacgaatttaataaataaaaaataacgct

SEQ ID NO: 1275 - DNA, 818 bp, Artificial Sequence
  chemically treated genomic DNA (Homo sapiens) CpG-island No: 1275
aattttaaagacgattattagtttaaggtggaggttattgggttgtttatgtgttttatttacgcggggttttgaagttggagtatatttcgagtggtcgagtagggtacgtttggcgttttatacgtagttagtcgtgtagttttaggatatgtatcgagaggagtttttaaaattcgttttcgagattgttttagatttcgcgttgggagggaggggcgggtttcgcgaggtcgcgcgtttcgttttttgcgtcgtttcgttttcgtttgttcgtgatattttcgcgtttcgtttttttggtcggtatttattttttttttaggttgattggcgtttttgcggcggattttcgggcgggtagtcgggtcggcgcgttacgtggtttacggcgtttagggcgattagtcgcgggtcgtagggtatggatttttaggtcgtcggggtttaggcgtagggggtcgcggagtcgtttcggggttcgtcgttgtttagcgcgcggggggcgttttttagttcggaggtgagcgtcgcgtgggggttaggagtaatagttagtcgtagtttggggcgggaagtcgcggggtcgggttgggcgggggtcgcggggtcggggaagcgtttttggtcggtttcgggtcgtttcgcgatacggagcgttgtttgggttcgcgttcgagttgaaaacggttaggtcgcggggtcgcggggttgcggggcggggaaagtcgagggcgtgggtgggcgttttgggttagtagagacggttgttcgttcgttgggcgtcgttgcggatttggtaaatgggaggtgacgtt

SEQ ID NO: 1276 - DNA, 818 bp, Artificial Sequence
  chemically treated genomic DNA (Homo sapiens) CpG-island No: 1276
aacgtcacctcccatttaccaaatccgcaacgacgcccaacgaacgaacaaccgtctctactaacccaaaacgcccacccacgccctcgactttccccgccccgcaaccccgcgaccccgcgacctaaccgttttcaactcgaacgcgaacccaaacaacgctccgtatcgcgaaacgacccgaaaccgaccaaaaacgcttccccgaccccgcgacccccgcccaacccgaccccgcgacttcccgccccaaactacgactaactattactcctaacccccacgcgacgctcacctccgaactaaaaaacgccccccgcgcgctaaacaacgacgaaccccgaaacgactccgcgaccccctacgcctaaaccccgacgacctaaaaatccataccctacgacccgcgactaatcgccctaaacgccgtaaaccacgtaacgcgccgacccgactacccgcccgaaaatccgccgcaaaaacgccaatcaacctaaaaaaaaaataaataccgaccaaaaaaacgaaacgcgaaaatatcacgaacaaacgaaaacgaaacgacgcaaaaaacgaaacgcgcgacctcgcgaaacccgcccctccctcccaacgcgaaatctaaaacaatctcgaaaacgaattttaaaaactcctctcgatacatatcctaaaactacacgactaactacgtataaaacgccaaacgtaccctactcgaccactcgaaatatactccaacttcaaaaccccgcgtaaataaaacacataaacaacccaataacctccaccttaaactaataatcgtctttaaaatt

SEQ ID NO: 1277 - DNA, 514 bp, Artificial Sequence
  chemically treated genomic DNA (Homo sapiens) CpG-island No: 1277
cggcgtcgggattggagtttttggatgcgttacggtttagttggtttcgttttcgcggtggtcgcggttttacgtttatcgtcgtcgaatagttcgtttttttttcgcggttcgggtgcgtcggttcggtttttcgttcgttacgttcgcgatttagggttgggttttcgtggtgtaggtggtattgggttacgttacgttcgcgggttgtgtaatcggtagtgttttggagcgggtaggaggcgtttcgttttttgtttcgatatatagtttttcgattttggtaggcgttttttcggttcgggtagtttacgtttcgggtcgtttggtggaattggttttttcgtagttcgcggtggtggaattgggtttcgcgtaggttttggtattggttttcgcggttcgggttatttcgcgcgtcgtgggggtttcggtgtagtttttcgcggtgtagttggtttttttttcgtaggtcgcggtttttttgggtgagttggtttagttggttttttag

SEQ ID NO: 1278 - DNA, 514 bp, Artificial Sequence
  chemically treated genomic DNA (Homo sapiens) CpG-island No: 1278
ctaaaaaaccaactaaaccaactcacccaaaaaaaccgcgacctacgaaaaaaaaaccaactacaccgcgaaaaactacaccgaaacccccacgacgcgcgaaataacccgaaccgcgaaaaccaataccaaaacctacgcgaaacccaattccaccaccgcgaactacgaaaaaaccaattccaccaaacgacccgaaacgtaaactacccgaaccgaaaaaacgcctaccaaaatcgaaaaactatatatcgaaacaaaaaacgaaacgcctcctacccgctccaaaacactaccgattacacaacccgcgaacgtaacgtaacccaataccacctacaccacgaaaacccaaccctaaatcgcgaacgtaacgaacgaaaaaccgaaccgacgcacccgaaccgcgaaaaaaaaacgaactattcgacgacgataaacgtaaaaccgcgaccaccgcgaaaacgaaaccaactaaaccgtaacgcatccaaaaactccaatcccgacgccg

SEQ ID NO: 1279 - DNA, 514 bp, Artificial Sequence
  chemically treated genomic DNA (Homo sapiens) CpG-island No: 1279
ttggagggttagttggattagtttatttaggagaatcgcgatttgcgagaggagagttagttgtatcgcggggagttgtatcgggatttttacggcgcgcgggatagttcgggtcgcgagagttagtattagaatttgcgcgagatttagttttattatcgcgagttgcgggagagttagttttattaggcggttcgggacgtgggttattcgaatcgggaaggcgtttattagaatcgggaggttgtgtatcgggataaggagcgggacgttttttattcgttttaggatattatcggttatatagttcgcgagcgtgacgtggtttagtgttatttgtattacgagaatttagttttgggtcgcgagcgtggcgggcgggaggtcgggtcggcgtattcgggtcgcgagaaggaagcgggttattcggcggcggtgggcgtggggtcgcggttatcgcgggagcggggttagttgagtcgtggcgtatttaggagttttagtttcggcgtcg

SEQ ID NO: 1280 - DNA, 514 bp, Artificial Sequence
  chemically treated genomic DNA (Homo sapiens) CpG-island No: 1280
cgacgccgaaactaaaactcctaaatacgccacgactcaactaaccccgctcccgcgataaccgcgaccccacgcccaccgccgccgaataacccgcttccttctcgcgacccgaatacgccgacccgacctcccgcccgccacgctcgcgacccaaaactaaattctcgtaatacaaataacactaaaccacgtcacgctcgcgaactatataaccgataatatcctaaaacgaataaaaaacgtcccgctccttatcccgatacacaacctcccgattctaataaacgccttcccgattcgaataacccacgtcccgaaccgcctaataaaactaactctcccgcaactcgcgataataaaactaaatctcgcgcaaattctaatactaactctcgcgacccgaactatcccgcgcgccgtaaaaatcccgatacaactccccgcgatacaactaactctcctctcgcaaatcgcgattctcctaaataaactaatccaactaaccctccaa

SEQ ID NO: 1281 - DNA, 940 bp, Artificial Sequence
  chemically treated genomic DNA (Homo sapiens) CpG-island No: 1281
tagcgtttcgttttgtttcgtaattttacggaaatgtttttcgcgtgttttaatattacgttcgattataattttgggcgtaattagattgttattattatagttcgcgttttaaataaggtatttttcgttagtaagttttttcgttaatttttcgatacgaaatcgttttttcgtttataaagtattttagatcggtttgttttattcgtttttggtttaattttcgtcgttattttttttatttttttttttttcggattttttttttttttaattaacgtttttttttcgttacggtttttattattacgatatttcggaatttatcgtacgacgtcgttttcggtttttttttaatttttatattttttttttttttttttttttttttttttttttttttattatttttttttattttttttttatttcgtatcgttattttttttttttttttcgtcgttatttttttattttttttgtttttattttttttttttttttttttttatagtattttattttttttggcgcgatttttcgtttttttatgattttttttgtgcgtttattttttttacgttttagttttttatttttttttatattagtttcgcgttaagtttttttagttttacgtttttttatattttgtcgtcgttatattattacggttcgtttgttattatttattcgtacgcgattttttattatattcgttagcgttttttttattattttgtttttatacgtgtcgcgtttttttttatcgttttttttcgttataattgtttattttttattttcgttatttttagtttgtcgttttcgttttatttatttattttttttttttcgaaatttttttatatttttttttttttatttatttttttattttttttttcgtttttttcgtattttttttgtttattag

SEQ ID NO: 1282 - DNA, 940 bp, Artificial Sequence
  chemically treated genomic DNA (Homo sapiens) CpG-island No: 1282
ctaataaacaaaaaaaatacgaaaaaaacgaaaaaaaaaataaaaaaataaataaaaaaaaaaaaatataaaaaaatttcgaaaaaaaaaaaataaataaataaaacgaaaacgacaaactaaaaataacgaaaataaaaaataaacaattataacgaaaaaaaacgataaaaaaaaacgcgacacgtataaaaacaaaataataaaaaaaacgctaacgaatataataaaaaatcgcgtacgaataaataataacaaacgaaccgtaataatataacgacgacaaaatataaaaaaacgtaaaactaaaaaaacttaacgcgaaactaatataaaaaaaaataaaaaactaaaacgtaaaaaaaataaacgcacaaaaaaaatcataaaaaaacgaaaaatcgcgccaaaaaaaataaaatactataaaaaaaaaaaaaaaaaaaaaataaaaacaaaaaaaataaaaaaataacgacgaaaaaaaaaaaaaaaataacgatacgaaataaaaaaaaaataaaaaaaaataataaaaaaaaaaaaaaaaaaaaaaaaaaaaaaaaaaaaaatataaaaattaaaaaaaaaccgaaaacgacgtcgtacgataaattccgaaatatcgtaataataaaaaccgtaacgaaaaaaaaacgttaattaaaaaaaaaaaaaatccgaaaaaaaaaaaaataaaaaaaataacgacgaaaattaaaccaaaaacgaataaaacaaaccgatctaaaatactttataaacgaaaaaacgatttcgtatcgaaaaattaacgaaaaaacttactaacgaaaaataccttatttaaaacgcgaactataataataacaatctaattacgcccaaaattataatcgaacgtaatattaaaacacgcgaaaaacatttccgtaaaattacgaaacaaaacgaaacgcta

SEQ ID NO: 1283 - DNA, 940 bp, Artificial Sequence
  chemically treated genomic DNA (Homo sapiens) CpG-island No: 1283
ttggtaggtaggaggagtgcggggagggcgggaggagaagtggggaggtaggtgggaggggggaagtatggaggggtttcgagggggaggagatgagtgggtaaggcggaggcgataggttggagatggcgagaatggaaggtaggtagttatggcgagagagagcgatagaagagagcgcggtacgtataggagtagggtagtgagaagggcgttggcggatgtaatagagagtcgcgtgcgagtagatagtggtagacgagtcgtagtagtgtgacggcggtagagtgtagaggagcgtggagttaagaagatttagcgcgaggttagtgtgggagagagtaggaggttgaggcgtggagaaagtgggcgtatagagaaggttatggggagacggaagatcgcgttagaggagatagggtgttgtggagggggaggaggagagggggtgggggtaggggaggtgggggagtagcggcgggagaagggggaggagtggcgatgcgaggtgaggagaaggtgggaggaggtggtggggaagaggggggggggggggaggagaggaggggggatgtgggagttgggggggagtcgggagcggcgtcgtgcgatgagtttcggaatgtcgtggtggtgggagtcgtggcgggaggggagcgttggttgggaggggagggagttcggggagggggggaatagagggggtggcgacggaggttgggttaggggcgggtgggatagatcggtttaaaatattttgtgggcggaagagcgatttcgtgtcggggaattggcgagggaatttgttgacgaaggatgttttatttagaacgcggattgtggtagtggtagtttaattgcgtttaaggttatggtcgagcgtggtattaggatacgcggagagtattttcgtgaggttgcgaggtaaggcgaagcgttg

SEQ ID NO: 1284 - DNA, 940 bp, Artificial Sequence
  chemically treated genomic DNA (Homo sapiens) CpG-island No: 1284
caacgcttcgccttacctcgcaacctcacgaaaatactctccgcgtatcctaataccacgctcgaccataaccttaaacgcaattaaactaccactaccacaatccgcgttctaaataaaacatccttcgtcaacaaattccctcgccaattccccgacacgaaatcgctcttccgcccacaaaatattttaaaccgatctatcccacccgcccctaacccaacctccgtcgccaccccctctattccccccctccccgaactccctcccctcccaaccaacgctcccctcccgccacgactcccaccaccacgacattccgaaactcatcgcacgacgccgctcccgactcccccccaactcccacatcccccctcctctcctcccccccccccccctcttccccaccacctcctcccaccttctcctcacctcgcatcgccactcctcccccttctcccgccgctactcccccacctcccctacccccaccccctctcctcctccccctccacaacaccctatctcctctaacgcgatcttccgtctccccataaccttctctatacgcccactttctccacgcctcaacctcctactctctcccacactaacctcgcgctaaatcttcttaactccacgctcctctacactctaccgccgtcacactactacgactcgtctaccactatctactcgcacgcgactctctattacatccgccaacgcccttctcactaccctactcctatacgtaccgcgctctcttctatcgctctctctcgccataactacctaccttccattctcgccatctccaacctatcgcctccgccttacccactcatctcctccccctcgaaacccctccatacttcccccctcccacctacctccccacttctcctcccgccctccccgcactcctcctacctaccaa

SEQ ID NO: 1285 - DNA, 1511 bp, Artificial Sequence
  chemically treated genomic DNA (Homo sapiens) CpG-island No: 1285
gttcgcgttaggttggttacggttattagcgggattatttttgtcgtatcgtaggttattttgcgtataatcggcgttagggtggtcgatttgtttttgggtacgattatagtcgtggtatcggtcgtatcggtcgtgcgtaggtacgcgtcgaggttatgcgggtcggttatatcgtttaggattaggattagcggcggcgtttcggtgcgtttaagtaatttttcgagtattaattcgttttatatttggtttgggttgatttcggcgattacgttttggtgtacgttttttatttaggtatttagtttacggcgtttagtttggtcgatcggtacgcggtttttcgttgttagcgttagtaaggtttttaggcgtggttcgttgcgttttttcgatagttagatttgtttgacgcgtttcggatggtgttttagtaatgtttgtacggcgtgtacgtcgtagattttttttagttgatttatgatttgtttttgtttttgcgtggcgtatcggatttcggcgggtttttacggtgtttggtcggtttgtcggagtcggaggttttgttatttttgttcgatttgttgttggtatggtcgttattgcgtgtttcgtttattagcgttttttttatttcgcggtttttgcgtatttcggcgttacgttgtacggcgtttttcgggaagtacgtttcggcggtttcgtttttgcggttacgcggtttaggcgtggttttcgtttcggttatcggttgttgtttaattttgtcggttgttgacgcggcgtcgcgttgtttgcggtcgatcggtgcggcgagggtttttttcgatatttcgaagtcgattttgcgttcgtttaggtttatacgtatgatttttattttaatggtgtcgtttaggcggaagttgcgttcggtgcgttcgttcgatagacggtggtgtatagggtcgaagtggtagtagtcgttcggtagcgtattgacgtgtattaggttttttacgtaaatgtcggttagttcgacgaataggtcgaaatcggttacggcggtgattatattcgggaaggtttcgtttacgcgattttttatgaattcgtatttgagttagtttattacgttacgggtagtttcgtcggttcgacgttcggttatcgagtattgttcgtcgagttgttttagggtgttttcgtcgtacgggtagatacgcgttttgggaatgtttatggcgttagtacgtttgacgtgcggggtatcgattttggaacggatgatgttgcggatggcgcggtgtattagtaggttcgggtaacggcggatcggcgaggtaaagtgggtgtacgtttcgtagtttaggtcgaagtggttattgttttcggtgttgtatacggtttggtttagcgaacgtagtattacggtttggattaggtggaagttcgggcgttcggcgatgttcgttagtagggtttggtaatttttcggtgaagggtttttgtttttgtgtaggtttagg

SEQ ID NO: 1286 - DNA, 1511 bp, Artificial Sequence
  chemically treated genomic DNA (Homo sapiens) CpG-island No: 1286
cctaaacctacacaaaaacaaaaacccttcaccgaaaaattaccaaaccctactaacgaacatcgccgaacgcccgaacttccacctaatccaaaccgtaatactacgttcgctaaaccaaaccgtatacaacaccgaaaacaataaccacttcgacctaaactacgaaacgtacacccactttacctcgccgatccgccgttacccgaacctactaatacaccgcgccatccgcaacatcatccgttccaaaatcgataccccgcacgtcaaacgtactaacgccataaacattcccaaaacgcgtatctacccgtacgacgaaaacaccctaaaacaactcgacgaacaatactcgataaccgaacgtcgaaccgacgaaactacccgtaacgtaataaactaactcaaatacgaattcataaaaaatcgcgtaaacgaaaccttcccgaatataatcaccgccgtaaccgatttcgacctattcgtcgaactaaccgacatttacgtaaaaaacctaatacacgtcaatacgctaccgaacgactactaccacttcgaccctatacaccaccgtctatcgaacgaacgcaccgaacgcaacttccgcctaaacgacaccattaaaataaaaatcatacgtataaacctaaacgaacgcaaaatcgacttcgaaatatcgaaaaaaaccctcgccgcaccgatcgaccgcaaacaacgcgacgccgcgtcaacaaccgacaaaattaaacaacaaccgataaccgaaacgaaaaccacgcctaaaccgcgtaaccgcaaaaacgaaaccgccgaaacgtacttcccgaaaaacgccgtacaacgtaacgccgaaatacgcaaaaaccgcgaaataaaaaaaacgctaataaacgaaacacgcaataacgaccataccaacaacaaatcgaacaaaaataacaaaacctccgactccgacaaaccgaccaaacaccgtaaaaacccgccgaaatccgatacgccacgcaaaaacaaaaacaaatcataaatcaactaaaaaaaatctacgacgtacacgccgtacaaacattactaaaacaccatccgaaacgcgtcaaacaaatctaactatcgaaaaaacgcaacgaaccacgcctaaaaaccttactaacgctaacaacgaaaaaccgcgtaccgatcgaccaaactaaacgccgtaaactaaatacctaaataaaaaacgtacaccaaaacgtaatcgccgaaatcaacccaaaccaaatataaaacgaattaatactcgaaaaattacttaaacgcaccgaaacgccgccgctaatcctaatcctaaacgatataaccgacccgcataacctcgacgcgtacctacgcacgaccgatacgaccgataccacgactataatcgtacccaaaaacaaatcgaccaccctaacgccgattatacgcaaaataacctacgatacgacaaaaataatcccgctaataaccgtaaccaacctaacgcgaac

SEQ ID NO: 1287 - DNA, 1511 bp, Artificial Sequence
  chemically treated genomic DNA (Homo sapiens) CpG-island No: 1287
tttgagtttgtataaaggtaaggattttttatcgaaggattattaggttttgttggcgagtatcgtcgggcgttcggatttttatttgatttagatcgtgatgttgcgttcgttgagttaggtcgtgtatagtatcgagaataatggttatttcggtttgaattacgaggcgtatatttattttatttcgtcgattcgtcgttattcggatttgttggtgtatcgcgttattcgtagtattattcgttttaaggtcgatatttcgtacgttaagcgtgttggcgttatgagtatttttaaggcgcgtatttattcgtacgacgagaatattttggagtagttcggcgagtagtgttcgatgatcgagcgtcgggtcgacgaagttattcgtgacgtggtgaattggtttaagtgcgagtttatgaaggatcgcgtgggcgagattttttcgggtgtgattatcgtcgtgatcggtttcggtttgttcgtcgagttgatcgatatttacgtagagggtttggtgtacgttagtgcgttgtcgggcgattattattatttcgattttgtgtattatcgtttgtcgggcgagcgtatcgggcgtagttttcgtttgggcgatattattgaagtgaaggttatgcgtgtggatttggacgagcgtaagatcgatttcgaggtgtcggaaaaaattttcgtcgtatcgatcggtcgtaagtagcgcggcgtcgcgttagtagtcgataaggttgaatagtagtcggtaatcgaagcgaaagttacgtttaaatcgcgtagtcgtaagagcgaaatcgtcgaggcgtatttttcgaaagacgtcgtgtagcgtaacgtcgaagtgcgtaagagtcgcgaaatgaaaaaggcgttgatgagcgaggtacgtagtggcggttatgttagtagtaagtcggataaaggtggtaaggttttcggtttcggtaagtcgattaagtatcgtaaaggttcgtcgaagttcggtgcgttacgtaagagtaagagtaagttatgagttagttggaaaagatttacggcgtgtacgtcgtgtaggtattgttgaagtattattcgaagcgcgttaagtagatttggttgtcggaagggcgtagcgagttacgtttggaaattttgttggcgttggtagcggagaatcgcgtgtcggtcggttaggttgagcgtcgtgagttggatgtttgggtagagggcgtgtattagggcgtggtcgtcgaggttagtttaagttaggtgtggggcgagttgatgttcgaagagttgtttgagcgtatcgaaacgtcgtcgttgattttggttttggacggtgtgatcgattcgtataatttcggcgcgtgtttgcgtacggtcgatgcggtcggtgttacggttgtgatcgtgtttaaggataagtcggttattttgacgtcggttgtgcgtaaggtggtttgcggtgcggtagaggtgatttcgttggtggtcgtgattaatttggcgcggat

SEQ ID NO: 1288 - DNA, 1511 bp, Artificial Sequence
  chemically treated genomic DNA (Homo sapiens) CpG-island No: 1288
atccgcgccaaattaatcacgaccaccaacgaaatcacctctaccgcaccgcaaaccaccttacgcacaaccgacgtcaaaataaccgacttatccttaaacacgatcacaaccgtaacaccgaccgcatcgaccgtacgcaaacacgcgccgaaattatacgaatcgatcacaccgtccaaaaccaaaatcaacgacgacgtttcgatacgctcaaacaactcttcgaacatcaactcgccccacacctaacttaaactaacctcgacgaccacgccctaatacacgccctctacccaaacatccaactcacgacgctcaacctaaccgaccgacacgcgattctccgctaccaacgccaacaaaatttccaaacgtaactcgctacgcccttccgacaaccaaatctacttaacgcgcttcgaataatacttcaacaatacctacacgacgtacacgccgtaaatcttttccaactaactcataacttactcttactcttacgtaacgcaccgaacttcgacgaacctttacgatacttaatcgacttaccgaaaccgaaaaccttaccacctttatccgacttactactaacataaccgccactacgtacctcgctcatcaacgcctttttcatttcgcgactcttacgcacttcgacgttacgctacacgacgtctttcgaaaaatacgcctcgacgatttcgctcttacgactacgcgatttaaacgtaactttcgcttcgattaccgactactattcaaccttatcgactactaacgcgacgccgcgctacttacgaccgatcgatacgacgaaaattttttccgacacctcgaaatcgatcttacgctcgtccaaatccacacgcataaccttcacttcaataatatcgcccaaacgaaaactacgcccgatacgctcgcccgacaaacgataatacacaaaatcgaaataataataatcgcccgacaacgcactaacgtacaccaaaccctctacgtaaatatcgatcaactcgacgaacaaaccgaaaccgatcacgacgataatcacacccgaaaaaatctcgcccacgcgatccttcataaactcgcacttaaaccaattcaccacgtcacgaataacttcgtcgacccgacgctcgatcatcgaacactactcgccgaactactccaaaatattctcgtcgtacgaataaatacgcgccttaaaaatactcataacgccaacacgcttaacgtacgaaatatcgaccttaaaacgaataatactacgaataacgcgatacaccaacaaatccgaataacgacgaatcgacgaaataaaataaatatacgcctcgtaattcaaaccgaaataaccattattctcgatactatacacgacctaactcaacgaacgcaacatcacgatctaaatcaaataaaaatccgaacgcccgacgatactcgccaacaaaacctaataatccttcgataaaaaatccttacctttatacaaactcaaa

SEQ ID NO: 1289 - DNA, 1583 bp, Artificial Sequence
  chemically treated genomic DNA (Homo sapiens) CpG-island No: 1289
gtttcggcggcgggtcgtcgtgtacgcggtatagggttggtacgttatgtttttgtaggaattcggcggtggttacgttggtcgttagtatgtatttttcgattagtttgtgggtatcgttgcgtacggtcgggcggattttcgcgattttgcgttggtcgtcgaagatgatgcgggttttttgcgtttcgaagtcgatggcgttacgggtgtgacgggtatttattagtattttgtataggttgtataggttttttaggttcggtacgatttttttgtatttttcgcgtagcgttttgttttcgcgggtgcgggcgtgttcgagtatgttgttgattttgttgtaggttaggcgggcgtgggagtggataacgttttcgtagaattggtagtcgattatttggtcggttttgtttatggttattttatagattatggttagacggtcgacgtgcgggtttagcgagtataggtcgttggatagtttttcgggaagtatcggtattatacgttcggggaagtatatcgagttgtcgcgttgttgagtttcgacgtttagggtcgagtttaggcgaacgtagttggatacgtcggtaatcgttatatataggcgttagttatcggagaataggcgtagtttgtttagcggttcgtagtagacggcgtcgtcgaagtttcgagtatttttatcgtcgatggtgacgaacggtaggtggcgtaggtcgacgcgtttttttttgttttttttttcgatttcggagcggaatttgcgcgtttttttgacgatagtattaggttagacgtgcggaatgtcgtagttgcgtaaggtaacgtcgatttttatgttcggtgttatgtagttgtcgatgatttcgattacgtcgttttgcggttggaagcgcggggttggttagtgggtgattttgatttcgacgaattgatcgattttcgcgtcgtcgttacgttcggcggttattagtattttttgttggattttcgggttgttcggggttacgtagttaatgttatttttttcgaagtaacggtcgattacgttttcgtgggtacgggagatgatttcgattagcgtattttcgcggcggttacggcggtcgacgttagagatacgggttaggtcgcggttatcgtcgaatattaggcgtatttgcgacgggttgaggaataggttttcgttgtcgttatcgggaataaggaagtcgaagttatcgcggtggtcggagacgcgattatagattaggtttagtttgtttatcggggtataagtgttacgtcgggtatagataagttggtcgtcgcgttttatggtacgtaggcggcggcgtagggtttcgatttggtttttttcgtatagatcgaattcggtcgttagttttttacgcgcggtcggttcgttacggtcggcgaggcgttgtaggattagtttacggttggggatagggttgtcgtattttttcgtttcgcgagcggtttcgggatcgagggattgttaatcggttattagaaggggtttattttggggtatatagatatgaattttggtataggcgtattgaaatcggaaa

SEQ ID NO: 1290 - DNA, 1583 bp, Artificial Sequence
  chemically treated genomic DNA (Homo sapiens) CpG-island No: 1290
tttccgatttcaatacgcctataccaaaattcatatctatataccccaaaataaaccccttctaataaccgattaacaatccctcgatcccgaaaccgctcgcgaaacgaaaaaatacgacaaccctatccccaaccgtaaactaatcctacaacgcctcgccgaccgtaacgaaccgaccgcgcgtaaaaaactaacgaccgaattcgatctatacgaaaaaaaccaaatcgaaaccctacgccgccgcctacgtaccataaaacgcgacgaccaacttatctatacccgacgtaacacttataccccgataaacaaactaaacctaatctataatcgcgtctccgaccaccgcgataacttcgacttccttattcccgataacgacaacgaaaacctattcctcaacccgtcgcaaatacgcctaatattcgacgataaccgcgacctaacccgtatctctaacgtcgaccgccgtaaccgccgcgaaaatacgctaatcgaaatcatctcccgtacccacgaaaacgtaatcgaccgttacttcgaaaaaaataacattaactacgtaaccccgaacaacccgaaaatccaacaaaaaatactaataaccgccgaacgtaacgacgacgcgaaaatcgatcaattcgtcgaaatcaaaatcacccactaaccaaccccgcgcttccaaccgcaaaacgacgtaatcgaaatcatcgacaactacataacaccgaacataaaaatcgacgttaccttacgcaactacgacattccgcacgtctaacctaatactatcgtcaaaaaaacgcgcaaattccgctccgaaatcgaaaaaaaaaacaaaaaaaaacgcgtcgacctacgccacctaccgttcgtcaccatcgacgataaaaatactcgaaacttcgacgacgccgtctactacgaaccgctaaacaaactacgcctattctccgataactaacgcctatatataacgattaccgacgtatccaactacgttcgcctaaactcgaccctaaacgtcgaaactcaacaacgcgacaactcgatatacttccccgaacgtataataccgatacttcccgaaaaactatccaacgacctatactcgctaaacccgcacgtcgaccgtctaaccataatctataaaataaccataaacaaaaccgaccaaataatcgactaccaattctacgaaaacgttatccactcccacgcccgcctaacctacaacaaaatcaacaacatactcgaacacgcccgcacccgcgaaaacaaaacgctacgcgaaaaatacaaaaaaatcgtaccgaacctaaaaaacctatacaacctatacaaaatactaataaatacccgtcacacccgtaacgccatcgacttcgaaacgcaaaaaacccgcatcatcttcgacgaccaacgcaaaatcgcgaaaatccgcccgaccgtacgcaacgatacccacaaactaatcgaaaaatacatactaacgaccaacgtaaccaccgccgaattcctacaaaaacataacgtaccaaccctataccgcgtacacgacgacccgccgccgaaac

SEQ ID NO: 1291 - DNA, 1583 bp, Artificial Sequence
  chemically treated genomic DNA (Homo sapiens) CpG-island No: 1291
ttttcggttttaatacgtttatgttagaatttatatttatatattttaaggtgaattttttttgatggtcgattggtaatttttcgatttcgaggtcgttcgcgaagcggaaaaatacgataattttatttttagtcgtgagttgattttgtagcgtttcgtcgatcgtggcgaatcggtcgcgcgtgaggagttggcggtcgagttcggtttgtacgaagaagattagatcgaagttttgcgtcgtcgtttgcgtgttatggagcgcgacggttagtttatttatattcggcgtggtatttatgtttcggtagataagttggatttgatttgtggtcgcgttttcggttatcgcgatggtttcggtttttttattttcgatgacggtagcgaagatttgttttttagttcgtcgtagatgcgtttggtgttcgacggtgatcgcggtttggttcgtgtttttggcgtcgatcgtcgtggtcgtcgcgaaggtgcgttggtcgaggttatttttcgtgtttacgaaagcgtggtcggtcgttatttcgaagaaggtggtattggttacgtaatttcggataattcgaagatttagtaggaagtgttagtaatcgtcgggcgtaacggcggcgcgaagatcggttagttcgtcgagattaagattatttattggttaatttcgcgtttttagtcgtaaggcgacgtggtcgaggttatcggtaattatatggtatcgggtatggaaatcgacgttgttttgcgtagttacgatatttcgtacgtttggtttgatgttgtcgttaaggaagcgcgtaagtttcgtttcgaagtcgaagagaaggataaagagaagcgcgtcgatttgcgttatttgtcgttcgttattatcgacggtgaggatgttcgggatttcgacgacgtcgtttattgcgaatcgttgggtaagttgcgtttgtttttcggtggttggcgtttgtatgtggcgattgtcgacgtgtttagttacgttcgtttgggttcggttttggacgtcgaggtttagtagcgcggtaattcggtgtattttttcgagcgtgtagtgtcgatgtttttcgaagagttgtttaacggtttgtgttcgttgaattcgtacgtcgatcgtttggttatggtttgtgaaatgattatgaataaagtcggttaaatggtcgattattagttttacgaaggcgttatttatttttacgttcgtttgatttataataaggttagtagtatgttcgagtacgttcgtattcgcgaaggtaaggcgttgcgcgaggaatataaggaagtcgtatcggatttgaagaatttgtataatttgtataaggtgttggtggatgttcgttatattcgtggcgttatcgatttcgaaacgtaggaaattcgtattattttcggcgattagcgtaagatcgcggaaattcgttcgatcgtgcgtaacgatgtttataagttgatcgaggaatgtatgttggcggttaacgtggttatcgtcgagtttttgtaaaagtatggcgtgttagttttgtatcgcgtgtacgacggttcgtcgtcggagt

SEQ ID NO: 1292 - DNA, 1583 bp, Artificial Sequence
  chemically treated genomic DNA (Homo sapiens) CpG-island No: 1292
actccgacgacgaaccgtcgtacacgcgatacaaaactaacacgccatacttttacaaaaactcgacgataaccacgttaaccgccaacatacattcctcgatcaacttataaacatcgttacgcacgatcgaacgaatttccgcgatcttacgctaatcgccgaaaataatacgaatttcctacgtttcgaaatcgataacgccacgaatataacgaacatccaccaacaccttatacaaattatacaaattcttcaaatccgatacgacttccttatattcctcgcgcaacgccttaccttcgcgaatacgaacgtactcgaacatactactaaccttattataaatcaaacgaacgtaaaaataaataacgccttcgtaaaactaataatcgaccatttaaccgactttattcataatcatttcacaaaccataaccaaacgatcgacgtacgaattcaacgaacacaaaccgttaaacaactcttcgaaaaacatcgacactacacgctcgaaaaaatacaccgaattaccgcgctactaaacctcgacgtccaaaaccgaacccaaacgaacgtaactaaacacgtcgacaatcgccacatacaaacgccaaccaccgaaaaacaaacgcaacttacccaacgattcgcaataaacgacgtcgtcgaaatcccgaacatcctcaccgtcgataataacgaacgacaaataacgcaaatcgacgcgcttctctttatccttctcttcgacttcgaaacgaaacttacgcgcttccttaacgacaacatcaaaccaaacgtacgaaatatcgtaactacgcaaaacaacgtcgatttccatacccgataccatataattaccgataacctcgaccacgtcgccttacgactaaaaacgcgaaattaaccaataaataatcttaatctcgacgaactaaccgatcttcgcgccgccgttacgcccgacgattactaacacttcctactaaatcttcgaattatccgaaattacgtaaccaataccaccttcttcgaaataacgaccgaccacgctttcgtaaacacgaaaaataacctcgaccaacgcaccttcgcgacgaccacgacgatcgacgccaaaaacacgaaccaaaccgcgatcaccgtcgaacaccaaacgcatctacgacgaactaaaaaacaaatcttcgctaccgtcatcgaaaataaaaaaaccgaaaccatcgcgataaccgaaaacgcgaccacaaatcaaatccaacttatctaccgaaacataaataccacgccgaatataaataaactaaccgtcgcgctccataacacgcaaacgacgacgcaaaacttcgatctaatcttcttcgtacaaaccgaactcgaccgccaactcctcacgcgcgaccgattcgccacgatcgacgaaacgctacaaaatcaactcacgactaaaaataaaattatcgtatttttccgcttcgcgaacgacctcgaaatcgaaaaattaccaatcgaccatcaaaaaaaattcaccttaaaatatataaatataaattctaacataaacgtattaaaaccgaaaa

SEQ ID NO: 1293 - DNA, 664 bp, Artificial Sequence
  chemically treated genomic DNA (Homo sapiens) CpG-island No: 1293
tcgtaatcgttgatgcgtattttggtcgtcgtcgtgttgagtttggttatcggcgtttcggtcgttatggtagacgtatcggttattttgattatgtataacggttagtataaggaaatcggcgaagttatcgttaaggtttacgaggttaagatcggtatttatatcgatattcgtaagggtagtagtaattagttggttagttagattatcgaggagggcgatcgttcgttagtcgattttatttatatcgaagagttttcgtttttgaataatttgggcgaattgggtttgttggcgaagatcgacgacgttatcgcgaatatggtgtttaaggagtatgtgggcgttaacggtatttggatgggtattatcgcgcgtacgcgtatcgtggtgtataattcgaagaaggtcgatgaaaaagatttgtcgattatagtgatggatttcgttaattttgagtgggaaggtcgcgtcggttacgtatttattagcggtgtattttaggagtaggtcgtggttattttgaagatgtatggtcgtgaagttatcgaagaatggttgatcggttttaaagttttcggtaaaatatatattaataatatggtcgtttttaaagtcgtggaaaaaggtgaagtggttgcggtattggtgaataattatt

SEQ ID NO: 1294 - DNA, 664 bp, Artificial Sequence
  chemically treated genomic DNA (Homo sapiens) CpG-island No: 1294
aataattattcaccaataccgcaaccacttcacctttttccacgactttaaaaacgaccatattattaatatatattttaccgaaaactttaaaaccgatcaaccattcttcgataacttcacgaccatacatcttcaaaataaccacgacctactcctaaaatacaccgctaataaatacgtaaccgacgcgaccttcccactcaaaattaacgaaatccatcactataatcgacaaatctttttcatcgaccttcttcgaattatacaccacgatacgcgtacgcgcgataatacccatccaaataccgttaacgcccacatactccttaaacaccatattcgcgataacgtcgtcgatcttcgccaacaaacccaattcgcccaaattattcaaaaacgaaaactcttcgatataaataaaatcgactaacgaacgatcgccctcctcgataatctaactaaccaactaattactactacccttacgaatatcgatataaataccgatcttaacctcgtaaaccttaacgataacttcgccgatttccttatactaaccgttatacataatcaaaataaccgatacgtctaccataacgaccgaaacgccgataaccaaactcaacacgacgacgaccaaaatacgcatcaacgattacga

SEQ ID NO: 1295 - DNA, 664 bp, Artificial Sequence
  chemically treated genomic DNA (Homo sapiens) CpG-island No: 1295
agtagttgtttattagtatcgtagttattttatttttttttacggttttgagggcgattatgttgttggtgtatgttttgtcgaaggttttaaggtcggttagttatttttcggtggttttacgattatgtatttttaggatggttacggtttgtttttggaatgtatcgttggtgggtacgtagtcgacgcggtttttttatttagggttggcgaagtttattattgtggtcggtaggttttttttatcgatttttttcgggttgtatattacgatgcgcgtgcgcgcggtgatgtttatttaggtgtcgttggcgtttatatattttttgggtattatgttcgcggtggcgtcgtcgattttcgttagtaggtttagttcgtttaggttgtttaggggcggggatttttcggtgtagatgaggtcggttggcgaacggtcgtttttttcgatgatttggttggttagttggttgttgttgtttttgcggatatcgatgtggatgtcggttttggtttcgtaggttttggcgatggtttcgtcgatttttttgtgttgatcgttgtatatggttagggtgatcggtgcgtttgttatggcggtcggagcgtcgatgattaggtttagtacggcggcggttaaggtacgtattagcggttgcgg

SEQ ID NO: 1296 - DNA, 664 bp, Artificial Sequence
  chemically treated genomic DNA (Homo sapiens) CpG-island No: 1296
ccgcaaccgctaatacgtaccttaaccgccgccgtactaaacctaatcatcgacgctccgaccgccataacaaacgcaccgatcaccctaaccatatacaacgatcaacacaaaaaaatcgacgaaaccatcgccaaaacctacgaaaccaaaaccgacatccacatcgatatccgcaaaaacaacaacaaccaactaaccaaccaaatcatcgaaaaaaacgaccgttcgccaaccgacctcatctacaccgaaaaatccccgcccctaaacaacctaaacgaactaaacctactaacgaaaatcgacgacgccaccgcgaacataatacccaaaaaatatataaacgccaacgacacctaaataaacatcaccgcgcgcacgcgcatcgtaatatacaacccgaaaaaaatcgataaaaaaaacctaccgaccacaataataaacttcgccaaccctaaataaaaaaaccgcgtcgactacgtacccaccaacgatacattccaaaaacaaaccgtaaccatcctaaaaatacataatcgtaaaaccaccgaaaaataactaaccgaccttaaaaccttcgacaaaacatacaccaacaacataatcgccctcaaaaccgtaaaaaaaaataaaataactacgatactaataaacaactact

SEQ ID NO: 1297 - DNA, 1265 bp, Artificial Sequence
  chemically treated genomic DNA (Homo sapiens) CpG-island No: 1297
cggttaacgtcgagttcgcggcggcggcgttttatgtagttttgttgatcgtggtgttaggtttgtcggtttatttgttgattacgcggatgtatttgaataaggtataaatttcgtagtttttatcgtcggtaagttagtttttataggtatagtatcgtttttaaggtttgtgtaatatttgcgggagcgggtacgttcgtttttataaagttcgggttacgttttgaattgatttaggttcgttcgtaattgcgtagttaggttatttagtattttgttgttggtcgtggtttgtattattatttcggtcgatcgttcggtttgggtatggatagtttttattcgattacgtatcgtttgcgtttcgttcgtttgttgttcggtcgtacgggtagttaggtcgatagttgcgtgaatttgttttatcgtcgtttgtatagattgttgacggcgttcgttgttacgtagtattagtagtttttcgttggtttttagatcggtttggttgatcgtcgttacggtttttttggcgtttttttgtagcgtagcgatatgcgtttggatatttttcgtggagttttgcgttttgttcgttaacgttcgtattttattagttattacggtaaagtcgcgttcggttttatcggttcgggtcgtttcgatggtcgtatttaacgttagtaggttggtttgttcggcgatgtcgtggattatcgttagtattatttcgatttgtttattttgtttggttaggcgttcgattatttgagagttcgtttttatttggttagttaggttttcgattagttttgcgagttgggtcgaggtgcggttgtttttatcggtggtttggcggatatttattatttgttttaatgttgtttgtatcgtatggttttcggtttgggttttatcggttatgttcgaaaggttacgtaggttggtcgttatttcgttacgttgtagcgtagtagtagtatcggtatcggtattacgttgggttatcgcgttaatttttatatcggtacgttgggcgatttcgttcgtttcgcgtacgatcggttgtaatttgtcgataaagcggtttacggtcgaagttatgtcgtcgatttcgtttcggttgtcgagtggtatacgtttggttaggtcgttttcgtttgtcgttaggtcgttaagggtagtaattagtaggcgtagtttgtttagtatacgacgattaagtattacggttattattagtaatacgtttaggttaattagta

SEQ ID NO: 1298 - DNA, 1265 bp, Artificial Sequence
  chemically treated genomic DNA (Homo sapiens) CpG-island No: 1298
tactaattaacctaaacgtattactaataataaccgtaatacttaatcgtcgtatactaaacaaactacgcctactaattactacccttaacgacctaacgacaaacgaaaacgacctaaccaaacgtataccactcgacaaccgaaacgaaatcgacgacataacttcgaccgtaaaccgctttatcgacaaattacaaccgatcgtacgcgaaacgaacgaaatcgcccaacgtaccgatataaaaattaacgcgataacccaacgtaataccgataccgatactactactacgctacaacgtaacgaaataacgaccaacctacgtaacctttcgaacataaccgataaaacccaaaccgaaaaccatacgatacaaacaacattaaaacaaataataaatatccgccaaaccaccgataaaaacaaccgcacctcgacccaactcgcaaaactaatcgaaaacctaactaaccaaataaaaacgaactctcaaataatcgaacgcctaaccaaacaaaataaacaaatcgaaataatactaacgataatccacgacatcgccgaacaaaccaacctactaacgttaaatacgaccatcgaaacgacccgaaccgataaaaccgaacgcgactttaccgtaataactaataaaatacgaacgttaacgaacaaaacgcaaaactccacgaaaaatatccaaacgcatatcgctacgctacaaaaaaacgccaaaaaaaccgtaacgacgatcaaccaaaccgatctaaaaaccaacgaaaaactactaatactacgtaacaacgaacgccgtcaacaatctatacaaacgacgataaaacaaattcacgcaactatcgacctaactacccgtacgaccgaacaacaaacgaacgaaacgcaaacgatacgtaatcgaataaaaactatccatacccaaaccgaacgatcgaccgaaataataatacaaaccacgaccaacaacaaaatactaaataacctaactacgcaattacgaacgaacctaaatcaattcaaaacgtaacccgaactttataaaaacgaacgtacccgctcccgcaaatattacacaaaccttaaaaacgatactatacctataaaaactaacttaccgacgataaaaactacgaaatttataccttattcaaatacatccgcgtaatcaacaaataaaccgacaaacctaacaccacgatcaacaaaactacataaaacgccgccgccgcgaactcgacgttaaccg

SEQ ID NO: 1299 - DNA, 1265 bp, Artificial Sequence
  chemically treated genomic DNA (Homo sapiens) CpG-island No: 1299
tgttggttggtttgggcgtgttgttggtggtggtcgtggtgtttggtcgtcgtgtgttgagtaagttgcgtttgttgattgttgtttttgacgatttggcggtaggcgagggcgatttgattaagcgtgtgttattcgatagtcgggacgagatcggcgatatggtttcggtcgtgaatcgttttgtcgataagttgtaatcgatcgtgcgcgaggcgggcgaggtcgtttagcgtatcggtgtggaaattggcgcgatggtttagcgtaatgtcggtgtcgatgttgttgttgcgttgtagcgtgacgaagtggcggttagtttgcgtgatttttcgagtatggtcgatgaagtttaggtcgaaagttatgcgatgtaggtagtattgaaataggtggtggatattcgttaggttatcgatgaaaatagtcgtatttcgatttagttcgtagggttgatcgaaaatttggttggttaggtagagacgggtttttaggtgatcgagcgtttggttaagtagagtgagtagatcgaagtagtgttgacggtgatttacggtatcgtcgagtagattaatttgttggcgttgaatgcggttatcgaagcggttcgggtcggtgagatcgggcgcggttttgtcgtggtggttgatgaggtgcgggcgttggcgagtaagacgtaaagttttacgggggatatttaggcgtatatcgttgcgttgtagaagggcgttaaggaggtcgtggcgacgattagttaggtcggtttgaaggttagcgaagggttgttggtgttgcgtgataacgagcgtcgttagtagtttgtgtaggcggcggtggagtaggtttacgtagttatcggtttggttattcgtgcggtcgagtagtaggcgagcggggcgtaggcggtgcgtggtcgggtggagattatttatgtttaggtcgagcggtcggtcgaagtagtgatgtagattacggttagtagtaaggtgttggatgatttggttgcgtagttgcgggcgagtttgggttagtttagggcgtaattcgggttttgtgggagcgggcgtgttcgttttcgtaggtattatataggttttgagggcggtgttgtatttgtgggagttggtttgtcggcgatgagggttgcgaggtttatgttttgtttaggtatattcgcgtggttagtagataaatcggtaggtttgatattacgattagtaaggttgtatagggcgtcgtcgtcgcgaattcgacgttggtcg

SEQ ID NO: 1300 - DNA, 1265 bp, Artificial Sequence
  chemically treated genomic DNA (Homo sapiens) CpG-island No: 1300
cgaccaacgtcgaattcgcgacgacgacgccctatacaaccttactaatcgtaatatcaaacctaccgatttatctactaaccacgcgaatatacctaaacaaaacataaacctcgcaaccctcatcgccgacaaaccaactcccacaaatacaacaccgccctcaaaacctatataatacctacgaaaacgaacacgcccgctcccacaaaacccgaattacgccctaaactaacccaaactcgcccgcaactacgcaaccaaatcatccaacaccttactactaaccgtaatctacatcactacttcgaccgaccgctcgacctaaacataaataatctccacccgaccacgcaccgcctacgccccgctcgcctactactcgaccgcacgaataaccaaaccgataactacgtaaacctactccaccgccgcctacacaaactactaacgacgctcgttatcacgcaacaccaacaacccttcgctaaccttcaaaccgacctaactaatcgtcgccacgacctccttaacgcccttctacaacgcaacgatatacgcctaaatatcccccgtaaaactttacgtcttactcgccaacgcccgcacctcatcaaccaccacgacaaaaccgcgcccgatctcaccgacccgaaccgcttcgataaccgcattcaacgccaacaaattaatctactcgacgataccgtaaatcaccgtcaacactacttcgatctactcactctacttaaccaaacgctcgatcacctaaaaacccgtctctacctaaccaaccaaattttcgatcaaccctacgaactaaatcgaaatacgactattttcatcgataacctaacgaatatccaccacctatttcaatactacctacatcgcataactttcgacctaaacttcatcgaccatactcgaaaaatcacgcaaactaaccgccacttcgtcacgctacaacgcaacaacaacatcgacaccgacattacgctaaaccatcgcgccaatttccacaccgatacgctaaacgacctcgcccgcctcgcgcacgatcgattacaacttatcgacaaaacgattcacgaccgaaaccatatcgccgatctcgtcccgactatcgaataacacacgcttaatcaaatcgccctcgcctaccgccaaatcgtcaaaaacaacaatcaacaaacgcaacttactcaacacacgacgaccaaacaccacgaccaccaccaacaacacgcccaaaccaaccaaca

SEQ ID NO: 1301 - DNA, 928 bp, Artificial Sequence
  chemically treated genomic DNA (Homo sapiens) CpG-island No: 1301
tgcgttagcgtagttcgtcggtagtatcgcgaacggtttgcgcggtgttggtttgtatggtagtagtattgttttgtgttttttttagtcgtttacgtagggttttgtcgttgttcgcggtagtatcgattaggttgtcgtttattagttgttcgttattggcgattagtgtcgcgaagcgttgatcgagcgtttttagtttttgttcgatattcgttgtggaaatttttattattattttgtcgatttcggcgttattggggttgatcgaagtttcgacgaaataaacggtaggatcgcgtcgagttgtatcgattattttgtttagcgttcgttcgttttggtttttttttattaacgtttggttgatcgggttttgtcggtttagatagcgggtgaggtgttggttttgggcgtcgtcgtatattacgaatagtacgttgggattgcgttgggtacgtcgtgtaaagtttgagagtatcggtatatcgttgttttagatggtacgcggggtaatcgaggttagtagttttgttatatcgttggcggagttttttaggtttttttttagggtgttacgtagttgttgttgttcgttttgtaggcgtgtcgataattttgtatttaggcgttgacgggtattgttggatagattgtttaggttcgagcgtatattttgttcggtttgttttagttcgtcggttaattgacggttgttattgtttaggcgttcgttaaggtcggtttttagggtagtgatcgtgtttcgggtaagcgtaacggtaattagtatttgtattaaaagagcgatattaagggtaataaatataggtcgtaaaaggcggtttcgtaatagtgagaggatggtagatacggtgtaattttcgtgttttttggcgttattattttgatggtatttatagaaatt

SEQ ID NO: 1302 - DNA, 928 bp, Artificial Sequence
  chemically treated genomic DNA (Homo sapiens) CpG-island No: 1302
aatttctataaataccatcaaaataataacgccaaaaaacacgaaaattacaccgtatctaccatcctctcactattacgaaaccgccttttacgacctatatttattacccttaatatcgctcttttaatacaaatactaattaccgttacgcttacccgaaacacgatcactaccctaaaaaccgaccttaacgaacgcctaaacaataacaaccgtcaattaaccgacgaactaaaacaaaccgaacaaaatatacgctcgaacctaaacaatctatccaacaatacccgtcaacgcctaaatacaaaattatcgacacgcctacaaaacgaacaacaacaactacgtaacaccctaaaaaaaaacctaaaaaactccgccaacgatataacaaaactactaacctcgattaccccgcgtaccatctaaaacaacgatataccgatactctcaaactttacacgacgtacccaacgcaatcccaacgtactattcgtaatatacgacgacgcccaaaaccaacacctcacccgctatctaaaccgacaaaacccgatcaaccaaacgttaataaaaaaaaaccaaaacgaacgaacgctaaacaaaataatcgatacaactcgacgcgatcctaccgtttatttcgtcgaaacttcgatcaaccccaataacgccgaaatcgacaaaataataataaaaatttccacaacgaatatcgaacaaaaactaaaaacgctcgatcaacgcttcgcgacactaatcgccaataacgaacaactaataaacgacaacctaatcgatactaccgcgaacaacgacaaaaccctacgtaaacgactaaaaaaaacacaaaacaatactactaccatacaaaccaacaccgcgcaaaccgttcgcgatactaccgacgaactacgctaacgca

SEQ ID NO: 1303 - DNA, 928 bp, Artificial Sequence
  chemically treated genomic DNA (Homo sapiens) CpG-island No: 1303
agtttttgtagatgttattaaaatagtggcgttagaaaatacgagggttatatcgtgtttgttatttttttattgttacgaagtcgttttttgcggtttgtgtttgttgtttttggtatcgtttttttggtgtaggtgttggttgtcgttgcgtttattcgaagtacggttattgttttggaggtcgattttggcgaacgtttgggtaatgatagtcgttagttggtcggcgaattggagtaagtcgggtaagatgtgcgttcgggtttggatagtttgtttagtagtattcgttagcgtttgagtgtagggttgtcggtacgtttgtaaagcgaatagtagtaattgcgtagtattttggaaaagaatttgaaggatttcgttaacgatatggtagagttgttggtttcggttgtttcgcgtgttatttgggataacgatgtgtcggtgtttttagattttgtacggcgtgtttagcgtaattttaacgtgttgttcgtggtgtacgacgacgtttagggttagtattttattcgttatttgaatcggtaaaattcgattaattaggcgttgatggaaaaaggttagggcgagcgagcgttggataaagtgatcgatgtagttcggcgcgattttgtcgtttatttcgtcgaggtttcgattagttttaatggcgtcgaaatcggtaaggtagtgatgggggtttttatagcgggtatcgagtaggaattgaaggcgttcgattagcgtttcgcggtattgatcgttagtggcgagtaattggtaggcgatagtttggtcggtgttgtcgcggatagcggtaaaattttgcgtgaacggttggaaaaagtatagggtagtgttgttgttatgtaggttaatatcgcgtaaatcgttcgcgatgttgtcggcgagttgcgttggcgta

SEQ ID NO: 1304 - DNA, 928 bp, Artificial Sequence
  chemically treated genomic DNA (Homo sapiens) CpG-island No: 1304
tacgccaacgcaactcgccgacaacatcgcgaacgatttacgcgatattaacctacataacaacaacactaccctatactttttccaaccgttcacgcaaaattttaccgctatccgcgacaacaccgaccaaactatcgcctaccaattactcgccactaacgatcaataccgcgaaacgctaatcgaacgccttcaattcctactcgatacccgctataaaaacccccatcactaccttaccgatttcgacgccattaaaactaatcgaaacctcgacgaaataaacgacaaaatcgcgccgaactacatcgatcactttatccaacgctcgctcgccctaacctttttccatcaacgcctaattaatcgaattttaccgattcaaataacgaataaaatactaaccctaaacgtcgtcgtacaccacgaacaacacgttaaaattacgctaaacacgccgtacaaaatctaaaaacaccgacacatcgttatcccaaataacacgcgaaacaaccgaaaccaacaactctaccatatcgttaacgaaatccttcaaattcttttccaaaatactacgcaattactactattcgctttacaaacgtaccgacaaccctacactcaaacgctaacgaatactactaaacaaactatccaaacccgaacgcacatcttacccgacttactccaattcgccgaccaactaacgactatcattacccaaacgttcgccaaaatcgacctccaaaacaataaccgtacttcgaataaacgcaacgacaaccaacacctacaccaaaaaaacgataccaaaaacaacaaacacaaaccgcaaaaaacgacttcgtaacaataaaaaaataacaaacacgatataaccctcgtattttctaacgccactattttaataacatctacaaaaact

SEQ ID NO: 1305 - DNA, 860 bp, Artificial Sequence
  chemically treated genomic DNA (Homo sapiens) CpG-island No: 1305
ttcggcgtagaaatgaaaacgtcgtagttttttttagggttacggcgttagattagtttggagggtagattaggcgaacggatggcgtagtacgatggtttcgttgcggttcgggtcggtagaaatgatgtcgatcggcgcgtcgattaggttttcgatgcgtttgatgtaggcgcgagcgttggtcggtagtttttttagggttttaacgtttacggtcgattcgttttagtttggtattttttcgtatatcggttttaggtcgatgtagttgtcggtatcggacggcgcgtcgatgatagtatcgttttcgtttttgtagttaacgtagatgttgatggtttttaggtcgtttagtacgtttagtttggttaggtagatgttcgagatgttgttgacgtcgatggcgcgacgtaggattacggtatcgaattagtcgtaacgacgggtacggttagtggtggaatcgaattcgtggttacgtttggttagggtagcgtcggtttcgtcgaatagttcggtcgggaacggatcggaatttacgcgagtggtgtaggttttggtaatatttaggatgtagtttaggtatatcgggttaatatcggagtcggtggagatatcgttagcggtggtgttggagttggtgacgtacgggtaggtatcgtggtcgatgtttagtagcgagttttgggtattttcgaatatgatgtttttgttagcgcggcgtaggttgtgtagttcggcggtgacgtttagtattatcggtttgagttgtttagcgtaggttatgtattcgtttagggtttgttggaagtcgatggtcggttttttgtagtagtttattagttggaagttgtggt

SEQ ID NO: 1306 - DNA, 860 bp, Artificial Sequence
  chemically treated genomic DNA (Homo sapiens) CpG-island No: 1306
accacaacttccaactaataaactactacaaaaaaccgaccatcgacttccaacaaaccctaaacgaatacataacctacgctaaacaactcaaaccgataatactaaacgtcaccgccgaactacacaacctacgccgcgctaacaaaaacatcatattcgaaaatacccaaaactcgctactaaacatcgaccacgatacctacccgtacgtcaccaactccaacaccaccgctaacgatatctccaccgactccgatattaacccgatatacctaaactacatcctaaatattaccaaaacctacaccactcgcgtaaattccgatccgttcccgaccgaactattcgacgaaaccgacgctaccctaaccaaacgtaaccacgaattcgattccaccactaaccgtacccgtcgttacgactaattcgataccgtaatcctacgtcgcgccatcgacgtcaacaacatctcgaacatctacctaaccaaactaaacgtactaaacgacctaaaaaccatcaacatctacgttaactacaaaaacgaaaacgatactatcatcgacgcgccgtccgataccgacaactacatcgacctaaaaccgatatacgaaaaaataccaaactaaaacgaatcgaccgtaaacgttaaaaccctaaaaaaactaccgaccaacgctcgcgcctacatcaaacgcatcgaaaacctaatcgacgcgccgatcgacatcatttctaccgacccgaaccgcaacgaaaccatcgtactacgccatccgttcgcctaatctaccctccaaactaatctaacgccgtaaccctaaaaaaaactacgacgttttcatttctacgccgaa

SEQ ID NO: 1307 - DNA, 860 bp, Artificial Sequence
  chemically treated genomic DNA (Homo sapiens) CpG-island No: 1307
attataatttttagttggtgaattattataaagagtcggttatcgatttttagtaaattttggacgagtgtatggtttacgttgaatagtttaagtcgatgatgttggacgttatcgtcgaattgtataatttgcgtcgcgttggtaaggatattatgttcgaaggtgtttagggttcgttgttggatatcgattacggtatttattcgtacgttattagttttaatattatcgttggcggtatttttatcggtttcggtgttggttcgatgtatttggattatattttgggtattattaaggtttatattattcgcgtaggtttcggttcgttttcgatcgaattgttcgacgaaatcggcgttattttggttaagcgtggttacgagttcggttttattattggtcgtgttcgtcgttgcggttggttcgatgtcgtgattttgcgtcgcgttatcgacgttaatagtatttcgggtatttgtttgattaagttggacgtattggacggtttggaaattattaatatttgcgttggttataagaacgagaacggtgttgttatcgacgcgtcgttcgatgtcgatagttatatcggtttggagtcggtgtacgaagagatgttaggttggagcgagtcgatcgtgggcgttaaaattttggaagagttgtcggttaacgttcgcgtttatattaagcgtatcgaagatttgatcggcgcgtcgatcgatattatttttatcggttcggatcgtaacgagattatcgtgttgcgttattcgttcgtttgatttgttttttaggttgatttgacgtcgtggttttgaaaggggttgcggcgtttttatttttgcgtcgag

SEQ ID NO: 1308 - DNA, 860 bp, Artificial Sequence
  chemically treated genomic DNA (Homo sapiens) CpG-island No: 1308
ctcgacgcaaaaataaaaacgccgcaacccctttcaaaaccacgacgtcaaatcaacctaaaaaacaaatcaaacgaacgaataacgcaacacgataatctcgttacgatccgaaccgataaaaataatatcgatcgacgcgccgatcaaatcttcgatacgcttaatataaacgcgaacgttaaccgacaactcttccaaaattttaacgcccacgatcgactcgctccaacctaacatctcttcgtacaccgactccaaaccgatataactatcgacatcgaacgacgcgtcgataacaacaccgttctcgttcttataaccaacgcaaatattaataatttccaaaccgtccaatacgtccaacttaatcaaacaaatacccgaaatactattaacgtcgataacgcgacgcaaaatcacgacatcgaaccaaccgcaacgacgaacacgaccaataataaaaccgaactcgtaaccacgcttaaccaaaataacgccgatttcgtcgaacaattcgatcgaaaacgaaccgaaacctacgcgaataatataaaccttaataatacccaaaatataatccaaatacatcgaaccaacaccgaaaccgataaaaataccgccaacgataatattaaaactaataacgtacgaataaataccgtaatcgatatccaacaacgaaccctaaacaccttcgaacataatatccttaccaacgcgacgcaaattatacaattcgacgataacgtccaacatcatcgacttaaactattcaacgtaaaccatacactcgtccaaaatttactaaaaatcgataaccgactctttataataattcaccaactaaaaattataat

SEQ ID NO: 1309 - DNA, 680 bp, Artificial Sequence
  chemically treated genomic DNA (Homo sapiens) CpG-island No: 1309
gcgaaacgttcgcggtggaataggtcgtttacgcgtaggtcgcggcgcgtaattttgttttcgtaggtagggtcgatgttacggtcggtggtgtcgattttggtttcgttacgggttttttcgcgggtttggtttagggttacgtggtacgataggattagcggcgtagtcggggagatgcgtaggcgttcgcgtatcggtacgttttttttttttagtttggtgattttacgtattagggtattcggggtaacgattacgtcgttgtcgattaggtattgtacgtttttacgtaggatgtcggacggaattaggtgtagaacggtttttttatcgttgattattagggtgtgattcgcgttgtggttattttggtagcgtattacggcggtagtatgttcggttagtagatcgacgattttgtttttgtttttattattttattgggtgtttaggacgacgatatttttatttattatattggtttttatttacgtaaatttggttgtcggtttgttgtcgacgtagaaatttattgggttagcggtagaatttgttagcgttcgttttgttgaattaattgtcgattataattcgtttcgagagtagtatttaacggttggttaggtagggtttggattatacgttggttttcgttgcgtaattggtagatttgttgt

SEQ ID NO: 1310 - DNA, 680 bp, Artificial Sequence
  chemically treated genomic DNA (Homo sapiens) CpG-island No: 1310
acaacaaatctaccaattacgcaacgaaaaccaacgtataatccaaaccctacctaaccaaccgttaaatactactctcgaaacgaattataatcgacaattaattcaacaaaacgaacgctaacaaattctaccgctaacccaataaatttctacgtcgacaacaaaccgacaaccaaatttacgtaaataaaaaccaatataataaataaaaatatcgtcgtcctaaacacccaataaaataataaaaacaaaaacaaaatcgtcgatctactaaccgaacatactaccgccgtaatacgctaccaaaataaccacaacgcgaatcacaccctaataatcaacgataaaaaaaccgttctacacctaattccgtccgacatcctacgtaaaaacgtacaatacctaatcgacaacgacgtaatcgttaccccgaataccctaatacgtaaaatcaccaaactaaaaaaaaaaaacgtaccgatacgcgaacgcctacgcatctccccgactacgccgctaatcctatcgtaccacgtaaccctaaaccaaacccgcgaaaaaacccgtaacgaaaccaaaatcgacaccaccgaccgtaacatcgaccctacctacgaaaacaaaattacgcgccgcgacctacgcgtaaacgacctattccaccgcgaacgtttcgc

SEQ ID NO: 1311 - DNA, 680 bp, Artificial Sequence
  chemically treated genomic DNA (Homo sapiens) CpG-island No: 1311
gtagtaagtttgttagttgcgtagcgagggttagcgtgtggtttaggttttgtttggttagtcgttgagtgttgttttcgaggcggattgtgatcggtaattgatttagtaagacgggcgttggtaggttttgtcgttggtttagtgagtttttgcgtcggtaataggtcggtaattaagtttgcgtgaatgaggattaatgtaatgggtaagaatgtcgtcgttttgggtatttagtggggtgatgagggtaaaggtaagatcgtcgatttgttgatcgaatatgttgtcgtcgtagtgcgttattagggtggttataacgcgggttatattttggtgattaacggtgaaaagatcgttttgtatttgatttcgttcggtattttgcgtgaaggcgtatagtgtttgatcggtaacggcgtggtcgttgtttcggatgttttgatgcgtgaaattattaagttggaagagaagggcgtatcggtgcgcgagcgtttgcgtattttttcggttgcgtcgttgattttgtcgtattacgtggttttggattaggttcgcgaaaaagttcgtggcgaagttaagatcggtattatcggtcgtggtatcggttttgtttacgaagataaggttgcgcgtcgcggtttgcgcgtaggcgatttgttttatcgcgagcgtttcgt

SEQ ID NO: 1312 - DNA, 680 bp, Artificial Sequence
  chemically treated genomic DNA (Homo sapiens) CpG-island No: 1312
acgaaacgctcgcgataaaacaaatcgcctacgcgcaaaccgcgacgcgcaaccttatcttcgtaaacaaaaccgataccacgaccgataataccgatcttaacttcgccacgaactttttcgcgaacctaatccaaaaccacgtaatacgacaaaatcaacgacgcaaccgaaaaaatacgcaaacgctcgcgcaccgatacgcccttctcttccaacttaataatttcacgcatcaaaacatccgaaacaacgaccacgccgttaccgatcaaacactatacgccttcacgcaaaataccgaacgaaatcaaatacaaaacgatcttttcaccgttaatcaccaaaatataacccgcgttataaccaccctaataacgcactacgacgacaacatattcgatcaacaaatcgacgatcttacctttaccctcatcaccccactaaatacccaaaacgacgacattcttacccattacattaatcctcattcacgcaaacttaattaccgacctattaccgacgcaaaaactcactaaaccaacgacaaaacctaccaacgcccgtcttactaaatcaattaccgatcacaatccgcctcgaaaacaacactcaacgactaaccaaacaaaacctaaaccacacgctaaccctcgctacgcaactaacaaacttactac

SEQ ID NO: 1313 - DNA, 1286 bp, Artificial Sequence
  chemically treated genomic DNA (Homo sapiens) CpG-island No: 1313
tggtaatacgattttcgttcgttttagtgtgattagggtttttaaattcgtggagaaatcggtggtcgggcgcgttcggttaaagtcggcgtcgatgtcgtcgtaacgttcgttttgggcgatcgattgattttcgttcggtacgaatacggcgaatattacgttcgtgtgatagtggtaatcgcgtaattcgtcgaggtcgaagtatagcggtaggttcgggtagcgcgacgttaggcggttagcgatcgttagtaggtcgtttagcgcggttagtacgttggtcggggtacggtttaggcgtacgcgggtttcggttagtattttacggttatcgtatagttcgattagagcgcgtagtatgttgtttaggtttttcggtaggtcggcggttagcgtttgtattttatcgatagttttgcgttgtatggcgtcgaatagttgttgttttatcgtatcggataggtcggcggtacgggttaggttacggtagatattaacgtggtttaggtttatgtgtatattcggtatatcggttagttgtagcgtggcgagtattaggttgatgatttcgatattattggtagggttggtatcgtcgtaaagttcggtatttagttggatcgggttgcgcgaggtcgatagtgtacgcggttgggcgtgtagtacgttatcggtatagtataggcggttcgggtttttacggcgtagggtgtgggcgttaatgcgcgttatttgcggagtgaagtcggcgcggaagtttattaggcggtcggattgtgggtttattattttgaaggtgcgttgatttaggttttggtcggcgtcggtgagtagcgattttaggtattcgatatgcggggtgacgattagttcgtagttttaattttggaataggtttaatatttggcggcgcgcgatttcgatgcgcgtagttttaggtggtagtattttttcgatgttatttggtagtagttagcggtttatcgttgttattacgttattttttttttggttcgggcggtttgttagtaggcgagtcgttagtaaagtcggtatcgcgtatagtagcgggtagtattgattttagcgtagttatcgtattcgatattttcgaattgttttgcgagttgattaaatcgttaattggcgcgttgttaattaattttgtagacgtaaaaaagtcgggaaatttttcggttgttttattatatatttttttttatttaggatgtatttcgtttggtgttttagttgttaggcggggcgtcgttgtatgaaaatta

SEQ ID NO: 1314 - DNA, 1286 bp, Artificial Sequence
  chemically treated genomic DNA (Homo sapiens) CpG-island No: 1314
taattttcatacaacgacgccccgcctaacaactaaaacaccaaacgaaatacatcctaaataaaaaaaaatatataataaaacaaccgaaaaatttcccgacttttttacgtctacaaaattaattaacaacgcgccaattaacgatttaatcaactcgcaaaacaattcgaaaatatcgaatacgataactacgctaaaatcaatactacccgctactatacgcgataccgactttactaacgactcgcctactaacaaaccgcccgaaccaaaaaaaaaataacgtaataacaacgataaaccgctaactactaccaaataacatcgaaaaaatactaccacctaaaactacgcgcatcgaaatcgcgcgccgccaaatattaaacctattccaaaattaaaactacgaactaatcgtcaccccgcatatcgaatacctaaaatcgctactcaccgacgccgaccaaaacctaaatcaacgcaccttcaaaataataaacccacaatccgaccgcctaataaacttccgcgccgacttcactccgcaaataacgcgcattaacgcccacaccctacgccgtaaaaacccgaaccgcctatactataccgataacgtactacacgcccaaccgcgtacactatcgacctcgcgcaacccgatccaactaaataccgaactttacgacgataccaaccctaccaataatatcgaaatcatcaacctaatactcgccacgctacaactaaccgatataccgaatatacacataaacctaaaccacgttaatatctaccgtaacctaacccgtaccgccgacctatccgatacgataaaacaacaactattcgacgccatacaacgcaaaactatcgataaaatacaaacgctaaccgccgacctaccgaaaaacctaaacaacatactacgcgctctaatcgaactatacgataaccgtaaaatactaaccgaaacccgcgtacgcctaaaccgtaccccgaccaacgtactaaccgcgctaaacgacctactaacgatcgctaaccgcctaacgtcgcgctacccgaacctaccgctatacttcgacctcgacgaattacgcgattaccactatcacacgaacgtaatattcgccgtattcgtaccgaacgaaaatcaatcgatcgcccaaaacgaacgttacgacgacatcgacgccgactttaaccgaacgcgcccgaccaccgatttctccacgaatttaaaaaccctaatcacactaaaacgaacgaaaatcgtattacca

SEQ ID NO: 1315 - DNA, 1286 bp, Artificial Sequence
  chemically treated genomic DNA (Homo sapiens) CpG-island No: 1315
tgatttttatgtagcggcgtttcgtttggtagttaaaatattaggcggggtgtattttgaatgaaaaggggtgtatgatgaggtagtcgggaaatttttcggtttttttgcgtttgtaaggttgattggtaacgcgttagttgacggtttggttagttcgtaaggtaattcgagggtatcgggtacggtggttgcgttgggattagtgttgttcgttgttgtgcgcgatatcggttttattgacggttcgtttgttggtaagtcgttcggattagaggggaaatggcgtaatggtaacggtagatcgttggttgttgttagatggtatcgaggaagtattgttatttgaagttgcgcgtatcgagatcgcgcgtcgttaggtgttggatttgttttagagttggggttacgaattggtcgttatttcgtatatcgagtatttggagtcgttgtttatcggcgtcggttaggatttggattagcgtatttttaaggtggtggatttatagttcggtcgtttgatgggttttcgcgtcgattttatttcgtaggtggcgcgtattgacgtttatattttgcgtcgtgaaggttcgagtcgtttgtgttatgtcggtagcgtgttgtacgtttagtcgcgtgtattgtcgatttcgcgtagttcgatttagttgggtgtcgagttttacggcgatgttagttttattagtgatgtcgaagttattagtttgatgttcgttacgttgtagttggtcgatgtgtcggatgtgtatatggatttgggttacgttggtatttatcgtggtttggttcgtgtcgtcggtttgttcggtgcggtggagtagtagttgttcgacgttatgtaacgtaaggttgtcgatgaagtgtaggcgttgatcgtcgatttgtcgaaagatttgggtaatatgttgcgcgttttggtcgagttgtgcggtggtcgtgaagtgttggtcgaagttcgcgtgcgtttgggtcgtgtttcggttagcgtgttggtcgcgttggacgatttgttggcgatcgttgatcgtttggcgtcgcgttattcggatttgtcgttgtatttcgatttcggcgaattgcgcggttattattattatacgggcgtggtgttcgtcgtgttcgtatcgggcgaaggttagtcgatcgtttagggcgggcgttacgacgatatcggcgtcgattttggtcgggcgcgttcggttatcggtttttttacggatttgaagattttggttatattggggcgagcggaggtcgtattgtta

SEQ ID NO: 1316 - DNA, 1286 bp, Artificial Sequence
  chemically treated genomic DNA (Homo sapiens) CpG-island No: 1316
taacaatacgacctccgctcgccccaatataaccaaaatcttcaaatccgtaaaaaaaccgataaccgaacgcgcccgaccaaaatcgacgccgatatcgtcgtaacgcccgccctaaacgatcgactaaccttcgcccgatacgaacacgacgaacaccacgcccgtataataataataaccgcgcaattcgccgaaatcgaaatacaacgacaaatccgaataacgcgacgccaaacgatcaacgatcgccaacaaatcgtccaacgcgaccaacacgctaaccgaaacacgacccaaacgcacgcgaacttcgaccaacacttcacgaccaccgcacaactcgaccaaaacgcgcaacatattacccaaatctttcgacaaatcgacgatcaacgcctacacttcatcgacaaccttacgttacataacgtcgaacaactactactccaccgcaccgaacaaaccgacgacacgaaccaaaccacgataaataccaacgtaacccaaatccatatacacatccgacacatcgaccaactacaacgtaacgaacatcaaactaataacttcgacatcactaataaaactaacatcgccgtaaaactcgacacccaactaaatcgaactacgcgaaatcgacaatacacgcgactaaacgtacaacacgctaccgacataacacaaacgactcgaaccttcacgacgcaaaatataaacgtcaatacgcgccacctacgaaataaaatcgacgcgaaaacccatcaaacgaccgaactataaatccaccaccttaaaaatacgctaatccaaatcctaaccgacgccgataaacaacgactccaaatactcgatatacgaaataacgaccaattcgtaaccccaactctaaaacaaatccaacacctaacgacgcgcgatctcgatacgcgcaacttcaaataacaatacttcctcgataccatctaacaacaaccaacgatctaccgttaccattacgccatttcccctctaatccgaacgacttaccaacaaacgaaccgtcaataaaaccgatatcgcgcacaacaacgaacaacactaatcccaacgcaaccaccgtacccgataccctcgaattaccttacgaactaaccaaaccgtcaactaacgcgttaccaatcaaccttacaaacgcaaaaaaaccgaaaaatttcccgactacctcatcatacaccccttttcattcaaaatacaccccgcctaatattttaactaccaaacgaaacgccgctacataaaaatca

SEQ ID NO: 1317 - DNA, 1057 bp, Artificial Sequence
  chemically treated genomic DNA (Homo sapiens) CpG-island No: 1317
ggtaacggaagaattcgtttttcgggtttaggattagtacgtcgtttttgttcgagaagttttcgcggtatgtttgtaggttacggtggaacgtatagaaattagcgttttggttgtaggttttggtatagatggcggtcgtttgagcgtcgtcgttattacgggttttttttgtttcgcggtaggtttcggttagtagtatacggcgttgacggtcggcgtcggtacgaatatttttagttagttcgttatttttggtacggtgttcgcgcgttttacgtttacgttttgtgtttatgcggtcgaatacgttgcggttgatttttttcggtaggtcgatggttttgacgcgtacgtcgattattttaatgtttagttttttgttggttatgcggtttaatgatgtagtgatgttagttattagtgcgttacgtttatcggaaattatttcgtgtagggtacgtttatcgaattggtcgcgtaggtcgttttttagacgacgcgatagacgttcgtcggcgatttgttttatgtcggacgtggcggtgtagaagcgtttcgtatttttgacgcgttatttggcgtaggcgtcgattattatcgtttttttttttagggttaggaatcgttgggtcggggcgtcgagggttatgaggcgggcgtcgaatttgcgtatttggtttacgtacgggatttttacgtgtaggttcggttgaatatttgtttggattattttatcgaagcgtagtagtatcgtacgttcggtttgggatacgatgtagaagttgttttaggttacgatggttagaattacggcggcgattagggcgattagcgatttattgtttattagcggttttttttagtacgtagcggttgttgttgttgttgtaggttttgcgtcgtacgggcggtcgtatcgttgatcgatggcgatacgttggtggttggcgcggacgggttgcggttgttttcgattattttgtttagtggtaggtagagtaggttgttttgttcgtttttggtcgttattatgattttgttcgaattgttgtag

SEQ ID NO: 1318 - DNA, 1057 bp, Artificial Sequence
  chemically treated genomic DNA (Homo sapiens) CpG-island No: 1318
ctacaacaattcgaacaaaatcataataacgaccaaaaacgaacaaaacaacctactctacctaccactaaacaaaataatcgaaaacaaccgcaacccgtccgcgccaaccaccaacgtatcgccatcgatcaacgatacgaccgcccgtacgacgcaaaacctacaacaacaacaacaaccgctacgtactaaaaaaaaccgctaataaacaataaatcgctaatcgccctaatcgccgccgtaattctaaccatcgtaacctaaaacaacttctacatcgtatcccaaaccgaacgtacgatactactacgcttcgataaaataatccaaacaaatattcaaccgaacctacacgtaaaaatcccgtacgtaaaccaaatacgcaaattcgacgcccgcctcataaccctcgacgccccgacccaacgattcctaaccctaaaaaaaaaaacgataataatcgacgcctacgccaaataacgcgtcaaaaatacgaaacgcttctacaccgccacgtccgacataaaacaaatcgccgacgaacgtctatcgcgtcgtctaaaaaacgacctacgcgaccaattcgataaacgtaccctacacgaaataatttccgataaacgtaacgcactaataactaacatcactacatcattaaaccgcataaccaacaaaaaactaaacattaaaataatcgacgtacgcgtcaaaaccatcgacctaccgaaaaaaatcaaccgcaacgtattcgaccgcataaacacaaaacgtaaacgtaaaacgcgcgaacaccgtaccaaaaataacgaactaactaaaaatattcgtaccgacgccgaccgtcaacgccgtatactactaaccgaaacctaccgcgaaacaaaaaaaacccgtaataacgacgacgctcaaacgaccgccatctataccaaaacctacaaccaaaacgctaatttctatacgttccaccgtaacctacaaacataccgcgaaaacttctcgaacaaaaacgacgtactaatcctaaacccgaaaaacgaattcttccgttacc

SEQ ID NO: 1319 - DNA, 1057 bp, Artificial Sequence
  chemically treated genomic DNA (Homo sapiens) CpG-island No: 1319
ttatagtaattcgagtaaggttatggtggcgattaaggacgggtagaataatttgttttatttgttattggataagatggtcgaaggtagtcgtaattcgttcgcgttaattattagcgtgtcgttatcggttaacgatgcggtcgttcgtgcggcgtaggatttgtaatagtaatagtagtcgttgcgtattagggagagtcgttgatgagtaatagatcgttgatcgttttgatcgtcgtcgtggttttggttatcgtggtttggaatagtttttatatcgtgttttagatcgagcgtgcggtattgttgcgtttcggtaaggtggtttaggtagatgtttagtcgggtttgtacgtgaagatttcgtacgtgaattaggtgcgtaagttcgacgttcgttttatgattttcgacgtttcgatttagcggtttttgattttggagaagaaagcggtgatggtcgacgtttacgttaagtggcgcgttaaggatgcggagcgtttttatatcgttacgttcggtatgaagtagatcgtcgacgagcgtttgtcgcgtcgtttggaaagcggtttgcgcgattagttcggtaaacgtattttgtacgaggtggttttcggtgagcgtgacgtattgatggttgatattattgtattattgaatcgtatggttaataaggagttgggtattgaagtggtcgacgtgcgcgttaaggttatcgatttgtcgaaggaagttaatcgtagcgtgttcgatcgtatgagtatagagcgtgagcgtgaagcgcgcgagtatcgtgttaagggtaacgagttggttgaaggtattcgtgtcgacgtcgatcgttagcgtcgtgtgttgttggtcgaggtttatcgcgaagtagaagaaattcgtggtgacggcgacgtttaggcggtcgttatttatgttaaggtttatagttaggacgttgatttttatgcgttttatcgtagtttgtaggtatatcgcgagagtttttcgagtaagagcgacgtgttggttttggattcgaagaacgaattttttcgttatt

SEQ ID NO: 1320 - DNA, 1057 bp, Artificial Sequence
  chemically treated genomic DNA (Homo sapiens) CpG-island No: 1320
aataacgaaaaaattcgttcttcgaatccaaaaccaacacgtcgctcttactcgaaaaactctcgcgatatacctacaaactacgataaaacgcataaaaatcaacgtcctaactataaaccttaacataaataacgaccgcctaaacgtcgccgtcaccacgaatttcttctacttcgcgataaacctcgaccaacaacacacgacgctaacgatcgacgtcgacacgaataccttcaaccaactcgttacccttaacacgatactcgcgcgcttcacgctcacgctctatactcatacgatcgaacacgctacgattaacttccttcgacaaatcgataaccttaacgcgcacgtcgaccacttcaatacccaactccttattaaccatacgattcaataatacaataatatcaaccatcaatacgtcacgctcaccgaaaaccacctcgtacaaaatacgtttaccgaactaatcgcgcaaaccgctttccaaacgacgcgacaaacgctcgtcgacgatctacttcataccgaacgtaacgatataaaaacgctccgcatccttaacgcgccacttaacgtaaacgtcgaccatcaccgctttcttctccaaaatcaaaaaccgctaaatcgaaacgtcgaaaatcataaaacgaacgtcgaacttacgcacctaattcacgtacgaaatcttcacgtacaaacccgactaaacatctacctaaaccaccttaccgaaacgcaacaataccgcacgctcgatctaaaacacgatataaaaactattccaaaccacgataaccaaaaccacgacgacgatcaaaacgatcaacgatctattactcatcaacgactctccctaatacgcaacgactactattactattacaaatcctacgccgcacgaacgaccgcatcgttaaccgataacgacacgctaataattaacgcgaacgaattacgactaccttcgaccatcttatccaataacaaataaaacaaattattctacccgtccttaatcgccaccataaccttactcgaattactataa

SEQ ID NO: 1321 - DNA, 4704 bp, Artificial Sequence
  chemically treated genomic DNA (Homo sapiens) CpG-island No: 1321
acgggttacgttaggtgttttgtggtattcggcgattagtttggtgaagcggtcggttttatttttggttcgggtaatgatttcgtcgcggtaatcgttggcgttttcgatgatgcgttgggtttgattacgggttttcggtattacgttattggcgtaggattcggtttggttgcgggtacgttgttcgttttcgcgggtacggattacgtcgtcgaaggttttttgtattttacgcggggtcgtcgcgttttgtacgttgatttgggtgacggtgatatcggtacggtagttgtcgaggaagcgttgtaggcgttcgcggatatttacggttatttgtttacggttttcggtgagtatttgatttatcgaggtggaatttattacgtggcgtagggtattgtcggtcgcgtgttgtaggtttattttaggttggtcgatattgagtacgaagttttgtaggttgttgattttgtattggacggttagcggtatttcgacgatgttttcgttttcggttagtatttggttttgtttggtgtaggtacgtttacgcgtgacgttttttatgtatttgcgatcgatcggcgggaagtagatgtttaggtcgggatcgatcgttttatagtatttgtcgaagcgtagtattacggtttgtttttgttcgtcgattacgtatacggcgttgtatagttagatggtagttagtatcgttaggttaatgtttagtaggttaaggttatcgtttttgtcgatattgcggttatcgtcgttacgttttttgttattgtcgaatatgttatttaggttgttttgtaatttgcggaaggtttcgtttagattcggcggattttttttgttattattatcgttatcgttattacggcggtcgttttagggattttcggtgacgatttttttagcggcgatgaattcgttggtgataatgttttcggcgattttacgtagggtaataacggttggtttgtcgtttttttacgtaacgcgtggttttttgtcgtcggtcgttagttggcgagcgcgtttggtcgagagtatgattagtttaaagcggttatttacgtgttttaggtagtttttaatagttacgcgggttatggttttttttagtagtaaatgcggtgggcgtgtagtttagtaatgggtaggcggattcgatagtataaaaatttattagttaatagggaagcgttgttttgtcgggtggatcggtgtggaattttttacgggtatgttcgtttttataagttttgtttattttttatcgtcgtcgttttatttgtgggagcgggtaagttcgcgaaagggtcggaatagatagttttaaatttgaattcgacgataattttagagtatcgcgttacgtaatcgcggcgtaagttttttaaataaggtttgtatcgagcgtagcgttcggtagttcggtcgggttagtagttataattgggtgtcgtaattcggtagcggtttatttagcgtatttacgttcggtagggtatgtattatataattcggtagcgtcgttacgtttaggttagcggttattagttgggcgatggtcgatatgttgttgtattgatagcgcggatttagtttcgggtgttgttggttgcgttagattatcgtagggtggtttattatcgagttatcgggggcgatttacggtacgttggcgggcgattcggttagacgttcgcgttattgtggttggtcgtagacgatataggaggtagaatttaggttgcggtttattaggtgtttcggtggcgtgttggttaggcgtagggcgatgtcggtatcgcgtcgattgaggttggtaaacgtgttggaggtgtttatttttagcgataacgtcgggtagttgggtatgaattcggttagcgtcggtagtaagagattgtgtattatcgtttcggtataggttagtcgtatcgtgtcgtttattatttgttcgttattggttatggtaatgcgcgtcgtttttagtgtttgtttcgcgcgttcggtttgttcggttagcgtttgagcggtgtcggtcggtaggtagtttttgcggtttttgacgaataaggcggtgtttagcgtcgattttagtcggcggatcgagcggaatattgtcgaaatatcgatttttagtagttcggcggttttggttagcgagcggtttcgttttagtgttaggattagggaaaggttcgcgtgggtgatttgatattgtattggtgtacgttttgtttgtcgaattgttaatgtttgttgcgttagggttattttatagtgaaacggtttttcggaattaatgcgttcggtcgggtaattagtttttacgatgggaaagtgaaaagaataatagttgtaattatcgtcgttcgtgaggcgttagtcgtattttatatcgtcgtagtatattaaaggatgtatattatgacgtcggtaatttcgtgcgttagtttttttagcgagatgaatgattttttttaggtttattcggatacgtagtacgtcgatttgttgattttcgatatgaatggcgtggtacgtggtaagcgtattgagcgggttagtttgtataaggtgtacgagaagggtattaatttgttcgtatcgttgttcgttttggatattaatggttttatcgtcgagagtatcggttttggtttggatatcggcgatgtcgatcgtatttgtttttcgatttcgggtacgttgtcggatgagtcgtggtagaagcgttttacggtttagttgttgatgattatgtacgagttggatggttagtcgtttttcgtcgattcgcgcgaagtgttgcgttaggtggtgagtaagttcgacgatttgggtttggatatttgcgcggcgttcgagttggagttttatttgatcgattaggataattttaacggtcgttcgtagtcgtcgcgttcgtttattttcggtaaacgttcgtagtcgatttaggtgtatttgatcgacgatttcgatgaatacgtcgattgtttgtaggatatgtttgaagtcgttaaggaataaggtttgttcgtcgacgttatcgttaaggaaagcgtttcggcgtagttcgaagttaatttgtattacgtggtcgattcgttgaaggtttgtgattacgcgattttgtttaagcgtttgattaagaacgtggtttacgattatgaaatggatattacgtttatggttaagttttattcgggttaggtaggtaatggtttgtacgtatatatttcgttgttggataagaaaatcggtaagaatatttttgttagtgatgattcgttgtaaagcgatacgttgcgttacgttatcggtggtgtgttggaaattatgtcggcgtcgatggcgtttttgtgttcgaatattaatttttatcgtcgttttggcgcgtagttttacgtgtttaatgcgttaagttggggtttggataatcgtatcgtggtcgtacgcgtgtttatcgatagtagcgataacgtgcgtttggagtatcgtgtggttggcgtcgacgttaattcgtatttgatgttggtagttattttggtcggcgtgtattacgggttgattaataaggtcgagtcggaggcgtcgatcgaaggtaatttttacgaatagttggagtaaagtttgtcgaataatttgcgcgatgttttgcgcgcgttggacgatagcgaagtttttaattaatatattagttcggattatatcgatattttcgtggtttgtaaggaaagcgaattggtcgagttcgaagtgtcgattttcgattttgagtataattggtatttgtatacggtgtaagtttatgagcgtaattgcggtttttttgatcggtgttagcgtttgtcgttagtaggtggggaagaattcgtcgtatacggtaggcgataagtatgtcgaggcggtcggttttgtcggtttgtcgttgattttgtcggttcgcgacggaggtagcgatttataggcgttgttggtttgtttgtacggtattgtttttataggttcgtttttaaatatcgaatcgtattattataatggcgtttttagcgtggcgggtattcggtacgatttggcgcgtgatcggttgattttgttattgttgtaggcggcgattgtcgtcggtgtgtcggtgttttgtatttgtcgtggttattaggaattgaacgtggtttttggcggtagtttgtattaacgcgtgtaggagttgtttggttattttgattatcgcgaatttgaggacgtatttttggaggtgtaatacggttttcgttattcggtcggtatcgagtttggcgggttgttcgagcgtttgggtttggcggcgtagttcgaggttaattcgttgtatagttagggtatcgatcgtttggttttcggtttgcgcgtcgaggtacgggtttcggatggtttgatcgaagtagtgtttatgttcgatgcgtcgggttttgtgttcggtgtgtagtggtattcggagtggcgttttaacgaaaattcggtttcgttgcgtttgttttaggcgtttcgcgaggtttgtattgtttacgtagtacgggagggcgtacggtaggaatgattttgacgttagtcgaaggtttcggatgatttgttttcgatagtaagtttttaatgagtgaaagcgggttttgtacgtaaggtttgtgaaaataattttaaaat

SEQ ID NO: 1322 - DNA, 4704 bp, Artificial Sequence
  chemically treated genomic DNA (Homo sapiens) CpG-island No: 1322
attttaaaattattttcacaaaccttacgtacaaaacccgctttcactcattaaaaacttactatcgaaaacaaatcatccgaaaccttcgactaacgtcaaaatcattcctaccgtacgccctcccgtactacgtaaacaatacaaacctcgcgaaacgcctaaaacaaacgcaacgaaaccgaattttcgttaaaacgccactccgaataccactacacaccgaacacaaaacccgacgcatcgaacataaacactacttcgatcaaaccatccgaaacccgtacctcgacgcgcaaaccgaaaaccaaacgatcgataccctaactatacaacgaattaacctcgaactacgccgccaaacccaaacgctcgaacaacccgccaaactcgataccgaccgaataacgaaaaccgtattacacctccaaaaatacgtcctcaaattcgcgataatcaaaataaccaaacaactcctacacgcgttaatacaaactaccgccaaaaaccacgttcaattcctaataaccacgacaaatacaaaacaccgacacaccgacgacaatcgccgcctacaacaataacaaaatcaaccgatcacgcgccaaatcgtaccgaatacccgccacgctaaaaacgccattataataatacgattcgatatttaaaaacgaacctataaaaacaataccgtacaaacaaaccaacaacgcctataaatcgctacctccgtcgcgaaccgacaaaatcaacgacaaaccgacaaaaccgaccgcctcgacatacttatcgcctaccgtatacgacgaattcttccccacctactaacgacaaacgctaacaccgatcaaaaaaaccgcaattacgctcataaacttacaccgtatacaaataccaattatactcaaaatcgaaaatcgacacttcgaactcgaccaattcgctttccttacaaaccacgaaaatatcgatataatccgaactaatatattaattaaaaacttcgctatcgtccaacgcgcgcaaaacatcgcgcaaattattcgacaaactttactccaactattcgtaaaaattaccttcgatcgacgcctccgactcgaccttattaatcaacccgtaatacacgccgaccaaaataactaccaacatcaaatacgaattaacgtcgacgccaaccacacgatactccaaacgcacgttatcgctactatcgataaacacgcgtacgaccacgatacgattatccaaaccccaacttaacgcattaaacacgtaaaactacgcgccaaaacgacgataaaaattaatattcgaacacaaaaacgccatcgacgccgacataatttccaacacaccaccgataacgtaacgcaacgtatcgctttacaacgaatcatcactaacaaaaatattcttaccgattttcttatccaacaacgaaatatatacgtacaaaccattacctacctaacccgaataaaacttaaccataaacgtaatatccatttcataatcgtaaaccacgttcttaatcaaacgcttaaacaaaatcgcgtaatcacaaaccttcaacgaatcgaccacgtaatacaaattaacttcgaactacgccgaaacgctttccttaacgataacgtcgacgaacaaaccttattccttaacgacttcaaacatatcctacaaacaatcgacgtattcatcgaaatcgtcgatcaaatacacctaaatcgactacgaacgtttaccgaaaataaacgaacgcgacgactacgaacgaccgttaaaattatcctaatcgatcaaataaaactccaactcgaacgccgcgcaaatatccaaacccaaatcgtcgaacttactcaccacctaacgcaacacttcgcgcgaatcgacgaaaaacgactaaccatccaactcgtacataatcatcaacaactaaaccgtaaaacgcttctaccacgactcatccgacaacgtacccgaaatcgaaaaacaaatacgatcgacatcgccgatatccaaaccaaaaccgatactctcgacgataaaaccattaatatccaaaacgaacaacgatacgaacaaattaatacccttctcgtacaccttatacaaactaacccgctcaatacgcttaccacgtaccacgccattcatatcgaaaatcaacaaatcgacgtactacgtatccgaataaacctaaaaaaaatcattcatctcgctaaaaaaactaacgcacgaaattaccgacgtcataatatacatcctttaatatactacgacgatataaaatacgactaacgcctcacgaacgacgataattacaactattattcttttcactttcccatcgtaaaaactaattacccgaccgaacgcattaattccgaaaaaccgtttcactataaaataaccctaacgcaacaaacattaacaattcgacaaacaaaacgtacaccaatacaatatcaaatcacccacgcgaacctttccctaatcctaacactaaaacgaaaccgctcgctaaccaaaaccgccgaactactaaaaatcgatatttcgacaatattccgctcgatccgccgactaaaatcgacgctaaacaccgccttattcgtcaaaaaccgcaaaaactacctaccgaccgacaccgctcaaacgctaaccgaacaaaccgaacgcgcgaaacaaacactaaaaacgacgcgcattaccataaccaataacgaacaaataataaacgacacgatacgactaacctataccgaaacgataatacacaatctcttactaccgacgctaaccgaattcatacccaactacccgacgttatcgctaaaaataaacacctccaacacgtttaccaacctcaatcgacgcgataccgacatcgccctacgcctaaccaacacgccaccgaaacacctaataaaccgcaacctaaattctacctcctatatcgtctacgaccaaccacaataacgcgaacgtctaaccgaatcgcccgccaacgtaccgtaaatcgcccccgataactcgataataaaccaccctacgataatctaacgcaaccaacaacacccgaaactaaatccgcgctatcaatacaacaacatatcgaccatcgcccaactaataaccgctaacctaaacgtaacgacgctaccgaattatataatacataccctaccgaacgtaaatacgctaaataaaccgctaccgaattacgacacccaattataactactaacccgaccgaactaccgaacgctacgctcgatacaaaccttatttaaaaaacttacgccgcgattacgtaacgcgatactctaaaattatcgtcgaattcaaatttaaaactatctattccgaccctttcgcgaacttacccgctcccacaaataaaacgacgacgataaaaaataaacaaaacttataaaaacgaacatacccgtaaaaaattccacaccgatccacccgacaaaacaacgcttccctattaactaataaatttttatactatcgaatccgcctacccattactaaactacacgcccaccgcatttactactaaaaaaaaccataacccgcgtaactattaaaaactacctaaaacacgtaaataaccgctttaaactaatcatactctcgaccaaacgcgctcgccaactaacgaccgacgacaaaaaaccacgcgttacgtaaaaaaacgacaaaccaaccgttattaccctacgtaaaatcgccgaaaacattatcaccaacgaattcatcgccgctaaaaaaatcgtcaccgaaaatccctaaaacgaccgccgtaataacgataacgataataataacaaaaaaaatccgccgaatctaaacgaaaccttccgcaaattacaaaacaacctaaataacatattcgacaataacaaaaaacgtaacgacgataaccgcaatatcgacaaaaacgataaccttaacctactaaacattaacctaacgatactaactaccatctaactatacaacgccgtatacgtaatcgacgaacaaaaacaaaccgtaatactacgcttcgacaaatactataaaacgatcgatcccgacctaaacatctacttcccgccgatcgatcgcaaatacataaaaaacgtcacgcgtaaacgtacctacaccaaacaaaaccaaatactaaccgaaaacgaaaacatcgtcgaaataccgctaaccgtccaatacaaaatcaacaacctacaaaacttcgtactcaatatcgaccaacctaaaataaacctacaacacgcgaccgacaataccctacgccacgtaataaattccacctcgataaatcaaatactcaccgaaaaccgtaaacaaataaccgtaaatatccgcgaacgcctacaacgcttcctcgacaactaccgtaccgatatcaccgtcacccaaatcaacgtacaaaacgcgacgaccccgcgtaaaatacaaaaaaccttcgacgacgtaatccgtacccgcgaaaacgaacaacgtacccgcaaccaaaccgaatcctacgccaataacgtaataccgaaaacccgtaatcaaacccaacgcatcatcgaaaacgccaacgattaccgcgacgaaatcattacccgaaccaaaaataaaaccgaccgcttcaccaaactaatcgccgaataccacaaaacacctaacgtaacccgt

SEQ ID NO: 1323 - DNA, 4704 bp, Artificial Sequence
  chemically treated genomic DNA (Homo sapiens) CpG-island No: 1323
attttggaattgtttttataggttttgcgtataaggttcgtttttatttattgaaagtttgttgtcggggataagttattcgagattttcggttgacgttagaattatttttgtcgtgcgttttttcgtgttgcgtaggtaatgtaggtttcgcgaaacgtttgaaataggcgtagcgagatcgggttttcgttgaagcgttatttcgggtgttattgtatatcgagtataaagttcggcgtatcgggtatggatattgtttcgattaggttattcggggttcgtgtttcgacgcgtaagtcgggggttaggcggtcgatgttttggttgtgtaacgagttgatttcgaattgcgtcgttagatttaggcgttcgaataattcgttaggttcgatgtcgatcgggtgacgagggtcgtattgtatttttaggggtgcgtttttaggttcgcgatgattaaggtagttaggtagtttttgtacgcgttggtgtaggttgtcgttaagggttacgtttagtttttgatagttacggtaaatgtagaatatcggtatatcggcggtaatcgtcgtttgtagtagtggtaaggttagtcgattacgcgttaggtcgtgtcgggtattcgttacgttgggggcgttattgtaatgatgcggttcgatatttgaaggcgagtttgtaaaaataatgtcgtgtagataggttagtagcgtttgtgggtcgttgttttcgtcgcgggtcggtaagattagcggtaagtcgataaagtcggtcgtttcgatatatttgtcgtttatcgtgtgcgacgagtttttttttatttgttggcggtaggcgttgatatcgattaaggggatcgtagttgcgtttatgggtttatatcgtgtgtaggtattagttgtatttaaggtcggaaatcgatatttcgaattcggttagttcgttttttttgtaggttacgaagatatcgatgtagttcgggttgatgtattggttgaggatttcgttgtcgtttagcgcgcgtagggtatcgcgtaggttgttcggtaggttttgttttagttgttcgtaggagttgttttcgatcggcgttttcggttcgattttgttggttagttcgtgatgtacgtcggttaggatggttgttagtattaggtacgggttggcgtcggcgttagttatacggtgttttaggcgtacgttgtcgttgttgtcggtgggtacgcgtacggttacggtgcggttatttaggttttagtttggcgtattgggtacgtagaattgcgcgttaaagcggcgataagagttgatgttcgggtataggaacgttatcgacgtcggtatggtttttagtatattatcgatggcgtggcgtagcgtgtcgttttgtaacggattattattggtaaagatgtttttgtcggtttttttgtttagtaacgaaatgtgtacgtgtaggttattatttgtttggttcgggtagggtttggttatgaacgtggtgtttattttatggtcgtaggttacgtttttgattaggcgtttgagtaggatcgcgtaattataggtttttagcgggtcggttacgtggtgtaggttgatttcgaattgcgtcggggcgttttttttgacgatggcgtcggcgggtaggttttgttttttggcggttttaagtatgttttgtaggtagtcggcgtatttatcgagatcgtcgattaggtatatttgggtcgattgcgggcgtttgtcggaaatgggcgaacgcggcggttgcgggcgatcgttgaggttgttttggtcgattaggtagaattttagttcgaacgtcgcgtagatatttaggtttaagtcgtcgaatttgtttattatttggcgtaatatttcgcgcgggtcggcgaagaacggttggttatttagttcgtgtatggttattagtaattgggtcgtggggcgtttttgttacggtttattcgataacgtgttcgggatcgggaagtagatgcggtcggtatcgtcgatgtttaggttaaggtcggtgttttcgacggtggagttattgatgtttagggcgaatagcgatgcgggtaggttgatgtttttttcgtatattttgtgtaggttggttcgtttaatgcgtttgttacgtattacgttatttatgtcggagattagtaggtcgacgtattgcgtgttcggatgggtttggaggaagttatttatttcgttggaagaattggcgtacggggttatcgacgttatggtgtatattttttgatgtgttgcggcgatgtgggatacggttggcgttttacgggcgacgatggttgtagttgttgttttttttatttttttatcgtggggattggttattcgatcgggcgtattgatttcggggggtcgttttattataaaatggttttgacgtaatagatattggtaattcggtaagtagagcgtgtattaatgtaatattagattatttacgcggatttttttttggttttggtattggagcggggtcgttcgttggttaaggtcgtcgagttgttgaaagtcgatgtttcgatagtatttcgttcgattcgtcggttggagtcggcgttgggtatcgttttgttcgttaagagtcgtaagggttatttgtcgatcgatatcgtttaggcgttggtcgagtaggtcgaacgcgcggaataggtattggaggcggcgcgtattgttatgattagtggcgagtaggtggtaagcggtacggtgcggttgatttgtatcgaggcggtgatgtatagttttttgttgtcggcgttggtcgagtttatgtttaattattcggcgttatcgttggagatgggtatttttaatacgtttgttaattttagtcggcgcgatgtcgatatcgttttgcgtttgattaatacgttatcggagtatttggtgggtcgtaatttgggttttattttttatgtcgtttgcggttagttatagtggcgcgagcgtttggtcgagtcgttcgttaacgtgtcgtggatcgttttcgatgattcgatggtggattattttacggtggtttggcgtaattagtagtattcggggttgagttcgcgttattagtgtagtagtatgtcgattatcgtttaattggtgatcgttggtttaggcgtggcggcgttgtcggattatatggtgtatgttttgtcgggcgtggatgcgttgagtgggtcgttatcgggttgcgatatttaattgtggttgttgattcggtcggattgtcgggcgttgcgttcggtgtagattttgtttgaagagtttacgtcgcggttgcgtggcgcgatgttttgaggttatcgtcgagtttaggtttgaggttgtttgtttcggttttttcgcgggtttgttcgtttttataggtaaagcggcggcggtgagaaatgggtagaatttgtgggagcgggtatgttcgtgaagaattttatatcgatttattcgataaaatagcgtttttttattggttggtgaatttttatattatcgagttcgtttgtttattattgggttgtacgtttatcgtatttgttattgaggaagattatggttcgcgtaattgttgaagattgtttggaatacgtggataatcgttttgagttggttatgttttcgattaagcgcgttcgttagttggcgatcggcggtaaagagttacgcgttgcgtgggagaacgataagttaatcgttgttgttttgcgtgaaatcgtcgaaggtattgttattaacgagtttatcgtcgttgaagagatcgttatcgaggatttttggggcggtcgtcgtggtggcggtggcggtggtggtgataagaaaggttcgtcggatttggacgaggtttttcgtaaattgtaggatagtttgaatggtatgttcggtagtggtaagaaacgtggcggcggtgatcgtaatgtcggtaagggcggtggttttggtttgttgggtattggtttggcggtgttggttgttatttggttgtatagcgtcgtgtacgtggtcgacgagtaggagtaggtcgtggtgttgcgtttcggtaagtattatgagacggtcggtttcggtttgaatatttatttttcgtcgatcgatcgtaagtatatggaaaacgttacgcgtgagcgtgtttatattaagtagggttagatgttgatcgaagacgagaatatcgtcgaggtgtcgttgatcgtttagtataagattagtaatttgtaggatttcgtgtttaatgtcgattagtttgaggtaagtttgtagtacgcgatcgatagtgttttgcgttacgtggtgggttttatttcgatggattaggtgtttatcgaaggtcgtgagtagatggtcgtggatattcgcgagcgtttgtagcgttttttcgataattatcgtatcggtattatcgttatttaggttaacgtatagagcgcggcggtttcgcgtgaagtgtaggaagttttcgacgacgtgattcgtgttcgcgaagacgagtagcgtgttcgtaattaggtcgagttttacgttaatggcgtggtgtcggaagttcgtggttaggtttagcgtattatcgaggacgttaacggttatcgcgacgaagttattgttcgggttaagggtgaggtcgatcgttttattaagttggtcgtcgagtattataaggtatttgacgtgattcgt

SEQ ID NO: 1324 - DNA, 4704 bp, Artificial Sequence
  chemically treated genomic DNA (Homo sapiens) CpG-island No: 1324
acgaatcacgtcaaataccttataatactcgacgaccaacttaataaaacgatcgacctcacccttaacccgaacaataacttcgtcgcgataaccgttaacgtcctcgataatacgctaaacctaaccacgaacttccgacaccacgccattaacgtaaaactcgacctaattacgaacacgctactcgtcttcgcgaacacgaatcacgtcgtcgaaaacttcctacacttcacgcgaaaccgccgcgctctatacgttaacctaaataacgataataccgatacgataattatcgaaaaaacgctacaaacgctcgcgaatatccacgaccatctactcacgaccttcgataaacacctaatccatcgaaataaaacccaccacgtaacgcaaaacactatcgatcgcgtactacaaacttacctcaaactaatcgacattaaacacgaaatcctacaaattactaatcttatactaaacgatcaacgacacctcgacgatattctcgtcttcgatcaacatctaaccctacttaatataaacacgctcacgcgtaacgttttccatatacttacgatcgatcgacgaaaaataaatattcaaaccgaaaccgaccgtctcataatacttaccgaaacgcaacaccacgacctactcctactcgtcgaccacgtacacgacgctatacaaccaaataacaaccaacaccgccaaaccaatacccaacaaaccaaaaccaccgcccttaccgacattacgatcaccgccgccacgtttcttaccactaccgaacataccattcaaactatcctacaatttacgaaaaacctcgtccaaatccgacgaacctttcttatcaccaccaccgccaccgccaccacgacgaccgccccaaaaatcctcgataacgatctcttcaacgacgataaactcgttaataacaataccttcgacgatttcacgcaaaacaacaacgattaacttatcgttctcccacgcaacgcgtaactctttaccgccgatcgccaactaacgaacgcgcttaatcgaaaacataaccaactcaaaacgattatccacgtattccaaacaatcttcaacaattacgcgaaccataatcttcctcaataacaaatacgataaacgtacaacccaataataaacaaacgaactcgataatataaaaattcaccaaccaataaaaaaacgctattttatcgaataaatcgatataaaattcttcacgaacatacccgctcccacaaattctacccatttctcaccgccgccgctttacctataaaaacgaacaaacccgcgaaaaaaccgaaacaaacaacctcaaacctaaactcgacgataacctcaaaacatcgcgccacgcaaccgcgacgtaaactcttcaaacaaaatctacaccgaacgcaacgcccgacaatccgaccgaatcaacaaccacaattaaatatcgcaacccgataacgacccactcaacgcatccacgcccgacaaaacatacaccatataatccgacaacgccgccacgcctaaaccaacgatcaccaattaaacgataatcgacatactactacactaataacgcgaactcaaccccgaatactactaattacgccaaaccaccgtaaaataatccaccatcgaatcatcgaaaacgatccacgacacgttaacgaacgactcgaccaaacgctcgcgccactataactaaccgcaaacgacataaaaaataaaacccaaattacgacccaccaaatactccgataacgtattaatcaaacgcaaaacgatatcgacatcgcgccgactaaaattaacaaacgtattaaaaatacccatctccaacgataacgccgaataattaaacataaactcgaccaacgccgacaacaaaaaactatacatcaccgcctcgatacaaatcaaccgcaccgtaccgcttaccacctactcgccactaatcataacaatacgcgccgcctccaatacctattccgcgcgttcgacctactcgaccaacgcctaaacgatatcgatcgacaaataacccttacgactcttaacgaacaaaacgatacccaacgccgactccaaccgacgaatcgaacgaaatactatcgaaacatcgactttcaacaactcgacgaccttaaccaacgaacgaccccgctccaataccaaaaccaaaaaaaaatccgcgtaaataatctaatattacattaatacacgctctacttaccgaattaccaatatctattacgtcaaaaccattttataataaaacgaccccccgaaatcaatacgcccgatcgaataaccaatccccacgataaaaaaataaaaaaaacaacaactacaaccatcgtcgcccgtaaaacgccaaccgtatcccacatcgccgcaacacatcaaaaaatatacaccataacgtcgataaccccgtacgccaattcttccaacgaaataaataacttcctccaaacccatccgaacacgcaatacgtcgacctactaatctccgacataaataacgtaatacgtaacaaacgcattaaacgaaccaacctacacaaaatatacgaaaaaaacatcaacctacccgcatcgctattcgccctaaacatcaataactccaccgtcgaaaacaccgaccttaacctaaacatcgacgataccgaccgcatctacttcccgatcccgaacacgttatcgaataaaccgtaacaaaaacgccccacgacccaattactaataaccatacacgaactaaataaccaaccgttcttcgccgacccgcgcgaaatattacgccaaataataaacaaattcgacgacttaaacctaaatatctacgcgacgttcgaactaaaattctacctaatcgaccaaaacaacctcaacgatcgcccgcaaccgccgcgttcgcccatttccgacaaacgcccgcaatcgacccaaatatacctaatcgacgatctcgataaatacgccgactacctacaaaacatacttaaaaccgccaaaaaacaaaacctacccgccgacgccatcgtcaaaaaaaacgccccgacgcaattcgaaatcaacctacaccacgtaaccgacccgctaaaaacctataattacgcgatcctactcaaacgcctaatcaaaaacgtaacctacgaccataaaataaacaccacgttcataaccaaaccctacccgaaccaaacaaataataacctacacgtacacatttcgttactaaacaaaaaaaccgacaaaaacatctttaccaataataatccgttacaaaacgacacgctacgccacgccatcgataatatactaaaaaccataccgacgtcgataacgttcctatacccgaacatcaactcttatcgccgctttaacgcgcaattctacgtacccaatacgccaaactaaaacctaaataaccgcaccgtaaccgtacgcgtacccaccgacaacaacgacaacgtacgcctaaaacaccgtataactaacgccgacgccaacccgtacctaatactaacaaccatcctaaccgacgtacatcacgaactaaccaacaaaatcgaaccgaaaacgccgatcgaaaacaactcctacgaacaactaaaacaaaacctaccgaacaacctacgcgataccctacgcgcgctaaacgacaacgaaatcctcaaccaatacatcaacccgaactacatcgatatcttcgtaacctacaaaaaaaacgaactaaccgaattcgaaatatcgatttccgaccttaaatacaactaatacctacacacgatataaacccataaacgcaactacgatccccttaatcgatatcaacgcctaccgccaacaaataaaaaaaaactcgtcgcacacgataaacgacaaatatatcgaaacgaccgactttatcgacttaccgctaatcttaccgacccgcgacgaaaacaacgacccacaaacgctactaacctatctacacgacattatttttacaaactcgccttcaaatatcgaaccgcatcattacaataacgcccccaacgtaacgaatacccgacacgacctaacgcgtaatcgactaaccttaccactactacaaacgacgattaccgccgatataccgatattctacatttaccgtaactatcaaaaactaaacgtaacccttaacgacaacctacaccaacgcgtacaaaaactacctaactaccttaatcatcgcgaacctaaaaacgcacccctaaaaatacaatacgaccctcgtcacccgatcgacatcgaacctaacgaattattcgaacgcctaaatctaacgacgcaattcgaaatcaactcgttacacaaccaaaacatcgaccgcctaacccccgacttacgcgtcgaaacacgaaccccgaataacctaatcgaaacaatatccatacccgatacgccgaactttatactcgatatacaataacacccgaaataacgcttcaacgaaaacccgatctcgctacgcctatttcaaacgtttcgcgaaacctacattacctacgcaacacgaaaaaacgcacgacaaaaataattctaacgtcaaccgaaaatctcgaataacttatccccgacaacaaactttcaataaataaaaacgaaccttatacgcaaaacctataaaaacaattccaaaat

SEQ ID NO: 1325 - DNA, 1215 bp, Artificial Sequence
  chemically treated genomic DNA (Homo sapiens) CpG-island No: 1325
ggcgttggtcgataatttgttgattaatatcgttatttgttgcgtgtttatcgttttggcggtgtggatttgttgtcgcggtatcgttattattatgatcgtgtagtatggtttggtggttttgtagttggtggtgttgatcggttttgtcgtcgtcgttttcggcggtattatcgcgtcgttatcgttggcgtttgatttcgtttggtttaattcgttcggtgtcgagtcgttttcggtttttgtcgtcgggttgtcgttttcgatttttattttttggggttgggatatatgtttgatcgttagcgaggagtcggtgggtagcgaagaggtgtcgggtaaggtcgttatttggatcgtgatgttgattttcggtttgtatttgtttatcgttatcgttattttgtagtttgtcggtattagcgaaacgggttttggtttgaataattcgcgtatttaggagaacgtttttgtttatttggtcggttcggttatggggtcgttggcgattttgatgtttattgtcgtgttggttagtacggcggcgtcgttgtagtcgattttcgtggcgtcggcgcggatttttttggcgatggggtattacggtgcggtgtcgtcgaagttcgttagcgtttgtttacgttcgtaaatttttcgttacgttattatttgcgtaggtttggtagtaggtttgttttacgtgattatgcgtagtttgagcgagaacgtgttggtagatattattatcgcgttgggtatgatgatttgtttttattattcgttgatcgtatttgtttgcgtttggtattttcgtggtagtttgttcgatagtttgcgttattttattatgcgcggtttgtgttcgttggtgggtggggtgattttatcggtgattttcgtacggattgttatcgatagcgtttcgtcggatttcggtagtggttcgtatgtgggtgggttggggttggtgttcgtgattgtcgcgattatttcggtgttgggtatcgggttgatgatgttgtcgcgtatgcgcgcgtcggtttattttttgggggcgattttgcgttagtaggttattttgttattgtaggaataaatagttggggtcgttttgcggttttaattcgttttttagtcgattatttgttttagaagcgtcgtatgacgttgttgttgtttttttaatagtaagcgattcgagcggaatatcgtttt

SEQ ID NO: 1326 - DNA, 1215 bp, Artificial Sequence
  chemically treated genomic DNA (Homo sapiens) CpG-island No: 1326
aaaacgatattccgctcgaatcgcttactattaaaaaaacaacaacaacgtcatacgacgcttctaaaacaaataatcgactaaaaaacgaattaaaaccgcaaaacgaccccaactatttattcctacaataacaaaataacctactaacgcaaaatcgcccccaaaaaataaaccgacgcgcgcatacgcgacaacatcatcaacccgatacccaacaccgaaataatcgcgacaatcacgaacaccaaccccaacccacccacatacgaaccactaccgaaatccgacgaaacgctatcgataacaatccgtacgaaaatcaccgataaaatcaccccacccaccaacgaacacaaaccgcgcataataaaataacgcaaactatcgaacaaactaccacgaaaataccaaacgcaaacaaatacgatcaacgaataataaaaacaaatcatcatacccaacgcgataataatatctaccaacacgttctcgctcaaactacgcataatcacgtaaaacaaacctactaccaaacctacgcaaataataacgtaacgaaaaatttacgaacgtaaacaaacgctaacgaacttcgacgacaccgcaccgtaataccccatcgccaaaaaaatccgcgccgacgccacgaaaatcgactacaacgacgccgccgtactaaccaacacgacaataaacatcaaaatcgccaacgaccccataaccgaaccgaccaaataaacaaaaacgttctcctaaatacgcgaattattcaaaccaaaacccgtttcgctaataccgacaaactacaaaataacgataacgataaacaaatacaaaccgaaaatcaacatcacgatccaaataacgaccttacccgacacctcttcgctacccaccgactcctcgctaacgatcaaacatatatcccaaccccaaaaaataaaaatcgaaaacgacaacccgacgacaaaaaccgaaaacgactcgacaccgaacgaattaaaccaaacgaaatcaaacgccaacgataacgacgcgataataccgccgaaaacgacgacgacaaaaccgatcaacaccaccaactacaaaaccaccaaaccatactacacgatcataataataacgataccgcgacaacaaatccacaccgccaaaacgataaacacgcaacaaataacgatattaatcaacaaattatcgaccaacgcc

SEQ ID NO: 1327 - DNA, 1215 bp, Artificial Sequence
  chemically treated genomic DNA (Homo sapiens) CpG-island No: 1327
aaggcggtgtttcgttcgaatcgtttgttgttgaagaaatagtaataacgttatgcgacgtttttgaagtaaatgatcggttgaaaaacgagttggggtcgtagagcggttttaattatttatttttgtagtggtaaggtagtttgttgacgtagagtcgtttttaggaagtaagtcggcgcgcgtatgcgcgatagtattattagttcgatgtttagtatcgagatgatcgcggtaattacgaatattagttttaatttatttatatgcgagttattgtcgaagttcggcgaggcgttgtcgatggtagttcgtacgaagattatcgataggattattttatttattagcgggtataggtcgcgtatgatgaagtggcgtaggttgtcgaataggttgttacggaaatattagacgtaggtaaatgcggttagcgaataatagaagtagattattatgtttagcgcggtgatggtatttgttaatacgttttcgtttaggttacgtatggttacgtagaatagatttgttgttaggtttgcgtaaatagtggcgtagcggggggtttgcgaacgtgggtagacgttggcgaatttcggcggtatcgtatcgtagtattttatcgttaagagggttcgcgtcggcgttacgaaggtcgattgtaacgacgtcgtcgtattggttagtacggtaatggatattaggatcgttagcggttttatgatcgggtcggttaggtgggtaaagacgtttttttggatgcgcgggttgtttaggttaaggttcgtttcgttgatatcggtaaattgtagggtggcgatggcggtgaataggtataggtcgaggattagtattacggtttaggtggcggttttgttcggtattttttcgttgtttatcgatttttcgttgacggttaggtatgtgttttagttttagaagatgaagatcgaaagcgatagttcggcggtaaaggtcgagaacgattcgatatcgaacgggttgaattaggcgaaattaaacgttagcggtggcggcgcggtggtatcgtcgaaggcggcgacggtaaagtcgattaatattattaattgtaaggttattaggttatattgtacggttatggtggtggcgatgtcgcgatagtagatttatatcgttagggcgatgaatacgtaataggtaacgatgttgattaataggttatcggttaacgtt

SEQ ID NO: 1328 - DNA, 1215 bp, Artificial Sequence
  chemically treated genomic DNA (Homo sapiens) CpG-island No: 1328
aacgttaaccgataacctattaatcaacatcgttacctattacgtattcatcgccctaacgatataaatctactatcgcgacatcgccaccaccataaccgtacaatataacctaataaccttacaattaataatattaatcgactttaccgtcgccgccttcgacgataccaccgcgccgccaccgctaacgtttaatttcgcctaattcaacccgttcgatatcgaatcgttctcgacctttaccgccgaactatcgctttcgatcttcatcttctaaaactaaaacacatacctaaccgtcaacgaaaaatcgataaacaacgaaaaaataccgaacaaaaccgccacctaaaccgtaatactaatcctcgacctatacctattcaccgccatcgccaccctacaatttaccgatatcaacgaaacgaaccttaacctaaacaacccgcgcatccaaaaaaacgtctttacccacctaaccgacccgatcataaaaccgctaacgatcctaatatccattaccgtactaaccaatacgacgacgtcgttacaatcgaccttcgtaacgccgacgcgaaccctcttaacgataaaatactacgatacgataccgccgaaattcgccaacgtctacccacgttcgcaaaccccccgctacgccactatttacgcaaacctaacaacaaatctattctacgtaaccatacgtaacctaaacgaaaacgtattaacaaataccatcaccgcgctaaacataataatctacttctattattcgctaaccgcatttacctacgtctaatatttccgtaacaacctattcgacaacctacgccacttcatcatacgcgacctatacccgctaataaataaaataatcctatcgataatcttcgtacgaactaccatcgacaacgcctcgccgaacttcgacaataactcgcatataaataaattaaaactaatattcgtaattaccgcgatcatctcgatactaaacatcgaactaataatactatcgcgcatacgcgcgccgacttacttcctaaaaacgactctacgtcaacaaactaccttaccactacaaaaataaataattaaaaccgctctacgaccccaactcgtttttcaaccgatcatttacttcaaaaacgtcgcataacgttattactatttcttcaacaacaaacgattcgaacgaaacaccgcctt

SEQ ID NO: 1329 - DNA, 2354 bp, Artificial Sequence
  chemically treated genomic DNA (Homo sapiens) CpG-island No: 1329
cgtcgtagtgtattatttcgttgatcgttttttttatgcgttcggtaatgattttttcgttgttttgtttacggtcgtttaggcggtggcgtagcgttttttggttcggtggtaggatgaatatcgatagtgtttgtggtattagtttgcgtatttgttgggcgttttgttagtcgatttttaggattaggtcgtagttttgatttagcgtttgttgtagcgcgttgcgcgaggtgtcgtagaagttgtcgaatatttcggtatgttttaggaagtcgttttgcgcgattagcgttttgaatttttcgtggacgacgaagtggtagtttatttcgtgtttttcgttcgggcgtatggcgcgggtggtgtgcgagatcgaaacgcggatttgtcggtcgtttttggttagggtcgttattaggttggttttgtcggcgttcgaaggggtcgaaacgatgtagagggtgtcgttgttgtggtttatggtcggggtggttttattcgatgttttgtatttgtttacgtatttgttcgattaatatttttaggttgatcgtcgtttgcgtgttgcgtgggtcgaaggttttggagtcgagggtgttggtttcgcggttgagtttttgtattaggaagtttaggcgacgttttgcggtatcgttatttttgaggattcggcgtattttagtgacgtgggtgttgaggcggtcgagtttttcggttacgtcgtttttttgcgttagtagtattattttttgttcgaggcgttgtgggtcgagttcggtttgtatgtcgtcgaaacggtcgagaattttttgtcgttgcgtcgttagtatttgcggtattaaggcgcgtagggtggtgattttattggatatgttgtttagacgttcgttgattagtcgggttagtttttggttttcgcgtaggcgatcggttttgagttcggttagggtttcgtcgaatagcgttatggtttcggcgtttagtgtttgcgggtcgttggtgtcggttattagtacgttaggttacgatagtatttttagcgggtttaggggtgttggttgtttgattaggtcggttattttttcggcggcggtaattagttgcgcggcgcgttcgcggtttatttttagtggtttgtcgttgttgttttcgttgaggcgtaaggtgtattttattttgtttcgcgataagttttggcgtaggtttttacgtacggcgttttcgaggtcgcgtagggtttttggtaggcgtaggtgcggttttaggtaacggtggttgatcgaacgtagtttttagattagggtgttttggttgtcggcgcgttcgatacgagtaaaagcggttatgttgtgtattatggggagtatttcgtttagttgaatgaacggtgggagtttttcggttgtaaggcgtaggattgtagcgtagtggggtcgtggcgtttaatttgtttatgttatcgacgggcggtcgcgttagtaggaaaaggcgacgggttgtggcgggtacgataataggtatgtttttttcgggttgcgggttttataatgttcggtagatttaaagttttagtataggtattttagatgaaacgtttaagtggtcgcgtcgtcgattagtttcgttcgattcgtattattcgtaattatattaagtacgtcgaagggtcggtattggtcgagttcggtgatatttaggttatttgtacggttagcgttgaaaacggtgtatcgcgttttttgaaaggttaaggttaaggttggttgatcgtcgaatacggtatgttgtcgcgtgttatcggtgagcgtaattagcgcgaagttagtcgtggtaaatagggtggtcgtattttggaaatttagcgtttgatcggtcgttcgttgcgcgtcgcgttggatatgagtaagttgggcgatattattttgtacgtcgattgcgacgtgatttaggtcgatggcggtattcgtatcgcgtttattatcggtgttatggtcgttttgtgcgatgcgttggcggtgattaagaagcgtggtggtttgaaggtcggtagttcgtttaagtatatgatcgttgtcgtgtcggtgggtatgtattagggcgaagtcgtgttcgatttggattatttggaagatttcgtcgtcgaaatcgatttgaacgtggttatgattagcgtcggtggttttatcgaggtgtagggtattgtcgaaggtgcgtcgttttagtttgaagattttaacgttatgttggcgttggcgtataagggtatgatcgaaattttcgagttgtagtaggttgtattggcggattgattgatttcgtagatataaaaaagtcgatattattgtcggttt

SEQ ID NO: 1330 - DNA, 2354 bp, Artificial Sequence
  chemically treated genomic DNA (Homo sapiens) CpG-island No: 1330
aaaccgacaataatatcgacttttttatatctacgaaatcaatcaatccgccaatacaacctactacaactcgaaaatttcgatcatacccttatacgccaacgccaacataacgttaaaatcttcaaactaaaacgacgcaccttcgacaataccctacacctcgataaaaccaccgacgctaatcataaccacgttcaaatcgatttcgacgacgaaatcttccaaataatccaaatcgaacacgacttcgccctaatacatacccaccgacacgacaacgatcatatacttaaacgaactaccgaccttcaaaccaccacgcttcttaatcaccgccaacgcatcgcacaaaacgaccataacaccgataataaacgcgatacgaataccgccatcgacctaaatcacgtcgcaatcgacgtacaaaataatatcgcccaacttactcatatccaacgcgacgcgcaacgaacgaccgatcaaacgctaaatttccaaaatacgaccaccctatttaccacgactaacttcgcgctaattacgctcaccgataacacgcgacaacataccgtattcgacgatcaaccaaccttaaccttaacctttcaaaaaacgcgatacaccgttttcaacgctaaccgtacaaataacctaaatatcaccgaactcgaccaataccgacccttcgacgtacttaatataattacgaataatacgaatcgaacgaaactaatcgacgacgcgaccacttaaacgtttcatctaaaatacctatactaaaactttaaatctaccgaacattataaaacccgcaacccgaaaaaaacatacctattatcgtacccgccacaacccgtcgccttttcctactaacgcgaccgcccgtcgataacataaacaaattaaacgccacgaccccactacgctacaatcctacgccttacaaccgaaaaactcccaccgttcattcaactaaacgaaatactccccataatacacaacataaccgcttttactcgtatcgaacgcgccgacaaccaaaacaccctaatctaaaaactacgttcgatcaaccaccgttacctaaaaccgcacctacgcctaccaaaaaccctacgcgacctcgaaaacgccgtacgtaaaaacctacgccaaaacttatcgcgaaacaaaataaaatacaccttacgcctcaacgaaaacaacaacgacaaaccactaaaaataaaccgcgaacgcgccgcgcaactaattaccgccgccgaaaaaataaccgacctaatcaaacaaccaacacccctaaacccgctaaaaatactatcgtaacctaacgtactaataaccgacaccaacgacccgcaaacactaaacgccgaaaccataacgctattcgacgaaaccctaaccgaactcaaaaccgatcgcctacgcgaaaaccaaaaactaacccgactaatcaacgaacgtctaaacaacatatccaataaaatcaccaccctacgcgccttaataccgcaaatactaacgacgcaacgacaaaaaattctcgaccgtttcgacgacatacaaaccgaactcgacccacaacgcctcgaacaaaaaataatactactaacgcaaaaaaacgacgtaaccgaaaaactcgaccgcctcaacacccacgtcactaaaatacgccgaatcctcaaaaataacgataccgcaaaacgtcgcctaaacttcctaatacaaaaactcaaccgcgaaaccaacaccctcgactccaaaaccttcgacccacgcaacacgcaaacgacgatcaacctaaaaatattaatcgaacaaatacgtaaacaaatacaaaacatcgaataaaaccaccccgaccataaaccacaacaacgacaccctctacatcgtttcgaccccttcgaacgccgacaaaaccaacctaataacgaccctaaccaaaaacgaccgacaaatccgcgtttcgatctcgcacaccacccgcgccatacgcccgaacgaaaaacacgaaataaactaccacttcgtcgtccacgaaaaattcaaaacgctaatcgcgcaaaacgacttcctaaaacataccgaaatattcgacaacttctacgacacctcgcgcaacgcgctacaacaaacgctaaatcaaaactacgacctaatcctaaaaatcgactaacaaaacgcccaacaaatacgcaaactaataccacaaacactatcgatattcatcctaccaccgaaccaaaaaacgctacgccaccgcctaaacgaccgtaaacaaaacaacgaaaaaatcattaccgaacgcataaaaaaaacgatcaacgaaataatacactacgacg

SEQ ID NO: 1331 - DNA, 2354 bp, Artificial Sequence
  chemically treated genomic DNA (Homo sapiens) CpG-island No: 1331
aagtcgatagtaatgtcggtttttttgtatttacgaaattagttagttcgttagtgtagtttgttgtagttcgaagatttcggttatgtttttgtgcgttagcgttagtatggcgttgaagtttttaggttggaacggcgtattttcggtagtgttttgtatttcgatgaagttatcggcgttggttatgattacgtttaggtcggtttcggcggcggagttttttaggtagtttaggtcgagtacggtttcgttttggtatatgtttatcgatacggtagcgattatgtgtttgagcgggttgtcggtttttaggttattacgttttttgattatcgttagcgtatcgtatagggcgattatggtatcggtgatggacgcggtacgggtatcgttatcggtttggattacgtcgtagtcgacgtatagggtgatgtcgtttagtttgtttatgtttagcgcggcgcgtagcgaacggtcgattaggcgttggatttttagggtgcggttattttgtttgttacggttggtttcgcgttggttacgtttatcggtagtacgcggtagtatgtcgtattcggcggttagttagttttggttttggttttttaggaagcgcggtatatcgtttttaacgttgatcgtgtagatgatttaggtgttatcgaattcgattagtatcgatttttcggcgtgtttggtgtagttgcgggtgatgcggatcgagcggagttgatcggcggcgcgattatttggacgttttatttgggatatttgtattgggattttgaatttgtcgagtattatagagttcgtagttcggggaagatatgtttattgtcgtattcgttatagttcgtcgtttttttttattggcgcggtcgttcgtcggtaatataggtagattgggcgttacggttttattgcgttataattttgcgttttgtagtcgagaggtttttatcgtttatttaattaagcgaggtattttttatggtgtatagtatgatcgtttttgttcgtgtcgagcgcgtcggtagttaaggtattttgatttgggagttgcgttcggttaattatcgttatttggaatcgtatttgcgtttgttagaggttttgcgcgatttcgaaggcgtcgtacgtgaaggtttgcgttagggtttgtcgcggggtaaggtggaatgtattttgcgttttaacgaagatagtaacggtaagttattgaaggtagatcgcgagcgcgtcgcgtagttggttgtcgtcgtcgaggaagtggtcggtttgattaagtagttagtatttttgaattcgttggaagtgttgtcgtggtttggcgtgttggtggtcgatattagcgattcgtaggtattgaacgtcgaagttatggcgttgttcgacgaagttttggtcgaatttaaggtcggtcgtttgcgcgaaggttaggaattggttcggttgattaacgaacgtttggatagtatgtttagtgaagttattattttgcgcgttttggtgtcgtagatgttggcggcgtagcggtagaaaattttcgatcgtttcggcgatatgtaagtcgagttcgatttatagcgtttcgaataagagatggtgttgttggcgtagaagagcgacgtggtcgaggagttcgatcgttttagtatttacgttattgaagtgcgtcgggtttttaagggtggcggtgtcgtagggcgtcgtttggattttttgatgtaggaatttaatcgcgaagttaatattttcggttttaaggttttcgatttacgtagtacgtaagcggcggttaatttgaaggtattgatcgaatagatgcgtgaataagtatagaatatcgagtaaggttatttcgattatgaattatagtagcggtattttttatatcgtttcggttttttcgggcgtcggtaagattagtttggtaacggttttgattaaggacgatcggtagattcgcgtttcggtttcgtatattattcgcgttatgcgttcgggcgaggaatacggggtgaattattatttcgtcgtttacgaagaatttaaggcgttgatcgcgtagggcgattttttggagtatgtcgaagtgttcggtaatttttacggtatttcgcgtagcgcgttgtagtagacgttggattagggttacgatttgattttggaaatcgattggtaaggcgtttagtaggtgcgtaagttgatgttataggtattgtcggtgtttattttgttatcgagttaggaagcgttacgttatcgtttggacggtcgtgggtaggatagcgaagaaattattgtcgggcgtatgaaagaagcggttagcgagatggtgtattacgacg

SEQ ID NO: 1332 - DNA, 2354 bp, Artificial Sequence
  chemically treated genomic DNA (Homo sapiens) CpG-island No: 1332
cgtcgtaatacaccatctcgctaaccgcttctttcatacgcccgacaataatttcttcgctatcctacccacgaccgtccaaacgataacgtaacgcttcctaactcgataacaaaataaacaccgacaatacctataacatcaacttacgcacctactaaacgccttaccaatcgatttccaaaatcaaatcgtaaccctaatccaacgtctactacaacgcgctacgcgaaataccgtaaaaattaccgaacacttcgacatactccaaaaaatcgccctacgcgatcaacgccttaaattcttcgtaaacgacgaaataataattcaccccgtattcctcgcccgaacgcataacgcgaataatatacgaaaccgaaacgcgaatctaccgatcgtccttaatcaaaaccgttaccaaactaatcttaccgacgcccgaaaaaaccgaaacgatataaaaaataccgctactataattcataatcgaaataaccttactcgatattctatacttattcacgcatctattcgatcaataccttcaaattaaccgccgcttacgtactacgtaaatcgaaaaccttaaaaccgaaaatattaacttcgcgattaaattcctacatcaaaaaatccaaacgacgccctacgacaccgccacccttaaaaacccgacgcacttcaataacgtaaatactaaaacgatcgaactcctcgaccacgtcgctcttctacgccaacaacaccatctcttattcgaaacgctataaatcgaactcgacttacatatcgccgaaacgatcgaaaattttctaccgctacgccgccaacatctacgacaccaaaacgcgcaaaataataacttcactaaacatactatccaaacgttcgttaatcaaccgaaccaattcctaaccttcgcgcaaacgaccgaccttaaattcgaccaaaacttcgtcgaacaacgccataacttcgacgttcaatacctacgaatcgctaatatcgaccaccaacacgccaaaccacgacaacacttccaacgaattcaaaaatactaactacttaatcaaaccgaccacttcctcgacgacgacaaccaactacgcgacgcgctcgcgatctaccttcaataacttaccgttactatcttcgttaaaacgcaaaatacattccaccttaccccgcgacaaaccctaacgcaaaccttcacgtacgacgccttcgaaatcgcgcaaaacctctaacaaacgcaaatacgattccaaataacgataattaaccgaacgcaactcccaaatcaaaataccttaactaccgacgcgctcgacacgaacaaaaacgatcatactatacaccataaaaaatacctcgcttaattaaataaacgataaaaacctctcgactacaaaacgcaaaattataacgcaataaaaccgtaacgcccaatctacctatattaccgacgaacgaccgcgccaataaaaaaaaacgacgaactataacgaatacgacaataaacatatcttccccgaactacgaactctataatactcgacaaattcaaaatcccaatacaaatatcccaaataaaacgtccaaataatcgcgccgccgatcaactccgctcgatccgcatcacccgcaactacaccaaacacgccgaaaaatcgatactaatcgaattcgataacacctaaatcatctacacgatcaacgttaaaaacgatataccgcgcttcctaaaaaaccaaaaccaaaactaactaaccgccgaatacgacatactaccgcgtactaccgataaacgtaaccaacgcgaaaccaaccgtaacaaacaaaataaccgcaccctaaaaatccaacgcctaatcgaccgttcgctacgcgccgcgctaaacataaacaaactaaacgacatcaccctatacgtcgactacgacgtaatccaaaccgataacgatacccgtaccgcgtccatcaccgataccataatcgccctatacgatacgctaacgataatcaaaaaacgtaataacctaaaaaccgacaacccgctcaaacacataatcgctaccgtatcgataaacatataccaaaacgaaaccgtactcgacctaaactacctaaaaaactccgccgccgaaaccgacctaaacgtaatcataaccaacgccgataacttcatcgaaatacaaaacactaccgaaaatacgccgttccaacctaaaaacttcaacgccatactaacgctaacgcacaaaaacataaccgaaatcttcgaactacaacaaactacactaacgaactaactaatttcgtaaatacaaaaaaaccgacattactatcgactt

SEQ ID NO: 1333 - DNA, 781 bp, Artificial Sequence
  chemically treated genomic DNA (Homo sapiens) CpG-island No: 1333
ggagaagcgcggttgacgcggtaggcgggcgttacgtacgaaacggcgtaggtttggcgtgaggatttggtagtcgaatcggtagtttaggttgagtatttcggtttgttcgttgttcggttattagttgtattggtcgtttttacggttgatttcgcgtagggtatcgacgtattttatttcgttagtgatcgtatttatttaggcgcgtttcggcgttaggaagttcggcgattgttggttgttacgttagtttttgatgtcgagtttttgttgcgttacgtagaacgagtcgtaatagatgtattcgcgacgtttgcgacgttgtttgtttaggtatttggcgaagtcgtttattaatttgaatttttggtttaagttttcgtcgtcgtttatgttcgaaggtagtagtaggttggtaatattgattttgtcgaaatttgtttgtaggtaacgttcgtagcggtcggttgtttcgaaatttaggtcggtgatgattgttttgggttgtatgcgcgaataaagggttatattattttgggtaggtattttcgcgtcgtaggtataaaggaaatagttatcgagttggaaagttgggttatcgagtttaaaggtcgaggcgcgggtattttgaaggtagatgacgtcggtattttgggtttgtagttagttgagtaaattacgttcggtcgtagtttgaatgttatttacgtttatattgatgattcgtataaatggttttaaaaatttcgtgcgtgtatgatattcgagtttaatttat

SEQ ID NO: 1334 - DNA, 781 bp, Artificial Sequence
  chemically treated genomic DNA (Homo sapiens) CpG-island No: 1334
ataaattaaactcgaatatcatacacgcacgaaatttttaaaaccatttatacgaatcatcaatataaacgtaaataacattcaaactacgaccgaacgtaatttactcaactaactacaaacccaaaataccgacgtcatctaccttcaaaatacccgcgcctcgacctttaaactcgataacccaactttccaactcgataactatttcctttatacctacgacgcgaaaatacctacccaaaataatataaccctttattcgcgcatacaacccaaaacaatcatcaccgacctaaatttcgaaacaaccgaccgctacgaacgttacctacaaacaaatttcgacaaaatcaatattaccaacctactactaccttcgaacataaacgacgacgaaaacttaaaccaaaaattcaaattaataaacgacttcgccaaatacctaaacaaacaacgtcgcaaacgtcgcgaatacatctattacgactcgttctacgtaacgcaacaaaaactcgacatcaaaaactaacgtaacaaccaacaatcgccgaacttcctaacgccgaaacgcgcctaaataaatacgatcactaacgaaataaaatacgtcgataccctacgcgaaatcaaccgtaaaaacgaccaatacaactaataaccgaacaacgaacaaaccgaaatactcaacctaaactaccgattcgactaccaaatcctcacgccaaacctacgccgtttcgtacgtaacgcccgcctaccgcgtcaaccgcgcttctcc

SEQ ID NO: 1335 - DNA, 781 bp, Artificial Sequence
  chemically treated genomic DNA (Homo sapiens) CpG-island No: 1335
atgggttgagttcgggtattatatacgtacgagatttttggggttatttatgcggattattagtgtgaacgtaaatggtatttaggttgcggtcgagcgtggtttgtttagttggttgtaagtttagaatgtcgacgttatttgtttttaggatattcgcgtttcggtttttgaattcgatgatttagttttttagttcgatggttattttttttatgtttgcgacgcggaggtgtttgtttaaggtggtgtggttttttattcgcgtatgtagtttaaggtagttattatcggtttgggtttcgagatagtcgatcgttacgggcgttatttgtaagtagatttcgataaagttagtattgttagtttgttgttgttttcgggtatgaacggcgacgaagatttgaattagaagtttaagttgatggacgatttcgttaagtatttggataagtagcgtcgtaagcgtcgcgagtatatttattgcggttcgttttacgtggcgtagtagaagttcgatattaagaattggcgtgatagttagtagtcgtcgggttttttggcgtcggagcgcgtttggatggatgcgattattggcgagatggggtacgtcgatgttttgcgcgaagttagtcgtgaaggcgattagtatagttggtggtcggataacgagtaggtcgagatgtttaatttgggttatcggttcgattattagatttttacgttaggtttgcgtcgtttcgtgcgtaacgttcgtttgtcgcgttagtcgcgttttttt

SEQ ID NO: 1336 - DNA, 781 bp, Artificial Sequence
  chemically treated genomic DNA (Homo sapiens) CpG-island No: 1336
aaaaaaacgcgactaacgcgacaaacgaacgttacgcacgaaacgacgcaaacctaacgtaaaaatctaataatcgaaccgataacccaaattaaacatctcgacctactcgttatccgaccaccaactatactaatcgccttcacgactaacttcgcgcaaaacatcgacgtaccccatctcgccaataatcgcatccatccaaacgcgctccgacgccaaaaaacccgacgactactaactatcacgccaattcttaatatcgaacttctactacgccacgtaaaacgaaccgcaataaatatactcgcgacgcttacgacgctacttatccaaatacttaacgaaatcgtccatcaacttaaacttctaattcaaatcttcgtcgccgttcatacccgaaaacaacaacaaactaacaatactaactttatcgaaatctacttacaaataacgcccgtaacgatcgactatctcgaaacccaaaccgataataactaccttaaactacatacgcgaataaaaaaccacaccaccttaaacaaacacctccgcgtcgcaaacataaaaaaaataaccatcgaactaaaaaactaaatcatcgaattcaaaaaccgaaacgcgaatatcctaaaaacaaataacgtcgacattctaaacttacaaccaactaaacaaaccacgctcgaccgcaacctaaataccatttacgttcacactaataatccgcataaataaccccaaaaatctcgtacgtatataatacccgaactcaacccat

SEQ ID NO: 1337 - DNA, 1676 bp, Artificial Sequence
  chemically treated genomic DNA (Homo sapiens) CpG-island No: 1337
ttttgttatcgatcgcggggtattgcgtttcggtgaatttattttgaaatcggggcgtattagttcgtatttttttaatgtcggtttgtttaatatcggttttgtattggtcgaattggggcggtgttatgtcgtagttattgtcgatagtaagatttcgttcgacgtgttgttcggttcggtttataagggtatttcgttggcggcgattattgtcgtggttttggtagattagtataagttcgacgtgttttggtgttttaatcgtaaggaagttaaggattacggcgaaggcggtagtttggtgggtgcgttattggtcggtgacgtgttgattatcgacgacgtgattatcgtcggtattgttattcgtgaggttatgtagattattaacgtttagtaggttaaggtcgtcggcgtgttgatcgcgttgaatcgcgaagagcgtggtaatggcgagttgtcggcgatttaggaagtggaacgcgatttcggtatttcggtagttagtatcgtttcgttgatttaggtgttggagtttttggtcgatgatttttagttgaagtagtatttgtcggttgtcgaggtttatcgcgcgtagtacgggatttgattttggtttggaaatgaaaaaggcgatttttttgtgaaggtcgtttttttttgtcgttcgtttcggtcgattagcgcggtttgcggttggtaattagggtatttacgtcgttgtcggtgaaaatttttagtagtatagtattcggtatacggtcgtcgatgatgtgcgagttgtttacgtcgttttgtatcgtatttagtgcgtatttgattttcggtagtatgtcgtcgtagatggtgtcgttcgcgattagttcgttgatttgttcggtggttaggtcggttagaatttgattttgtttgtttattaaatcggcgatgttggttagtagtattagtttttcggtttttagcgttttcgcgattttgtttgttattaggtcggcgttgatgttgtacgatttttcgttggtatttacgtcgatcggcgcgatgatcgggatgaagtcgttttttattagtatgtttagtagatcggtgtttacgtttattatttcgtttacgtggtcgatgtcgatgattttcggggtggttatttcgggcgtttggcggttgacggttagtttgcgggcgcggattagtttcgcgtttttgtcggttaggtcgatggcgttgtcgtcgtggcggttgattaggttgacgatgtttttgttgatttggttatttagtattatttttattacgtttatggtcgtcgagtcggtgacgcgtatgtcgtcgatgaagtggttttcgatcgataggcgtttgagtaggtcgtcgatttgcgggttattatcgtggattattatcgggttgatgtttatagtttttattagtacgatgttacgggcgaagtcggttttgagtttttcgttttttatcgcgttgtcgtcgtatttgattattagggttttgtcgataaagcggcggatgtaaggtagtgtttcggataaaatttcggttatatgggaagcggtatcgcgatcgagggttatgtagggtttttgtaaggaatagatagtcggttagaacggtagttgtagtttaggggtaattcgtagtaattgggtacggaaaatatt

SEQ ID NO: 1338 - DNA, 1676 bp, Artificial Sequence
  chemically treated genomic DNA (Homo sapiens) CpG-island No: 1338
aatattttccgtacccaattactacgaattacccctaaactacaactaccgttctaaccgactatctattccttacaaaaaccctacataaccctcgatcgcgataccgcttcccatataaccgaaattttatccgaaacactaccttacatccgccgctttatcgacaaaaccctaataatcaaatacgacgacaacgcgataaaaaacgaaaaactcaaaaccgacttcgcccgtaacatcgtactaataaaaactataaacatcaacccgataataatccacgataataacccgcaaatcgacgacctactcaaacgcctatcgatcgaaaaccacttcatcgacgacatacgcgtcaccgactcgacgaccataaacgtaataaaaataatactaaataaccaaatcaacaaaaacatcgtcaacctaatcaaccgccacgacgacaacgccatcgacctaaccgacaaaaacgcgaaactaatccgcgcccgcaaactaaccgtcaaccgccaaacgcccgaaataaccaccccgaaaatcatcgacatcgaccacgtaaacgaaataataaacgtaaacaccgatctactaaacatactaataaaaaacgacttcatcccgatcatcgcgccgatcgacgtaaataccaacgaaaaatcgtacaacatcaacgccgacctaataacaaacaaaatcgcgaaaacgctaaaaaccgaaaaactaatactactaaccaacatcgccgatttaataaacaaacaaaatcaaattctaaccgacctaaccaccgaacaaatcaacgaactaatcgcgaacgacaccatctacgacgacatactaccgaaaatcaaatacgcactaaatacgatacaaaacgacgtaaacaactcgcacatcatcgacgaccgtataccgaatactatactactaaaaattttcaccgacaacgacgtaaataccctaattaccaaccgcaaaccgcgctaatcgaccgaaacgaacgacaaaaaaaaacgaccttcacaaaaaaatcgcctttttcatttccaaaccaaaatcaaatcccgtactacgcgcgataaacctcgacaaccgacaaatactacttcaactaaaaatcatcgaccaaaaactccaacacctaaatcaacgaaacgatactaactaccgaaataccgaaatcgcgttccacttcctaaatcgccgacaactcgccattaccacgctcttcgcgattcaacgcgatcaacacgccgacgaccttaacctactaaacgttaataatctacataacctcacgaataacaataccgacgataatcacgtcgtcgataatcaacacgtcaccgaccaataacgcacccaccaaactaccgccttcgccgtaatccttaacttccttacgattaaaacaccaaaacacgtcgaacttatactaatctaccaaaaccacgacaataatcgccgccaacgaaatacccttataaaccgaaccgaacaacacgtcgaacgaaatcttactatcgacaataactacgacataacaccgccccaattcgaccaatacaaaaccgatattaaacaaaccgacattaaaaaaatacgaactaatacgccccgatttcaaaataaattcaccgaaacgcaataccccgcgatcgataacaaaa

SEQ ID NO: 1339 - DNA, 1676 bp, Artificial Sequence
  chemically treated genomic DNA (Homo sapiens) CpG-island No: 1339
gatgtttttcgtatttagttgttgcgggttgtttttgagttgtaattgtcgttttgatcgattatttgttttttataggagttttgtatgattttcgatcgcgatgtcgttttttatgtagtcgaggttttgttcgaagtattgttttatattcgtcgttttgtcggtaagattttggtgattaagtacggcggtaacgcgatggagagcgaggagtttaaaatcggtttcgttcgtgatatcgtgttgatgaaggttgtgggtattaattcggtggtggtttacggtggtggttcgtagatcggcgatttgtttaagcgtttgtcgatcgaaagttattttatcgacggtatgcgcgttatcgattcggcgattatggacgtggtggagatggtgttgggtggttaggttaataaggatatcgttaatttgattaatcgttacggcggtagcgttatcggtttgatcggtaaggacgcggaattgattcgcgttcgtaagttgatcgttagtcgttagacgttcgagatgattatttcggaaattatcgatatcggttacgtgggcgaagtggtgagcgtgaatatcgatttgttgaatatgttggtgaagggcgattttatttcggttatcgcgtcgatcggcgtgggtgttaacggagagtcgtataatattaacgtcgatttggtagtaggtaaggtcgcggaagcgttgaaagtcgagaagttgatgttgttgattaatatcgtcggtttgatggataagtaaggttaggttttgatcggtttgattatcgaataggttaacgaattgatcgcggacggtattatttacggcggtatgttgtcgaagattaagtgcgtattggatgcggtgtagggcggcgtgaatagttcgtatattatcgacggtcgtgtgtcgaatgttgtgttgttggaaatttttatcgatagcggcgtgggtattttgattattaatcgtaagtcgcgttgatcggtcgaaacgggcgataaaaaaaggcgatttttataagaaggtcgttttttttatttttaggttaggattagatttcgtattgcgcgcggtaagtttcgatagtcggtagatgttgttttagttgagggttatcggttaggaattttagtatttgggttagcgaaacgatgttgattatcgggatatcgaagtcgcgttttattttttggatcgtcgatagttcgttattgttacgtttttcgcggtttagcgcgattagtacgtcggcggttttggtttgttgggcgttgatgatttgtatgattttacggatggtagtatcggcggtgattacgtcgtcgatgattagtacgttatcggttagtggcgtatttattaggttgtcgttttcgtcgtggtttttggtttttttgcggttgaagtattaaggtacgtcgagtttatgttggtttgttagggttacggtagtggtcgtcgttaacggaatatttttgtaggtcgggtcgaatagtacgtcgaacgggattttgttgtcgataatggttgcggtatagtatcgttttagttcggttaatgtagaatcggtgttgaataggtcggtattgaagaaatacgggttggtacgtttcgattttagggtgaatttatcgaaacgtagtatttcgcgatcgatggtaaaa

SEQ ID NO: 1340 - DNA, 1676 bp, Artificial Sequence
  chemically treated genomic DNA (Homo sapiens) CpG-island No: 1340
ttttaccatcgatcgcgaaatactacgtttcgataaattcaccctaaaatcgaaacgtaccaacccgtatttcttcaataccgacctattcaacaccgattctacattaaccgaactaaaacgatactataccgcaaccattatcgacaacaaaatcccgttcgacgtactattcgacccgacctacaaaaatattccgttaacgacgaccactaccgtaaccctaacaaaccaacataaactcgacgtaccttaatacttcaaccgcaaaaaaaccaaaaaccacgacgaaaacgacaacctaataaatacgccactaaccgataacgtactaatcatcgacgacgtaatcaccgccgatactaccatccgtaaaatcatacaaatcatcaacgcccaacaaaccaaaaccgccgacgtactaatcgcgctaaaccgcgaaaaacgtaacaataacgaactatcgacgatccaaaaaataaaacgcgacttcgatatcccgataatcaacatcgtttcgctaacccaaatactaaaattcctaaccgataaccctcaactaaaacaacatctaccgactatcgaaacttaccgcgcgcaatacgaaatctaatcctaacctaaaaataaaaaaaacgaccttcttataaaaatcgcctttttttatcgcccgtttcgaccgatcaacgcgacttacgattaataatcaaaatacccacgccgctatcgataaaaatttccaacaacacaacattcgacacacgaccgtcgataatatacgaactattcacgccgccctacaccgcatccaatacgcacttaatcttcgacaacataccgccgtaaataataccgtccgcgatcaattcgttaacctattcgataatcaaaccgatcaaaacctaaccttacttatccatcaaaccgacgatattaatcaacaacatcaacttctcgactttcaacgcttccgcgaccttacctactaccaaatcgacgttaatattatacgactctccgttaacacccacgccgatcgacgcgataaccgaaataaaatcgcccttcaccaacatattcaacaaatcgatattcacgctcaccacttcgcccacgtaaccgatatcgataatttccgaaataatcatctcgaacgtctaacgactaacgatcaacttacgaacgcgaatcaattccgcgtccttaccgatcaaaccgataacgctaccgccgtaacgattaatcaaattaacgatatccttattaacctaaccacccaacaccatctccaccacgtccataatcgccgaatcgataacgcgcataccgtcgataaaataactttcgatcgacaaacgcttaaacaaatcgccgatctacgaaccaccaccgtaaaccaccaccgaattaatacccacaaccttcatcaacacgatatcacgaacgaaaccgattttaaactcctcgctctccatcgcgttaccgccgtacttaatcaccaaaatcttaccgacaaaacgacgaatataaaacaatacttcgaacaaaacctcgactacataaaaaacgacatcgcgatcgaaaatcatacaaaactcctataaaaaacaaataatcgatcaaaacgacaattacaactcaaaaacaacccgcaacaactaaatacgaaaaacatc

SEQ ID NO: 1341 - DNA, 1570 bp, Artificial Sequence
  chemically treated genomic DNA (Homo sapiens) CpG-island No: 1341
gttcggttttgttgaggatttttagtaggcgtgcggtattgtagatgtcgtcgtcgaaatcgtattagcgttttttgatgaagatgtgatcgtttatttcgtcggttagtagcgagtttgtttgttttattttttttttgattaacgaatgatcggttttttatattagtgcgcggtcgttatgttgttcgattagcggggttaggcgacgggtgtatttgacgtcgaagatgatttcggcgttagggttgcgcgttagtacgttttgggtaaatagtattagtaggcggtcggggtagacgatgttgtcggtattggttattatatcgacgcggtcgttatcgtcgtcgaaggttaggtcgatatcggcgtcggtttttttgattttggcgattaggtttttaaggtttttcggtttgttcgggttcgggtggtggttggggaagttgtcgtttatttcgtagaatagcgggattattttatagtttaaggtttcgattaattgcggtgcgattacgttagcggtatcgttgtcgtagtttattattattttgagttttttcgttagttttacgttttcgacgatttgttggaaatagcggttaaggatttcgattttttttacgcggttttcggttaaggttaggtcgttggtttttaggcgggtgagtagggtttggatttgttcgttggttagcgtgtcgttagcgatgacgattttgaagtcgttgtagttcgacgggttgtggttgttagttagtattacgttcgatttgtttgttagtacgttggtcgcgtagtaaagggtcggggtgggtattaggtcgacgtcgttgacgtggtagtcggtatcgattaggtttttgattagttgttcgattagtatcgggtcggataggcggttattacggtcgatcgaaatttgcggttcgttttgggttaggttttgcgtatcgatggcgcggtttatttagtaggcggtttcggcgtgaagggttttgtcgattacgtcgcggatgttatacgcgcggaaaatgttgtcgggtaatgcggcggggattaggtgggttatgtcgtttatttttggaagttttattagttaaaggttttttgggtaggcgtaaattgaacgtttggacggtgttttcgttagagagttcgttatttttggtttgaacggttatttgtcggtttagtggttgtcggagtgatcgaagtcgttagtattacgttggtttttatcgaaggtttcgacgatgtcgaaatgggtttgtattatcggtattagtattagttgggcgatacgttcgttaacggcgatggtgaatggcgtgttgtcgcggttttagtacgatattattagttcgttttggtaattcgagtcgattaggtcgattaggttgtttagtacgatgtcgtgtttatggtttaggttcgagcgcggtaggattatcgtcgttaggttcgggtcgtcgatgtagatcgataggtcggtagggattagtagggtttggtttggtttaaggatagtgttttttttgagtagggcgcgtaggtttaggttcgcgga

SEQ ID NO: 1342 - DNA, 1570 bp, Artificial Sequence
  chemically treated genomic DNA (Homo sapiens) CpG-island No: 1342
tccgcgaacctaaacctacgcgccctactcaaaaaaaacactatccttaaaccaaaccaaaccctactaatccctaccgacctatcgatctacatcgacgacccgaacctaacgacgataatcctaccgcgctcgaacctaaaccataaacacgacatcgtactaaacaacctaatcgacctaatcgactcgaattaccaaaacgaactaataatatcgtactaaaaccgcgacaacacgccattcaccatcgccgttaacgaacgtatcgcccaactaatactaataccgataatacaaacccatttcgacatcgtcgaaaccttcgataaaaaccaacgtaatactaacgacttcgatcactccgacaaccactaaaccgacaaataaccgttcaaaccaaaaataacgaactctctaacgaaaacaccgtccaaacgttcaatttacgcctacccaaaaaacctttaactaataaaacttccaaaaataaacgacataacccacctaatccccgccgcattacccgacaacattttccgcgcgtataacatccgcgacgtaatcgacaaaacccttcacgccgaaaccgcctactaaataaaccgcgccatcgatacgcaaaacctaacccaaaacgaaccgcaaatttcgatcgaccgtaataaccgcctatccgacccgatactaatcgaacaactaatcaaaaacctaatcgataccgactaccacgtcaacgacgtcgacctaatacccaccccgaccctttactacgcgaccaacgtactaacaaacaaatcgaacgtaatactaactaacaaccacaacccgtcgaactacaacgacttcaaaatcgtcatcgctaacgacacgctaaccaacgaacaaatccaaaccctactcacccgcctaaaaaccaacgacctaaccttaaccgaaaaccgcgtaaaaaaaatcgaaatccttaaccgctatttccaacaaatcgtcgaaaacgtaaaactaacgaaaaaactcaaaataataataaactacgacaacgataccgctaacgtaatcgcaccgcaattaatcgaaaccttaaactataaaataatcccgctattctacgaaataaacgacaacttccccaaccaccacccgaacccgaacaaaccgaaaaaccttaaaaacctaatcgccaaaatcaaaaaaaccgacgccgatatcgacctaaccttcgacgacgataacgaccgcgtcgatataataaccaataccgacaacatcgtctaccccgaccgcctactaatactatttacccaaaacgtactaacgcgcaaccctaacgccgaaatcatcttcgacgtcaaatacacccgtcgcctaaccccgctaatcgaacaacataacgaccgcgcactaatataaaaaaccgatcattcgttaatcaaaaaaaaaataaaacaaacaaactcgctactaaccgacgaaataaacgatcacatcttcatcaaaaaacgctaatacgatttcgacgacgacatctacaataccgcacgcctactaaaaatcctcaacaaaaccgaac

SEQ ID NO: 1343 - DNA, 1570 bp, Artificial Sequence
  chemically treated genomic DNA (Homo sapiens) CpG-island No: 1343
ttcgcgggtttggatttgcgcgttttgtttaaggaggatattgtttttgagttaggttagattttgttgatttttatcggtttgtcgatttatatcggcgattcgggtttggcggcggtgattttgtcgcgttcgggtttgggttataagtacggtatcgtgttgggtaatttggtcggtttgatcgattcggattattagggcgagttgatggtgtcgtgttggaatcgcggtaatacgttatttattatcgtcgttggcgagcgtatcgtttagttggtattggtgtcggtggtataggtttatttcgatatcgtcgaagttttcgatgaaagttagcgtggtgttggcggtttcggttatttcggtagttattgagtcggtaaatgatcgtttaggttaaggatggcgaattttttggcgaaagtatcgtttaagcgtttagtttgcgtttgtttagaaagtttttgattaatggagtttttagagatgaacgatatggtttatttggttttcgtcgtattgttcgatagtatttttcgcgcgtatgatattcgcggcgtggtcggtaaaattttttacgtcgaaatcgtttattggataggtcgcgttatcggtgcgtaaagtttggtttagggcgaatcgtaggtttcggtcggtcgtgatggtcgtttgttcggttcgatgttggtcgaatagttgattaagggtttggtcgatgtcggttgttacgttagcgacgtcggtttggtgtttatttcggttttttattacgcggttaacgtgttggtaggtaagtcgggcgtgatgttgattggtagttataattcgtcggattataacggttttaagatcgttatcgttggcgatacgttggttaacgaatagatttaggttttgtttattcgtttgaaaattaacgatttgattttggtcgaaggtcgcgtggaaaaggtcgagatttttgatcgttatttttagtagatcgtcgaggacgtgaagttggcgaaaaagtttaaggtggtggtggattgcggtaacggtgtcgttggcgtgatcgtatcgtaattgatcgaagttttgggttgtgaagtgatttcgttgttttgcgaagtagacggtaatttttttaattattattcggattcgggtaagtcggaaaattttgaagatttgatcgttagggttaaggaaatcggcgtcgatatcggtttggttttcgacggcgatggcgatcgcgtcggtgtggtgattaatatcggtagtatcgtttatttcgatcgtttgttgatgttgtttgtttaggacgtgttggcgcgtaattttggcgtcgaaattattttcgacgttaaatgtattcgtcgtttgatttcgttgatcgaatagtatggcggtcgcgtattgatgtggaagatcggttattcgttgattaaaaagaagatgaaatagataggttcgttgttggtcggcgagatgagcggttatatttttattaaggaacgttggtacggtttcgacgacggtatttatagtgtcgtacgtttgttggagatttttagtaaggtcgggt

SEQ ID NO: 1344 - DNA, 1570 bp, Artificial Sequence
  chemically treated genomic DNA (Homo sapiens) CpG-island No: 1344
acccgaccttactaaaaatctccaacaaacgtacgacactataaataccgtcgtcgaaaccgtaccaacgttccttaataaaaatataaccgctcatctcgccgaccaacaacgaacctatctatttcatcttctttttaatcaacgaataaccgatcttccacatcaatacgcgaccgccatactattcgatcaacgaaatcaaacgacgaatacatttaacgtcgaaaataatttcgacgccaaaattacgcgccaacacgtcctaaacaaacaacatcaacaaacgatcgaaataaacgatactaccgatattaatcaccacaccgacgcgatcgccatcgccgtcgaaaaccaaaccgatatcgacgccgatttccttaaccctaacgatcaaatcttcaaaattttccgacttacccgaatccgaataataattaaaaaaattaccgtctacttcgcaaaacaacgaaatcacttcacaacccaaaacttcgatcaattacgatacgatcacgccaacgacaccgttaccgcaatccaccaccaccttaaactttttcgccaacttcacgtcctcgacgatctactaaaaataacgatcaaaaatctcgaccttttccacgcgaccttcgaccaaaatcaaatcgttaattttcaaacgaataaacaaaacctaaatctattcgttaaccaacgtatcgccaacgataacgatcttaaaaccgttataatccgacgaattataactaccaatcaacatcacgcccgacttacctaccaacacgttaaccgcgtaataaaaaaccgaaataaacaccaaaccgacgtcgctaacgtaacaaccgacatcgaccaaacccttaatcaactattcgaccaacatcgaaccgaacaaacgaccatcacgaccgaccgaaacctacgattcgccctaaaccaaactttacgcaccgataacgcgacctatccaataaacgatttcgacgtaaaaaattttaccgaccacgccgcgaatatcatacgcgcgaaaaatactatcgaacaatacgacgaaaaccaaataaaccatatcgttcatctctaaaaactccattaatcaaaaactttctaaacaaacgcaaactaaacgcttaaacgatactttcgccaaaaaattcgccatccttaacctaaacgatcatttaccgactcaataactaccgaaataaccgaaaccgccaacaccacgctaactttcatcgaaaacttcgacgatatcgaaataaacctataccaccgacaccaataccaactaaacgatacgctcgccaacgacgataataaataacgtattaccgcgattccaacacgacaccatcaactcgccctaataatccgaatcgatcaaaccgaccaaattacccaacacgataccgtacttataacccaaacccgaacgcgacaaaatcaccgccgccaaacccgaatcgccgatataaatcgacaaaccgataaaaatcaacaaaatctaacctaactcaaaaacaatatcctccttaaacaaaacgcgcaaatccaaacccgcgaa

SEQ ID NO: 1345 - DNA, 2088 bp, Artificial Sequence
  chemically treated genomic DNA (Homo sapiens) CpG-island No: 1345
cggaatttaggcgtgggtcgaggattttggtttgaagagcgtgtatgtaatttattgaatttggttgagtcgttcggcgatgaaggcgattagttgtcgggcgattttgtttttgttggtttgcgcgaagagggtttggtgttgttggcggtcgattacggttaaggcgtttttttcgttgttaaagtcgatgttggggttggttatattattggcgacgattaggtcgaggtttttgtttttgagtttgcgcgtggcgtaatcgagtaggtgttcggtttcggcggcgaagtcgacgttgaacgggcggtcgttgcggttagtaatggtggtaaggatatcgggattgcgtattatttgtagtagtatatcgtcgtcggtcgtaggatttttttttagtttttgtgtggtaattattttcgggcggtagttcgcgatcgttgtcgaggcgatgaataggtcgtatggtatggttgttttataggtcgcgagtatgtttcgcgcgttgattacgtcgatgcggttgattcggtcgggggttggtaggtgtatcgggttcgtgacgagggttattcgagtttcggtttcggtagtcgtttcggttagggcgaagtttattttgtcggagttatgattggtgatgtagcgtatcgggtcgatgtttttttgggtcggttcggcggtgattaatacgtgtttgtcggtgagtgtttggcgtttgaagttttttgcggcgtattaggttaggtcggtggtttcgagtatgcggtttaggtttacgtcgttataggtttggttatcggaggtcgggtcgaatatttgaatgttacggtttttgagtagtttaaggttagtttgggtggtcgggtcgcgttatatggtttggtttatggtcggggttacggcgacggtggcgtcggtggttagtattagggtggttagtaggtcgtcggttatgttttgggttatgcgcgttatgaggtcggcggtggtcggggcgattagtattaggtcggtttatttggttagttcgatatggtttatggttgtttcggcggtagggtcgagtaggtttatgtgtatcgggtggttcgatagcgtttgtagggttagcggggtgatgaattcggtattattacgggttatgacgacgcgtatttgcgcgtcgtgttttaggagtcggcgaattagttcggcgtttttgtaggcggtaatgtcgttatttacgtcgagaacgatgcgtttgcgatatagtcgttgtataggtttgtttttttttagtgagagcgggcggcgacgttcgaaatgtttgcggtagaacgtcgtatgtacgaggcgaaatagattaatatagggtcgaaatgggtcgtagtaagggtagggggcggggatgaatattagggagtggtcggttgaagagcggtcgagggagaagttgttgtagcgtggtgcggcggtatttacggatgtcgaattgtttgtcgtgttgttgggtttaggggtggtcgggcgtaatgtattggattttgcgcgggggttgttgatgcgttttggcgggttgaggtagtttttggaggtcgagcgcgacgcgttgttgcgcgagtcgggtatcggggtcgtgaagtatgtatagttataggcgttgttggagatcggtcggcgttatttgggtgagaatattaagcgcgtagaggttttggatgggttagcggcggtgcggcgttattttaaggttatgttgcggtatgaggttagtgaagtgttcggatgtttgtttttggatattaagtatcggtcgttggcgttcgagattttgtttaggggtacgatagatcgggcgagtgtttattcgcgggaggtagtgcggcgggttttgttgtataacgcggcggcgttgattttttgttataattattttttaggtaatagtgaatcgagttaggacgatgtgtatttgattttgttgttgaagcgcgggttggtattgatcgatgtgcgggtgttggattatattattattggcgatggggagtcgttgtcgatggttgagtatgggtggattgtggtttgaggtaggttaatgggggt

SEQ ID NO: 1346 - DNA, 2088 bp, Artificial Sequence
  chemically treated genomic DNA (Homo sapiens) CpG-island No: 1346
acccccattaacctacctcaaaccacaatccacccatactcaaccatcgacaacgactccccatcgccaataataatataatccaacacccgcacatcgatcaataccaacccgcgcttcaacaacaaaatcaaatacacatcgtcctaactcgattcactattacctaaaaaataattataacaaaaaatcaacgccgccgcgttatacaacaaaacccgccgcactacctcccgcgaataaacactcgcccgatctatcgtacccctaaacaaaatctcgaacgccaacgaccgatacttaatatccaaaaacaaacatccgaacacttcactaacctcataccgcaacataaccttaaaataacgccgcaccgccgctaacccatccaaaacctctacgcgcttaatattctcacccaaataacgccgaccgatctccaacaacgcctataactatacatacttcacgaccccgatacccgactcgcgcaacaacgcgtcgcgctcgacctccaaaaactacctcaacccgccaaaacgcatcaacaacccccgcgcaaaatccaatacattacgcccgaccacccctaaacccaacaacacgacaaacaattcgacatccgtaaataccgccgcaccacgctacaacaacttctccctcgaccgctcttcaaccgaccactccctaatattcatccccgccccctacccttactacgacccatttcgaccctatattaatctatttcgcctcgtacatacgacgttctaccgcaaacatttcgaacgtcgccgcccgctctcactaaaaaaaaacaaacctatacaacgactatatcgcaaacgcatcgttctcgacgtaaataacgacattaccgcctacaaaaacgccgaactaattcgccgactcctaaaacacgacgcgcaaatacgcgtcgtcataacccgtaataataccgaattcatcaccccgctaaccctacaaacgctatcgaaccacccgatacacataaacctactcgaccctaccgccgaaacaaccataaaccatatcgaactaaccaaataaaccgacctaatactaatcgccccgaccaccgccgacctcataacgcgcataacccaaaacataaccgacgacctactaaccaccctaatactaaccaccgacgccaccgtcgccgtaaccccgaccataaaccaaaccatataacgcgacccgaccacccaaactaaccttaaactactcaaaaaccgtaacattcaaatattcgacccgacctccgataaccaaacctataacgacgtaaacctaaaccgcatactcgaaaccaccgacctaacctaatacgccgcaaaaaacttcaaacgccaaacactcaccgacaaacacgtattaatcaccgccgaaccgacccaaaaaaacatcgacccgatacgctacatcaccaatcataactccgacaaaataaacttcgccctaaccgaaacgactaccgaaaccgaaactcgaataaccctcgtcacgaacccgatacacctaccaacccccgaccgaatcaaccgcatcgacgtaatcaacgcgcgaaacatactcgcgacctataaaacaaccataccatacgacctattcatcgcctcgacaacgatcgcgaactaccgcccgaaaataattaccacacaaaaactaaaaaaaaatcctacgaccgacgacgatatactactacaaataatacgcaatcccgatatccttaccaccattactaaccgcaacgaccgcccgttcaacgtcgacttcgccgccgaaaccgaacacctactcgattacgccacgcgcaaactcaaaaacaaaaacctcgacctaatcgtcgccaataatataaccaaccccaacatcgactttaacaacgaaaaaaacgccttaaccgtaatcgaccgccaacaacaccaaaccctcttcgcgcaaaccaacaaaaacaaaatcgcccgacaactaatcgccttcatcgccgaacgactcaaccaaattcaataaattacatacacgctcttcaaaccaaaatcctcgacccacgcctaaattccg

SEQ ID NO: 1347 - DNA, 2088 bp, Artificial Sequence
  chemically treated genomic DNA (Homo sapiens) CpG-island No: 1347
gtttttattgatttgttttaggttataatttatttatgtttaattatcgataacggttttttatcgttaatgatgatgtgatttagtattcgtatatcgattaatgttaattcgcgttttagtaataaggttagatgtatatcgttttggttcggtttattgttgtttgaggggtggttgtggtaaaggattaacgtcgtcgcgttatgtagtaaagttcgtcgtattatttttcgcgggtaaatattcgttcggtttatcgtgtttttgaataggatttcgaacgttaacggtcggtgtttggtgtttagaaataggtattcgaatattttattggttttatgtcgtagtatggttttgagataacgtcgtatcgtcgttggtttatttagagtttttgcgcgtttgatgtttttatttagataacgtcggtcgatttttagtagcgtttgtaattgtgtatattttacggtttcgatgttcggttcgcgtagtagcgcgtcgcgttcggtttttagaaattgttttagttcgttaaaacgtattagtagttttcgcgtaaggtttagtatattacgttcggttatttttgagtttagtagtacggtaagtaattcggtattcgtgagtatcgtcgtattacgttgtaatagtttttttttcggtcgttttttagtcggttattttttgatatttattttcgttttttgtttttgttgcggtttatttcgattttgtgttaatttatttcgtttcgtatatgcgacgttttgtcgtaggtatttcgaacgtcgtcgttcgtttttattggaaaaaggtaagtttatgtagcggttgtatcgtaagcgtatcgttttcggcgtgggtggcggtattgtcgtttataaaagcgtcgagttgattcgtcgatttttggagtacggcgcgtaggtgcgcgtcgttatgattcgtggtggtgtcgagtttattatttcgttgattttgtaggcgttgtcgggttattcggtgtatatggatttgttcgattttgtcgtcgaagtagttatgggttatatcgaattggttaagtgggtcgatttggtgttgatcgtttcggttatcgtcgattttatggcgcgtatggtttagggtatggtcgacgatttgttgattattttggtattggttatcgacgttatcgtcgtcgtggtttcggttatgaattaggttatgtggcgcgattcggttatttaggttaattttgagttgtttaagagtcgtggtatttaggtattcggttcggttttcggtagttaggtttgtggcgacgtgggtttgggtcgtatgttcgaagttatcgatttggtttggtgcgtcgtagaaagttttaagcgttaggtatttatcggtaaatacgtattgattatcgtcgggtcgatttaggaaaatatcgattcggtgcgttatattattaattatagtttcggtaagatgggtttcgttttggtcgaagcggttgtcgaagtcggggttcgggtgattttcgttacgggttcggtgtatttgttaattttcgatcgggttagtcgtatcgacgtggttagcgcgcgggatatgttcgcggtttgtgaagtagttatgttatgcgatttgtttatcgtttcggtagcggtcgcggattatcgttcggaagtggttgttatataaaaattgaagaaagattttacgatcggcgacggtatgttgttgtagatggtgcgtaatttcgatatttttgttattattgttggtcgtagcgatcgttcgtttagcgtcggtttcgtcgtcgaaatcgaatatttgttcgattacgttacgcgtaagtttaaggataagaatttcgatttgatcgtcgttaatgatgtggttaattttagtatcggttttaatagcgaagaaaacgttttgatcgtgatcgatcgttagtagtattagatttttttcgcgtagattagtaagggtaagatcgttcggtaattggtcgtttttatcgtcgaacggtttaattaggtttaataagttatatgtacgttttttaagttaagattttcgatttacgtttgggtttcg

SEQ ID NO: 1348 - DNA, 2088 bp, Artificial Sequence
  chemically treated genomic DNA (Homo sapiens) CpG-island No: 1348
cgaaacccaaacgtaaatcgaaaatcttaacttaaaaaacgtacatataacttattaaacctaattaaaccgttcgacgataaaaacgaccaattaccgaacgatcttacccttactaatctacgcgaaaaaaatctaatactactaacgatcgatcacgatcaaaacgttttcttcgctattaaaaccgatactaaaattaaccacatcattaacgacgatcaaatcgaaattcttatccttaaacttacgcgtaacgtaatcgaacaaatattcgatttcgacgacgaaaccgacgctaaacgaacgatcgctacgaccaacaataataacaaaaatatcgaaattacgcaccatctacaacaacataccgtcgccgatcgtaaaatctttcttcaatttttatataacaaccacttccgaacgataatccgcgaccgctaccgaaacgataaacaaatcgcataacataactacttcacaaaccgcgaacatatcccgcgcgctaaccacgtcgatacgactaacccgatcgaaaattaacaaatacaccgaacccgtaacgaaaatcacccgaaccccgacttcgacaaccgcttcgaccaaaacgaaacccatcttaccgaaactataattaataatataacgcaccgaatcgatattttcctaaatcgacccgacgataatcaatacgtatttaccgataaatacctaacgcttaaaactttctacgacgcaccaaaccaaatcgataacttcgaacatacgacccaaacccacgtcgccacaaacctaactaccgaaaaccgaaccgaatacctaaataccacgactcttaaacaactcaaaattaacctaaataaccgaatcgcgccacataacctaattcataaccgaaaccacgacgacgataacgtcgataaccaataccaaaataatcaacaaatcgtcgaccataccctaaaccatacgcgccataaaatcgacgataaccgaaacgatcaacaccaaatcgacccacttaaccaattcgatataacccataactacttcgacgacaaaatcgaacaaatccatatacaccgaataacccgacaacgcctacaaaatcaacgaaataataaactcgacaccaccacgaatcataacgacgcgcacctacgcgccgtactccaaaaatcgacgaatcaactcgacgcttttataaacgacaataccgccacccacgccgaaaacgatacgcttacgatacaaccgctacataaacttacctttttccaataaaaacgaacgacgacgttcgaaatacctacgacaaaacgtcgcatatacgaaacgaaataaattaacacaaaatcgaaataaaccgcaacaaaaacaaaaaacgaaaataaatatcaaaaaataaccgactaaaaaacgaccgaaaaaaaaactattacaacgtaatacgacgatactcacgaataccgaattacttaccgtactactaaactcaaaaataaccgaacgtaatatactaaaccttacgcgaaaactactaatacgttttaacgaactaaaacaatttctaaaaaccgaacgcgacgcgctactacgcgaaccgaacatcgaaaccgtaaaatatacacaattacaaacgctactaaaaatcgaccgacgttatctaaataaaaacatcaaacgcgcaaaaactctaaataaaccaacgacgatacgacgttatctcaaaaccatactacgacataaaaccaataaaatattcgaatacctatttctaaacaccaaacaccgaccgttaacgttcgaaatcctattcaaaaacacgataaaccgaacgaatatttacccgcgaaaaataatacgacgaactttactacataacgcgacgacgttaatcctttaccacaaccacccctcaaacaacaataaaccgaaccaaaacgatatacatctaaccttattactaaaacgcgaattaacattaatcgatatacgaatactaaatcacatcatcattaacgataaaaaaccgttatcgataattaaacataaataaattataacctaaaacaaatcaataaaaac

SEQ ID NO: 1349 - DNA, 568 bp, Artificial Sequence
  chemically treated genomic DNA (Homo sapiens) CpG-island No: 1349
ttttgcggagttttcgtcgcgtgcgcgatttatggcggtcgtggaggttaaggatttcgcgcgagtgtaagagttgatcgaggcgcgtggagttaagtcggcggttgattatgtttttgcgtagttcgtcgtggtcgaaggtttggatcgtaagtttggtgcgcgcgtcgtggtcgggaaagcggcgggtagtatggtaatgtcgtttgcggcgttgggttttacgttaaggggagaagcggtatacgttatcgagcggttagtttatggtgagtcgaggtttagtattgcgaagtagtattagtaggaatggaatcggaaggcggcgatttggtgggcgatggtcggtgtggtcggtattatcggcgcgattttggcggcggcggtaatcggttttgttgggttggtagtgtcgattcgtaatcgagtgaagcgcgtgcgcgatttgttggtgatggagtcgggtgtagagttataagcggtaagagacgaaagttcggttttcgggtttttgttttgttacgttaaggacgagttttagcggttaaaggtgttgacgtgcgagaaa

SEQ ID NO: 1350 - DNA, 568 bp, Artificial Sequence
  chemically treated genomic DNA (Homo sapiens) CpG-island No: 1350
tttctcgcacgtcaacacctttaaccgctaaaactcgtccttaacgtaacaaaacaaaaacccgaaaaccgaactttcgtctcttaccgcttataactctacacccgactccatcaccaacaaatcgcgcacgcgcttcactcgattacgaatcgacactaccaacccaacaaaaccgattaccgccgccgccaaaatcgcgccgataataccgaccacaccgaccatcgcccaccaaatcgccgccttccgattccattcctactaatactacttcgcaatactaaacctcgactcaccataaactaaccgctcgataacgtataccgcttctccccttaacgtaaaacccaacgccgcaaacgacattaccatactacccgccgctttcccgaccacgacgcgcgcaccaaacttacgatccaaaccttcgaccacgacgaactacgcaaaaacataatcaaccgccgacttaactccacgcgcctcgatcaactcttacactcgcgcgaaatccttaacctccacgaccgccataaatcgcgcacgcgacgaaaactccgcaaaa

SEQ ID NO: 1351 - DNA, 568 bp, Artificial Sequence
  chemically treated genomic DNA (Homo sapiens) CpG-island No: 1351
tttttcgtacgttaatatttttagtcgttaaaattcgtttttggcgtaataaaataaaagttcggaaatcgggttttcgttttttgtcgtttatggttttgtattcggttttattattaataggtcgcgtacgcgttttattcggttgcggatcgatattgttagtttaataaagtcggttgtcgtcgtcgttaggatcgcgtcgatgatgtcggttatatcggttatcgtttattaggtcgtcgtttttcggttttatttttgttggtattgtttcgtaatgttggatttcggtttattataggttgatcgttcgatggcgtatgtcgtttttttttttggcgtaaaatttagcgtcgtaggcggtattgttatgttgttcgtcgttttttcgattacgacgcgcgtattaggtttgcggtttagattttcggttacggcgagttgcgtaaggatataattagtcgtcgatttggttttacgcgtttcgattagtttttgtattcgcgcgaaatttttggtttttacggtcgttatgaatcgcgtacgcggcgaaggtttcgtaggg

SEQ ID NO: 1352 - DNA, 568 bp, Artificial Sequence
  chemically treated genomic DNA (Homo sapiens) CpG-island No: 1352
ccctacgaaaccttcgccgcgtacgcgattcataacgaccgtaaaaaccaaaaatttcgcgcgaatacaaaaactaatcgaaacgcgtaaaaccaaatcgacgactaattatatccttacgcaactcgccgtaaccgaaaatctaaaccgcaaacctaatacgcgcgtcgtaatcgaaaaaacgacgaacaacataacaataccgcctacgacgctaaattttacgccaaaaaaaaaaacgacatacgccatcgaacgatcaacctataataaaccgaaatccaacattacgaaacaataccaacaaaaataaaaccgaaaaacgacgacctaataaacgataaccgatataaccgacatcatcgacgcgatcctaacgacgacgacaaccgactttattaaactaacaatatcgatccgcaaccgaataaaacgcgtacgcgacctattaataataaaaccgaatacaaaaccataaacgacaaaaaacgaaaacccgatttccgaacttttattttattacgccaaaaacgaattttaacgactaaaaatattaacgtacgaaaaa

SEQ ID NO: 1353 - DNA, 3034 bp, Artificial Sequence
  chemically treated genomic DNA (Homo sapiens) CpG-island No: 1353
ttcgagcgcggtttgcgggttgtcgtgatcgatttggatttttagggtaatgcgttttatacgtttaaggattttgttatcggtttgtatgtaagtaagttgttcggcgttgtttttgtcggcggttggatcgaaatcgtattcgtagtcggcgacggttaggtcgcgcgtttcgtttttatcgagtttaattcggtattggcgaacgtcgaacggttgtcgttggacgacgttcgcgagttgttcggggcgaatattaaggttttggcgaattaaggtttcgacgtgtgtttgatcgatacggtttcgatttttggcgtcggtttggcggtcgtttttttcgcggtcgattatgtgttgttttttatcgagtttgaggcgtatagtatttagggtattaagaagatggttacgattattgcgaacgtgcgttagaagaacgttaagttgtaattttttggtatggtgtttagtaaggtcgatgcgcggaattcgcgttacgcgcgttattaagtcgagttgttggtcgcgtattttaagatgatgatttcggttatcgttggtttgcgtagtagtatcgtcgatgttttcgtattcggtgtgtcggtttggaagattaagaaaacggtcgcgcgtaaggtatcgaaagaggttcgcgttttggttgattacgtgtttacgaagatggagattttttaatgattgcggtttaagttaagattattaagaaaaatatcgttgcggtcgtttaggaagtcgtaggcgcggcgtagtcgttcggtttggggttggatagtatcggcgatttgtcgagttttttggacgtttttgcggcgttttagggcggtttcggttttatcgagttggatttggatttgatcgacgaagattcgtattagtcgcggacggtcgataatttcggttttttttcggagagtatcgcggaaatcggtgttacgattaaagagcgcggggtgaagttatttatttcggtgcgcgagaattaggagtagtcgggtcgttatattattaattacggcgttcgtcgttatcgtggttcgaagtgggtcggtaagaagtttatttcggcgtttatcgataacgattataacgaagtcgattaggttatcgagaatttgtaacgtaacgagttgatttcgcgcgaaattgtcgattttattggtcgcgagttggcgaagggtaagaagaaaggcgatatcgttaaggaaatcggtaagtcgtcggcgtttattatttagtacgttacgttgttggatttgtcggagaagatcgtcgatgcgtttaatatcggtcgcgtgcgcgacgtgatcgtggtgaacgagttggtgacggtttttaagaagcgttcggaggaagtcgaggcgtggtttgacgacgatatttaggaaattacgcgcggtacggttaagttgttgcgcgagtttttggacgagaagggtcgcgattttaatatcgtcgatgtttttaacggttagattgatgtcgagcgtgacgcggaggtcggcgacggttaggacggcgaggacggcgattaggacggtaaggacgttaaggaaaagggcgcgaaggagtcggattcggataagttgaaaaaggttatcgtttaggtcgagtacgacgagcgttttgttcgttttatttttaatcgtcggtcgtcggcggaaggttatgtttggttgaagtacgaggacgacggttaggagttcgaggcgaattttgtcgacgtgaaattggtcgcgtttatcgagggttgatttttaaagatagcggcgcgggttattcgcgtcgtatagataacggtttcgttataaggaggatcgaagaatgaattcgatgttgttttatatcgcgggaggcgtaggcgcggcgttgttgttggttttcgcgattatgttgtttaagttgcgcgagtcgaagaaggaatatcgatcgtagcgtaaggcggcggtttcgacgtcgtagtcggtcgataacgagttgttgcgtatttttcgtcggtcgtcgtaggttagttaattcgagttatttacgacgtcgtcggcgcggcgtattgtttcgtcgagtagcgaataatttagagggaatgacggcgatttcgttacgtcggttttggtggtcggggcgattaatagtattatgttgggttatttggtcggcggttcgttgatcggggttatgttgggcgatgcgttgcggtcggatacgtcgtttgcggcgttcgcggatttttcgtcgtgtttcggtagtagcgatacggatagcggttggatcgatatcggtagtttttgcgattttagttcgttcgatatcgatacgaataattggtgagggcggattatgattgacgaataaaagaaacggtttttgatgttgtaagttattcggcgtagtatttaggtaatgcgtaggggtgtttcggggtcggatagttttaagggttggttgatcggtatcggtattatcgcggcggggtttttggttggcgagttgttgttattttttgttttcggcgtcggtttggttgtgttaggggtttgtattgtcggtttcgtcgtcggttgttggtttaataggaaaggtcgtttatggtcgatagttatttacgattaattggttcgttattagtcgtttaacgagcgggcgtatcgcgatttgtaagagacggtgaaggaacgcggtttcgattgcgatgcggttatggagtggatttatatcgagtaggtcgagtttatgtttttggtgtttattagggaggatttagcgcgcgataagtttttgatcgcgacgcgggtcgatagggtcgaggacgatgcgcgtgcgcgtttcgtcgtgttttattttaagaagcgcggtttcgacgtatgaagaagttcgacgttcgttaatttttttttcgttgattttttgttttcgtcgatcgtgcggggttttttttgtttgttttttagtcgttaaaaaatttgtcgttaagtcgagaattgtttagttaaatttttgcgttgataaggtaggt

SEQ ID NO: 1354 - DNA, 3034 bp, Artificial Sequence
  chemically treated genomic DNA (Homo sapiens) CpG-island No: 1354
acctaccttatcaacgcaaaaatttaactaaacaattctcgacttaacgacaaattttttaacgactaaaaaacaaacaaaaaaaaccccgcacgatcgacgaaaacaaaaaatcaacgaaaaaaaaattaacgaacgtcgaacttcttcatacgtcgaaaccgcgcttcttaaaataaaacacgacgaaacgcgcacgcgcatcgtcctcgaccctatcgacccgcgtcgcgatcaaaaacttatcgcgcgctaaatcctccctaataaacaccaaaaacataaactcgacctactcgatataaatccactccataaccgcatcgcaatcgaaaccgcgttccttcaccgtctcttacaaatcgcgatacgcccgctcgttaaacgactaataacgaaccaattaatcgtaaataactatcgaccataaacgacctttcctattaaaccaacaaccgacgacgaaaccgacaatacaaacccctaacacaaccaaaccgacgccgaaaacaaaaaataacaacaactcgccaaccaaaaaccccgccgcgataataccgataccgatcaaccaacccttaaaactatccgaccccgaaacacccctacgcattacctaaatactacgccgaataacttacaacatcaaaaaccgtttcttttattcgtcaatcataatccgccctcaccaattattcgtatcgatatcgaacgaactaaaatcgcaaaaactaccgatatcgatccaaccgctatccgtatcgctactaccgaaacacgacgaaaaatccgcgaacgccgcaaacgacgtatccgaccgcaacgcatcgcccaacataaccccgatcaacgaaccgccgaccaaataacccaacataatactattaatcgccccgaccaccaaaaccgacgtaacgaaatcgccgtcattccctctaaattattcgctactcgacgaaacaatacgccgcgccgacgacgtcgtaaataactcgaattaactaacctacgacgaccgacgaaaaatacgcaacaactcgttatcgaccgactacgacgtcgaaaccgccgccttacgctacgatcgatattccttcttcgactcgcgcaacttaaacaacataatcgcgaaaaccaacaacaacgccgcgcctacgcctcccgcgatataaaacaacatcgaattcattcttcgatcctccttataacgaaaccgttatctatacgacgcgaataacccgcgccgctatctttaaaaatcaaccctcgataaacgcgaccaatttcacgtcgacaaaattcgcctcgaactcctaaccgtcgtcctcgtacttcaaccaaacataaccttccgccgacgaccgacgattaaaaataaaacgaacaaaacgctcgtcgtactcgacctaaacgataacctttttcaacttatccgaatccgactccttcgcgcccttttccttaacgtccttaccgtcctaatcgccgtcctcgccgtcctaaccgtcgccgacctccgcgtcacgctcgacatcaatctaaccgttaaaaacatcgacgatattaaaatcgcgacccttctcgtccaaaaactcgcgcaacaacttaaccgtaccgcgcgtaatttcctaaatatcgtcgtcaaaccacgcctcgacttcctccgaacgcttcttaaaaaccgtcaccaactcgttcaccacgatcacgtcgcgcacgcgaccgatattaaacgcatcgacgatcttctccgacaaatccaacaacgtaacgtactaaataataaacgccgacgacttaccgatttccttaacgatatcgcctttcttcttacccttcgccaactcgcgaccaataaaatcgacaatttcgcgcgaaatcaactcgttacgttacaaattctcgataacctaatcgacttcgttataatcgttatcgataaacgccgaaataaacttcttaccgacccacttcgaaccacgataacgacgaacgccgtaattaataatataacgacccgactactcctaattctcgcgcaccgaaataaataacttcaccccgcgctctttaatcgtaacaccgatttccgcgatactctccgaaaaaaaaccgaaattatcgaccgtccgcgactaatacgaatcttcgtcgatcaaatccaaatccaactcgataaaaccgaaaccgccctaaaacgccgcaaaaacgtccaaaaaactcgacaaatcgccgatactatccaaccccaaaccgaacgactacgccgcgcctacgacttcctaaacgaccgcaacgatatttttcttaataatcttaacttaaaccgcaatcattaaaaaatctccatcttcgtaaacacgtaatcaaccaaaacgcgaacctctttcgataccttacgcgcgaccgttttcttaatcttccaaaccgacacaccgaatacgaaaacatcgacgatactactacgcaaaccaacgataaccgaaatcatcatcttaaaatacgcgaccaacaactcgacttaataacgcgcgtaacgcgaattccgcgcatcgaccttactaaacaccataccaaaaaattacaacttaacgttcttctaacgcacgttcgcaataatcgtaaccatcttcttaataccctaaatactatacgcctcaaactcgataaaaaacaacacataatcgaccgcgaaaaaaacgaccgccaaaccgacgccaaaaatcgaaaccgtatcgatcaaacacacgtcgaaaccttaattcgccaaaaccttaatattcgccccgaacaactcgcgaacgtcgtccaacgacaaccgttcgacgttcgccaataccgaattaaactcgataaaaacgaaacgcgcgacctaaccgtcgccgactacgaatacgatttcgatccaaccgccgacaaaaacaacgccgaacaacttacttacatacaaaccgataacaaaatccttaaacgtataaaacgcattaccctaaaaatccaaatcgatcacgacaacccgcaaaccgcgctcgaa

SEQ ID NO: 1355 - DNA, 3034 bp, Artificial Sequence
  chemically treated genomic DNA (Homo sapiens) CpG-island No: 1355
atttattttattagcgtaagagtttagttgaatagttttcgatttaacggtaggttttttagcggttgaagggtaggtaaaaaaagtttcgtacggtcggcgggggtaaagggttagcgggaaggggattagcgggcgtcgggtttttttatgcgtcggggtcgcgttttttgggatggagtacgacgaagcgcgtacgcgtatcgttttcggttttatcggttcgcgtcgcggttaggaatttgtcgcgcgttaggttttttttggtgggtattaggggtatgaattcggtttgttcgatgtaggtttattttatgatcgtatcgtagtcgaggtcgcgtttttttatcgttttttgtaggtcgcggtacgttcgttcgttgagcggttggtaacgggttaattggtcgtaaatggttgtcggttatgagcggttttttttgttgagttagtagtcgacgacgaagtcggtaatgtaggtttttggtataattaggtcgacgtcgggggtaggggatggtagtagttcgttaattaggaatttcgtcgcgatgatgtcgatgtcggttaattagtttttgaaattattcggtttcgaaatatttttgcgtattgtttggatgttgcgtcggatagtttgtaatattaggagtcgttttttttgttcgttagttatggttcgtttttattagttgttcgtatcggtgtcggacgaattgaaatcgtaagagttgtcggtatcggtttagtcgttgttcgtgtcgttgttgtcgaagtacggcgaggggttcgcgaacgtcgtagacggcgtattcggtcgtagcgtatcgtttagtatggtttcggttagcgagtcgtcggttaggtagtttagtatggtgttgttggtcgtttcggttattagggtcgacgtgacgaaatcgtcgttattttttttggattgttcgttgttcggcggggtagtgcgtcgcgtcggcggcgtcgtggatggttcgggttggttggtttgcgacggtcggcgaaaggtgcgtagtagttcgttatcgatcggttgcggcgtcggggtcgtcgttttgcgttgcggtcggtgtttttttttcggttcgcgtagtttgaatagtatgatcgcggaaattagtagtaacgtcgcgtttacgtttttcgcgatgtagaatagtatcggatttatttttcggttttttttgtagcggaatcgttgtttgtgcggcgcgggtggttcgcgtcgttgtttttggggattagttttcgatgagcgcgattagttttacgtcggtaaggttcgtttcgaatttttggtcgtcgttttcgtattttaattaggtatagtttttcgtcggcggtcgacggttgaggataaggcgggtagggcgttcgtcgtgttcgatttggacgatggttttttttagtttgttcgggttcggttttttcgcgtttttttttttggcgtttttatcgttttggtcgtcgttttcgtcgttttggtcgtcgtcggttttcgcgttacgttcggtattagtttggtcgttgaaggtatcgacggtgttgggatcgcggtttttttcgtttaggaattcgcgtagtagtttgatcgtgtcgcgcgtgattttttgggtgtcgtcgttaagttacgtttcgatttttttcgggcgttttttgaaggtcgttattagttcgtttattacggttacgtcgcgtacgcggtcggtgttgaacgtatcggcgatttttttcggtaggtttagtagcgtgacgtgttgggtgatgaacgtcggcgatttgtcgatttttttggcgatatcgtttttttttttgtttttcgttagttcgcggttaatgaagtcggtaatttcgcgcggggttagttcgttgcgttgtaggttttcgataatttggtcggtttcgttgtagtcgttgtcgatgaacgtcgggatggattttttgtcggtttatttcgagttacggtagcggcgggcgtcgtgattgatgatatagcggttcggttgtttttggttttcgcgtatcgaaatgggtgattttatttcgcgttttttgatcgtggtatcgattttcgcgatgtttttcggggaaaagtcggggttgtcggtcgttcgcggttgatgcggattttcgtcgattaggtttaggtttagttcgatagggtcggaatcgttttgagacgtcgtaggagcgtttaggaggttcgataggtcgtcgatgttatttaattttaggtcggacggttgcgtcgcgtttgcggttttttgagcggtcgtagcggtgttttttttggtggttttggtttgagtcgtagttattgggaaatttttattttcgtgaatacgtaattagttagggcgcgaatttttttcgatgttttgcgcgcggtcgtttttttgattttttagatcggtatatcggatgcgagggtatcggcgatgttgttgcgtaggttaacggtggtcggaattattattttggggtacgcggttagtagttcggtttggtggcgcgcgtggcgcggatttcgcgtatcgattttgttgggtattatgttaaggaattgtagtttggcgtttttttggcgtacgttcgtaatggtcgtgattatttttttgatgttttggatgttgtacgttttaagttcgatgggggatagtatatagtcggtcgcgaagagggcggtcgttaggtcgacgttaagggtcggggtcgtgtcgattaggtatacgtcgaagttttggttcgttagggttttgatgttcgtttcgaatagttcgcgggcgtcgtttagcgatagtcgttcggcgttcgttagtatcgggttggattcgatgagggcgaggcgcgcggtttggtcgtcgtcggttgcgggtgcggtttcggtttagtcgtcggtagggatagcgtcgaatagtttgtttgtatgtaggtcggtagtaaagtttttgagcgtgtaggacgtattgttttgggggtttaggtcgattacggtaattcgtaagtcgcgttcgaa

SEQ ID NO: 1356 - DNA, 3034 bp, Artificial Sequence
  chemically treated genomic DNA (Homo sapiens) CpG-island No: 1356
ttcgaacgcgacttacgaattaccgtaatcgacctaaacccccaaaacaatacgtcctacacgctcaaaaactttactaccgacctacatacaaacaaactattcgacgctatccctaccgacgactaaaccgaaaccgcacccgcaaccgacgacgaccaaaccgcgcgcctcgccctcatcgaatccaacccgatactaacgaacgccgaacgactatcgctaaacgacgcccgcgaactattcgaaacgaacatcaaaaccctaacgaaccaaaacttcgacgtatacctaatcgacacgaccccgacccttaacgtcgacctaacgaccgccctcttcgcgaccgactatatactatcccccatcgaacttaaaacgtacaacatccaaaacatcaaaaaaataatcacgaccattacgaacgtacgccaaaaaaacgccaaactacaattccttaacataatacccaacaaaatcgatacgcgaaatccgcgccacgcgcgccaccaaaccgaactactaaccgcgtaccccaaaataataattccgaccaccgttaacctacgcaacaacatcgccgataccctcgcatccgatataccgatctaaaaaatcaaaaaaacgaccgcgcgcaaaacatcgaaaaaaattcgcgccctaactaattacgtattcacgaaaataaaaatttcccaataactacgactcaaaccaaaaccaccaaaaaaaacaccgctacgaccgctcaaaaaaccgcaaacgcgacgcaaccgtccgacctaaaattaaataacatcgacgacctatcgaacctcctaaacgctcctacgacgtctcaaaacgattccgaccctatcgaactaaacctaaacctaatcgacgaaaatccgcatcaaccgcgaacgaccgacaaccccgacttttccccgaaaaacatcgcgaaaatcgataccacgatcaaaaaacgcgaaataaaatcacccatttcgatacgcgaaaaccaaaaacaaccgaaccgctatatcatcaatcacgacgcccgccgctaccgtaactcgaaataaaccgacaaaaaatccatcccgacgttcatcgacaacgactacaacgaaaccgaccaaattatcgaaaacctacaacgcaacgaactaaccccgcgcgaaattaccgacttcattaaccgcgaactaacgaaaaacaaaaaaaaaaacgatatcgccaaaaaaatcgacaaatcgccgacgttcatcacccaacacgtcacgctactaaacctaccgaaaaaaatcgccgatacgttcaacaccgaccgcgtacgcgacgtaaccgtaataaacgaactaataacgaccttcaaaaaacgcccgaaaaaaatcgaaacgtaacttaacgacgacacccaaaaaatcacgcgcgacacgatcaaactactacgcgaattcctaaacgaaaaaaaccgcgatcccaacaccgtcgataccttcaacgaccaaactaataccgaacgtaacgcgaaaaccgacgacgaccaaaacgacgaaaacgacgaccaaaacgataaaaacgccaaaaaaaaaaacgcgaaaaaaccgaacccgaacaaactaaaaaaaaccatcgtccaaatcgaacacgacgaacgccctacccgccttatcctcaaccgtcgaccgccgacgaaaaactatacctaattaaaatacgaaaacgacgaccaaaaattcgaaacgaaccttaccgacgtaaaactaatcgcgctcatcgaaaactaatccccaaaaacaacgacgcgaaccacccgcgccgcacaaacaacgattccgctacaaaaaaaaccgaaaaataaatccgatactattctacatcgcgaaaaacgtaaacgcgacgttactactaatttccgcgatcatactattcaaactacgcgaaccgaaaaaaaaacaccgaccgcaacgcaaaacgacgaccccgacgccgcaaccgatcgataacgaactactacgcacctttcgccgaccgtcgcaaaccaaccaacccgaaccatccacgacgccgccgacgcgacgcactaccccgccgaacaacgaacaatccaaaaaaaataacgacgatttcgtcacgtcgaccctaataaccgaaacgaccaacaacaccatactaaactacctaaccgacgactcgctaaccgaaaccatactaaacgatacgctacgaccgaatacgccgtctacgacgttcgcgaacccctcgccgtacttcgacaacaacgacacgaacaacgactaaaccgataccgacaactcttacgatttcaattcgtccgacaccgatacgaacaactaataaaaacgaaccataactaacgaacaaaaaaaacgactcctaatattacaaactatccgacgcaacatccaaacaatacgcaaaaatatttcgaaaccgaataatttcaaaaactaattaaccgacatcgacatcatcgcgacgaaattcctaattaacgaactactaccatcccctacccccgacgtcgacctaattataccaaaaacctacattaccgacttcgtcgtcgactactaactcaacaaaaaaaaccgctcataaccgacaaccatttacgaccaattaacccgttaccaaccgctcaacgaacgaacgtaccgcgacctacaaaaaacgataaaaaaacgcgacctcgactacgatacgatcataaaataaacctacatcgaacaaaccgaattcatacccctaatacccaccaaaaaaaacctaacgcgcgacaaattcctaaccgcgacgcgaaccgataaaaccgaaaacgatacgcgtacgcgcttcgtcgtactccatcccaaaaaacgcgaccccgacgcataaaaaaacccgacgcccgctaatccccttcccgctaaccctttacccccgccgaccgtacgaaactttttttacctacccttcaaccgctaaaaaacctaccgttaaatcgaaaactattcaactaaactcttacgctaataaaataaat

SEQ ID NO: 1357 - DNA, 890 bp, Artificial Sequence
  chemically treated genomic DNA (Homo sapiens) CpG-island No: 1357
aggcgatcgggagaatttttcgatcgtggatgtagtgcgtaaggtcgttcgcgttaatatgaacgacgttagcgtcggtatgcgcgaatggcgacgttagcgtacggcgtaggtcgtttcgttggtagtttaggtgtcggacgcggtgtagtaggtcggtaattaggtcgtggtcgttttttggtaagtcgtttaggtttttgttaatgaatcgttgtaggtagcgtaagtcggttgggatcgtgagcgtaacgagttggaagtcgtgcgcggggagttggtcgacgttttcgaggcgtaggttcgcgagttggaagaagtttaggcgcgcgttatattgttagagtagtaggtcgtcgaggcggtcgagttggtcgtacgttagcggtaagttttggtcgaagtacgtatcgttttggtaggagtcgagtagcgggtcgcgttggcgacgtagcgggtcgacgaggtggagcgtcgagcgtaggagttgcgcgtcgagttggattacgtttattaggacgttcgcgtatttaaagaagagagtcgtaagattttggacgcggttaattaggaaatgtaggcgtttcgcggcgagcgcgacgttattaggcgcgaagcggagagtttgcgtacggagttggtagcggtgaaagcgaaggcgtaggtcgacgtcgaggtttattaggagtaaaggaagttggcggcgtaagaggcggttaggtaggtcgagcgttttacgacggtgtaagtcgagcgtgacgaagcgcggtaagaggtaaaggtagtttaagaagaggtcgttatgttgaggggtcggttagacgcggaaacgagtgggaggaaatataaagcgggaggaaagtaattgataaatcgaacgtagtttatta

SEQ ID NO: 1358 - DNA, 890 bp, Artificial Sequence
  chemically treated genomic DNA (Homo sapiens) CpG-island No: 1358
taataaactacgttcgatttatcaattactttcctcccgctttatatttcctcccactcgtttccgcgtctaaccgacccctcaacataacgacctcttcttaaactacctttacctcttaccgcgcttcgtcacgctcgacttacaccgtcgtaaaacgctcgacctacctaaccgcctcttacgccgccaacttcctttactcctaataaacctcgacgtcgacctacgccttcgctttcaccgctaccaactccgtacgcaaactctccgcttcgcgcctaataacgtcgcgctcgccgcgaaacgcctacatttcctaattaaccgcgtccaaaatcttacgactctcttctttaaatacgcgaacgtcctaataaacgtaatccaactcgacgcgcaactcctacgctcgacgctccacctcgtcgacccgctacgtcgccaacgcgacccgctactcgactcctaccaaaacgatacgtacttcgaccaaaacttaccgctaacgtacgaccaactcgaccgcctcgacgacctactactctaacaatataacgcgcgcctaaacttcttccaactcgcgaacctacgcctcgaaaacgtcgaccaactccccgcgcacgacttccaactcgttacgctcacgatcccaaccgacttacgctacctacaacgattcattaacaaaaacctaaacgacttaccaaaaaacgaccacgacctaattaccgacctactacaccgcgtccgacacctaaactaccaacgaaacgacctacgccgtacgctaacgtcgccattcgcgcataccgacgctaacgtcgttcatattaacgcgaacgaccttacgcactacatccacgatcgaaaaattctcccgatcgcct

SEQ ID NO: 1359 - DNA, 890 bp, Artificial Sequence
  chemically treated genomic DNA (Homo sapiens) CpG-island No: 1359
tagtgaattgcgttcgatttattagttatttttttttcgttttgtgtttttttttattcgttttcgcgtttagtcgattttttaatatagcggtttttttttgggttgtttttgttttttgtcgcgtttcgttacgttcggtttgtatcgtcgtaaagcgttcggtttgtttggtcgttttttgcgtcgttaattttttttgtttttggtgggtttcggcgtcggtttgcgttttcgtttttatcgttgttaatttcgtgcgtaaatttttcgtttcgcgtttggtggcgtcgcgttcgtcgcgaagcgtttgtattttttggttggtcgcgtttagggttttgcggtttttttttttgaatgcgcgggcgttttggtgagcgtagtttagttcggcgcgtagtttttgcgttcgacgttttatttcgtcggttcgttgcgtcgttagcgcggttcgttgttcggtttttgttagggcggtgcgtgtttcggttagggtttgtcgttggcgtgcggttagttcggtcgtttcggcggtttgttgttttagtaatgtaacgcgcgtttgggttttttttagttcgcgggtttgcgtttcgaaggcgtcggttagtttttcgcgtacggtttttaattcgttgcgtttacgattttagtcggtttgcgttgtttgtaacgatttattggtaagggtttgggcggtttgttagagggcggttacggtttggttgtcggtttgttgtatcgcgttcggtatttggattgttagcggggcggtttgcgtcgtgcgttggcgtcgttattcgcgtatgtcggcgttggcgtcgtttatgttgacgcgggcggttttacgtattgtatttacggtcgggaagttttttcggtcgttt

SEQ ID NO: 1360 - DNA, 890 bp, Artificial Sequence
  chemically treated genomic DNA (Homo sapiens) CpG-island No: 1360
aaacgaccgaaaaaacttcccgaccgtaaatacaatacgtaaaaccgcccgcgtcaacataaacgacgccaacgccgacatacgcgaataacgacgccaacgcacgacgcaaaccgccccgctaacaatccaaataccgaacgcgatacaacaaaccgacaaccaaaccgtaaccgccctctaacaaaccgcccaaacccttaccaataaatcgttacaaacaacgcaaaccgactaaaatcgtaaacgcaacgaattaaaaaccgtacgcgaaaaactaaccgacgccttcgaaacgcaaacccgcgaactaaaaaaaacccaaacgcgcgttacattactaaaacaacaaaccgccgaaacgaccgaactaaccgcacgccaacgacaaaccctaaccgaaacacgcaccgccctaacaaaaaccgaacaacgaaccgcgctaacgacgcaacgaaccgacgaaataaaacgtcgaacgcaaaaactacgcgccgaactaaactacgctcaccaaaacgcccgcgcattcaaaaaaaaaaaccgcaaaaccctaaacgcgaccaaccaaaaaatacaaacgcttcgcgacgaacgcgacgccaccaaacgcgaaacgaaaaatttacgcacgaaattaacaacgataaaaacgaaaacgcaaaccgacgccgaaacccaccaaaaacaaaaaaaattaacgacgcaaaaaacgaccaaacaaaccgaacgctttacgacgatacaaaccgaacgtaacgaaacgcgacaaaaaacaaaaacaacccaaaaaaaaaccgctatattaaaaaatcgactaaacgcgaaaacgaataaaaaaaaacacaaaacgaaaaaaaaataactaataaatcgaacgcaattcacta

SEQ ID NO: 1361 - DNA, 1123 bp, Artificial Sequence
  chemically treated genomic DNA (Homo sapiens) CpG-island No: 1361
cgcgggcgtattcgttagagttttagcggttaaaaagggaggcgttttgagtagttatagtagagtcgagcgcgtatcgtggggagatttttcgaaggtggttcgtaacggcgattttggttttttgattaacgagtttgaatattaggttgcgaagtagggcgacgcggaagcggcgtttaatttggtcgagcgtttgatttcggacgatattgttgtttagtttaagacgttgatcggcgacgataagtttcgtatcgttttagttttcgtcgtcgaggcggcggggaataataagatttcggttatgatggcggtcgttttggtcgatcgttttggttttgaggtcgaaacggatattgtgtagcgggagaaggtcgttcgaatcggagtcggtttagattatcgtttggcgtttaattcgattttcgagggggaggtgattttcggttagaagtatatcgttgtcgatgatacgttgacgatgggcggtattattgttttattacgcggttatatcgagaataacggcggtaaggttatggcggcgttcgttatgatcgtttatgaaggcgcgtttgatttggcggttaagtcgaagatgtttgcgggtattaatgagaaatacggtttagtaatggacgtattttggaaggaaatttttggttatggtatcgatcgatttatttaaggagaagtcggatattttcgcgttgtttcgttcgttgacgtaattcgagatcgtatcgttgcggttcgaaatgaagtagttaatcgagtgggggtaagtcgaattgcgacgacggcgcgagtagggtaatagtagttttcggtagtaaagtagtttagcggtaatagcggcgaggatttgttataggcggtttaggaggtcgagacggaatagtaggtttttttagaattcgcgtttatcgagtagatttattagtagatttttgcgttttacgtgtaggtaaagtatgattaggtggagcgtatcgaggatcgtttagaatagttcgtagatcgttagtaggcgcgtttgtagtagttatagtttaatgttttcggtttgttgtttttgtcgcgtataaaggtcgtttggtagtagtagtaggtttaatag

SEQ ID NO: 1362 - DNA, 1123 bp, Artificial Sequence
  chemically treated genomic DNA (Homo sapiens) CpG-island No: 1362
ctattaaacctactactactaccaaacgacctttatacgcgacaaaaacaacaaaccgaaaacattaaactataactactacaaacgcgcctactaacgatctacgaactattctaaacgatcctcgatacgctccacctaatcatactttacctacacgtaaaacgcaaaaatctactaataaatctactcgataaacgcgaattctaaaaaaacctactattccgtctcgacctcctaaaccgcctataacaaatcctcgccgctattaccgctaaactactttactaccgaaaactactattaccctactcgcgccgtcgtcgcaattcgacttacccccactcgattaactacttcatttcgaaccgcaacgatacgatctcgaattacgtcaacgaacgaaacaacgcgaaaatatccgacttctccttaaataaatcgatcgataccataaccaaaaatttccttccaaaatacgtccattactaaaccgtatttctcattaatacccgcaaacatcttcgacttaaccgccaaatcaaacgcgccttcataaacgatcataacgaacgccgccataaccttaccgccgttattctcgatataaccgcgtaataaaacaataataccgcccatcgtcaacgtatcatcgacaacgatatacttctaaccgaaaatcacctccccctcgaaaatcgaattaaacgccaaacgataatctaaaccgactccgattcgaacgaccttctcccgctacacaatatccgtttcgacctcaaaaccaaaacgatcgaccaaaacgaccgccatcataaccgaaatcttattattccccgccgcctcgacgacgaaaactaaaacgatacgaaacttatcgtcgccgatcaacgtcttaaactaaacaacaatatcgtccgaaatcaaacgctcgaccaaattaaacgccgcttccgcgtcgccctacttcgcaacctaatattcaaactcgttaatcaaaaaaccaaaatcgccgttacgaaccaccttcgaaaaatctccccacgatacgcgctcgactctactataactactcaaaacgcctccctttttaaccgctaaaactctaacgaatacgcccgcg

SEQ ID NO: 1363 - DNA, 1123 bp, Artificial Sequence
  chemically treated genomic DNA (Homo sapiens) CpG-island No: 1363
ttgttgggtttgttgttgttgttaggcggtttttgtacgcggtagggatagtaagtcgggggtattggattgtagttgttgtaaacgcgtttgttgacggtttacgagttgttttaggcggttttcgatgcgttttatttggttatgttttgtttgtacgtagagcgtaagggtttgttggtaggtttgttcgatgggcgcggattttaagagggtttgttgtttcgtttcggttttttgggtcgtttgtagtaaattttcgtcgttgttgtcgttggattgttttattgtcggggattgttgttgttttgttcgcgtcgtcgtcgtagttcggtttgtttttattcgattgattgttttatttcgagtcgtagcgatgcgatttcggattgcgttaacggacggggtagcgcggaggtgttcggtttttttttgggtgagtcggtcgatgttatagttaaaggtttttttttaaaatgcgtttattgttggatcgtgttttttattgatgttcgtaagtattttcggtttgatcgttaggttaagcgcgtttttatgggcggttatgacggacgtcgttatgattttgtcgtcgttgttttcgatgtagtcgcgtaatgaggtaatggtgtcgtttatcgttagcgtgttatcgataacgatgtatttttggtcggggattatttttttttcgaaagtcgggttgaacgttaggcgatgatttgaatcggtttcggttcgggcgattttttttcgttgtataatgttcgtttcgattttaaggttaaggcggtcggttagaacgatcgttattatggtcggaattttgttgtttttcgtcgtttcgacggcgaggattggaacgatgcggggtttgtcgtcgtcgattagcgttttgagttgggtaatagtgtcgttcgaaattaggcgttcgattaaattaagcgtcgttttcgcgtcgttttgtttcgtagtttggtatttaggttcgttggttaaagaattaaggtcgtcgttgcgaattattttcgggaagtttttttacggtgcgcgttcggttttgttgtagttgtttaagacgtttttttttttagtcgttaaaattttaacgagtgcgttcgcg

SEQ ID NO: 1364 - DNA, 1123 bp, Artificial Sequence
  chemically treated genomic DNA (Homo sapiens) CpG-island No: 1364
cgcgaacgcactcgttaaaattttaacgactaaaaaaaaaaacgtcttaaacaactacaacaaaaccgaacgcgcaccgtaaaaaaacttcccgaaaataattcgcaacgacgaccttaattctttaaccaacgaacctaaataccaaactacgaaacaaaacgacgcgaaaacgacgcttaatttaatcgaacgcctaatttcgaacgacactattacccaactcaaaacgctaatcgacgacgacaaaccccgcatcgttccaatcctcgccgtcgaaacgacgaaaaacaacaaaattccgaccataataacgatcgttctaaccgaccgccttaaccttaaaatcgaaacgaacattatacaacgaaaaaaaatcgcccgaaccgaaaccgattcaaatcatcgcctaacgttcaacccgactttcgaaaaaaaaataatccccgaccaaaaatacatcgttatcgataacacgctaacgataaacgacaccattacctcattacgcgactacatcgaaaacaacgacgacaaaatcataacgacgtccgtcataaccgcccataaaaacgcgcttaacctaacgatcaaaccgaaaatacttacgaacatcaataaaaaacacgatccaacaataaacgcattttaaaaaaaaacctttaactataacatcgaccgactcacccaaaaaaaaaccgaacacctccgcgctaccccgtccgttaacgcaatccgaaatcgcatcgctacgactcgaaataaaacaatcaatcgaataaaaacaaaccgaactacgacgacgacgcgaacaaaacaacaacaatccccgacaataaaacaatccaacgacaacaacgacgaaaatttactacaaacgacccaaaaaaccgaaacgaaacaacaaaccctcttaaaatccgcgcccatcgaacaaacctaccaacaaacccttacgctctacgtacaaacaaaacataaccaaataaaacgcatcgaaaaccgcctaaaacaactcgtaaaccgtcaacaaacgcgtttacaacaactacaatccaatacccccgacttactatccctaccgcgtacaaaaaccgcctaacaacaacaacaaacccaacaa

SEQ ID NO: 1365 - DNA, 1891 bp, Artificial Sequence
  chemically treated genomic DNA (Homo sapiens) CpG-island No: 1365
atttacgcgtttaagatcgaggaattggcgacgcgtaagatgcgcgcggagtatttcgagttggtcggcgattgggattcgatgcgtgaagtagttcgacggtattaggttttgatgcgtaagtaggagtaggagaagaaataggtttaggagcgcgagcgcgggcgtagttagagtttgggtttgttaaataagtttagttaacgtaaaaataaagttcggtaacgtcgggtttttttatttgcgtttttgcgatttataacgaggtttatattattagggcggtcgcgaataatattatgtcgtcggcgattatgtttattatcgttacgcgtcgcgcgttcgcgattttggtcgcgagttggcggttaaggtcgtcgtcgatttttttgcggatcgtttcggtcgtttgcgcggcgttgttttttattattttcgttattgcgtttttgttggtcgttagggtcgcgtttagtattcgtttcgttttggttttggcgttttcgttttaacgatgggcgattttttttagtttttttttgaacgcggtaaggatttttttttgtttggtcgtattgtcggttatgagtcgggcgttgatggtatgtaggattagtatcgggtcgtcgcggtcgacggcgatgtcgtgtttggtcgtaatttttcggattagttttttaatttggtcgtttatagtacggtcgtcgcgtcgagttgtttaaataggtcgcgtcgtacgattttgaggcgttgtcgcgttatgatcgtgagcgatttatcggttagcgtttggtcgaacgttagtcgtttttgtagtatgtcgttgaaatcgcggtcgtaggttttttttttgagggtcggaatttggatgatggacgatacgcgggttttgttggtcgtgtacgtttttatttgtttaaagtttttgtttttatgttcgataggtttttaatacgggtttagttagattacgaaaagcgtttcggtcgggaattggttggcgagttgggcgaagtcgtttatcgtgtttaggagagtttggtcgtcggtgacgacggtatggatgattagtttatgttttattttttgtagtagagtcggtatttggttgttgatgaggtaatgcgatagaggtacgaacgagttggtatcgttgtcgattattacgttatttttggtcggcgtaattagttcgattagggtgtcgaagttgcgcgagttaatttcgtcgtcggttatgatgtttagtcggcggacgtttagggttttgtagttttcgaacgtcgcgtttatcgggtcggtgtcgatgtataagggtgtttgttttttgtttattttgtattgcgtaatgatcgcggcgatggtcgatttgtcgatttcgtttttgttttgtaaaattatgtgaattttcgttattatagtagattttttttgttcggtgttgggttgaaggtgaagtcggtcggggtcgtagcgggggtcggttttttagttttgtttttttgtttcggtcgtcgtggtttcggcgttttgggtgtcggcgcgggtttcgtagttttggtttgcggtgcgggtatatcggcgggtttggttttgatgtgtcgtttggcgtgcgagcggaacgtttcgtaggagaatttgatttttttcgtttttcgtatgtgtttttaaatggtgacgagcgtatagtcggacgttaacgtcgtttcgatattcgtttttatcgttaggaacgtaatcgtagttttattacgtcggcgttttttggtcgcgcgggatttaatttattcggttagttcgtcggtgtagttttttggtatcgtttttcgtttgtttttttagtttagtaattttttgtatttgtttgtttttagtcggtagatattttata

SEQ ID NO: 1366 - DNA, 1891 bp, Artificial Sequence
  chemically treated genomic DNA (Homo sapiens) CpG-island No: 1366
tataaaatatctaccgactaaaaacaaacaaatacaaaaaattactaaactaaaaaaacaaacgaaaaacgataccaaaaaactacaccgacgaactaaccgaataaattaaatcccgcgcgaccaaaaaacgccgacgtaataaaactacgattacgttcctaacgataaaaacgaatatcgaaacgacgttaacgtccgactatacgctcgtcaccatttaaaaacacatacgaaaaacgaaaaaaatcaaattctcctacgaaacgttccgctcgcacgccaaacgacacatcaaaaccaaacccgccgatatacccgcaccgcaaaccaaaactacgaaacccgcgccgacacccaaaacgccgaaaccacgacgaccgaaacaaaaaaacaaaactaaaaaaccgacccccgctacgaccccgaccgacttcaccttcaacccaacaccgaacaaaaaaaatctactataataacgaaaattcacataattttacaaaacaaaaacgaaatcgacaaatcgaccatcgccgcgatcattacgcaatacaaaataaacaaaaaacaaacacccttatacatcgacaccgacccgataaacgcgacgttcgaaaactacaaaaccctaaacgtccgccgactaaacatcataaccgacgacgaaattaactcgcgcaacttcgacaccctaatcgaactaattacgccgaccaaaaataacgtaataatcgacaacgataccaactcgttcgtacctctatcgcattacctcatcaacaaccaaataccgactctactacaaaaaataaaacataaactaatcatccataccgtcgtcaccgacgaccaaactctcctaaacacgataaacgacttcgcccaactcgccaaccaattcccgaccgaaacgcttttcgtaatctaactaaacccgtattaaaaacctatcgaacataaaaacaaaaactttaaacaaataaaaacgtacacgaccaacaaaacccgcgtatcgtccatcatccaaattccgaccctcaaaaaaaaaacctacgaccgcgatttcaacgacatactacaaaaacgactaacgttcgaccaaacgctaaccgataaatcgctcacgatcataacgcgacaacgcctcaaaatcgtacgacgcgacctatttaaacaactcgacgcgacgaccgtactataaacgaccaaattaaaaaactaatccgaaaaattacgaccaaacacgacatcgccgtcgaccgcgacgacccgatactaatcctacataccatcaacgcccgactcataaccgacaatacgaccaaacaaaaaaaaatccttaccgcgttcaaaaaaaaactaaaaaaaatcgcccatcgttaaaacgaaaacgccaaaaccaaaacgaaacgaatactaaacgcgaccctaacgaccaacaaaaacgcaataacgaaaataataaaaaacaacgccgcgcaaacgaccgaaacgatccgcaaaaaaatcgacgacgaccttaaccgccaactcgcgaccaaaatcgcgaacgcgcgacgcgtaacgataataaacataatcgccgacgacataatattattcgcgaccgccctaataatataaacctcgttataaatcgcaaaaacgcaaataaaaaaacccgacgttaccgaactttatttttacgttaactaaacttatttaacaaacccaaactctaactacgcccgcgctcgcgctcctaaacctatttcttctcctactcctacttacgcatcaaaacctaataccgtcgaactacttcacgcatcgaatcccaatcgccgaccaactcgaaatactccgcgcgcatcttacgcgtcgccaattcctcgatcttaaacgcgtaaat

SEQ ID NO: 1367 - DNA, 1891 bp, Artificial Sequence
  chemically treated genomic DNA (Homo sapiens) CpG-island No: 1367
tgtggaatatttatcgattggaaataggtaaatgtaggaaattattgaattgaggggataggcgagagacgatgttaaagagttatatcgacgagttggtcgagtgggttgaatttcgcgcggttaagaagcgtcggcgtgatgaggttgcggttgcgtttttggcggtgagggcggatgtcgaggcggcgttagcgttcggttatgcgttcgttattatttgggagtatatgcgggaaacggggaaggttaagtttttttacgagacgtttcgttcgtacgttaggcggtatattaaggttaagttcgtcgatgtgttcgtatcgtaggttaaggttgcggaattcgcgtcggtatttaagacgtcggagttacggcggtcgaagtaggggggtaaggttgaaaagtcggttttcgttgcggtttcgatcggttttatttttaatttaatatcggataaaaaggatttattgtaatggcgaaaatttatatggttttgtagggtaagggcggggtcggtaagtcggttatcgtcgcgattattgcgtagtataagatggataaggggtagatatttttgtgtatcgatatcgattcggtgaacgcgacgttcgagggttataaggttttgaacgttcgtcggttgaatattatggtcggcgacgaaattaattcgcgtaatttcgatattttggtcgagttgattgcgtcgattaaggatgacgtggtgatcgataacggtgttagttcgttcgtgtttttgtcgtattattttattagtaattaggtgtcggttttgttgtaagaaatggggtatgagttggttatttatatcgtcgttatcggcggttaggtttttttggatacggtgagcggtttcgtttagttcgttagttagttttcggtcgaagcgtttttcgtggtttggttgaattcgtattgggggtttatcgagtatgagggtaagagttttgagtagatgaaggcgtatacggttaataaggttcgcgtgtcgtttattatttagatttcggtttttaaggaagaaatttacggtcgcgattttagcgatatgttgtaagagcggttgacgttcgattaggcgttggtcgatgaatcgtttacgattatgacgcggtaacgttttaagatcgtgcggcgcggtttgtttgaatagttcgacgcggcggtcgtgttatgagcgattagattgaagagttgattcgggagattgcggttaagtacggtatcgtcgtcggtcgcgacgattcggtgttgattttgtatattattaacgttcggtttatggtcgatagtgcggttaagtaagaggaaatttttgtcgcgtttaaggaagagttggaagggatcgtttatcgttggggcgaggacgttaaggttaaagcggagcggatgttgaacgcggttttggcggttagtaaggacgtaatggcgaaggtaatgaaggatagcgtcgcgtaggcggtcgaagcgattcgtagggaaatcgacgacggttttggtcgttagttcgcggttaaggtcgcggacgcgcggcgcgtggcgatgatgaatatgatcgtcggcggtatggtgttgttcgcggtcgttttggtggtgtgggtttcgttatgaatcgtagaggcgtagatgaaaaagttcggcgttgtcgggttttgtttttgcgttagttgggtttgtttgataggtttaagttttgattgcgttcgcgttcgcgtttttgggtttgtttttttttttgtttttgtttgcgtattagggtttggtgtcgtcgggttgttttacgtatcgaattttagtcgtcggttagttcgggatgtttcgcgcgtattttgcgcgtcgttagtttttcgattttgggcgcgtgaat

SEQ ID NO: 1368 - DNA, 1891 bp, Artificial Sequence
  chemically treated genomic DNA (Homo sapiens) CpG-island No: 1368
attcacgcgcccaaaatcgaaaaactaacgacgcgcaaaatacgcgcgaaacatcccgaactaaccgacgactaaaattcgatacgtaaaacaacccgacgacaccaaaccctaatacgcaaacaaaaacaaaaaaaaaaacaaacccaaaaacgcgaacgcgaacgcaatcaaaacttaaacctatcaaacaaacccaactaacgcaaaaacaaaacccgacaacgccgaactttttcatctacgcctctacgattcataacgaaacccacaccaccaaaacgaccgcgaacaacaccataccgccgacgatcatattcatcatcgccacgcgccgcgcgtccgcgaccttaaccgcgaactaacgaccaaaaccgtcgtcgatttccctacgaatcgcttcgaccgcctacgcgacgctatccttcattaccttcgccattacgtccttactaaccgccaaaaccgcgttcaacatccgctccgctttaaccttaacgtcctcgccccaacgataaacgatcccttccaactcttccttaaacgcgacaaaaatttcctcttacttaaccgcactatcgaccataaaccgaacgttaataatatacaaaatcaacaccgaatcgtcgcgaccgacgacgataccgtacttaaccgcaatctcccgaatcaactcttcaatctaatcgctcataacacgaccgccgcgtcgaactattcaaacaaaccgcgccgcacgatcttaaaacgttaccgcgtcataatcgtaaacgattcatcgaccaacgcctaatcgaacgtcaaccgctcttacaacatatcgctaaaatcgcgaccgtaaatttcttccttaaaaaccgaaatctaaataataaacgacacgcgaaccttattaaccgtatacgccttcatctactcaaaactcttaccctcatactcgataaacccccaatacgaattcaaccaaaccacgaaaaacgcttcgaccgaaaactaactaacgaactaaacgaaaccgctcaccgtatccaaaaaaacctaaccgccgataacgacgatataaataaccaactcataccccatttcttacaacaaaaccgacacctaattactaataaaataatacgacaaaaacacgaacgaactaacaccgttatcgatcaccacgtcatccttaatcgacgcaatcaactcgaccaaaatatcgaaattacgcgaattaatttcgtcgccgaccataatattcaaccgacgaacgttcaaaaccttataaccctcgaacgtcgcgttcaccgaatcgatatcgatacacaaaaatatctaccccttatccatcttatactacgcaataatcgcgacgataaccgacttaccgaccccgcccttaccctacaaaaccatataaattttcgccattacaataaatcctttttatccgatattaaattaaaaataaaaccgatcgaaaccgcaacgaaaaccgacttttcaaccttacccccctacttcgaccgccgtaactccgacgtcttaaataccgacgcgaattccgcaaccttaacctacgatacgaacacatcgacgaacttaaccttaatataccgcctaacgtacgaacgaaacgtctcgtaaaaaaacttaaccttccccgtttcccgcatatactcccaaataataacgaacgcataaccgaacgctaacgccgcctcgacatccgccctcaccgccaaaaacgcaaccgcaacctcatcacgccgacgcttcttaaccgcgcgaaattcaacccactcgaccaactcgtcgatataactctttaacatcgtctctcgcctatcccctcaattcaataatttcctacatttacctatttccaatcgataaatattccaca

SEQ ID NO: 1369 - DNA, 1581 bp, Artificial Sequence
  chemically treated genomic DNA (Homo sapiens) CpG-island No: 1369
aaaggcggcggcggtcggtatgagtttgtcggtttatttgttggtcgtcggttagggttataaaattacgggcgtcgtggattatgagtacgttcgcgagttggttcgtattaatggcgatttgggtcgtttgggcggtttgttgaaattttggtttatcgacgattcgcgtacggcgcggttcggtgatgttacgattttcgttttgttggcgaagatcgaagagaagtaggacgagtttggtaaggttatgatgggcgtggttcgttcgagggtagagttatgatttttttagtcgttaaaacggtcggggggtgcgcgtgattgttaagtacgtttttatgcgttttattaagaagagcgatttcgcggagttggtgaagtatattatcgacgagtaaggtaagatcgagcgtttttttttaatcgttgtcgttagacggttagggaacgtcgataggtttcgtttcgcgtagttcggagtaggacgtcgtacggcgtttatatggattatttatttattttttaggttcgcgagggtttggttgatgcgggcggatattatttcgcgttgttggtcggtgttgtttgcgttgttatcgtttttgtatagttaggtagttataaagttgtcgtttttgtttacgattacgtcgttatcgacgatagcggcgtagttgagtagatcggttaggtcggcgtttttggaacgatgtttttttagttttagttcggtatcgatcgcgcggatgcgggtaaagaggatgaataatagaagcgcgtcgaggttcgcgattgtaatcgtaattgtttggattatcggtattgttttttttggttattggtgttttcgcggaacggggtcgagcgggtcgggtaatacggtttgtatcggcggtgacgtaggtatacgaatcgtattttcggatcggttttcgttatgattcggaacgtatagagcgtttcgaattataggattagatcgattacggtggttcgtagtttttgggcgttgaaaattagcgtaaacgttattaggttcgagaatattattagtttacgattattatttatgaataggttttttcggttgtttgcgcgacggatggggatcgtgcgtagagttatgattaggcgagtcgtttagtcgttatcgtacgtacggtattcgtcgtcgcgatttgtatttggtgtagcgtttcgttgtcgagggtcgcgatttcggtattacgatcgaagaaggtgtttattacgttttgcgcgtcgattagtagcgttattattagaattaggaagattagggttcggaagaaggcgttgagttcgtcgtcgaagattagtacgtcgtcggcgacgacgatgtcgatgatggatagcgcgaaggttatcgggtcggttacggagttgcgtaggttcgttagttagtttttatatggtaagttgtcgtcggtgtttttcgaggttatcgtcggatgcgcggataacgcgagagcgagaacgaagaatacggtaaggtagaataaaatgtcgcgatttatggttagacggaacggaatagtcgttgttattggaaatattttt

SEQ ID NO: 1370 - DNA, 1581 bp, Artificial Sequence
  chemically treated genomic DNA (Homo sapiens) CpG-island No: 1370
aaaaatatttccaataacaacgactattccgttccgtctaaccataaatcgcgacattttattctaccttaccgtattcttcgttctcgctctcgcgttatccgcgcatccgacgataacctcgaaaaacaccgacgacaacttaccatataaaaactaactaacgaacctacgcaactccgtaaccgacccgataaccttcgcgctatccatcatcgacatcgtcgtcgccgacgacgtactaatcttcgacgacgaactcaacgccttcttccgaaccctaatcttcctaattctaataataacgctactaatcgacgcgcaaaacgtaataaacaccttcttcgatcgtaataccgaaatcgcgaccctcgacaacgaaacgctacaccaaatacaaatcgcgacgacgaataccgtacgtacgataacgactaaacgactcgcctaatcataactctacgcacgatccccatccgtcgcgcaaacaaccgaaaaaacctattcataaataataatcgtaaactaataatattctcgaacctaataacgtttacgctaattttcaacgcccaaaaactacgaaccaccgtaatcgatctaatcctataattcgaaacgctctatacgttccgaatcataacgaaaaccgatccgaaaatacgattcgtatacctacgtcaccgccgatacaaaccgtattacccgacccgctcgaccccgttccgcgaaaacaccaataaccaaaaaaaacaataccgataatccaaacaattacgattacaatcgcgaacctcgacgcgcttctattattcatcctctttacccgcatccgcgcgatcgataccgaactaaaactaaaaaaacatcgttccaaaaacgccgacctaaccgatctactcaactacgccgctatcgtcgataacgacgtaatcgtaaacaaaaacgacaactttataactacctaactatacaaaaacgataacaacgcaaacaacaccgaccaacaacgcgaaataatatccgcccgcatcaaccaaaccctcgcgaacctaaaaaataaataaataatccatataaacgccgtacgacgtcctactccgaactacgcgaaacgaaacctatcgacgttccctaaccgtctaacgacaacgattaaaaaaaaacgctcgatcttaccttactcgtcgataatatacttcaccaactccgcgaaatcgctcttcttaataaaacgcataaaaacgtacttaacaatcacgcgcaccccccgaccgttttaacgactaaaaaaatcataactctaccctcgaacgaaccacgcccatcataaccttaccaaactcgtcctacttctcttcgatcttcgccaacaaaacgaaaatcgtaacatcaccgaaccgcgccgtacgcgaatcgtcgataaaccaaaatttcaacaaaccgcccaaacgacccaaatcgccattaatacgaaccaactcgcgaacgtactcataatccacgacgcccgtaattttataaccctaaccgacgaccaacaaataaaccgacaaactcataccgaccgccgccgccttt

SEQ ID NO: 1371 - DNA, 1581 bp, Artificial Sequence
  chemically treated genomic DNA (Homo sapiens) CpG-island No: 1371
aggagtatttttaatgataacggttgtttcgtttcgtttgattatgaatcgcggtattttgttttattttgtcgtgtttttcgttttcgttttcgcgttattcgcgtattcggcgatggtttcggaaggtatcggcggtagtttgttatatgagagttggttgacgaatttgcgtaatttcgtaatcggttcggtggttttcgcgttgtttattatcggtatcgtcgtcgtcggcggcgtgttgattttcggcggcgaatttaacgttttttttcgaattttgatttttttggttttggtgatggcgttgttggtcggcgcgtagaacgtgatgagtatttttttcggtcgtggtgtcgaaatcgcggttttcggtaacggggcgttgtattaggtgtaagtcgcggcggcggatgtcgtgcgtgcggtagcggttggacggttcgtttaattatggttttgcgtacgatttttattcgtcgcgtaggtaatcgagaaaatttgtttatgggtggtgatcgtgaattggtgatgttttcgggtttgatggcgtttgcgttgatttttagcgtttaagagttgcgggttatcgtggtcggtttgattttgtggttcggggcgttttatgcgtttcgaattatggcgaaggtcgattcgaagatgcggttcgtgtatttgcgttatcgtcggtataagtcgtattattcggttcgttcgatttcgtttcgcgagaatattaatagttaagggaagtaatatcgatgatttaagtaattgcgattgtaatcgcgggtttcggcgcgtttttgttgtttattttttttgttcgtattcgcgcggtcgatgtcgaattgaaattgaaaaagtatcgttttaaggacgtcggtttggtcgatttgtttaattacgtcgttgtcgtcgatgacggcgtaatcgtgggtaagaacggtagttttatggttgtttggttgtataagggcgatgataacgtaagtagtatcgattagtagcgcgaagtagtgttcgttcgtattaattaggttttcgcgggtttgggaagtgggtggatgatttatgtggacgtcgtgcggcgttttgtttcgaattacgcggagcggggtttgtcggcgttttttgatcgtttgacggtagcgattgaagaagagcgttcggttttgttttgttcgtcggtgatgtattttattagtttcgcgaagtcgttttttttgatggagcgtatggggacgtgtttggtaattacgcgtatttttcggtcgttttagcggttaaaaaagttatggttttgttttcgggcggattacgtttattatgattttgttaagttcgttttgttttttttcgattttcgttagtagggcgaggatcgtggtattatcgaatcgcgtcgtgcgcgggtcgtcggtgagttagagttttagtaggtcgtttaggcggtttaggtcgttattgatgcgggttagttcgcggacgtgtttatagtttacgacgttcgtgattttgtagttttggtcgacggttagtaggtaggtcgataggtttatgtcggtcgtcgtcgttttt

SEQ ID NO: 1372 - DNA, 1581 bp, Artificial Sequence
  chemically treated genomic DNA (Homo sapiens) CpG-island No: 1372
aaaaacgacgacgaccgacataaacctatcgacctacctactaaccgtcgaccaaaactacaaaatcacgaacgtcgtaaactataaacacgtccgcgaactaacccgcatcaataacgacctaaaccgcctaaacgacctactaaaactctaactcaccgacgacccgcgcacgacgcgattcgataataccacgatcctcgccctactaacgaaaatcgaaaaaaaacaaaacgaacttaacaaaatcataataaacgtaatccgcccgaaaacaaaaccataacttttttaaccgctaaaacgaccgaaaaatacgcgtaattaccaaacacgtccccatacgctccatcaaaaaaaacgacttcgcgaaactaataaaatacatcaccgacgaacaaaacaaaaccgaacgctcttcttcaatcgctaccgtcaaacgatcaaaaaacgccgacaaaccccgctccgcgtaattcgaaacaaaacgccgcacgacgtccacataaatcatccacccacttcccaaacccgcgaaaacctaattaatacgaacgaacactacttcgcgctactaatcgatactacttacgttatcatcgcccttatacaaccaaacaaccataaaactaccgttcttacccacgattacgccgtcatcgacgacaacgacgtaattaaacaaatcgaccaaaccgacgtccttaaaacgatactttttcaatttcaattcgacatcgaccgcgcgaatacgaacaaaaaaaataaacaacaaaaacgcgccgaaacccgcgattacaatcgcaattacttaaatcatcgatattacttcccttaactattaatattctcgcgaaacgaaatcgaacgaaccgaataatacgacttataccgacgataacgcaaatacacgaaccgcatcttcgaatcgaccttcgccataattcgaaacgcataaaacgccccgaaccacaaaatcaaaccgaccacgataacccgcaactcttaaacgctaaaaatcaacgcaaacgccatcaaacccgaaaacatcaccaattcacgatcaccacccataaacaaattttctcgattacctacgcgacgaataaaaatcgtacgcaaaaccataattaaacgaaccgtccaaccgctaccgcacgcacgacatccgccgccgcgacttacacctaatacaacgccccgttaccgaaaaccgcgatttcgacaccacgaccgaaaaaaatactcatcacgttctacgcgccgaccaacaacgccatcaccaaaaccaaaaaaatcaaaattcgaaaaaaaacgttaaattcgccgccgaaaatcaacacgccgccgacgacgacgataccgataataaacaacgcgaaaaccaccgaaccgattacgaaattacgcaaattcgtcaaccaactctcatataacaaactaccgccgataccttccgaaaccatcgccgaatacgcgaataacgcgaaaacgaaaacgaaaaacacgacaaaataaaacaaaataccgcgattcataatcaaacgaaacgaaacaaccgttatcattaaaaatactcct

SEQ ID NO: 1373 - DNA, 718 bp, Artificial Sequence
  chemically treated genomic DNA (Homo sapiens) CpG-island No: 1373
gtattttatcgattaggatgcggtcggggcgtatacgtagcgttgttttgagtagtagcgttatcgagacgtcgatgttggtgtggtattggacggcgttttttgcggcgtattggatttcgtcggtgttttcgatgatgacgacgcgtttagacgggttgaaggcgattattttattgatgatcgcgttgacgagcgtggttttgttcgagttagtatcgttaatgacgaggatgtttcgatgcgtcgcgacggcgtttttaatgatttcgtattgttcgcgggttatgatgttcgtttcgacgtattgttttagcgtgaagatggcgatcgcgcgtttgcggatcgtaaaggttggcgcggttacgatcggcggtaattggtcggtaaagcggttgttatttaaggggaattcgttttttaggatgggcgaatgtcgcgtgatttttttgtcgtggaattcggttatcgtttttataatcgtttgcgattggttgggtcgtatgtcgtagatgtatcgtatcggttcgttaaggcgttcgtgttatattttgtcgttcgcgttgagtatgattttaacggttttcgggtcgttgagcgcggttaataggttcgtatttatgtcgcgttttagtttgcgtttggttcgttttttgatggtttgaaatttttttttttcgtttattttttagtaatttttacgtaataaattattagt

SEQ ID NO: 1374 - DNA, 718 bp, Artificial Sequence
  chemically treated genomic DNA (Homo sapiens) CpG-island No: 1374
actaataatttattacgtaaaaattactaaaaaataaacgaaaaaaaaaaatttcaaaccatcaaaaaacgaaccaaacgcaaactaaaacgcgacataaatacgaacctattaaccgcgctcaacgacccgaaaaccgttaaaatcatactcaacgcgaacgacaaaatataacacgaacgccttaacgaaccgatacgatacatctacgacatacgacccaaccaatcgcaaacgattataaaaacgataaccgaattccacgacaaaaaaatcacgcgacattcgcccatcctaaaaaacgaattccccttaaataacaaccgctttaccgaccaattaccgccgatcgtaaccgcgccaacctttacgatccgcaaacgcgcgatcgccatcttcacgctaaaacaatacgtcgaaacgaacatcataacccgcgaacaatacgaaatcattaaaaacgccgtcgcgacgcatcgaaacatcctcgtcattaacgatactaactcgaacaaaaccacgctcgtcaacgcgatcatcaataaaataatcgccttcaacccgtctaaacgcgtcgtcatcatcgaaaacaccgacgaaatccaatacgccgcaaaaaacgccgtccaataccacaccaacatcgacgtctcgataacgctactactcaaaacaacgctacgtatacgccccgaccgcatcctaatcgataaaatac

SEQ ID NO: 1375 - DNA, 718 bp, Artificial Sequence
  chemically treated genomic DNA (Homo sapiens) CpG-island No: 1375
gttaatgatttgttgcgtaggggttattgaaaagtgagcgggaaagaagagttttagattattaaggagcgggttaagcgtaagttggaacgcgatatgggtgcggatttgttggtcgcgtttaacgattcgaaaatcgttgaagttatgtttaacgcggacggtaaggtgtggtacgaacgttttggcgagtcgatgcggtatatttgcgatatgcggtttagttagtcgtaggcgattatagaaacggtggtcggattttacggtaaagaggttacgcggtattcgtttattttggaaggcgagttttttttggatggtagtcgttttgtcggttaattgtcgtcggtcgtggtcgcgttaatttttgcgattcgtaagcgcgcggtcgttatttttacgttggaatagtacgtcgaggcgggtattatgattcgcgagtaatacgaggttattaaaagcgtcgtcgcggcgtatcgaaatattttcgttattggcggtattggttcgggtaagattacgttcgttaacgcgattattaatgaaatggtcgtttttaattcgtttgagcgcgtcgttattatcgaggatatcggcgaaatttagtgcgtcgtagagaacgtcgtttaatattatattagtatcgacgtttcgatgacgttgttgtttaagataacgttgcgtatgcgtttcgatcgtattttggtcggtgaggtat

SEQ ID NO: 1376 - DNA, 718 bp, Artificial Sequence
  chemically treated genomic DNA (Homo sapiens) CpG-island No: 1376
atacctcaccgaccaaaatacgatcgaaacgcatacgcaacgttatcttaaacaacaacgtcatcgaaacgtcgatactaatataatattaaacgacgttctctacgacgcactaaatttcgccgatatcctcgataataacgacgcgctcaaacgaattaaaaacgaccatttcattaataatcgcgttaacgaacgtaatcttacccgaaccaataccgccaataacgaaaatatttcgatacgccgcgacgacgcttttaataacctcgtattactcgcgaatcataatacccgcctcgacgtactattccaacgtaaaaataacgaccgcgcgcttacgaatcgcaaaaattaacgcgaccacgaccgacgacaattaaccgacaaaacgactaccatccaaaaaaaactcgccttccaaaataaacgaataccgcgtaacctctttaccgtaaaatccgaccaccgtttctataatcgcctacgactaactaaaccgcatatcgcaaatataccgcatcgactcgccaaaacgttcgtaccacaccttaccgtccgcgttaaacataacttcaacgattttcgaatcgttaaacgcgaccaacaaatccgcacccatatcgcgttccaacttacgcttaacccgctccttaataatctaaaactcttctttcccgctcacttttcaataacccctacgcaacaaatcattaac

SEQ ID NO: 1377 - DNA, 1446 bp, Artificial Sequence
  chemically treated genomic DNA (Homo sapiens) CpG-island No: 1377
gcgataagtaggagcgtatcgatttttttcgtattaagtgttttggtttttaggtcgaggtttacggtaagtatttgggtaaggggtcgttggtattcgtgtagggtaagattcggaatattaagtacgagaaggacggttagacggtttacgggatcgattttattgtcgataaggtggattatttggatattaaggtattaggcgggttaaattaggaataagggtatattgtttcggcgtgagtcggggtaatttcgtaaggagggtgaatgaatcggacgtttgatcggaaggtatataggtaagaattgatcgacgcggggtttttcgtcgaggatgtcgaaattatcgtaagtcgtatcgttatgcgtgcgtttcgcgaaattttttagttcgtcggttcgatggtttagtaagttacggttaagatcgagcgcgatagcgtgtaattggttttttttgttttgttcgcgttatcggtcgtcgtggagcgttcgcgtcgtttcgaataggaggcggtaggtttggcgaagtcgatgattatcgatacgcgaggaattatgacgattaagaagcgaaaaatcgtcggcgaggatttggtaaaataggttagcgaggttaagtaggtcgcgttgttgaaatatacgaagtagtagattaaggaaatgtagttttttttgttcgatattgcgtcgtggtcggatacgatgcgagcgatgttaaacgatacggttcgttttgttttgtttattacgcgtaataagaaaatttcgcgcgaggcgttgtaaaataaggttattttttacgttaataaggacgtgaagattatttatatcggcgtcgagttgcgggtcgacgatgacgaattggtgtggtagtaggtgttggagtacgcgaagcgtatttttatcggcgagtcgattatttttacgttttacgagttttgttaggatttgggttggtcgattaatggtcggtattatacgaaggtcgaggaatgtttgtcgcgtttataggcgacggcgatgggttttacgttcgatcgcgttgggtatttggaatcggtgtcgttgttgtatcgttttcgcgttttggatcgtggtaagaaaacgtttcgttgttaggttttgatcgacgaggaaatcgtcgtgttgtttgttggcgattattatacgaaatttatatgggagaagtatcgtaagttgtcgtcgacggttcgacggatgttcgattattttagttcgtatcgggagtcgtattcgtttaagttggaaatttttcgttttatgtgcggatcggattttattcgcgtgaagaagtggcgcgagtaggtcggcgaagtttgcgaagagttgcgaggtagcggtttggtggaatacgtttgggttaatgatgatttggtgtattgtaaacgttagggttttgtggggttagtttcggttg

SEQ ID NO: 1378 - DNA, 1446 bp, Artificial Sequence
  chemically treated genomic DNA (Homo sapiens) CpG-island No: 1378
caaccgaaactaaccccacaaaaccctaacgtttacaatacaccaaatcatcattaacccaaacgtattccaccaaaccgctacctcgcaactcttcgcaaacttcgccgacctactcgcgccacttcttcacgcgaataaaatccgatccgcacataaaacgaaaaatttccaacttaaacgaatacgactcccgatacgaactaaaataatcgaacatccgtcgaaccgtcgacgacaacttacgatacttctcccatataaatttcgtataataatcgccaacaaacaacacgacgatttcctcgtcgatcaaaacctaacaacgaaacgttttcttaccacgatccaaaacgcgaaaacgatacaacaacgacaccgattccaaatacccaacgcgatcgaacgtaaaacccatcgccgtcgcctataaacgcgacaaacattcctcgaccttcgtataataccgaccattaatcgaccaacccaaatcctaacaaaactcgtaaaacgtaaaaataatcgactcgccgataaaaatacgcttcgcgtactccaacacctactaccacaccaattcgtcatcgtcgacccgcaactcgacgccgatataaataatcttcacgtccttattaacgtaaaaaataaccttattttacaacgcctcgcgcgaaattttcttattacgcgtaataaacaaaacaaaacgaaccgtatcgtttaacatcgctcgcatcgtatccgaccacgacgcaatatcgaacaaaaaaaactacatttccttaatctactacttcgtatatttcaacaacgcgacctacttaacctcgctaacctattttaccaaatcctcgccgacgatttttcgcttcttaatcgtcataattcctcgcgtatcgataatcatcgacttcgccaaacctaccgcctcctattcgaaacgacgcgaacgctccacgacgaccgataacgcgaacaaaacaaaaaaaaccaattacacgctatcgcgctcgatcttaaccgtaacttactaaaccatcgaaccgacgaactaaaaaatttcgcgaaacgcacgcataacgatacgacttacgataatttcgacatcctcgacgaaaaaccccgcgtcgatcaattcttacctatataccttccgatcaaacgtccgattcattcaccctccttacgaaattaccccgactcacgccgaaacaatatacccttattcctaatttaacccgcctaataccttaatatccaaataatccaccttatcgacaataaaatcgatcccgtaaaccgtctaaccgtccttctcgtacttaatattccgaatcttaccctacacgaataccaacgaccccttacccaaatacttaccgtaaacctcgacctaaaaaccaaaacacttaatacgaaaaaaatcgatacgctcctacttatcgc

SEQ ID NO: 1379 - DNA, 1446 bp, Artificial Sequence
  chemically treated genomic DNA (Homo sapiens) CpG-island No: 1379
tagtcggaattgattttataaggttttagcgtttgtaatgtattaggttattattgatttaggcgtgttttattaggtcgttgtttcgtaatttttcgtaggtttcgtcgatttgttcgcgttatttttttacgcgggtggaattcgattcgtatatgaggcggaaggtttttagtttgagcgggtacggttttcggtgcgagttgaaatagtcgaatattcgtcgggtcgtcggcgatagtttgcggtattttttttatatgaatttcgtgtagtggtcgttagtaaatagtacgacgattttttcgtcgattaggatttggtaacgggacgtttttttgttacggtttaggacgcggaagcggtgtagtagcgatatcgattttaggtgtttaacgcggtcggacgtgaagtttatcgtcgtcgtttgtaggcgcgataggtatttttcggttttcgtgtaatatcggttattgatcgattagtttaggttttggtaaagttcgtagaacgtgaaggtgatcggttcgtcgataggggtgcgtttcgcgtattttaatatttgttgttatattagttcgttatcgtcggttcgtagttcgacgtcggtgtaggtgatttttacgtttttgttgacgtggaaaatgattttgttttgtagcgtttcgcgcgggatttttttgttgcgcgtggtgaatagggtagagcgggtcgtgtcgtttggtatcgttcgtatcgtgttcggttacggcgtaatatcgaataaggaaagttgtatttttttgatttgttgtttcgtgtgttttagtaacgcggtttgtttggtttcgttgatttgttttgttaggttttcgtcggcggtttttcgttttttggtcgttatagtttttcgcgtgtcgatggttatcgatttcgttaaatttgtcgttttttgttcgagacgacgcgaacgttttacggcggtcgatggcgcgggtagggtagggggagttagttgtacgttgtcgcgttcgattttggtcgtagtttgttggattatcgagtcgacggattggaaggtttcgcggggcgtacgtatgacggtgcggtttgcgatggtttcggtattttcggcggaaaatttcgcgtcgattagtttttgtttgtatgtttttcggttaaacgttcgatttatttattttttttgcgggattgtttcgatttacgtcggggtaatgtgtttttatttttgatttgattcgtttggtgttttggtgtttagataatttattttatcggtaatgaagtcggtttcgtagatcgtttggtcgtttttttcgtatttggtatttcgaattttgttttgtacgaatattagcgattttttgtttaaatatttgtcgtgggtttcggtttgagagttaaaatatttgatgcggaagaagtcggtgcgtttttgtttgtcgt

SEQ ID NO: 1380 - DNA, 1446 bp, Artificial Sequence
  chemically treated genomic DNA (Homo sapiens) CpG-island No: 1380
acgacaaacaaaaacgcaccgacttcttccgcatcaaatattttaactctcaaaccgaaacccacgacaaatatttaaacaaaaaatcgctaatattcgtacaaaacaaaattcgaaataccaaatacgaaaaaaacgaccaaacgatctacgaaaccgacttcattaccgataaaataaattatctaaacaccaaaacaccaaacgaatcaaatcaaaaataaaaacacattaccccgacgtaaatcgaaacaatcccgcaaaaaaaataaataaatcgaacgtttaaccgaaaaacatacaaacaaaaactaatcgacgcgaaattttccgccgaaaataccgaaaccatcgcaaaccgcaccgtcatacgtacgccccgcgaaaccttccaatccgtcgactcgataatccaacaaactacgaccaaaatcgaacgcgacaacgtacaactaactccccctaccctacccgcgccatcgaccgccgtaaaacgttcgcgtcgtctcgaacaaaaaacgacaaatttaacgaaatcgataaccatcgacacgcgaaaaactataacgaccaaaaaacgaaaaaccgccgacgaaaacctaacaaaacaaatcaacgaaaccaaacaaaccgcgttactaaaacacacgaaacaacaaatcaaaaaaatacaactttccttattcgatattacgccgtaaccgaacacgatacgaacgataccaaacgacacgacccgctctaccctattcaccacgcgcaacaaaaaaatcccgcgcgaaacgctacaaaacaaaatcattttccacgtcaacaaaaacgtaaaaatcacctacaccgacgtcgaactacgaaccgacgataacgaactaatataacaacaaatattaaaatacgcgaaacgcacccctatcgacgaaccgatcaccttcacgttctacgaactttaccaaaacctaaactaatcgatcaataaccgatattacacgaaaaccgaaaaatacctatcgcgcctacaaacgacgacgataaacttcacgtccgaccgcgttaaacacctaaaatcgatatcgctactacaccgcttccgcgtcctaaaccgtaacaaaaaaacgtcccgttaccaaatcctaatcgacgaaaaaatcgtcgtactatttactaacgaccactacacgaaattcatataaaaaaaataccgcaaactatcgccgacgacccgacgaatattcgactatttcaactcgcaccgaaaaccgtacccgctcaaactaaaaaccttccgcctcatatacgaatcgaattccacccgcgtaaaaaaataacgcgaacaaatcgacgaaacctacgaaaaattacgaaacaacgacctaataaaacacgcctaaatcaataataacctaatacattacaaacgctaaaaccttataaaatcaattccgacta

SEQ ID NO: 1381 - DNA, 644 bp, Artificial Sequence
  chemically treated genomic DNA (Homo sapiens) CpG-island No: 1381
gtcgggcggggtcgcggcgacggtaggcgttgtgtagtcgttgatggtcgtgtttatttttgtcgttttgttaggtagttcgatacgattgatggcggttttgggggttatttgcggaattgcgggcgtggcgttgttggtgttgatattaaacgtagcgttagattttgtcggcgtcgtagcgggtttggcgggggcggtttttatggcgttcggaatcgtgttgattcgtaagtggtaatttttcgtgtttttgtttatttttatcgtttggtaattggcggtcggaggatttttgttcgttttagtagttttagtgtttgattcgttaatttcgatgtttataggaattaatgttttcggtttggcgtggttcggtttgatcggagcgggtttaatttattttttttggtttcgggggatttcgcgattcgaatttatagttgtttttttattgggtttttttagttcggggatcgtcgtgttgttaggatggttgtttttggattagacgttgagtgcgttttaaattatcggcgttttgttcgtgatcgggagtatttggttgggttaacgttttaatcgtatttttagggcgcgtatagtttgtcggaagtcgttttgattcgtatggtataggttta

SEQ ID NO: 1382 - DNA, 644 bp, Artificial Sequence
  chemically treated genomic DNA (Homo sapiens) CpG-island No: 1382
taaacctataccatacgaatcaaaacgacttccgacaaactatacgcgccctaaaaatacgattaaaacgttaacccaaccaaatactcccgatcacgaacaaaacgccgataatttaaaacgcactcaacgtctaatccaaaaacaaccatcctaacaacacgacgatccccgaactaaaaaaacccaataaaaaaacaactataaattcgaatcgcgaaatcccccgaaaccaaaaaaaataaattaaacccgctccgatcaaaccgaaccacgccaaaccgaaaacattaattcctataaacatcgaaattaacgaatcaaacactaaaactactaaaacgaacaaaaatcctccgaccgccaattaccaaacgataaaaataaacaaaaacacgaaaaattaccacttacgaatcaacacgattccgaacgccataaaaaccgcccccgccaaacccgctacgacgccgacaaaatctaacgctacgtttaatatcaacaccaacaacgccacgcccgcaattccgcaaataacccccaaaaccgccatcaatcgtatcgaactacctaacaaaacgacaaaaataaacacgaccatcaacgactacacaacgcctaccgtcgccgcgaccccgcccgac

SEQ ID NO: 1383 - DNA, 644 bp, Artificial Sequence
  chemically treated genomic DNA (Homo sapiens) CpG-island No: 1383
taggtttatgttatgcgggttaaggcgattttcggtaagttatacgcgttttaggagtgcggttggaacgttggtttagttagatattttcgattacgagtaggacgtcgatgatttgaagcgtatttagcgtttgatttaagaataattattttagtaatacggcggttttcgggttgagaaagtttagtaaggaaataattgtaggttcgagtcgcgagatttttcggaattaaaggaagtaggttaaattcgtttcgattaggtcgagttacgttaggtcgagaatattggtttttgtaggtatcgggattggcggattaaatattaaagttattggaacgagtagaagtttttcggtcgttagttgttaggcggtaaaggtgagtagaggtacgggaggttgttatttgcgggttagtacggtttcgaacgttatggaaatcgttttcgttaggttcgttgcgacgtcgataggatttagcgttgcgtttggtgttaatattaatagcgttacgttcgtagtttcgtaaatagtttttaggatcgttattaatcgtatcgggttatttagtagagcggtagagatgaatacgattattagcggttgtatagcgtttatcgtcgtcgcgatttcgttcggt

SEQ ID NO: 1384 - DNA, 644 bp, Artificial Sequence
  chemically treated genomic DNA (Homo sapiens) CpG-island No: 1384
accgaacgaaatcgcgacgacgataaacgctatacaaccgctaataatcgtattcatctctaccgctctactaaataacccgatacgattaataacgatcctaaaaactatttacgaaactacgaacgtaacgctattaatattaacaccaaacgcaacgctaaatcctatcgacgtcgcaacgaacctaacgaaaacgatttccataacgttcgaaaccgtactaacccgcaaataacaacctcccgtacctctactcacctttaccgcctaacaactaacgaccgaaaaacttctactcgttccaataactttaatatttaatccgccaatcccgatacctacaaaaaccaatattctcgacctaacgtaactcgacctaatcgaaacgaatttaacctacttcctttaattccgaaaaatctcgcgactcgaacctacaattatttccttactaaactttctcaacccgaaaaccgccgtattactaaaataattattcttaaatcaaacgctaaatacgcttcaaatcatcgacgtcctactcgtaatcgaaaatatctaactaaaccaacgttccaaccgcactcctaaaacgcgtataacttaccgaaaatcgccttaacccgcataacataaaccta

SEQ ID NO: 1385 - DNA, 1448 bp, Artificial Sequence
  chemically treated genomic DNA (Homo sapiens) CpG-island No: 1385
tttttttttatatatatatttacgcgtttttattcgtttgatgtcgttttttttttatatatatttacgtatttttattcgtttgatttcgttttttttttttttatatatatttacgcgtttttattcgtttgatttcgttttttttttatatatatatatttttattcgtttgatttcgttttttttttttatatacgcgtttttattcgtttgatttcgttttttttttttatatatatatatttttattcgtttgatttcgttttttttttatatatatttacgtatttttattcgtttgatttcgttttttttttttatatatatatttacgcgtttttattcgtttgatgtcgttttttttttatatatatttacgtatttttattcgtttgatttcgttttttttttttatatatatatttacgcgtttttattcgtttgatgtcgttttttttttatatatatttacgtatttttattcgtttgatttcgttttttttttttttatatatatttacgcgtttttattcgtttgatttcgttttttttttatatatatatatttttattcgtttgatttcgttttttttttttatatatacgcgtttttattcgtttgatttcgttttttttttatatatatatatttttattcgtttgatttcgttttttttttatatatatttacgtatttttattcgtttgatttcgttttttttttttatatatatattcgcgtttttattcgtttgatgcggttttttttttatatatatatttacgcgtttttatttgtttgatttcgttttttttttttatatatagatttacgcgtttttattcgtttgattttattttttttttttatatatatttatgcgttgttattcgtttgatttcgttttttttttatatatatttacgtttttattcgtttgatttcgttttttttttatatatattcgcgtttttattcgtttgatttcgttttttttttatatatatatatttttattcgtttgatttcgttttttttttatatatatttacgtatttttattcgtttgatttcgttttttttttttatatatatattcgcgtttttattcgtttgatgcggttttttttttatatatatatttacgcgtttttatttgtttgatttcgttttttttttttatatatagatttacgcgtttttattcgtttgattttattttttttttttatatatatttatgcgttgttattcgtttgatttcgttttttttttatatatatttacgtttttattcgtttgatttcgttttttttttttttatatatatttacgtttttattcgcgtgatttcgttttttttttatatagatttatgtatttttattcgtttgattttattttttttttttatatatatttatacgttgttattcgtttgatt

SEQ ID NO: 1386 - DNA, 1448 bp, Artificial Sequence
  chemically treated genomic DNA (Homo sapiens) CpG-island No: 1386
aatcaaacgaataacaacgtataaatatatataaaaaaaaaaaataaaatcaaacgaataaaaatacataaatctatataaaaaaaaaacgaaatcacgcgaataaaaacgtaaatatatataaaaaaaaaaaaaacgaaatcaaacgaataaaaacgtaaatatatataaaaaaaaaacgaaatcaaacgaataacaacgcataaatatatataaaaaaaaaaaataaaatcaaacgaataaaaacgcgtaaatctatatataaaaaaaaaaaacgaaatcaaacaaataaaaacgcgtaaatatatatataaaaaaaaaaccgcatcaaacgaataaaaacgcgaatatatatataaaaaaaaaaaacgaaatcaaacgaataaaaatacgtaaatatatataaaaaaaaaacgaaatcaaacgaataaaaatatatatatataaaaaaaaaacgaaatcaaacgaataaaaacgcgaatatatataaaaaaaaaacgaaatcaaacgaataaaaacgtaaatatatataaaaaaaaaacgaaatcaaacgaataacaacgcataaatatatataaaaaaaaaaaataaaatcaaacgaataaaaacgcgtaaatctatatataaaaaaaaaaaacgaaatcaaacaaataaaaacgcgtaaatatatatataaaaaaaaaaccgcatcaaacgaataaaaacgcgaatatatatataaaaaaaaaaaacgaaatcaaacgaataaaaatacgtaaatatatataaaaaaaaaacgaaatcaaacgaataaaaatatatatatataaaaaaaaaacgaaatcaaacgaataaaaacgcgtatatataaaaaaaaaaaacgaaatcaaacgaataaaaatatatatatataaaaaaaaaacgaaatcaaacgaataaaaacgcgtaaatatatataaaaaaaaaaaaaacgaaatcaaacgaataaaaatacgtaaatatatataaaaaaaaaacgacatcaaacgaataaaaacgcgtaaatatatatataaaaaaaaaaaacgaaatcaaacgaataaaaatacgtaaatatatataaaaaaaaaacgacatcaaacgaataaaaacgcgtaaatatatatataaaaaaaaaaaacgaaatcaaacgaataaaaatacgtaaatatatataaaaaaaaaacgaaatcaaacgaataaaaatatatatatataaaaaaaaaaaacgaaatcaaacgaataaaaacgcgtatataaaaaaaaaaaacgaaatcaaacgaataaaaatatatatatataaaaaaaaaacgaaatcaaacgaataaaaacgcgtaaatatatataaaaaaaaaaaaaacgaaatcaaacgaataaaaatacgtaaatatatataaaaaaaaaacgacatcaaacgaataaaaacgcgtaaatatatatataaaaaaaaa

SEQ ID NO: 1387 - DNA, 1448 bp, Artificial Sequence
  chemically treated genomic DNA (Homo sapiens) CpG-island No: 1387
aattaagcgaatgatagcgtgtgagtgtgtgtggagagagagaatggaattaggcgaatgagagtgtatgagtttgtgtggagagagaacggaattacgcgaatgagaacgtgagtgtgtgtggagggagagagaacggaattaagcgaatgagagcgtgagtgtgtgtggagagagaacggaattaagcgaatgatagcgtatgagtgtgtgtggagggagagaatggaattaagcgaatgagagcgcgtgagtttgtgtgtggagggagagaacggaattaggtaaatgagagcgcgtgagtgtgtgtgtggagagagaatcgtattaagcgaatgagagcgcgagtgtgtgtgtggagggagagaacggaattaggcgaataagagtgcgtgagtgtgtgtggagagagaacggaattaggcgaatgagagtgtgtgtgtgtggagagagaacggaattaagcgaatgagagcgcgagtgtgtgtggagagagaacggaattaagcgaatgagagcgtgagtgtgtgtggagagagaacggaattaagcgaatgatagcgtatgagtgtgtgtggagggagagaatggaattaagcgaatgagagcgcgtgagtttgtgtgtggagggagagaacggaattaggtaaatgagagcgcgtgagtgtgtgtgtggagagagaatcgtattaagcgaatgagagcgcgagtgtgtgtgtggagggagagaacggaattaggcgaataagagtgcgtgagtgtgtgtggagagagaacggaattaggcgaatgagagtgtgtgtgtgtggagagagaacggaattaggcgaatgagagcgcgtgtgtgtggagagagagaacggaattaggcgaatgagagtgtgtgtgtgtggagagagaacggaattaggcgaatgagagcgcgtgagtgtgtgtggagagaaggagaacggaattaggcgaatgagagtgcgtgagtgtgtgtggagagagaacggtattaagcgaatgagagcgcgtgagtgtgtgtgtggagggagagaacggaattaggcgaatgagagtgcgtgagtgtgtgtggagagagaacggtattaagcgaatgagagcgcgtgagtgtgtgtgtggagggagagaacggaattaggcgaataagagtgcgtgagtgtgtgtggagagagaacggaattaggcgaatgagagtgtgtgtgtgtggagagagagaacggaattaggcgaatgagagcgcgtgtgtggagagagagaacggaattaggcgaatgagagtgtgtgtgtgtggagagagaacggaattaggcgaatgagagcgcgtgagtgtgtgtggagagaaggagaacggaattaggcgaatgagagtgcgtgagtgtgtgtggagagagaacggtattaagcgaatgagagcgcgtgagtgtgtgtgtggagggaga

SEQ ID NO: 1388 - DNA, 1448 bp, Artificial Sequence
  chemically treated genomic DNA (Homo sapiens) CpG-island No: 1388
tctccctccacacacacactcacgcgctctcattcgcttaataccgttctctctccacacacactcacgcactctcattcgcctaattccgttctccttctctccacacacactcacgcgctctcattcgcctaattccgttctctctccacacacacacactctcattcgcctaattccgttctctctctccacacacgcgctctcattcgcctaattccgttctctctctccacacacacacactctcattcgcctaattccgttctctctccacacacactcacgcactcttattcgcctaattccgttctctccctccacacacacactcacgcgctctcattcgcttaataccgttctctctccacacacactcacgcactctcattcgcctaattccgttctctccctccacacacacactcacgcgctctcattcgcttaataccgttctctctccacacacactcacgcactctcattcgcctaattccgttctccttctctccacacacactcacgcgctctcattcgcctaattccgttctctctccacacacacacactctcattcgcctaattccgttctctctctccacacacacgcgctctcattcgcctaattccgttctctctccacacacacacactctcattcgcctaattccgttctctctccacacacactcacgcactcttattcgcctaattccgttctctccctccacacacacactcgcgctctcattcgcttaatacgattctctctccacacacacactcacgcgctctcatttacctaattccgttctctccctccacacacaaactcacgcgctctcattcgcttaattccattctctccctccacacacactcatacgctatcattcgcttaattccgttctctctccacacacactcacgctctcattcgcttaattccgttctctctccacacacactcgcgctctcattcgcttaattccgttctctctccacacacacacactctcattcgcctaattccgttctctctccacacacactcacgcactcttattcgcctaattccgttctctccctccacacacacactcgcgctctcattcgcttaatacgattctctctccacacacacactcacgcgctctcatttacctaattccgttctctccctccacacacaaactcacgcgctctcattcgcttaattccattctctccctccacacacactcatacgctatcattcgcttaattccgttctctctccacacacactcacgctctcattcgcttaattccgttctctctccctccacacacactcacgttctcattcgcgtaattccgttctctctccacacaaactcatacactctcattcgcctaattccattctctctctccacacacactcacacgctatcattcgcttaatt

SEQ ID NO: 1389 - DNA, 580 bp, Artificial Sequence
  chemically treated genomic DNA (Homo sapiens) CpG-island No: 1389
ttttttttatatatatttacgtttttattcgtttgatttcgttttttttttttatatatatttacgcgtttttattcgtttgatttcgttttttttttttatatatattcgtgtttttattcgtttgattttattttttttttttatatatatttacgcgttgttattcgtttgattttattttttttttttatatatatttacgcgtttttattcgtttgattttgttttttttttttatatatatttacgcgttgttattcgtttgatttcgttttttttttatatatatttacgtttttattcgtttgatttcgttttttttttttttatatatatttacgcgtttttattcgtttgatttcgttttttttttttatatatattcgcgtttttattcgtttgattttattttttttttttatatatattcgcgtttttattcgtttgattttattttttttttttatatatatttacgcgttgttattcgtttgatttcgttttttttttttatatatattcgtgtttttattcgtttgatttcgttttttttttttatatatattcgtgtttttat

SEQ ID NO: 1390 - DNA, 580 bp, Artificial Sequence
  chemically treated genomic DNA (Homo sapiens) CpG-island No: 1390
ataaaaacacgaatatatataaaaaaaaaaaacgaaatcaaacgaataaaaacacgaatatatataaaaaaaaaaaacgaaatcaaacgaataacaacgcgtaaatatatataaaaaaaaaaaataaaatcaaacgaataaaaacgcgaatatatataaaaaaaaaaaataaaatcaaacgaataaaaacgcgaatatatataaaaaaaaaaaacgaaatcaaacgaataaaaacgcgtaaatatatataaaaaaaaaaaaaacgaaatcaaacgaataaaaacgtaaatatatataaaaaaaaaacgaaatcaaacgaataacaacgcgtaaatatatataaaaaaaaaaaacaaaatcaaacgaataaaaacgcgtaaatatatataaaaaaaaaaaataaaatcaaacgaataacaacgcgtaaatatatataaaaaaaaaaaataaaatcaaacgaataaaaacacgaatatatataaaaaaaaaaaacgaaatcaaacgaataaaaacgcgtaaatatatataaaaaaaaaaaacgaaatcaaacgaataaaaacgtaaatatatataaaaaaaa

SEQ ID NO: 1391 - DNA, 580 bp, Artificial Sequence
  chemically treated genomic DNA (Homo sapiens) CpG-island No: 1391
atgagaatacgagtgtgtgtggagagagagaacggaattaggcgaatgagaatacgagtgtgtgtggagagagagaacggaattaagcgaatgatagcgcgtgagtgtgtgtggagggagagaatggaattaagcgaatgagaacgcgagtgtgtgtggagggagagaatggaattaagcgaatgagaacgcgagtgtgtgtggagggagagaacggaattaagcgaatgagagcgcgtgagtgtgtgtggagagagagagaacggaattaagcgaatgagagcgtgagtgtgtgtggagagagaacggaattaagcgaatgatagcgcgtgagtgtgtgtggagagagagaatagaattaagcgaatgagagcgcgtgagtgtgtgtggagagagagaatggaattaagcgaatgatagcgcgtgagtgtgtgtggagggagagaatggaattaagcgaatgagaatacgagtgtgtgtggagggagagaacggaattaagcgaatgagagcgcgtgagtgtgtgtggagagagagaacggaattaagcgaatgagagcgtgagtgtgtgtggagagag

SEQ ID NO: 1392 - DNA, 580 bp, Artificial Sequence
  chemically treated genomic DNA (Homo sapiens) CpG-island No: 1392
ctctctccacacacactcacgctctcattcgcttaattccgttctctctctccacacacactcacgcgctctcattcgcttaattccgttctctccctccacacacactcgtattctcattcgcttaattccattctctccctccacacacactcacgcgctatcattcgcttaattccattctctctctccacacacactcacgcgctctcattcgcttaattctattctctctctccacacacactcacgcgctatcattcgcttaattccgttctctctccacacacactcacgctctcattcgcttaattccgttctctctctctccacacacactcacgcgctctcattcgcttaattccgttctctccctccacacacactcgcgttctcattcgcttaattccattctctccctccacacacactcgcgttctcattcgcttaattccattctctccctccacacacactcacgcgctatcattcgcttaattccgttctctctctccacacacactcgtattctcattcgcctaattccgttctctctctccacacacactcgtattctcat

SEQ ID NO: 1393 - DNA, 903 bp, Artificial Sequence
  chemically treated genomic DNA (Homo sapiens) CpG-island No: 1393
ggagatcgttaagtacgatcgcgagatggtgtagtaggtcgagttgggttagcgcgtgggttttttttcgtcgtcgtcgtcgtcgtcgtaggttatttcggttatcgttacgttgtagtaggcggcggttatgagtttttgttcgtaggtggcgcggtcgttcgtggggtcgttggcgttcggttcgtcgcgtttcgtgcgtcgttcgttttcggggttcgtatttgtcgtcgttttattcgggttttcgtttttcgttagtttttcgggcgcgttcgttagttttcgggtatcgcggatttcgttttacggcggtttgttcgtcgttttttttgttgggttcgttttgttcgcgcgtcgtttgagtcgcgcgtcgcgtttattgttcgtttcgtagttttcgttgttttacggcgttttcggtttcgcggtttttatacgttcggttagtagttttatatcgcgtttggggtttacgttcgttgttcgggtcgtcgcgtttagttcggatcgtagggattcggttttattcggcgtcgtcggcggtttggatttttaggatttcgcgcgttcgcgtttttcgtttaatttgtgattttcgtcgatcgtttcgcgggtttaggcgggtcgggggcggggtcgttatttagattaaagttatgttattgcgttgtttcggtcgttagttcgtttagaagttatagacgagacgtaggtagtcgtagttggacggacgggtagggtcggcggggtagtttttttcgcgttttcggtcgtttttttttatcgtttcgcgtttatttttatcgtttttgttttcggcggcggtttcgcgtgcgagggggttttttttatttcggtgttttagtttttttagttgtaagatagggacggggcggttta

SEQ ID NO: 1394 - DNA, 903 bp, Artificial Sequence
  chemically treated genomic DNA (Homo sapiens) CpG-island No: 1394
taaaccgccccgtccctatcttacaactaaaaaaactaaaacaccgaaataaaaaaaaccccctcgcacgcgaaaccgccgccgaaaacaaaaacgataaaaataaacgcgaaacgataaaaaaaaacgaccgaaaacgcgaaaaaaactaccccgccgaccctacccgtccgtccaactacgactacctacgtctcgtctataacttctaaacgaactaacgaccgaaacaacgcaataacataactttaatctaaataacgaccccgcccccgacccgcctaaacccgcgaaacgatcgacgaaaatcacaaattaaacgaaaaacgcgaacgcgcgaaatcctaaaaatccaaaccgccgacgacgccgaataaaaccgaatccctacgatccgaactaaacgcgacgacccgaacaacgaacgtaaaccccaaacgcgatataaaactactaaccgaacgtataaaaaccgcgaaaccgaaaacgccgtaaaacaacgaaaactacgaaacgaacaataaacgcgacgcgcgactcaaacgacgcgcgaacaaaacgaacccaacaaaaaaaacgacgaacaaaccgccgtaaaacgaaatccgcgatacccgaaaactaacgaacgcgcccgaaaaactaacgaaaaacgaaaacccgaataaaacgacgacaaatacgaaccccgaaaacgaacgacgcacgaaacgcgacgaaccgaacgccaacgaccccacgaacgaccgcgccacctacgaacaaaaactcataaccgccgcctactacaacgtaacgataaccgaaataacctacgacgacgacgacgacgacgaaaaaaaacccacgcgctaacccaactcgacctactacaccatctcgcgatcgtacttaacgatctcc

SEQ ID NO: 1395 - DNA, 903 bp, Artificial Sequence
  chemically treated genomic DNA (Homo sapiens) CpG-island No: 1395
tgggtcgtttcgtttttgttttatagttgggggaattgaggtatcgaggtgaagggagttttttcgtacgcgaggtcgtcgtcgggggtaggggcgatgggggtgggcgcggggcgatgaggggggacggtcgggggcgcggagggggttgtttcgtcggttttgttcgttcgtttaattacggttatttacgtttcgtttatggtttttgggcggattggcggtcggggtagcgtaatggtatggttttggtttggatgacggtttcgttttcggttcgtttgggttcgcggggcggtcggcgagggttataagttggacgagaggcgcgagcgcgcggagttttgggggtttaggtcgtcggcggcgtcgggtgaggtcgagtttttgcggttcgggttgggcgcggcggttcgggtagcgggcgtgggttttaagcgcggtgtggagttgttggtcgggcgtgtggaggtcgcggggtcgggggcgtcgtgaggtagcgagggttgcgaggcggatagtgggcgcgacgcgcggtttaggcggcgcgcgggtagggcgggtttagtaaggggggcggcgggtaggtcgtcgtagggcgaggttcgcggtgttcgggggttggcgggcgcgttcggggggttggcggggggcgggggttcgggtgaggcggcggtaggtgcgggtttcgggggcgggcggcgtacgaggcgcggcgagtcgagcgttagcggttttacgagcggtcgcgttatttgcgggtagaagtttatggtcgtcgtttgttgtagcgtggcgatggtcgaggtgatttgcggcggcggcggcggcggcgggaagaggtttacgcgttgatttagttcggtttgttgtattatttcgcggtcgtatttgacgattttt

SEQ ID NO: 1396 - DNA, 903 bp, Artificial Sequence
  chemically treated genomic DNA (Homo sapiens) CpG-island No: 1396
aaaaatcgtcaaatacgaccgcgaaataatacaacaaaccgaactaaatcaacgcgtaaacctcttcccgccgccgccgccgccgccgcaaatcacctcgaccatcgccacgctacaacaaacgacgaccataaacttctacccgcaaataacgcgaccgctcgtaaaaccgctaacgctcgactcgccgcgcctcgtacgccgcccgcccccgaaacccgcacctaccgccgcctcacccgaacccccgccccccgccaaccccccgaacgcgcccgccaacccccgaacaccgcgaacctcgccctacgacgacctacccgccgccccccttactaaacccgccctacccgcgcgccgcctaaaccgcgcgtcgcgcccactatccgcctcgcaaccctcgctacctcacgacgcccccgaccccgcgacctccacacgcccgaccaacaactccacaccgcgcttaaaacccacgcccgctacccgaaccgccgcgcccaacccgaaccgcaaaaactcgacctcacccgacgccgccgacgacctaaacccccaaaactccgcgcgctcgcgcctctcgtccaacttataaccctcgccgaccgccccgcgaacccaaacgaaccgaaaacgaaaccgtcatccaaaccaaaaccataccattacgctaccccgaccgccaatccgcccaaaaaccataaacgaaacgtaaataaccgtaattaaacgaacgaacaaaaccgacgaaacaaccccctccgcgcccccgaccgtcccccctcatcgccccgcgcccacccccatcgcccctacccccgacgacgacctcgcgtacgaaaaaactcccttcacctcgatacctcaattcccccaactataaaacaaaaacgaaacgaccca

SEQ ID NO: 1397 - DNA, 969 bp, Artificial Sequence
  chemically treated genomic DNA (Homo sapiens) CpG-island No: 1397
aggagacgtatattcgtgatagtgaatacgggacgtatgtgggcgagagacggggcggtggttggatgagttttttatagttacggatggaggatgggagttgcgggtggatcgggttgaaataagcgtgttcggagttgtcgggggaggagggtggatagaggatttgggggcgtcgggggaggaagtagttcggcggatgtaggggaggggggaacgtggggaacgcgggggttttggggtaggggagaagggagaagtaggacgggtagggggcgcgggggaggagagcgggcgggggacgtgggggcgttaggggagggggaggggaggaggaagacgggtagggggcgttaggggagggggaggggaggaggaagacgggtagggggcgcgggggcgtcgggggagggcgcgggggcgtcgggggagggcgcgggggtgtcgggagggcggggaatgcgggggtttcgtttttatcgttaagggttggttcgcggagtttaggatgttatttattatttttttcgtaaaggttaggcgttttcgtagcggttttcgtttttttaatttcgtgagattgattaggtggattttgagttaatttaggtcgtgcgggtcgagcgggcggttttgggcgaattttagtagggttcgcgttacgtcgttgtttaggtggttgaagtgcggcgggtaggggtaggtgcggtcgcggaagtttatgttgtgcggtagttagaagacgcggtttcgtaggtgttgcgttagcgagaggcggtatagcgttttcgttcgtaggttgtgtatttttcgggttattttttggtagtgcgttagtttacggcgtagttcggttttgcgggcgggcgcggcgttgtgcggtaggtgggtttcgggcggttggggcgtttcggagggcggggtcggtacgtttagttgggggtagtttttggtttggaagagttgtag

SEQ ID NO: 1398 - DNA, 969 bp, Artificial Sequence
  chemically treated genomic DNA (Homo sapiens) CpG-island No: 1398
ctacaactcttccaaaccaaaaactacccccaactaaacgtaccgaccccgccctccgaaacgccccaaccgcccgaaacccacctaccgcacaacgccgcgcccgcccgcaaaaccgaactacgccgtaaactaacgcactaccaaaaaataacccgaaaaatacacaacctacgaacgaaaacgctataccgcctctcgctaacgcaacacctacgaaaccgcgtcttctaactaccgcacaacataaacttccgcgaccgcacctacccctacccgccgcacttcaaccacctaaacaacgacgtaacgcgaaccctactaaaattcgcccaaaaccgcccgctcgacccgcacgacctaaattaactcaaaatccacctaatcaatctcacgaaattaaaaaaacgaaaaccgctacgaaaacgcctaacctttacgaaaaaaataataaataacatcctaaactccgcgaaccaacccttaacgataaaaacgaaacccccgcattccccgccctcccgacacccccgcgccctcccccgacgcccccgcgccctcccccgacgcccccgcgccccctacccgtcttcctcctcccctccccctcccctaacgccccctacccgtcttcctcctcccctccccctcccctaacgcccccacgtcccccgcccgctctcctcccccgcgccccctacccgtcctacttctcccttctcccctaccccaaaacccccgcgttccccacgttcccccctcccctacatccgccgaactacttcctcccccgacgcccccaaatcctctatccaccctcctcccccgacaactccgaacacgcttatttcaacccgatccacccgcaactcccatcctccatccgtaactataaaaaactcatccaaccaccgccccgtctctcgcccacatacgtcccgtattcactatcacgaatatacgtctcct

SEQ ID NO: 1399 - DNA, 969 bp, Artificial Sequence
  chemically treated genomic DNA (Homo sapiens) CpG-island No: 1399
ttgtagtttttttaggttaagggttgtttttagttaggcgtgtcggtttcgtttttcgaggcgttttagtcgttcgaggtttatttgtcgtatagcgtcgcgttcgttcgtaaggtcgagttgcgtcgtgagttggcgtattgttagaaggtggttcgggagatgtatagtttgcgggcggaggcgttgtatcgtttttcgttggcgtagtatttgcgggatcgcgttttttggttgtcgtataatatggattttcgcggtcgtatttatttttgttcgtcgtattttaattatttgggtagcgacgtggcgcgggttttgttggagttcgtttagggtcgttcgttcggttcgtacggtttggattggtttaagatttatttggttaattttacggggttgaagaagcgggagtcgttgcggaagcgtttggtttttgcggaggaggtgatggatgatattttggatttcgcggattaatttttgacggtaggggcggggttttcgtatttttcgttttttcggtattttcgcgttttttttcggcgttttcgcgttttttttcggcgttttcgcgttttttgttcgttttttttttttttttttttttttttggcgttttttgttcgttttttttttttttttttttttttttggcgtttttacgtttttcgttcgtttttttttttcgcgttttttgttcgttttgtttttttttttttttttgttttagggttttcgcgttttttacgttttttttttttttgtattcgtcgagttgttttttttttcggcgtttttaggttttttgtttatttttttttttcggtagtttcggatacgtttgttttagttcggtttattcgtagtttttattttttattcgtggttatggagaatttatttagttatcgtttcgtttttcgtttatatgcgtttcgtgtttattattacgggtgtgcgtttttt

SEQ ID NO: 1400 - DNA, 969 bp, Artificial Sequence
  chemically treated genomic DNA (Homo sapiens) CpG-island No: 1400
aaaaaacgcacacccgtaataataaacacgaaacgcatataaacgaaaaacgaaacgataactaaataaattctccataaccacgaataaaaaataaaaactacgaataaaccgaactaaaacaaacgtatccgaaactaccgaaaaaaaaaaataaacaaaaaacctaaaaacgccgaaaaaaaaaacaactcgacgaatacaaaaaaaaaaaaaacgtaaaaaacgcgaaaaccctaaaacaaaaaaaaaaaaaaaaacaaaacgaacaaaaaacgcgaaaaaaaaaaacgaacgaaaaacgtaaaaacgccaaaaaaaaaaaaaaaaaaaaaaaaaacgaacaaaaaacgccaaaaaaaaaaaaaaaaaaaaaaaaaacgaacaaaaaacgcgaaaacgccgaaaaaaaacgcgaaaacgccgaaaaaaaacgcgaaaataccgaaaaaacgaaaaatacgaaaaccccgcccctaccgtcaaaaattaatccgcgaaatccaaaatatcatccatcacctcctccgcaaaaaccaaacgcttccgcaacgactcccgcttcttcaaccccgtaaaattaaccaaataaatcttaaaccaatccaaaccgtacgaaccgaacgaacgaccctaaacgaactccaacaaaacccgcgccacgtcgctacccaaataattaaaatacgacgaacaaaaataaatacgaccgcgaaaatccatattatacgacaaccaaaaaacgcgatcccgcaaatactacgccaacgaaaaacgatacaacgcctccgcccgcaaactatacatctcccgaaccaccttctaacaatacgccaactcacgacgcaactcgaccttacgaacgaacgcgacgctatacgacaaataaacctcgaacgactaaaacgcctcgaaaaacgaaaccgacacgcctaactaaaaacaacccttaacctaaaaaaactacaa

SEQ ID NO: 1401 - DNA, 800 bp, Artificial Sequence
  chemically treated genomic DNA (Homo sapiens) CpG-island No: 1401
ttttgattgtcgtcgtttttttgtttttgttttttttcgggtttttgtttttttttaggtttttgcggttcgcgttttatattttcgttttcgtaattcgaggttttagttcgttcggggattcggttgatttacggatacgtttcgcgagataaataataaacgcgcggaggtcgagcgcggagtttcgtacggtcgcgtttttgtgtatttggttttcgttttcgagacgttttattggtcggcgttttagtttggtttcgtttaagtggatttcgttttcgtttcgaggtattttattggtcggcgttttcgttttagcgaattcggtttcgttttcgaggcgttttattggtttcgtcgcgcgaaggtagagtcgcggacgttcgggagcgacgagcgcgtagcgaatcgggtgtcgggttatgcgtcgtcgtttgtggttgggtttggtttggttgttgttggcgcgggcgtcggacgtcgcgggaatttcgagcgcgtcgcggggatcgcgtagttattcgtatttggagggcgacgtgcgttggcggcgtttttttttttttatttatttttttttgcgcgtggatttcggcggtcgcgtgtagggtattcgttggcgttacggttaggatagtgagtgcggggcggcgggggtttggggtggggaggcggcgggtgacggtaacgcggtcgtcgtttttacggtgatttgcgttcgcgggggagtttcggaggtttttttgtgtagtttcggttttagttttcgtggtttgtgagatgggtgtagtttgttt

SEQ ID NO: 1402 - DNA, 800 bp, Artificial Sequence
  chemically treated genomic DNA (Homo sapiens) CpG-island No: 1402
aaacaaactacacccatctcacaaaccacgaaaactaaaaccgaaactacacaaaaaaacctccgaaactcccccgcgaacgcaaatcaccgtaaaaacgacgaccgcgttaccgtcacccgccgcctccccaccccaaacccccgccgccccgcactcactatcctaaccgtaacgccaacgaataccctacacgcgaccgccgaaatccacgcgcaaaaaaaaataaataaaaaaaaaaaaacgccgccaacgcacgtcgccctccaaatacgaataactacgcgatccccgcgacgcgctcgaaattcccgcgacgtccgacgcccgcgccaacaacaaccaaaccaaacccaaccacaaacgacgacgcataacccgacacccgattcgctacgcgctcgtcgctcccgaacgtccgcgactctaccttcgcgcgacgaaaccaataaaacgcctcgaaaacgaaaccgaattcgctaaaacgaaaacgccgaccaataaaatacctcgaaacgaaaacgaaatccacttaaacgaaaccaaactaaaacgccgaccaataaaacgtctcgaaaacgaaaaccaaatacacaaaaacgcgaccgtacgaaactccgcgctcgacctccgcgcgtttattatttatctcgcgaaacgtatccgtaaatcaaccgaatccccgaacgaactaaaacctcgaattacgaaaacgaaaatataaaacgcgaaccgcaaaaacctaaaaaaaaacaaaaacccgaaaaaaaacaaaaacaaaaaaacgacgacaatcaaaa

SEQ ID NO: 1403 - DNA, 800 bp, Artificial Sequence
  chemically treated genomic DNA (Homo sapiens) CpG-island No: 1403
aggtaggttgtatttattttatagattacggaaattgaggtcgaggttgtatagaggagttttcgggattttttcgcgggcgtaggttatcgtgaagacggcggtcgcgttgtcgttattcgtcgtttttttattttaggttttcgtcgtttcgtatttattgttttggtcgtggcgttagcgggtgttttgtacgcggtcgtcgggatttacgcgtaggaagaagtgagtggaggagaagaggcgtcgttagcgtacgtcgttttttaggtgcgggtagttgcgcggttttcgcgacgcgttcggggttttcgcggcgttcggcgttcgcgttagtagtagttaggttaggtttagttataggcggcggcgtatgattcggtattcggttcgttgcgcgttcgtcgttttcgggcgttcgcggttttgttttcgcgcggcggggttaatggggcgtttcgggggcggggtcgggttcgttggggcggggacgtcggttaatggggtgtttcggggcgggggcggggtttatttgggcgggattaggttagggcgtcggttaatgggacgtttcgggggcgggggttaggtgtataggggcgcggtcgtgcgggatttcgcgttcggttttcgcgcgtttgttgtttgtttcgcggggcgtgttcgtgagttagtcgagttttcgggcgggttaggatttcgggttgcgggggcgggagtgtgagacgcgggtcgtagagatttggagggagatagagattcggagggagatagagatagaaagacggcggtagttaaga

SEQ ID NO: 1404 - DNA, 800 bp, Artificial Sequence
  chemically treated genomic DNA (Homo sapiens) CpG-island No: 1404
tcttaactaccgccgtctttctatctctatctccctccgaatctctatctccctccaaatctctacgacccgcgtctcacactcccgcccccgcaacccgaaatcctaacccgcccgaaaactcgactaactcacgaacacgccccgcgaaacaaacaacaaacgcgcgaaaaccgaacgcgaaatcccgcacgaccgcgcccctatacacctaacccccgcccccgaaacgtcccattaaccgacgccctaacctaatcccgcccaaataaaccccgcccccgccccgaaacaccccattaaccgacgtccccgccccaacgaacccgaccccgcccccgaaacgccccattaaccccgccgcgcgaaaacaaaaccgcgaacgcccgaaaacgacgaacgcgcaacgaaccgaataccgaatcatacgccgccgcctataactaaacctaacctaactactactaacgcgaacgccgaacgccgcgaaaaccccgaacgcgtcgcgaaaaccgcgcaactacccgcacctaaaaaacgacgtacgctaacgacgcctcttctcctccactcacttcttcctacgcgtaaatcccgacgaccgcgtacaaaacacccgctaacgccacgaccaaaacaataaatacgaaacgacgaaaacctaaaataaaaaaacgacgaataacgacaacgcgaccgccgtcttcacgataacctacgcccgcgaaaaaatcccgaaaactcctctatacaacctcgacctcaatttccgtaatctataaaataaatacaacctacct

SEQ ID NO: 1405 - DNA, 828 bp, Artificial Sequence
  chemically treated genomic DNA (Homo sapiens) CpG-island No: 1405
gaggcgttatcggtaagttcgagagaatgagcgtttttttagttaggatagtttttgggtattttaatttcgtatttttttatttcgtttcgtagttcgggtgtgaatgtaagggattggggcggcggggcgggggcgggggcgggggcgagggggtagcgcggagttgagatttcgttcggttattagggtttttttgggagaacgtgagaaatgatgttttcggttttagaatgatggattagtttgggatagtgggcggggggcggggggcgtcggggaattagggtcgatgtagttgtgtagacgtcgggttagttatttaaatttcgtttttttcgttcgggacgttttcgcgatttttcgtttaaagtcgttcgcggagtataaagcgagcgcggttatcgatttagttatcgcgttcgcgcgttttcggtagggcgcgaggggaagcgtcggcggtagggagttttagagttagtttttaagtagtttagtatatagcgcggagggtagtcgtcggcgggttggcgggatagcgggtaggaaaggcgatagacgcgtggttatttatcgtcggcgttgggttcggtgttttacgttcgtttggggatagtcggggacgtacggcgggggtttatcggggtagggaattttttcgcggagagtcggagggttgtattggttttagttggagacgttttttttttttttttttttttcgtcgtcgtcgtcgtcgttttttgggaaaaagaaaaaaaaaaaaaaaagttttgggtagtagttgttggaaagtttttgttaagttattttttagcgtcgttgttt

SEQ ID NO: 1406 - DNA, 828 bp, Artificial Sequence
  chemically treated genomic DNA (Homo sapiens) CpG-island No: 1406
aaacaacgacgctaaaaaataacttaacaaaaactttccaacaactactacccaaaacttttttttttttttttctttttcccaaaaaacgacgacgacgacgacgaaaaaaaaaaaaaaaaaaaaaacgtctccaactaaaaccaatacaaccctccgactctccgcgaaaaaattccctaccccgataaacccccgccgtacgtccccgactatccccaaacgaacgtaaaacaccgaacccaacgccgacgataaataaccacgcgtctatcgcctttcctacccgctatcccgccaacccgccgacgactaccctccgcgctatatactaaactacttaaaaactaactctaaaactccctaccgccgacgcttcccctcgcgccctaccgaaaacgcgcgaacgcgataactaaatcgataaccgcgctcgctttatactccgcgaacgactttaaacgaaaaatcgcgaaaacgtcccgaacgaaaaaaacgaaatttaaataactaacccgacgtctacacaactacatcgaccctaattccccgacgccccccgccccccgcccactatcccaaactaatccatcattctaaaaccgaaaacatcatttctcacgttctcccaaaaaaaccctaataaccgaacgaaatctcaactccgcgctaccccctcgcccccgcccccgcccccgccccgccgccccaatcccttacattcacacccgaactacgaaacgaaataaaaaaatacgaaattaaaatacccaaaaactatcctaactaaaaaaacgctcattctctcgaacttaccgataacgcctc

SEQ ID NO: 1407 - DNA, 828 bp, Artificial Sequence
  chemically treated genomic DNA (Homo sapiens) CpG-island No: 1407
ggatagcggcgttgggaggtggtttagtagagattttttagtaattgttgtttaggattttttttttttttttttttttttttaggaggcggcgacggcggcggcggggggagaggaagagaaagaagcgtttttagttgaagttaatgtagtttttcggtttttcgcgaagaagttttttgtttcgatgagttttcgtcgtgcgttttcgattatttttaggcgggcgtggggtatcgggtttagcgtcgacggtaagtggttacgcgtttgtcgttttttttgttcgttgtttcgttagttcgtcggcggttgtttttcgcgttgtgtgttaaattatttaagggttggttttggggttttttgtcgtcggcgttttttttcgcgttttgtcgggggcgcgcggacgcgatggttgggtcggtggtcgcgttcgttttgtgtttcgcgggcggttttgagcgaggggtcgcgggagcgtttcgggcgggggaagcggggtttgaatgattaattcggcgtttgtatagttgtatcggttttaatttttcggcgtttttcgtttttcgtttattgttttaggttaatttattattttggggtcgaaaatattattttttacgtttttttagagaaattttagtagtcgggcggaattttaatttcgcgttgttttttcgttttcgttttcgttttcgtttcgtcgttttagttttttgtatttatattcgagttgcgggacggggtagaggggtgcggagttggagtgtttaggaattgttttaattagaagggcgtttattttttcgggtttgtcggtggcgtttt

SEQ ID NO: 1408 - DNA, 828 bp, Artificial Sequence
  chemically treated genomic DNA (Homo sapiens) CpG-island No: 1408
aaaacgccaccgacaaacccgaaaaaataaacgcccttctaattaaaacaattcctaaacactccaactccgcacccctctaccccgtcccgcaactcgaatataaatacaaaaaactaaaacgacgaaacgaaaacgaaaacgaaaacgaaaaaacaacgcgaaattaaaattccgcccgactactaaaatttctctaaaaaaacgtaaaaaataatattttcgaccccaaaataataaattaacctaaaacaataaacgaaaaacgaaaaacgccgaaaaattaaaaccgatacaactatacaaacgccgaattaatcattcaaaccccgcttcccccgcccgaaacgctcccgcgacccctcgctcaaaaccgcccgcgaaacacaaaacgaacgcgaccaccgacccaaccatcgcgtccgcgcgcccccgacaaaacgcgaaaaaaaacgccgacgacaaaaaaccccaaaaccaacccttaaataatttaacacacaacgcgaaaaacaaccgccgacgaactaacgaaacaacgaacaaaaaaaacgacaaacgcgtaaccacttaccgtcgacgctaaacccgataccccacgcccgcctaaaaataatcgaaaacgcacgacgaaaactcatcgaaacaaaaaacttcttcgcgaaaaaccgaaaaactacattaacttcaactaaaaacgcttctttctcttcctctccccccgccgccgccgtcgccgcctcctaaaaaaaaaaaaaaaaaaaaaaaaaatcctaaacaacaattactaaaaaatctctactaaaccacctcccaacgccgctatcc

SEQ ID NO: 1409 - DNA, 1232 bp, Artificial Sequence
  chemically treated genomic DNA (Homo sapiens) CpG-island No: 1409
ggtatttttttgtttttattcgttttttatattttcggacgtttagcgtcgtttagggatttttttttttcggcgcgttagggcggggtttgggtcgaggtcgtttttgtaaagggcgttcgttcgttaggattttagtttagtgtagtcgcggttcgcgcgtttcggggaaaggttgggcggggtatttatttttacgcgtttttcgcgaaggcggatgcggtcggttaggcgttcgcgcgtatttacgttaggatattggttttgtacgaaaagcgtttcgagcgtttgtagttgtttttcgttgaagatggtgcggtggcgtttcgtgcgtcgttgcgaattcgggtcgatcgcgttcgggagcgtttcggaattttcggttggcgtatttagagataagggtatcgtcggttttagttttagcggttacgttagacgagcgtttgcggagcgagggcgcggtgaggcgcggggttggggttaagttcggtatttattgcgtcgcgtttcggtttcgtcgggtttcgcgttcgtttcgcgtttatttatttagtacggcggtcgtttttgggggttcgtagggcgtcgcgcgggggtcgtagtagtagtagtaggcgtagggcgtagtttcgggcgtttcgggtttttttggtttcgcggggttttggcgatcggcgggttgcggtgggtaggcggttcgggtcgggagtttcgttcgggtaggttggagaggatgtgttcgatggagaaggggtagggtcgttcggtatttcggcggttcgtcgcgtttttagtcgttgtcgttatgttcggttcggtcggggcgtcgtcgtcgcgggaatatatacgtcggggagggagcgcgtagtaattttcgggtcgggcgtttagtttacgcgggttaatttcgtagcgtcggtcgcgaacgcgttaattttcgattgcggcggttttgttttcgcgcgcgggggtcgggggcgttgtagagagggttttttgtgttttttatttcgtttcgcgtttttttgttttattcgcgttcgtcgtttaagttggtagggcgatttgcggggaaggggcggagggtcgtttcgtcgtcgttcgcggggtttggtagtcgttcggagggcgtttcgattttggtagttttttagagcgcggcggtgtttttcggtttagtttttggtggttttttttcgttcggttgggtttaatttttcgtttttttt

SEQ ID NO: 1410 - DNA, 1232 bp, Artificial Sequence
  chemically treated genomic DNA (Homo sapiens) CpG-island No: 1410
aaaaaaaacgaaaaattaaacccaaccgaacgaaaaaaaaccaccaaaaactaaaccgaaaaacaccgccgcgctctaaaaaactaccaaaatcgaaacgccctccgaacgactaccaaaccccgcgaacgacgacgaaacgaccctccgccccttccccgcaaatcgccctaccaacttaaacgacgaacgcgaataaaacaaaaaaacgcgaaacgaaataaaaaacacaaaaaaccctctctacaacgcccccgacccccgcgcgcgaaaacaaaaccgccgcaatcgaaaattaacgcgttcgcgaccgacgctacgaaattaacccgcgtaaactaaacgcccgacccgaaaattactacgcgctccctccccgacgtatatattcccgcgacgacgacgccccgaccgaaccgaacataacgacaacgactaaaaacgcgacgaaccgccgaaataccgaacgaccctaccccttctccatcgaacacatcctctccaacctacccgaacgaaactcccgacccgaaccgcctacccaccgcaacccgccgatcgccaaaaccccgcgaaaccaaaaaaacccgaaacgcccgaaactacgccctacgcctactactactactacgacccccgcgcgacgccctacgaacccccaaaaacgaccgccgtactaaataaataaacgcgaaacgaacgcgaaacccgacgaaaccgaaacgcgacgcaataaataccgaacttaaccccaaccccgcgcctcaccgcgccctcgctccgcaaacgctcgtctaacgtaaccgctaaaactaaaaccgacgatacccttatctctaaatacgccaaccgaaaattccgaaacgctcccgaacgcgatcgacccgaattcgcaacgacgcacgaaacgccaccgcaccatcttcaacgaaaaacaactacaaacgctcgaaacgcttttcgtacaaaaccaatatcctaacgtaaatacgcgcgaacgcctaaccgaccgcatccgccttcgcgaaaaacgcgtaaaaataaataccccgcccaacctttccccgaaacgcgcgaaccgcgactacactaaactaaaatcctaacgaacgaacgccctttacaaaaacgacctcgacccaaaccccgccctaacgcgccgaaaaaaaaaaatccctaaacgacgctaaacgtccgaaaatataaaaaacgaataaaaacaaaaaaatacc

SEQ ID NO: 1411 - DNA, 1232 bp, Artificial Sequence
  chemically treated genomic DNA (Homo sapiens) CpG-island No: 1411
agaggggacgaggaattaggtttagtcgaacgagggggagttattagaggttgggtcgggaggtatcgtcgcgttttggggagttgttagggtcggggcgtttttcgagcggttgttaggtttcgcgggcggcggcgaggcggtttttcgtttttttttcgtaggtcgttttgttagtttgagcggcgggcgcgggtggggtaggaggacgcggggcggggtggggggtatagggggttttttttgtagcgttttcggttttcgcgcgcggaggtagggtcgtcgtagtcgaggattagcgcgttcgcggtcggcgttgcgggattaattcgcgtggattggacgttcggttcggggattattgcgcgtttttttttcgacgtatatattttcgcggcggcggcgtttcggtcgggtcgggtatggcggtagcggttgggggcgcggcgagtcgtcggggtgtcgggcggttttgttttttttttatcgagtatattttttttagtttgttcgagcggagttttcggttcgggtcgtttgtttatcgtagttcgtcggtcgttagagtttcgcgaagttagaggagttcggggcgttcgaggttgcgttttgcgtttgttgttgttgttgcggttttcgcgcggcgttttgcgggtttttagaggcggtcgtcgtgttgggtgagtgggcgcggagcgggcgcggggttcggcggagtcggggcgcggcgtagtgggtgtcgagtttggttttagtttcgcgttttatcgcgttttcgtttcgtaggcgttcgtttggcgtggtcgttgaggttgggatcggcggtgtttttgtttttgggtgcgttagtcggaggtttcggggcgttttcgggcgcggtcggttcgggttcgtagcggcgtacgaggcgttatcgtattatttttagcgaagagtagttgtaggcgttcgaggcgtttttcgtgtagaattagtattttgacgtgagtacgcgcgagcgtttggtcggtcgtattcgttttcgcgaggagcgcgtggaggtgagtgtttcgtttagttttttttcggagcgcgcgggtcgcggttatattggattggggttttggcgggcgggcgttttttgtaaagacggtttcggtttaagtttcgttttggcgcgtcggagggaggaggtttttggacggcgttgggcgttcgggggtatgaggagcgggtgagagtagggaggtgtt

SEQ ID NO: 1412 - DNA, 1232 bp, Artificial Sequence
  chemically treated genomic DNA (Homo sapiens) CpG-island No: 1412
aacacctccctactctcacccgctcctcatacccccgaacgcccaacgccgtccaaaaacctcctccctccgacgcgccaaaacgaaacttaaaccgaaaccgtctttacaaaaaacgcccgcccgccaaaaccccaatccaatataaccgcgacccgcgcgctccgaaaaaaaactaaacgaaacactcacctccacgcgctcctcgcgaaaacgaatacgaccgaccaaacgctcgcgcgtactcacgtcaaaatactaattctacacgaaaaacgcctcgaacgcctacaactactcttcgctaaaaataatacgataacgcctcgtacgccgctacgaacccgaaccgaccgcgcccgaaaacgccccgaaacctccgactaacgcacccaaaaacaaaaacaccgccgatcccaacctcaacgaccacgccaaacgaacgcctacgaaacgaaaacgcgataaaacgcgaaactaaaaccaaactcgacacccactacgccgcgccccgactccgccgaaccccgcgcccgctccgcgcccactcacccaacacgacgaccgcctctaaaaacccgcaaaacgccgcgcgaaaaccgcaacaacaacaacaaacgcaaaacgcaacctcgaacgccccgaactcctctaacttcgcgaaactctaacgaccgacgaactacgataaacaaacgacccgaaccgaaaactccgctcgaacaaactaaaaaaaatatactcgataaaaaaaaaacaaaaccgcccgacaccccgacgactcgccgcgcccccaaccgctaccgccatacccgacccgaccgaaacgccgccgccgcgaaaatatatacgtcgaaaaaaaaacgcgcaataatccccgaaccgaacgtccaatccacgcgaattaatcccgcaacgccgaccgcgaacgcgctaatcctcgactacgacgaccctacctccgcgcgcgaaaaccgaaaacgctacaaaaaaaaccccctataccccccaccccgccccgcgtcctcctaccccacccgcgcccgccgctcaaactaacaaaacgacctacgaaaaaaaaacgaaaaaccgcctcgccgccgcccgcgaaacctaacaaccgctcgaaaaacgccccgaccctaacaactccccaaaacgcgacgatacctcccgacccaacctctaataactccccctcgttcgactaaacctaattcctcgtcccctct

SEQ ID NO: 1413 - DNA, 1532 bp, Artificial Sequence
  chemically treated genomic DNA (Homo sapiens) CpG-island No: 1413
gtttgtcggttgtttcgggagtatcgggttagcggggtcgttcgttttcgtattttttgcgtgttcggggttttcgttaggattttttttattttgatggtttttatggggtatacgattattacggtttcggttacgttagcgtttaggtcgtatagtagtttacgcgtgttgtttagtcgtttttgggtatttcgtatgtggttgttgaggaattcgaatattttaaatttggaggcgggaggcgggtgagaggggttgtcgcggtcgagtttttttttcgtagtagttatcggtcgggttttatttgacggtcgttttggggatggaatcgtagagtagggagttaaggtcgcggtataggtttaggacgttatggttgcgaatcgtttgtcgtacgtagttttttgggggagggggcggttaggattttacggttttcggtgtcgtcgttttgggtattcgtttttcgcggcgtcgcggtttttttttttttatcgatgtttcggtatcgcggcgggtgcgagcgttcgtttagttgtagttgcgtttttacgtattcggtggggaaggtgatgtagatttcgatgttattcgttaggtcgtttgtagggatcgggaattcgtttttgagattttcgttcggtcgttggcgttcgggtttttttttcgtttcggatttcggtcggcgcggtcgtcgcgttagtgtcgcggggaatataggttggggttttacgtttttatgtttttatttcgttgtttcggcgaggcgtagggggtgatagacgggaggcgggcgagttttagcgcgtcgggtggggattaggatcgcgtttttacgattttttagtttacggtttaattcggaagtggggcggggttttagcgtttcgggtttatttagaagcgcggcgggagaggggttcgcgtttcggaggggtttatttgttaggatcgtttttttcgggtgcgttagtttggttttttcggacgcgggcgcggcggtcgttagagcgcgcggggcgcggggcgcgggtatggcgggcgggaggcggggcgttttgtggcggtttcgggttcgagattttagaatttcgcgttcggttcgcggtggcggcggcggtcggttatggttttaggggcggggcggtcgcgttagttttaggtttcgtttcgcgtggttcgagttaggtttcgtttttagttcgtttcgtgcgggtcgggaaattgaggtttgggcggggcgcgtcgaggtaggcgtaggggcggggttaaagcgtagttaatggtcgaggtcgagtttttgggcgatcgcgagcggcgggacgggggcggggttgcgggaggcggagtcgtggtttagtttcgagtagtgggttaaggtgtattgtgtgtcgcgtcgcgggatagcgggtttcgggtttgcgcgattgtcgagagcggcgggatttttagggatttcggaggttaggggtatatttttttcgaaaatacgtggggttagtttagttttagaggaattttaacgtttt

SEQ ID NO: 1414 - DNA, 1532 bp, Artificial Sequence
  chemically treated genomic DNA (Homo sapiens) CpG-island No: 1414
aaaacgttaaaattcctctaaaactaaactaaccccacgtattttcgaaaaaaatatacccctaacctccgaaatccctaaaaatcccgccgctctcgacaatcgcgcaaacccgaaacccgctatcccgcgacgcgacacacaatacaccttaacccactactcgaaactaaaccacgactccgcctcccgcaaccccgcccccgtcccgccgctcgcgatcgcccaaaaactcgacctcgaccattaactacgctttaaccccgcccctacgcctacctcgacgcgccccgcccaaacctcaatttcccgacccgcacgaaacgaactaaaaacgaaacctaactcgaaccacgcgaaacgaaacctaaaactaacgcgaccgccccgcccctaaaaccataaccgaccgccgccgccaccgcgaaccgaacgcgaaattctaaaatctcgaacccgaaaccgccacaaaacgccccgcctcccgcccgccatacccgcgccccgcgccccgcgcgctctaacgaccgccgcgcccgcgtccgaaaaaaccaaactaacgcacccgaaaaaaacgatcctaacaaataaacccctccgaaacgcgaacccctctcccgccgcgcttctaaataaacccgaaacgctaaaaccccgccccacttccgaattaaaccgtaaactaaaaaatcgtaaaaacgcgatcctaatccccacccgacgcgctaaaactcgcccgcctcccgtctatcaccccctacgcctcgccgaaacaacgaaataaaaacataaaaacgtaaaaccccaacctatattccccgcgacactaacgcgacgaccgcgccgaccgaaatccgaaacgaaaaaaaaacccgaacgccaacgaccgaacgaaaatctcaaaaacgaattcccgatccctacaaacgacctaacgaataacatcgaaatctacatcaccttccccaccgaatacgtaaaaacgcaactacaactaaacgaacgctcgcacccgccgcgataccgaaacatcgataaaaaaaaaaaaaccgcgacgccgcgaaaaacgaatacccaaaacgacgacaccgaaaaccgtaaaatcctaaccgccccctcccccaaaaaactacgtacgacaaacgattcgcaaccataacgtcctaaacctataccgcgaccttaactccctactctacgattccatccccaaaacgaccgtcaaataaaacccgaccgataactactacgaaaaaaaaactcgaccgcgacaacccctctcacccgcctcccgcctccaaatttaaaatattcgaattcctcaacaaccacatacgaaatacccaaaaacgactaaacaacacgcgtaaactactatacgacctaaacgctaacgtaaccgaaaccgtaataatcgtataccccataaaaaccatcaaaataaaaaaaatcctaacgaaaaccccgaacacgcaaaaaatacgaaaacgaacgaccccgctaacccgatactcccgaaacaaccgacaaac

SEQ ID NO: 1415 - DNA, 1532 bp, Artificial Sequence
  chemically treated genomic DNA (Homo sapiens) CpG-island No: 1415
gaaacgttagagtttttttgggattgggttagttttacgtgttttcggggagggtgtgtttttggttttcgggatttttggggatttcgtcgttttcgatagtcgcgtagattcgaggttcgttatttcgcggcgcggtatatagtgtattttgatttattgttcggagttgggttacggtttcgtttttcgtagtttcgttttcgtttcgtcgttcgcggtcgtttagggattcggtttcggttattggttgcgttttggtttcgtttttacgtttgtttcggcgcgtttcgtttaggttttagtttttcggttcgtacggggcgggttgggggcggggtttggttcggattacgcggggcgggatttggagttgacgcggtcgtttcgtttttgggattataatcggtcgtcgtcgttatcgcggatcgagcgcggagttttggagtttcggattcgaagtcgttatagggcgtttcgtttttcgttcgttatgttcgcgtttcgcgtttcgcgcgttttggcggtcgtcgcgttcgcgttcgggaaggttaagttgacgtattcggggaaggcgattttggtaggtgggttttttcgggacgcggatttttttttcgtcgcgtttttgggtgggttcgggacgttgaggtttcgttttattttcgggttgggtcgtgggttggggagtcgtggaggcgcggttttggtttttattcggcgcgttgggattcgttcgtttttcgtttgttattttttgcgtttcgtcgggataacggggtgagggtatgggggcgtggggttttagtttatgtttttcgcggtattggcgcggcggtcgcgtcgatcgaagttcgggacgggggaggggttcgagcgttagcggtcgggcgggagttttaggagcgggttttcggtttttgtaggcggtttggcgggtggtatcgagatttgtattattttttttatcgagtacgtgaagacgtagttgtagttggacgagcgttcgtattcgtcgcggtatcggggtatcggtgaggagggggaggtcgcggcgtcgcggggggcgggtatttagggcggcggtatcgagggtcgtggggttttgatcgtttttttttttaggggattgcgtgcggtagacggttcgtagttatggcgttttgggtttgtatcgcggttttagttttttgttttacggttttatttttaaggcggtcgttaggtgaggttcggtcggtggttgttgcgggaggggggttcggtcgcggtagttttttttattcgtttttcgtttttaggtttggaatgttcgagttttttagtaattatatgcgggatgtttagggacggttggatagtacgcgtgggttgttgtgcggtttgggcgttggcgtggtcgaggtcgtggtggtcgtgtgttttatggagattattaaggtggggaaggttttggcgaggatttcggatacgtagggagtacggagacgggcggtttcgttggttcggtgttttcggggtaatcggtaagt

SEQ ID NO: 1416 - DNA, 1532 bp, Artificial Sequence
  chemically treated genomic DNA (Homo sapiens) CpG-island No: 1416
acttaccgattaccccgaaaacaccgaaccaacgaaaccgcccgtctccgtactccctacgtatccgaaatcctcgccaaaaccttccccaccttaataatctccataaaacacacgaccaccacgacctcgaccacgccaacgcccaaaccgcacaacaacccacgcgtactatccaaccgtccctaaacatcccgcatataattactaaaaaactcgaacattccaaacctaaaaacgaaaaacgaataaaaaaaactaccgcgaccgaacccccctcccgcaacaaccaccgaccgaacctcacctaacgaccgccttaaaaataaaaccgtaaaacaaaaaactaaaaccgcgatacaaacccaaaacgccataactacgaaccgtctaccgcacgcaatcccctaaaaaaaaaaacgatcaaaaccccacgaccctcgataccgccgccctaaatacccgccccccgcgacgccgcgacctccccctcctcaccgataccccgataccgcgacgaatacgaacgctcgtccaactacaactacgtcttcacgtactcgataaaaaaaataatacaaatctcgataccacccgccaaaccgcctacaaaaaccgaaaacccgctcctaaaactcccgcccgaccgctaacgctcgaacccctcccccgtcccgaacttcgatcgacgcgaccgccgcgccaataccgcgaaaaacataaactaaaaccccacgcccccataccctcaccccgttatcccgacgaaacgcaaaaaataacaaacgaaaaacgaacgaatcccaacgcgccgaataaaaaccaaaaccgcgcctccacgactccccaacccacgacccaacccgaaaataaaacgaaacctcaacgtcccgaacccacccaaaaacgcgacgaaaaaaaaatccgcgtcccgaaaaaacccacctaccaaaatcgccttccccgaatacgtcaacttaaccttcccgaacgcgaacgcgacgaccgccaaaacgcgcgaaacgcgaaacgcgaacataacgaacgaaaaacgaaacgccctataacgacttcgaatccgaaactccaaaactccgcgctcgatccgcgataacgacgacgaccgattataatcccaaaaacgaaacgaccgcgtcaactccaaatcccgccccgcgtaatccgaaccaaaccccgcccccaacccgccccgtacgaaccgaaaaactaaaacctaaacgaaacgcgccgaaacaaacgtaaaaacgaaaccaaaacgcaaccaataaccgaaaccgaatccctaaacgaccgcgaacgacgaaacgaaaacgaaactacgaaaaacgaaaccgtaacccaactccgaacaataaatcaaaatacactatataccgcgccgcgaaataacgaacctcgaatctacgcgactatcgaaaacgacgaaatccccaaaaatcccgaaaaccaaaaacacaccctccccgaaaacacgtaaaactaacccaatcccaaaaaaactctaacgtttc

SEQ ID NO: 1417 - DNA, 743 bp, Artificial Sequence
  chemically treated genomic DNA (Homo sapiens) CpG-island No: 1417
agcgtcgcgggcgcgcggaggggatattgtcgtggggtaattgggcggagggcgataggtagtgtgtcgtgatagataattcgggcggcgcggtaggtttgtgtagtcggtagtggcgggtcgtcggtatttttaggtggcgttcgggcgggtatcgggttttagaggtatttaggaatgtttaggagttcgggttcgcgtggggtttgtcgtcgttaatcgttgttttcgagtaaatattttattcgtttcgcggggaagcgtcgttcgcggggagcgttttggagtagttgacggcgttcgtttcgtagtcgcgtattcgtttcgcgtcgtttagcgtttcggggtatttgcgagtttttttatggtcgcggttttcggttgtcggtagattatcgtttagacgaggaagatggagaagtcggttacggagttgatgtcggagtaggcggcgcggaggtcgagttgtagtttggacggggttatggggttgcggcgtcgggcgggtcgagggcgagcgcggtcgagagttataggtgtagggttcgaagtcgttagtcggagtcgcgggagtcgttagagtagtcggcgtttcgcgtttcgttttcggttcgtttttagcgtcgttcgtatagcgtttttttcggtcggaggtcgttcgcgttcggaatcgtagacgttatcgtcgttttgcgaagttgtcgtgtcgtttgggggaatgttgttaaaaaggcggatttttg

SEQ ID NO: 1418 - DNA, 743 bp, Artificial Sequence
  chemically treated genomic DNA (Homo sapiens) CpG-island No: 1418
caaaaatccgcctttttaacaacattcccccaaacgacacgacaacttcgcaaaacgacgataacgtctacgattccgaacgcgaacgacctccgaccgaaaaaaacgctatacgaacgacgctaaaaacgaaccgaaaacgaaacgcgaaacgccgactactctaacgactcccgcgactccgactaacgacttcgaaccctacacctataactctcgaccgcgctcgccctcgacccgcccgacgccgcaaccccataaccccgtccaaactacaactcgacctccgcgccgcctactccgacatcaactccgtaaccgacttctccatcttcctcgtctaaacgataatctaccgacaaccgaaaaccgcgaccataaaaaaactcgcaaataccccgaaacgctaaacgacgcgaaacgaatacgcgactacgaaacgaacgccgtcaactactccaaaacgctccccgcgaacgacgcttccccgcgaaacgaataaaatatttactcgaaaacaacgattaacgacgacaaaccccacgcgaacccgaactcctaaacattcctaaatacctctaaaacccgatacccgcccgaacgccacctaaaaataccgacgacccgccactaccgactacacaaacctaccgcgccgcccgaattatctatcacgacacactacctatcgccctccgcccaattaccccacgacaatatcccctccgcgcgcccgcgacgct

SEQ ID NO: 1419 - DNA, 743 bp, Artificial Sequence
  chemically treated genomic DNA (Homo sapiens) CpG-island No: 1419
taggaattcgtttttttagtagtatttttttaaacgatacggtagtttcgtaaagcggcggtggcgtttgcggtttcgggcgcgggcggttttcggtcggggagggcgttgtgcgggcggcgttgggggcgggtcgggggcggagcgcggggcgtcggttgttttggcggttttcgcggtttcggttggcggtttcgggttttgtatttgtgattttcggtcgcgttcgttttcggttcgttcggcgtcgtagttttatggtttcgtttaggttgtagttcggttttcgcgtcgtttatttcggtattagtttcgtggtcggtttttttatttttttcgtttggacggtggtttatcgatagtcggggatcgcggttatgggagggttcgtaggtatttcgggacgttgggcggcgcggggcgggtgcgcggttgcggggcgggcgtcgttagttgttttaggacgtttttcgcgagcggcgttttttcgcggagcgggtggagtgtttattcgaaaatagcggttggcggcggtaggttttacgcgggttcgggtttttgggtatttttgggtgtttttgagattcgatgttcgttcgggcgttatttgggggtgtcgacggttcgttattgtcggttgtatagatttgtcgcgtcgttcgggttatttgttacggtatattgtttgtcgtttttcgtttagttgttttacgatagtgtttttttcgcgcgttcgcggcgtt

SEQ ID NO: 1420 - DNA, 743 bp, Artificial Sequence
  chemically treated genomic DNA (Homo sapiens) CpG-island No: 1420
aacgccgcgaacgcgcgaaaaaaacactatcgtaaaacaactaaacgaaaaacgacaaacaatataccgtaacaaataacccgaacgacgcgacaaatctatacaaccgacaataacgaaccgtcgacacccccaaataacgcccgaacgaacatcgaatctcaaaaacacccaaaaatacccaaaaacccgaacccgcgtaaaacctaccgccgccaaccgctattttcgaataaacactccacccgctccgcgaaaaaacgccgctcgcgaaaaacgtcctaaaacaactaacgacgcccgccccgcaaccgcgcacccgccccgcgccgcccaacgtcccgaaatacctacgaaccctcccataaccgcgatccccgactatcgataaaccaccgtccaaacgaaaaaaataaaaaaaccgaccacgaaactaataccgaaataaacgacgcgaaaaccgaactacaacctaaacgaaaccataaaactacgacgccgaacgaaccgaaaacgaacgcgaccgaaaatcacaaatacaaaacccgaaaccgccaaccgaaaccgcgaaaaccgccaaaacaaccgacgccccgcgctccgcccccgacccgcccccaacgccgcccgcacaacgccctccccgaccgaaaaccgcccgcgcccgaaaccgcaaacgccaccgccgctttacgaaactaccgtatcgtttaaaaaaatactactaaaaaaacgaattccta

SEQ ID NO: 1421 - DNA, 1032 bp, Artificial Sequence
  chemically treated genomic DNA (Homo sapiens) CpG-island No: 1421
tcgtggcgtagtttttggtcgtcgtcgttttcgggaagggtttagaggtaatattttggatagtagagttgtacgaagttcgaggcgtcgcgagtttaggtaagttttagtaggcgttcgtagagagtgttaggcggttcgcgagttaggtttcgttcgtttttgttttaggcgcggtttttgtaggagggcgtcgcgggtgaaaggaggtttcggggcgatttcggtttcgttcgtcgtttagtttttatatcgtttttatcgcgcggcgtatttggtcgtagcggttcggtgatagtgagtacgagtaggaagagtagtaggaaggcgtcgttgtttgttttgggtattatttatttttcgtttatcgttttcggggcggttggaaggtcggattaggtcggattgagggttaggggatcgtgttaagcggagggttaggcggagttgaatttgggcgaggcgcggagaggcggcgggaaagagtttcggttgggtcgcgggttggcgtatattttcggttgtaattttaggtatcgattttagttgcgcgtaagatggcggtcgttttgttcggtttcgcgtcgcgtcgtttcgtttcgtttttcgttcgcgacgtaggcgcgggttaatgatcgttaagatggggggcggggttagagttaaagtttttcgaagagggtgaggtttaaggtcgcgacggcggagggcggggatttaagggcggggattgaggggcgggttttaagggaagggcgggattatacggagtgaggcgtgttattggttaagtagagaggtagggtcggggtcggggtttgagcggcggggttatcgaagggagtagggtttttggacgtcggttagggacggcgggcgcgggacggtaaggatggatatcgaaaggcgcggggtatggggcggggcgtcgaggggtcgcgcgggtggggagcggagagaacgaagtgggaatttggttgggattttaagggtttttatatttgtaagtttaggtttcgtgagtagtttaaa

SEQ ID NO: 1422 - DNA, 1032 bp, Artificial Sequence
  chemically treated genomic DNA (Homo sapiens) CpG-island No: 1422
tttaaactactcacgaaacctaaacttacaaatataaaaacccttaaaatcccaaccaaattcccacttcgttctctccgctccccacccgcgcgacccctcgacgccccgccccataccccgcgcctttcgatatccatccttaccgtcccgcgcccgccgtccctaaccgacgtccaaaaaccctactcccttcgataaccccgccgctcaaaccccgaccccgaccctacctctctacttaaccaataacacgcctcactccgtataatcccgcccttcccttaaaacccgcccctcaatccccgcccttaaatccccgccctccgccgtcgcgaccttaaacctcaccctcttcgaaaaactttaactctaaccccgccccccatcttaacgatcattaacccgcgcctacgtcgcgaacgaaaaacgaaacgaaacgacgcgacgcgaaaccgaacaaaacgaccgccatcttacgcgcaactaaaatcgatacctaaaattacaaccgaaaatatacgccaacccgcgacccaaccgaaactctttcccgccgcctctccgcgcctcgcccaaattcaactccgcctaaccctccgcttaacacgatcccctaaccctcaatccgacctaatccgaccttccaaccgccccgaaaacgataaacgaaaaataaataatacccaaaacaaacaacgacgccttcctactactcttcctactcgtactcactatcaccgaaccgctacgaccaaatacgccgcgcgataaaaacgatataaaaactaaacgacgaacgaaaccgaaatcgccccgaaacctcctttcacccgcgacgccctcctacaaaaaccgcgcctaaaacaaaaacgaacgaaacctaactcgcgaaccgcctaacactctctacgaacgcctactaaaacttacctaaactcgcgacgcctcgaacttcgtacaactctactatccaaaatattacctctaaacccttcccgaaaacgacgacgaccaaaaactacgccacga

SEQ ID NO: 1423 - DNA, 1032 bp, Artificial Sequence
  chemically treated genomic DNA (Homo sapiens) CpG-island No: 1423
tttgggttgtttacgggatttgagtttgtaggtgtgaagatttttggagttttagttaggtttttatttcgtttttttcgttttttattcgcgcgatttttcggcgtttcgttttatgtttcgcgtttttcgatgtttatttttgtcgtttcgcgttcgtcgtttttaatcggcgtttagagattttatttttttcggtggtttcgtcgtttaggtttcggtttcggttttgtttttttgtttaattaatggtacgttttatttcgtatggtttcgttttttttttagagttcgttttttagttttcgtttttaggttttcgtttttcgtcgtcgcgattttaggttttatttttttcggagggttttggttttggtttcgttttttattttgacggttattggttcgcgtttgcgtcgcgggcgggaggcggggcggggcggcgcggcgcggagtcgagtaggacggtcgttattttgcgcgtagttggagtcggtgtttgaggttgtagtcgagagtgtgcgttagttcgcggtttagtcgaagttttttttcgtcgttttttcgcgtttcgtttaggtttagtttcgtttgatttttcgtttggtacggttttttgatttttagttcggtttggttcggttttttagtcgtttcggggacgatgaacggaggataaatggtgtttaaggtagatagcggcgtttttttgttgttttttttgttcgtgtttattgttatcgagtcgttgcggttaggtgcgtcgcgcgatgggggcggtgtgggggttgggcggcgagcggggtcggggtcgtttcgggatttttttttattcgcggcgtttttttgtaggggtcgcgtttggggtaggggcgggcggggtttggttcgcgggtcgtttggtattttttgcggacgtttgttggagtttatttgggttcgcggcgtttcggatttcgtgtagttttgttgtttaggatgttgtttttgggtttttttcgggagcggcggcggttaggagttacgttacgg

SEQ ID NO: 1424 - DNA, 1032 bp, Artificial Sequence
  chemically treated genomic DNA (Homo sapiens) CpG-island No: 1424
ccgtaacgtaactcctaaccgccgccgctcccgaaaaaaacccaaaaacaacatcctaaacaacaaaactacacgaaatccgaaacgccgcgaacccaaataaactccaacaaacgtccgcaaaaaataccaaacgacccgcgaaccaaaccccgcccgcccctaccccaaacgcgacccctacaaaaaaacgccgcgaataaaaaaaaatcccgaaacgaccccgaccccgctcgccgcccaacccccacaccgcccccatcgcgcgacgcacctaaccgcaacgactcgataacaataaacacgaacaaaaaaaacaacaaaaaaacgccgctatctaccttaaacaccatttatcctccgttcatcgtccccgaaacgactaaaaaaccgaaccaaaccgaactaaaaatcaaaaaaccgtaccaaacgaaaaatcaaacgaaactaaacctaaacgaaacgcgaaaaaacgacgaaaaaaaacttcgactaaaccgcgaactaacgcacactctcgactacaacctcaaacaccgactccaactacgcgcaaaataacgaccgtcctactcgactccgcgccgcgccgccccgccccgcctcccgcccgcgacgcaaacgcgaaccaataaccgtcaaaataaaaaacgaaaccaaaaccaaaaccctccgaaaaaaataaaacctaaaatcgcgacgacgaaaaacgaaaacctaaaaacgaaaactaaaaaacgaactctaaaaaaaaaacgaaaccatacgaaataaaacgtaccattaattaaacaaaaaaacaaaaccgaaaccgaaacctaaacgacgaaaccaccgaaaaaaataaaatctctaaacgccgattaaaaacgacgaacgcgaaacgacaaaaataaacatcgaaaaacgcgaaacataaaacgaaacgccgaaaaatcgcgcgaataaaaaacgaaaaaaacgaaataaaaacctaactaaaactccaaaaatcttcacacctacaaactcaaatcccgtaaacaacccaaa

SEQ ID NO: 1425 - DNA, 1141 bp, Artificial Sequence
  chemically treated genomic DNA (Homo sapiens) CpG-island No: 1425
ttcgtcgattcggttttaaaaaggcggttgtgagtttttttgagttcggcgggtttttttcgatttcgggtttcgtttcggtggtagagtttttgaggtttttatatggcgtaaagtttacgtttatcgggttcggttggggtttcgggttcgcggggtttgtttttttcggggattaaaggttttcggcgggtggtaggtcggacggtagattggcgttttaaagtttcggggcgtcgtttcggcggagtgggtcggaagatttggttaggtttagacgttcgttttaagggagttaatcgggcgggtcggggtttgtatgatatagtacgattcggtttaggtttcgattcggatttaacgtaagtttcgtttagggggcgcgcgggtgcgtagttggttttagtcgggtttgtcgggtttacggttttttattcgttttttagtttttttttttttttttttggtttttatttttttgacgcgtttacggttaggtttcgtcgggtttattttgcgcggttggtttcggtgcgcgtcgtcgtagtaagcgaacggcgcgcgtatatttattcggttttagaagttatggcgcgcgtttttttcggtcggcggttgtggcggttcgcgggtaacggttacgagcggtggtaagcgatcgattgggtcggggttcggtttttttaggcggtgggcgagtagcggcgataaattcgtaagcggtttttttttcgtttttttttatcggtagcgaggcgtcgggcgaataacgttggtttttgattcgcgaggtggtagtggtagtggtagcggtagcggtagcgacgatttaaacgacggtcgtagacgtttcgttgagattgagtcgagaagagtcgaattatcggaagggaagttgtttttattttagttaattagcgtttgttttgcggattttcgttcgttttttcgcgtttttttttagtaattcgtagattatagttaattaggaaattcgtttgcggtttggttttcgttttagtgatgcgatacgtttagtaacgttacgttaattggtcgtaacgttacgttttttcgacggattggaatttttagttaattaacgaaaggaatagggcgagatcgattagtgaaaggagat

SEQ ID NO: 1426 - DNA, 1141 bp, Artificial Sequence
  chemically treated genomic DNA (Homo sapiens) CpG-island No: 1426
atctcctttcactaatcgatctcgccctattcctttcgttaattaactaaaaattccaatccgtcgaaaaaacgtaacgttacgaccaattaacgtaacgttactaaacgtatcgcatcactaaaacgaaaaccaaaccgcaaacgaatttcctaattaactataatctacgaattactaaaaaaaaacgcgaaaaaacgaacgaaaatccgcaaaacaaacgctaattaactaaaataaaaacaacttcccttccgataattcgactcttctcgactcaatctcaacgaaacgtctacgaccgtcgtttaaatcgtcgctaccgctaccgctaccactaccactaccacctcgcgaatcaaaaaccaacgttattcgcccgacgcctcgctaccgataaaaaaaaacgaaaaaaaaaccgcttacgaatttatcgccgctactcgcccaccgcctaaaaaaaccgaaccccgacccaatcgatcgcttaccaccgctcgtaaccgttacccgcgaaccgccacaaccgccgaccgaaaaaaacgcgcgccataacttctaaaaccgaataaatatacgcgcgccgttcgcttactacgacgacgcgcaccgaaaccaaccgcgcaaaataaacccgacgaaacctaaccgtaaacgcgtcaaaaaaataaaaaccaaaaaaaaaaaaaaaaaaactaaaaaacgaataaaaaaccgtaaacccgacaaacccgactaaaaccaactacgcacccgcgcgccccctaaacgaaacttacgttaaatccgaatcgaaacctaaaccgaatcgtactatatcatacaaaccccgacccgcccgattaactcccttaaaacgaacgtctaaacctaaccaaatcttccgacccactccgccgaaacgacgccccgaaactttaaaacgccaatctaccgtccgacctaccacccgccgaaaacctttaatccccgaaaaaaacaaaccccgcgaacccgaaaccccaaccgaacccgataaacgtaaactttacgccatataaaaacctcaaaaactctaccaccgaaacgaaacccgaaatcgaaaaaaacccgccgaactcaaaaaaactcacaaccgcctttttaaaaccgaatcgacgaa

SEQ ID NO: 1427 - DNA, 1141 bp, Artificial Sequence
  chemically treated genomic DNA (Homo sapiens) CpG-island No: 1427
gtttttttttattaatcgatttcgttttatttttttcgttgattggttgagaattttaattcgtcgaggaagcgtagcgttgcggttaattgacgtggcgttattaggcgtgtcgtattattgaggcgggagttaggtcgtaagcgaattttttgattggttgtgatttgcgggttgttggggagaggcgcggagaggcgggcgagagttcgtagggtaggcgttgattggttgaggtgggagtagtttttttttcgatgattcggtttttttcggtttagttttagcgaagcgtttgcgatcgtcgtttgagtcgtcgttgtcgttgtcgttgttattgttattgttatttcgcggattaggagttagcgttgttcgttcgacgtttcgttgtcggtgggaggaagcgagagggaagtcgtttgcgggtttgtcgtcgttgttcgtttatcgtttggaagagtcgagtttcggtttagtcggtcgtttgttatcgttcgtagtcgttattcgcgggtcgttatagtcgtcggtcgggagaggcgcgcgttatggtttttggagtcgagtgagtgtgcgcgcgtcgttcgtttgttgcggcggcgcgtatcgggattagtcgcgtagggtaggttcggcggggtttggtcgtgggcgcgttagagaggtggagattaggaaagagggaagggaagttagggggcgagtgaggggtcgtggattcggtaggttcggttggggttagttgcgtattcgcgcgttttttaggcggggtttgcgttgggttcgggtcggagtttgggtcggatcgtgttgtgttatgtaggtttcggttcgttcgattggtttttttagaacggacgtttgggtttggttaggtttttcggtttatttcgtcggggcggcgtttcggggttttggggcgttagtttgtcgttcggtttattattcgtcgaaagtttttggttttcggagagagtaggtttcgcgagttcgaggttttagtcgggttcggtgggcgtggattttgcgttatgtgaaggttttaggagttttgttatcgaggcggagttcggggtcggggaaggttcgtcgagtttagggaagtttatagtcgtttttttggagtcgggtcggcggg

SEQ ID NO: 1428 - DNA, 1141 bp, Artificial Sequence
  chemically treated genomic DNA (Homo sapiens) CpG-island No: 1428
cccgccgacccgactccaaaaaaacgactataaacttccctaaactcgacgaaccttccccgaccccgaactccgcctcgataacaaaactcctaaaaccttcacataacgcaaaatccacgcccaccgaacccgactaaaacctcgaactcgcgaaacctactctctccgaaaaccaaaaactttcgacgaataataaaccgaacgacaaactaacgccccaaaaccccgaaacgccgccccgacgaaataaaccgaaaaacctaaccaaacccaaacgtccgttctaaaaaaaccaatcgaacgaaccgaaacctacataacacaacacgatccgacccaaactccgacccgaacccaacgcaaaccccgcctaaaaaacgcgcgaatacgcaactaaccccaaccgaacctaccgaatccacgacccctcactcgccccctaacttcccttccctctttcctaatctccacctctctaacgcgcccacgaccaaaccccgccgaacctaccctacgcgactaatcccgatacgcgccgccgcaacaaacgaacgacgcgcgcacactcactcgactccaaaaaccataacgcgcgcctctcccgaccgacgactataacgacccgcgaataacgactacgaacgataacaaacgaccgactaaaccgaaactcgactcttccaaacgataaacgaacaacgacgacaaacccgcaaacgacttccctctcgcttcctcccaccgacaacgaaacgtcgaacgaacaacgctaactcctaatccgcgaaataacaataacaataacaacgacaacgacaacgacgactcaaacgacgatcgcaaacgcttcgctaaaactaaaccgaaaaaaaccgaatcatcgaaaaaaaaactactcccacctcaaccaatcaacgcctaccctacgaactctcgcccgcctctccgcgcctctccccaacaacccgcaaatcacaaccaatcaaaaaattcgcttacgacctaactcccgcctcaataatacgacacgcctaataacgccacgtcaattaaccgcaacgctacgcttcctcgacgaattaaaattctcaaccaatcaacgaaaaaaataaaacgaaatcgattaataaaaaaaaac

SEQ ID NO: 1429 - DNA, 571 bp, Artificial Sequence
  chemically treated genomic DNA (Homo sapiens) CpG-island No: 1429
cgcggttcgtcgggtttttaatttcgtttttggttggtcgggtttgcgaagttttgggttgcggttggtttttttgaagagttagttttcgcgggaaattcggggaggaaacgagttagtaattttaaataggtttaggcgggttagaagtcggggtcgtgtttgattggggtagtcgtacggtcggcggtgcggttcgttcggttttcgcggaggttatagtttcgagaaagggtgggcgggagcgagtttcggttttatagttcgtggttcggttttttttcgttgttatatttttaggtttttttgggttttcgtttttatcgagggtcgattgcgaggtgtatgttgggagtcgtagtatcgtatcggggcggaatagtttcgtttcggcggatggtgtttttagaaagcggtaattggagacgagggcgtttcgtaatcgtttattttttttttgtttattgtcgagtattaatacgtttattaaggtcggttttttatcgcgtgtagtttgttggtagtgtcgttttgtatttgtattgtttaaaagtatttgtttaattatttt

SEQ ID NO: 1430 - DNA, 571 bp, Artificial Sequence
  chemically treated genomic DNA (Homo sapiens) CpG-island No: 1430
aaaataattaaacaaatacttttaaacaatacaaatacaaaacgacactaccaacaaactacacgcgataaaaaaccgaccttaataaacgtattaatactcgacaataaacaaaaaaaaaataaacgattacgaaacgccctcgtctccaattaccgctttctaaaaacaccatccgccgaaacgaaactattccgccccgatacgatactacgactcccaacatacacctcgcaatcgaccctcgataaaaacgaaaacccaaaaaaacctaaaaatataacaacgaaaaaaaaccgaaccacgaactataaaaccgaaactcgctcccgcccaccctttctcgaaactataacctccgcgaaaaccgaacgaaccgcaccgccgaccgtacgactaccccaatcaaacacgaccccgacttctaacccgcctaaacctatttaaaattactaactcgtttcctccccgaatttcccgcgaaaactaactcttcaaaaaaaccaaccgcaacccaaaacttcgcaaacccgaccaaccaaaaacgaaattaaaaacccgacgaaccgcg

SEQ ID NO: 1431 - DNA, 571 bp, Artificial Sequence
  chemically treated genomic DNA (Homo sapiens) CpG-island No: 1431
gaaatgattgggtaggtatttttgagtagtgtaagtatagagcggtattgttagtagattatacgcggtagaaagtcgattttggtgagcgtgttggtgttcgatagtgagtagagaaaggatggacgattacggagcgttttcgtttttagttatcgttttttggaaatattattcgtcggggcggagttgtttcgtttcggtgcggtattacgatttttagtatgtatttcgtagtcggttttcggtggaagcgggaatttaggaggatttgggggtgtggtagcgaggaagggtcgagttacggattgtggggtcgaaattcgttttcgtttattttttttcgaggttgtggttttcgcgagagtcgagcgggtcgtatcgtcggtcgtgcgattgttttagttagatacgatttcggtttttagttcgtttaagtttgtttggggttgttgattcgtttttttttcgagtttttcgcgggaattaattttttaagaggattaatcgtagtttagagtttcgtagattcggttaattagaggcgaggttgagagttcggcgggtcgcg

SEQ ID NO: 1432 - DNA, 571 bp, Artificial Sequence
  chemically treated genomic DNA (Homo sapiens) CpG-island No: 1432
cgcgacccgccgaactctcaacctcgcctctaattaaccgaatctacgaaactctaaactacgattaatcctcttaaaaaattaattcccgcgaaaaactcgaaaaaaaaacgaatcaacaaccccaaacaaacttaaacgaactaaaaaccgaaatcgtatctaactaaaacaatcgcacgaccgacgatacgacccgctcgactctcgcgaaaaccacaacctcgaaaaaaaataaacgaaaacgaatttcgaccccacaatccgtaactcgacccttcctcgctaccacacccccaaatcctcctaaattcccgcttccaccgaaaaccgactacgaaatacatactaaaaatcgtaataccgcaccgaaacgaaacaactccgccccgacgaataatatttccaaaaaacgataactaaaaacgaaaacgctccgtaatcgtccatcctttctctactcactatcgaacaccaacacgctcaccaaaatcgactttctaccgcgtataatctactaacaataccgctctatacttacactactcaaaaatacctacccaatcatttc

SEQ ID NO: 1433 - DNA, 529 bp, Artificial Sequence
  chemically treated genomic DNA (Homo sapiens) CpG-island No: 1433
tcgcgtatcgtcgtgcgttcggatgtgttttcgttcgttattttcggcggtacgttttatatcgatagcgatcgttcggttagtagtaaggtttattagttgtttgagtcgggagttcgttattttcgcgagtttacggagatggaggtaggttgtagttatacgtgcgtggtcgtgttggataattttgtgtacgtggtcggggggtagtatttgtagtatcgtagcggcgagggcgtagtggacgtttgttatcgttacgatttttatttgaatcgttggttgcgtttgtaggttatgtaggaaagtcgtatttagttttagttgaacgtgttgtgcggtatggtgtacgttacgggcggtcgtaatcgagtcggtagtttggttttcgtggagcggtattgttttcggcgtaatgagtggggttacgtttgttcgttgaagcgtcgtatttggggttatgttggggtcgttttagggggtcgtttttatatttcgggtggttacgggattttagtggaggataaga

SEQ ID NO: 1434 - DNA, 529 bp, Artificial Sequence
  chemically treated genomic DNA (Homo sapiens) CpG-island No: 1434
tcttatcctccactaaaatcccgtaaccacccgaaatataaaaacgaccccctaaaacgaccccaacataaccccaaatacgacgcttcaacgaacaaacgtaaccccactcattacgccgaaaacaataccgctccacgaaaaccaaactaccgactcgattacgaccgcccgtaacgtacaccataccgcacaacacgttcaactaaaactaaatacgactttcctacataacctacaaacgcaaccaacgattcaaataaaaatcgtaacgataacaaacgtccactacgccctcgccgctacgatactacaaatactaccccccgaccacgtacacaaaattatccaacacgaccacgcacgtataactacaacctacctccatctccgtaaactcgcgaaaataacgaactcccgactcaaacaactaataaaccttactactaaccgaacgatcgctatcgatataaaacgtaccgccgaaaataacgaacgaaaacacatccgaacgcacgacgatacgcga

SEQ ID NO: 1435 - DNA, 529 bp, Artificial Sequence
  chemically treated genomic DNA (Homo sapiens) CpG-island No: 1435
ttttgttttttattgagatttcgtagttattcgagatgtagaggcggttttttgaggcggttttagtatggttttaggtacggcgttttagcgagtaggcgtagttttatttattgcgtcgggggtagtatcgttttacggaggttaggttgtcggttcggttgcggtcgttcgtggcgtatattatgtcgtatagtacgtttagttggaattggatgcggtttttttgtatggtttgtaggcgtagttagcgatttaggtgggggtcgtagcggtagtaggcgtttattgcgttttcgtcgttgcggtattgtaggtgttgtttttcggttacgtatataaaattgtttagtacggttacgtacgtgtggttgtagtttatttttattttcgtgagttcgcggaagtggcgggttttcggtttaggtagttggtagattttgttgttgatcgagcggtcgttgtcggtgtagggcgtgtcgtcgaaggtgacgagcgagggtatattcgagcgtacggcggtgcgcgg

SEQ ID NO: 1436 - DNA, 529 bp, Artificial Sequence
  chemically treated genomic DNA (Homo sapiens) CpG-island No: 1436
ccgcgcaccgccgtacgctcgaatataccctcgctcgtcaccttcgacgacacgccctacaccgacaacgaccgctcgatcaacaacaaaatctaccaactacctaaaccgaaaacccgccacttccgcgaactcacgaaaataaaaataaactacaaccacacgtacgtaaccgtactaaacaattttatatacgtaaccgaaaaacaacacctacaataccgcaacgacgaaaacgcaataaacgcctactaccgctacgacccccacctaaatcgctaactacgcctacaaaccatacaaaaaaaccgcatccaattccaactaaacgtactatacgacataatatacgccacgaacgaccgcaaccgaaccgacaacctaacctccgtaaaacgatactacccccgacgcaataaataaaactacgcctactcgctaaaacgccgtacctaaaaccatactaaaaccgcctcaaaaaaccgcctctacatctcgaataactacgaaatctcaataaaaaacaaaa

SEQ ID NO: 1437 - DNA, 609 bp, Artificial Sequence
  chemically treated genomic DNA (Homo sapiens) CpG-island No: 1437
attgcgtcggcgttgaaatttttattcgcgttttatcgtttttttcgcgggtttcgagcgcgcgtttgggcgcgcgtatgcgttttcgttttcgcgtcgcgcgtcgtttttgtgcgtttgcgtcgcgtttacgatcgtcggcgcgtttgcgtattgttcgtcgttcgtgggtttagtcggcgtttgcgcggtggtacgggcgagtgggggggcgaggaggtggaggaggaggaggaggaggaggaggtggcggcgagaagatggcgatttcgaataattcgcggaaatttagcgagaagatcgcgttgtataattagaagtaggcggaggagacggcggttttcgaggaggttatgaaggatttgagtttgacgcgggtcgcgcgggtaagggggttgttcgcgtcgattttttagggtcggcggagggagggagggggcgcgtgttcggcgcgtgtacggggcggggtgggggggggcgcggcgggggcggggcgcgcgcggcgggggcggggtttggtacggttcgagggggataggtgtttttacgtttcgggcgtcgtgggcgggataggtgattttataaaatttatatttgatggggtatagg

SEQ ID NO: 1438 - DNA, 609 bp, Artificial Sequence
  chemically treated genomic DNA (Homo sapiens) CpG-island No: 1438
cctataccccatcaaatataaattttataaaatcacctatcccgcccacgacgcccgaaacgtaaaaacacctatccccctcgaaccgtaccaaaccccgcccccgccgcgcgcgccccgcccccgccgcgcccccccccaccccgccccgtacacgcgccgaacacgcgccccctccctccctccgccgaccctaaaaaatcgacgcgaacaacccccttacccgcgcgacccgcgtcaaactcaaatccttcataacctcctcgaaaaccgccgtctcctccgcctacttctaattatacaacgcgatcttctcgctaaatttccgcgaattattcgaaatcgccatcttctcgccgccacctcctcctcctcctcctcctcctccacctcctcgcccccccactcgcccgtaccaccgcgcaaacgccgactaaacccacgaacgacgaacaatacgcaaacgcgccgacgatcgtaaacgcgacgcaaacgcacaaaaacgacgcgcgacgcgaaaacgaaaacgcatacgcgcgcccaaacgcgcgctcgaaacccgcgaaaaaaacgataaaacgcgaataaaaatttcaacgccgacgcaat

SEQ ID NO: 1439 - DNA, 609 bp, Artificial Sequence
  chemically treated genomic DNA (Homo sapiens) CpG-island No: 1439
tttgtattttattaggtatggattttgtggggttatttgtttcgtttacgacgttcggggcgtggggatatttgtttttttcgggtcgtgttaagtttcgttttcgtcgcgcgcgtttcgttttcgtcgcgtttttttttatttcgtttcgtgtacgcgtcggatacgcgtttttttttttttttcgtcggttttgaagggtcggcgcgggtagtttttttattcgcgcggttcgcgttaggtttaggttttttatgattttttcgaaggtcgtcgtttttttcgtttgtttttgattgtgtagcgcgattttttcgttgaattttcgcggattgttcgaagtcgttattttttcgtcgttattttttttttttttttttttttttttattttttcgtttttttattcgttcgtgttatcgcgtaagcgtcggttgggtttacgggcggcgagtagtgcgtaggcgcgtcggcggtcgtgagcgcggcgtaggcgtataggagcggcgcgcggcgcgggggcgaaggcgtatgcgcgcgtttaggcgcgcgttcggggttcgcgggaagggcggtggagcgcgagtggaaattttaacgtcgacgtagt

SEQ ID NO: 1440 - DNA, 609 bp, Artificial Sequence
  chemically treated genomic DNA (Homo sapiens) CpG-island No: 1440
actacgtcgacgttaaaatttccactcgcgctccaccgcccttcccgcgaaccccgaacgcgcgcctaaacgcgcgcatacgccttcgcccccgcgccgcgcgccgctcctatacgcctacgccgcgctcacgaccgccgacgcgcctacgcactactcgccgcccgtaaacccaaccgacgcttacgcgataacacgaacgaataaaaaaacgaaaaaataaaaaaaaaaaaaaaaaaaaaaaaaataacgacgaaaaaataacgacttcgaacaatccgcgaaaattcaacgaaaaaatcgcgctacacaatcaaaaacaaacgaaaaaaacgacgaccttcgaaaaaatcataaaaaacctaaacctaacgcgaaccgcgcgaataaaaaaactacccgcgccgacccttcaaaaccgacgaaaaaaaaaaaaaaacgcgtatccgacgcgtacacgaaacgaaataaaaaaaaacgcgacgaaaacgaaacgcgcgcgacgaaaacgaaacttaacacgacccgaaaaaaacaaatatccccacgccccgaacgtcgtaaacgaaacaaataaccccacaaaatccatacctaataaaatacaaa

SEQ ID NO: 1441 - DNA, 629 bp, Artificial Sequence
  chemically treated genomic DNA (Homo sapiens) CpG-island No: 1441
cgggcgacgcggtcgagggtcgggcggttaagaggtgcgagaaggtcgaggagaaggttaaggagattgcgaagatggtagagatgttggtggagttggttcggcggatagagaagagcgagtcgtcgtgagcgcggtcggcggtaagtcgggtattcgcgttaggtcgaggagcggttttagtttggtcgtttttcgagagcgatgattttatcgagatgtatcggaatcgggggtggggcgggagaataaaggcgtgttcgggttagggtcgatttgggtttcgttttcgtgttttgttttttgacggtggcggcgtgggataattagagtggtcgggtttgggcgtgatgcgtgtttagtggaagggttataaattttagagtcgttaaggaaatagaaacggataaggtttcgggtcgtttagtaagcgggggtggaaatagaggattttcggggaagacgttggataagttaacgttgttagagattggagtgagttaggtggtggttagaagaggtggcgttttgtatagtggcgttcgtgagggtttgggggtcgttgtgtttgggattaatttttcgatgatgaatttttttttattgtgttttaggtttttagttaatgg

SEQ ID NO: 1442 - DNA, 629 bp, Artificial Sequence
  chemically treated genomic DNA (Homo sapiens) CpG-island No: 1442
ccattaactaaaaacctaaaacacaataaaaaaaaattcatcatcgaaaaattaatcccaaacacaacgacccccaaaccctcacgaacgccactatacaaaacgccacctcttctaaccaccacctaactcactccaatctctaacaacgttaacttatccaacgtcttccccgaaaatcctctatttccacccccgcttactaaacgacccgaaaccttatccgtttctatttccttaacgactctaaaatttataacccttccactaaacacgcatcacgcccaaacccgaccactctaattatcccacgccgccaccgtcaaaaaacaaaacacgaaaacgaaacccaaatcgaccctaacccgaacacgcctttattctcccgccccacccccgattccgatacatctcgataaaatcatcgctctcgaaaaacgaccaaactaaaaccgctcctcgacctaacgcgaatacccgacttaccgccgaccgcgctcacgacgactcgctcttctctatccgccgaaccaactccaccaacatctctaccatcttcgcaatctccttaaccttctcctcgaccttctcgcacctcttaaccgcccgaccctcgaccgcgtcgcccg

SEQ ID NO: 1443 - DNA, 629 bp, Artificial Sequence
  chemically treated genomic DNA (Homo sapiens) CpG-island No: 1443
ttattggttggaaatttaaagtataatgggaagaaatttattatcgagaggttaattttaggtataacgatttttaaatttttacgaacgttattgtgtaggacgttattttttttggttattatttgatttattttagtttttagtaacgttgatttgtttaacgtttttttcgaaaattttttatttttattttcgtttgttggacggttcgggattttgttcgtttttgtttttttggcgattttgagatttatgatttttttattgaatacgtattacgtttaaattcggttattttgattattttacgtcgttatcgttaaaaaataaaatacgaagacggggtttagatcggttttgattcgagtacgtttttattttttcgttttattttcgatttcggtgtatttcgatgaaattatcgttttcgaagagcggttaagttggggtcgtttttcggtttggcgcgggtgttcgatttatcgtcgatcgcgtttacgacgattcgtttttttttattcgtcggattagttttattagtatttttgttattttcgtaatttttttggtttttttttcggttttttcgtattttttggtcgttcggttttcggtcgcgtcgttcg

SEQ ID NO: 1444 - DNA, 629 bp, Artificial Sequence
  chemically treated genomic DNA (Homo sapiens) CpG-island No: 1444
cgaacgacgcgaccgaaaaccgaacgaccaaaaaatacgaaaaaaccgaaaaaaaaaccaaaaaaattacgaaaataacaaaaatactaataaaactaatccgacgaataaaaaaaaacgaatcgtcgtaaacgcgatcgacgataaatcgaacacccgcgccaaaccgaaaaacgaccccaacttaaccgctcttcgaaaacgataatttcatcgaaatacaccgaaatcgaaaataaaacgaaaaaataaaaacgtactcgaatcaaaaccgatctaaaccccgtcttcgtattttattttttaacgataacgacgtaaaataatcaaaataaccgaatttaaacgtaatacgtattcaataaaaaaatcataaatctcaaaatcgccaaaaaaacaaaaacgaacaaaatcccgaaccgtccaacaaacgaaaataaaaataaaaaattttcgaaaaaaacgttaaacaaatcaacgttactaaaaactaaaataaatcaaataataaccaaaaaaaataacgtcctacacaataacgttcgtaaaaatttaaaaatcgttatacctaaaattaacctctcgataataaatttcttcccattatactttaaatttccaaccaataa

SEQ ID NO: 1445 - DNA, 752 bp, Artificial Sequence
  chemically treated genomic DNA (Homo sapiens) CpG-island No: 1445
gtttttttcgtattttttattttttttgtatttttcgtttttttcgtattttttattttttttttatttttcgtttttttcgtatttttcgttttttttacgtttttcgtttttttcgtatttttcgttttttttttattttttattttttttgtattttttttttttttcgtattttttattttttttttatttttcgtttttttcgtattttttatttttttcgtatttttcgtttttttcgtatttttcgttttttttttatttttcgtcgtttttttatttttcgtttttttcgtatttttcgtttttttcgtatttttcgtttttttcgtatttttcgttttttttgtatttttcgtcgtttttttatttttcgtttttttcgtatttttcgtttttttcgtatttttcgtttttttcgtatttttcgttttttttttatttttcgtttttttcgtatttttcgttttttttttatttttcgtttttttcgtatttttcgttttttttgtatttttcgttttttttttatttttcgtttttttcgtatttttcgttttttttatgttcgttattttttttgtattttttattttttttgtatttttcgttttttttgcgttcgtcgtttttttcgtttttttttttttttttgtattttttattttttttatgtttttcgtttttttcgtattttcgtttttgttgttttttttgtgtttttttttttcgggtgtgttcgtggtttg

SEQ ID NO: 1446 - DNA, 752 bp, Artificial Sequence
  chemically treated genomic DNA (Homo sapiens) CpG-island No: 1446
caaaccacgaacacacccgaaaaaaaaaaacacaaaaaaaacaacaaaaacgaaaatacgaaaaaaacgaaaaacataaaaaaaataaaaaatacaaaaaaaaaaaaaaaaacgaaaaaaacgacgaacgcaaaaaaaacgaaaaatacaaaaaaaataaaaaatacaaaaaaaataacgaacataaaaaaaacgaaaaatacgaaaaaaacgaaaaataaaaaaaaaacgaaaaatacaaaaaaaacgaaaaatacgaaaaaaacgaaaaataaaaaaaaaacgaaaaatacgaaaaaaacgaaaaataaaaaaaaaacgaaaaatacgaaaaaaacgaaaaatacgaaaaaaacgaaaaatacgaaaaaaacgaaaaataaaaaaacgacgaaaaatacaaaaaaaacgaaaaatacgaaaaaaacgaaaaatacgaaaaaaacgaaaaatacgaaaaaaacgaaaaataaaaaaacgacgaaaaataaaaaaaaaacgaaaaatacgaaaaaaacgaaaaatacgaaaaaaataaaaaatacgaaaaaaacgaaaaataaaaaaaaaataaaaaatacgaaaaaaaaaaaaaatacaaaaaaaataaaaaataaaaaaaaaacgaaaaatacgaaaaaaacgaaaaacgtaaaaaaaacgaaaaatacgaaaaaaacgaaaaataaaaaaaaaataaaaaatacgaaaaaaacgaaaaatacaaaaaaaataaaaaatacgaaaaaaac

SEQ ID NO: 1447 - DNA, 752 bp, Artificial Sequence
  chemically treated genomic DNA (Homo sapiens) CpG-island No: 1447
taagttacgagtatattcgaggaagaagagtatagggaagatagtaggagcgagggtgcggggaggacgagaggtatggggaggatgaggaatgtagggagaaggaggggagcggggaggacgacgggcgtagggaggacgaggaatgtagggagaatgaggaatatagggaggatgacgggtatggggaggacgaggaatgcggggaggacgaggaatgaggggaggacgaggaatgtagggaggacgaggaatgcggggaggacgaggaatgaggggaggacgaggaatgcggggaggacgaggaatgaggggaggacgaggaatgcggggaggacgaggaatgcggggaggacgaggaatgcggggaggacgaggaatgaggggacgacgaggaatgtagggaggacgaggaatgcggggaggacgaggaatgcggggaggacgaggaatgcggggaggacgaggaatgaggggacgacgaggaatgaggggaggacgaggaatgcggggaggacgaggaatgcggggaggatgaggaatacggggaggacgaggaatgaggggaggatgaagaatgcggggaggaagaggaatatagggaagatgaggaatgaggggaggacgaggaatgcggggaggacgagaggcgtggggaggacgaggaatgcggggaggacgaggaatgaggggaggatgaagaatgcggggaggacgaggaatatagggaagatgaggaatgcggggaggat

SEQ ID NO: 1448 - DNA, 752 bp, Artificial Sequence
  chemically treated genomic DNA (Homo sapiens) CpG-island No: 1448
atcctccccgcattcctcatcttccctatattcctcgtcctccccgcattcttcatcctcccctcattcctcgtcctccccgcattcctcgtcctccccacgcctctcgtcctccccgcattcctcgtcctcccctcattcctcatcttccctatattcctcttcctccccgcattcttcatcctcccctcattcctcgtcctccccgtattcctcatcctccccgcattcctcgtcctccccgcattcctcgtcctcccctcattcctcgtcgtcccctcattcctcgtcctccccgcattcctcgtcctccccgcattcctcgtcctccccgcattcctcgtcctccctacattcctcgtcgtcccctcattcctcgtcctccccgcattcctcgtcctccccgcattcctcgtcctccccgcattcctcgtcctcccctcattcctcgtcctccccgcattcctcgtcctcccctcattcctcgtcctccccgcattcctcgtcctccctacattcctcgtcctcccctcattcctcgtcctccccgcattcctcgtcctccccatacccgtcatcctccctatattcctcattctccctacattcctcgtcctccctacgcccgtcgtcctccccgctcccctccttctccctacattcctcatcctccccatacctctcgtcctccccgcaccctcgctcctactatcttccctatactcttcttcctcgaatatactcgtaactta

SEQ ID NO: 1449 - DNA, 524 bp, Artificial Sequence
  chemically treated genomic DNA (Homo sapiens) CpG-island No: 1449
agggttttcgcggatcggggtaggcggcggcggcggcggcggtattaaggttggatcggagaaaggaaggggagggggaggggaggcggcgagggggagggggaggggggcgggcgcggagtcgtagcgcgcgtcgggggcgggggaggcgcggtttcgtcggtagagatcggcgcgttcgagttttcggggatcgggaaatttcggaattagttggcgggggcgcgaggggagatcgggaggcgggttttcgggttagatttcgcggttttcgggttcgtacggcgaggatgtgatttgaataataaaaggtggtttttttttagagttttcggtggcggggatcgtcgatttcggagcgagaggtcgtcggttcgttaggaagcgtgtgtgtgtgtgtgtgtgtgtgtgtgtgtgcgttcgcgtgtgtgtgtaggcgtgcgtgtgtatgtatgcgtgtgttttggtggtgggattagtgggatttaggaagtgagtaggggaggtggtgaaaaaggagggat

SEQ ID NO: 1450 - DNA, 524 bp, Artificial Sequence
  chemically treated genomic DNA (Homo sapiens) CpG-island No: 1450
atccctcctttttcaccacctcccctactcacttcctaaatcccactaatcccaccaccaaaacacacgcatacatacacacgcacgcctacacacacacgcgaacgcacacacacacacacacacacacacacacacgcttcctaacgaaccgacgacctctcgctccgaaatcgacgatccccgccaccgaaaactctaaaaaaaaaccaccttttattattcaaatcacatcctcgccgtacgaacccgaaaaccgcgaaatctaacccgaaaacccgcctcccgatctcccctcgcgcccccgccaactaattccgaaatttcccgatccccgaaaactcgaacgcgccgatctctaccgacgaaaccgcgcctcccccgcccccgacgcgcgctacgactccgcgcccgcccccctccccctccccctcgccgcctcccctccccctccccttcctttctccgatccaaccttaataccgccgccgccgccgccgcctaccccgatccgcgaaaaccct

SEQ ID NO: 1451 - DNA, 524 bp, Artificial Sequence
  chemically treated genomic DNA (Homo sapiens) CpG-island No: 1451
gtttttttttttttattattttttttgtttattttttgagttttattgattttattattaaaatatacgtatgtatgtatacgtacgtttgtatatatacgcgggcgtatatatatatatatatatatatatatatacgttttttggcgggtcggcggtttttcgtttcgggatcggcgattttcgttatcgggaattttggggagaagttattttttgttatttaaattatattttcgtcgtgcgagttcgggggtcgcgggatttggttcgggaattcgtttttcggttttttttcgcgttttcgttagttgatttcgggatttttcggttttcgggggttcgggcgcgtcggtttttgtcggcggggtcgcgtttttttcgttttcggcgcgcgttgcggtttcgcgttcgtttttttttttttttttttcgtcgttttttttttttttttttttttttttttcggtttagttttggtgtcgtcgtcgtcgtcgtcgtttgtttcggttcgcgggggtttt

SEQ ID NO: 1452 - DNA, 524 bp, Artificial Sequence
  chemically treated genomic DNA (Homo sapiens) CpG-island No: 1452
aaaacccccgcgaaccgaaacaaacgacgacgacgacgacgacaccaaaactaaaccgaaaaaaaaaaaaaaaaaaaaaaaaaaaacgacgaaaaaaaaaaaaaaaaaaacgaacgcgaaaccgcaacgcgcgccgaaaacgaaaaaaacgcgaccccgccgacaaaaaccgacgcgcccgaacccccgaaaaccgaaaaatcccgaaatcaactaacgaaaacgcgaaaaaaaaccgaaaaacgaattcccgaaccaaatcccgcgacccccgaactcgcacgacgaaaatataatttaaataacaaaaaataacttctccccaaaattcccgataacgaaaatcgccgatcccgaaacgaaaaaccgccgacccgccaaaaaacgtatatatatatatatatatatatatatatacgcccgcgtatatatacaaacgtacgtatacatacatacgtatattttaataataaaatcaataaaactcaaaaaataaacaaaaaaaataataaaaaaaaaaaaac

SEQ ID NO: 1453 - DNA, 720 bp, Artificial Sequence
  chemically treated genomic DNA (Homo sapiens) CpG-island No: 1453
tttttacggcgtcgttcgtttcgttttattcgcggggattcggcgttaacgggacggttttcgtttgttattggttgtgagttttgttagttttttagagatttcgtttttcgtcgaacggttttttcgttcgttttcgtttttttaggagttttttcgttggttcggtttcgattagtttttcggggtttcgaggcgcgtggtgattggtttggagttttgttagttatcgtggtttcgtcgttttaggtagggtcggggcggggtgcggacggggcgaggtttggatggggcgtggtttgggcgggttgttttgatatgttttcgttcgtttcgttttcgttcgcgtatcgttttttttttttttcggtcgtagttttcgcgcgtttcgagcgtgttgtttttcgttaagcgtcgtttattattttgttcgtttttgtagggggttatttcgcgacggttcgtggagatgggcggggatgacgcgggtcgggtagtggggtttttttcgggggaattttagttcgtttgcgaatagttcgttagtttttttcgggtttgggattcgggagcgtcggattgattagttttgcggtcgtagttcgggaaagcgtagtttcgcgggcggggcgtagcgtgggcgtttggtcggattcggtttaatgggtggtcgtttttatttagtttttaggttttttcgttttgtatttttttattttg

SEQ ID NO: 1454 - DNA, 720 bp, Artificial Sequence
  chemically treated genomic DNA (Homo sapiens) CpG-island No: 1454
caaaataaaaaaatacaaaacgaaaaaacctaaaaactaaataaaaacgaccacccattaaaccgaatccgaccaaacgcccacgctacgccccgcccgcgaaactacgctttcccgaactacgaccgcaaaactaatcaatccgacgctcccgaatcccaaacccgaaaaaaactaacgaactattcgcaaacgaactaaaattcccccgaaaaaaaccccactacccgacccgcgtcatccccgcccatctccacgaaccgtcgcgaaataaccccctacaaaaacgaacaaaataataaacgacgcttaacgaaaaacaacacgctcgaaacgcgcgaaaactacgaccgaaaaaaaaaaaaaacgatacgcgaacgaaaacgaaacgaacgaaaacatatcaaaacaacccgcccaaaccacgccccatccaaacctcgccccgtccgcaccccgccccgaccctacctaaaacgacgaaaccacgataactaacaaaactccaaaccaatcaccacgcgcctcgaaaccccgaaaaactaatcgaaaccgaaccaacgaaaaaactcctaaaaaaacgaaaacgaacgaaaaaaccgttcgacgaaaaacgaaatctctaaaaaactaacaaaactcacaaccaataacaaacgaaaaccgtcccgttaacgccgaatccccgcgaataaaacgaaacgaacgacgccgtaaaaa

SEQ ID NO: 1455 - DNA, 720 bp, Artificial Sequence
  chemically treated genomic DNA (Homo sapiens) CpG-island No: 1455
tagaatggagaagtgtaggacggggaagtttgggagttgggtgggggcggttatttattgagtcggattcggttaggcgtttacgttgcgtttcgttcgcggggttgcgttttttcgggttgcggtcgtagggttggttagttcggcgttttcgggttttaggttcggaaggagttaacgggttattcgtaggcgggttgggattttttcgggggaggttttattgttcggttcgcgttattttcgtttatttttacgggtcgtcgcgggatagttttttgtaggagcgggtagggtagtgggcggcgtttggcggagggtagtacgttcggggcgcgcggggattgcggtcgaggggaggagagggcggtgcgcgggcgggggcggggcgagcgagggtatattagggtagttcgtttaggttacgttttatttaggtttcgtttcgttcgtatttcgtttcggttttgtttagaacggcgggattacggtgattgataggattttagattagttattacgcgtttcgaggtttcgagaggttagtcggggtcgagttagcggaggggtttttgaaggggcgggggcgggcggggaagtcgttcggcgaggggcggggtttttggaagattggtagaatttatagttaatggtaggcgggagtcgtttcgttagcgtcggattttcgcgggtagggcggggcgggcggcgtcgtgggga

SEQ ID NO: 1456 - DNA, 720 bp, Artificial Sequence
  chemically treated genomic DNA (Homo sapiens) CpG-island No: 1456
tccccacgacgccgcccgccccgccctacccgcgaaaatccgacgctaacgaaacgactcccgcctaccattaactataaattctaccaatcttccaaaaaccccgcccctcgccgaacgacttccccgcccgcccccgccccttcaaaaacccctccgctaactcgaccccgactaacctctcgaaacctcgaaacgcgtaataactaatctaaaatcctatcaatcaccgtaatcccgccgttctaaacaaaaccgaaacgaaatacgaacgaaacgaaacctaaataaaacgtaacctaaacgaactaccctaatataccctcgctcgccccgcccccgcccgcgcaccgccctctcctcccctcgaccgcaatccccgcgcgccccgaacgtactaccctccgccaaacgccgcccactaccctacccgctcctacaaaaaactatcccgcgacgacccgtaaaaataaacgaaaataacgcgaaccgaacaataaaacctcccccgaaaaaatcccaacccgcctacgaataacccgttaactccttccgaacctaaaacccgaaaacgccgaactaaccaaccctacgaccgcaacccgaaaaaacgcaaccccgcgaacgaaacgcaacgtaaacgcctaaccgaatccgactcaataaataaccgcccccacccaactcccaaacttccccgtcctacacttctccattcta

SEQ ID NO: 1457 - DNA, 1090 bp, Artificial Sequence
  chemically treated genomic DNA (Homo sapiens) CpG-island No: 1457
cgtttatttcgagttgttcgtggagtacgggatttggagcggcggcggatagtaagtggtgagcgatttcgagaacgtttgcgtggtaatagtggcgttcgagatttagagcggcgtcgaatagttggaggtgttcgggatttagagcggcggcgtgttattggtgaggttcgagagcgggatttttttcgagttattggagatgtgcgagatcgagatttttttcgggtgatcggagatgttttggattttgattttttgcgagtgataggcgaagttttgtttcgagatcgttttttggttattggtggagttttggatttggattttttgcgagttattggtggagttttagaacgggagcggcggcgtgttgttggcgttttagattttgaacgacggcgggttattggtggcgttttggatttggatcgttttttgtttattggggatgtttttgatcgggattttcgtcgagttattgaagttttggattttgatcgttttcggttgattggtgaagttcgagatttggatttacgtcggtttattaggggggttttggatttggatcgtcggtgagtggttggagaggttcgagatttagagcgtttttacggggttggtgatgtgcgtgagcgagaacgttttcgattggttgggggtgttcgagagcggttttttcggcgtcgagaggaggttcgggaatttttttgtcgggtaggtgattttgagtgataattagagtttttttttcgtcgtcgagtaattcgcgattttgatcggtttcgttgttttcgtcgagaggttgattgagaagatttagatttatttcgacgtcgggttgtttttgttttttttttttttgagcgggaacgggatttttggagtttacgaggttttggcgaaggagagcggtttttttttgaggttgttttagtgcgtggagatgaagttgagcgtcgtcggcgtgaagatttcgatttttcggttggtttcggggaagatattgagggattttttcggtgttttgggggagttttagagcgagtttttggtgaggatgaggtagagcggtttttacgggata

SEQ ID NO: 1458 - DNA, 1090 bp, Artificial Sequence
  chemically treated genomic DNA (Homo sapiens) CpG-island No: 1458
tatcccgtaaaaaccgctctacctcatcctcaccaaaaactcgctctaaaactcccccaaaacaccgaaaaaatccctcaatatcttccccgaaaccaaccgaaaaatcgaaatcttcacgccgacgacgctcaacttcatctccacgcactaaaacaacctcaaaaaaaaaccgctctccttcgccaaaacctcgtaaactccaaaaatcccgttcccgctcaaaaaaaaaaaaaacaaaaacaacccgacgtcgaaataaatctaaatcttctcaatcaacctctcgacgaaaacaacgaaaccgatcaaaatcgcgaattactcgacgacgaaaaaaaaactctaattatcactcaaaatcacctacccgacaaaaaaattcccgaacctcctctcgacgccgaaaaaaccgctctcgaacacccccaaccaatcgaaaacgttctcgctcacgcacatcaccaaccccgtaaaaacgctctaaatctcgaacctctccaaccactcaccgacgatccaaatccaaaacccccctaataaaccgacgtaaatccaaatctcgaacttcaccaatcaaccgaaaacgatcaaaatccaaaacttcaataactcgacgaaaatcccgatcaaaaacatccccaataaacaaaaaacgatccaaatccaaaacgccaccaataacccgccgtcgttcaaaatctaaaacgccaacaacacgccgccgctcccgttctaaaactccaccaataactcgcaaaaaatccaaatccaaaactccaccaataaccaaaaaacgatctcgaaacaaaacttcgcctatcactcgcaaaaaatcaaaatccaaaacatctccgatcacccgaaaaaaatctcgatctcgcacatctccaataactcgaaaaaaatcccgctctcgaacctcaccaataacacgccgccgctctaaatcccgaacacctccaactattcgacgccgctctaaatctcgaacgccactattaccacgcaaacgttctcgaaatcgctcaccacttactatccgccgccgctccaaatcccgtactccacgaacaactcgaaataaacg

SEQ ID NO: 1459 - DNA, 1090 bp, Artificial Sequence
  chemically treated genomic DNA (Homo sapiens) CpG-island No: 1459
tgtttcgtagaagtcgttttgttttatttttattagaaattcgttttagaatttttttaaggtatcggagaagttttttagtgtttttttcggagttagtcgaaaaatcgaggtttttacgtcgacggcgtttagttttatttttacgtattaagataattttaaggagaggtcgttttttttcgttaaagtttcgtggattttagaggtttcgttttcgtttaaggagagagaaaataagaataattcgacgtcgagataggtttggatttttttagttaatttttcggcgaagatagcggagtcggttaaggtcgcgggttattcggcggcggaggggaggttttggttattatttaaggttatttgttcggtaggaaagttttcggattttttttcgacgtcgaagaggtcgttttcggatatttttaattagtcggaagcgttttcgtttacgtatattattagtttcgtggaaacgttttagatttcgagtttttttagttatttatcggcgatttaggtttagaatttttttgataagtcgacgtaggtttagatttcgaattttattagttagtcggagacggttaaggtttaggattttagtgattcgacgaagatttcggttaagagtatttttagtgagtagaaggcgatttagatttagaacgttattagtaattcgtcgtcgtttaaggtttagaacgttaataatacgtcgtcgttttcgttttagaattttattagtgattcgtagaaggtttagatttaggattttattagtaattaggaggcgatttcgaagtagaatttcgtttattattcgtagaagattaagatttagaatattttcggttattcgaaggagatttcgatttcgtatatttttagtaattcgaagaaggtttcgttttcgaattttattagtgatacgtcgtcgttttaggtttcggatatttttagttattcggcgtcgttttagatttcgaacgttattgttattacgtaaacgttttcgaagtcgtttattatttgttattcgtcgtcgttttagatttcgtattttacgaatagttcggggtaaacg

SEQ ID NO: 1460 - DNA, 1090 bp, Artificial Sequence
  chemically treated genomic DNA (Homo sapiens) CpG-island No: 1460
cgtttaccccgaactattcgtaaaatacgaaatctaaaacgacgacgaataacaaataataaacgacttcgaaaacgtttacgtaataacaataacgttcgaaatctaaaacgacgccgaataactaaaaatatccgaaacctaaaacgacgacgtatcactaataaaattcgaaaacgaaaccttcttcgaattactaaaaatatacgaaatcgaaatctccttcgaataaccgaaaatattctaaatcttaatcttctacgaataataaacgaaattctacttcgaaatcgcctcctaattactaataaaatcctaaatctaaaccttctacgaatcactaataaaattctaaaacgaaaacgacgacgtattattaacgttctaaaccttaaacgacgacgaattactaataacgttctaaatctaaatcgccttctactcactaaaaatactcttaaccgaaatcttcgtcgaatcactaaaatcctaaaccttaaccgtctccgactaactaataaaattcgaaatctaaacctacgtcgacttatcaaaaaaattctaaacctaaatcgccgataaataactaaaaaaactcgaaatctaaaacgtttccacgaaactaataatatacgtaaacgaaaacgcttccgactaattaaaaatatccgaaaacgacctcttcgacgtcgaaaaaaaatccgaaaactttcctaccgaacaaataaccttaaataataaccaaaacctcccctccgccgccgaataacccgcgaccttaaccgactccgctatcttcgccgaaaaattaactaaaaaaatccaaacctatctcgacgtcgaattattcttattttctctctccttaaacgaaaacgaaacctctaaaatccacgaaactttaacgaaaaaaaacgacctctccttaaaattatcttaatacgtaaaaataaaactaaacgccgtcgacgtaaaaacctcgatttttcgactaactccgaaaaaaacactaaaaaacttctccgataccttaaaaaaattctaaaacgaatttctaataaaaataaaacaaaacgacttctacgaaaca

SEQ ID NO: 1461 - DNA, 1086 bp, Artificial Sequence
  chemically treated genomic DNA (Homo sapiens) CpG-island No: 1461
ggttatttcggcggtatatgttggggggaggagtgaagtcgaggcgcgcgttttttttttttattaagggcgttcgcgaattcgagtataggcggttgcgaacgtcgttgttatgggggaggggcgggggggggggtgaagttcgcgcgcgataggaacggcgggaagggggaagggaggcgagggcgttcgcgttagcgaagggcgtcgagcgcgcgtgcgcgcggaggagttcggcggtttgggtagtttttcgcgcgttttggtttcgcgtcggggtcgtcgttttttttttattcggttcgttggtttttttatttttttattcgtcgttttcgttcgtcgttttcgagggggagaggttttgtcgtcgtcgttgttcgagttttcgagtttttcgggtttggggtcgtcgtttcgtttcgtcggttcgttcgttttagtcgacgtcgacgttttttcgtttttttaggggtcgtaacgggtttcgattgcgttattcgtatttcgtttgggtcgcgttgtacgttagtacgattaattgcgtgcgttagtacgtaaacgcgcgtcgcggggtttgtcgggaattggagtgcgtttcgcggttttttgcgtaggcgtcgaagttatatcgcgaagtatcgtttttttaggtataaggaaggttttatttcgttgtcgaaagattaagcgtttcgttggttagtgtaacgaagaacggaggaagcgacgtaagatatcgcgtattcgtaggtttttcgttgcggggaggagtatagggtttagcggtagtaaagcgacgttcgagcgcgtttcgtttttcgttgtcgatgtagagtattttgggagttgtggttcgggcgtgtcgcggagttcggatgtaatttcggttcggggcgtggcggttattttgtttttttatgttgggagacgatattttagtcgcggtggtgttgtcgttttcgtgtgattttgggtttttcgagcgagttcgtagttgtatagtagttcgttttttcgtattcgagagaagtcgttttagattttagttagcgggtattttcggaggtttcgagtttggttgta

SEQ ID NO: 1462 - DNA, 1086 bp, Artificial Sequence
  chemically treated genomic DNA (Homo sapiens) CpG-island No: 1462
tacaaccaaactcgaaacctccgaaaatacccgctaactaaaatctaaaacgacttctctcgaatacgaaaaaacgaactactatacaactacgaactcgctcgaaaaacccaaaatcacacgaaaacgacaacaccaccgcgactaaaatatcgtctcccaacataaaaaaacaaaataaccgccacgccccgaaccgaaattacatccgaactccgcgacacgcccgaaccacaactcccaaaatactctacatcgacaacgaaaaacgaaacgcgctcgaacgtcgctttactaccgctaaaccctatactcctccccgcaacgaaaaacctacgaatacgcgatatcttacgtcgcttcctccgttcttcgttacactaaccaacgaaacgcttaatctttcgacaacgaaataaaaccttccttatacctaaaaaaacgatacttcgcgatataacttcgacgcctacgcaaaaaaccgcgaaacgcactccaattcccgacaaaccccgcgacgcgcgtttacgtactaacgcacgcaattaatcgtactaacgtacaacgcgacccaaacgaaatacgaataacgcaatcgaaacccgttacgacccctaaaaaaacgaaaaaacgtcgacgtcgactaaaacgaacgaaccgacgaaacgaaacgacgaccccaaacccgaaaaactcgaaaactcgaacaacgacgacgacaaaacctctccccctcgaaaacgacgaacgaaaacgacgaataaaaaaataaaaaaaccaacgaaccgaataaaaaaaaaacgacgaccccgacgcgaaaccaaaacgcgcgaaaaactacccaaaccgccgaactcctccgcgcgcacgcgcgctcgacgcccttcgctaacgcgaacgccctcgcctcccttcccccttcccgccgttcctatcgcgcgcgaacttcacccccccccccgcccctcccccataacaacgacgttcgcaaccgcctatactcgaattcgcgaacgcccttaataaaaaaaaaaaacgcgcgcctcgacttcactcctccccccaacatataccgccgaaataacc

SEQ ID NO: 1463 - DNA, 1086 bp, Artificial Sequence
  chemically treated genomic DNA (Homo sapiens) CpG-island No: 1463
tgtagttaggttcggggttttcgggggtgttcgttggttggggtttgaggcggtttttttcgggtacgggaaggcggattgttgtgtagttgcgggttcgttcgggaaatttaaagttatacgaaagcggtagtattatcgcggttgggatatcgttttttaatatggggagataaaatggtcgttacgtttcgagtcgaaattatattcgggtttcgcgatacgttcgaattataatttttagaatgttttgtatcgatagcgggagacgagacgcgttcgggcgtcgttttgttgtcgttaggttttgtgttttttttcgtagcggaaggtttacgaatacgcggtgttttacgtcgtttttttcgtttttcgttgtattggttaacgggacgtttagtttttcggtaacggggtgaaattttttttgtgtttgaaaaaacggtatttcgcggtgtggtttcggcgtttgcgtaaaaggtcgcggggcgtattttagttttcggtaggtttcgcgacgcgcgtttgcgtgttgacgtacgtagttagtcgtgttgacgtgtagcgcggtttaggcggggtgcgagtggcgtagtcggagttcgttgcggtttttgaggaagcgaggaggcgtcggcgtcggttgaggcgggcggatcggcgaggcgaggcggcggttttaggttcgagggattcgggagttcgagtagcggcggcggtaagatttttttttttcggaggcggcgggcggaggcggcgggtgagagggtgagggagttagcgagtcgggtgggggaggggcggcggtttcggcgcgaggttaaagcgcgcggagaattgtttaggtcgtcgagttttttcgcgcgtacgcgcgttcgacgtttttcgttggcgcggacgttttcgtttttttttttttttttcgtcgtttttgtcgcgcgcgggttttattttttttttcgttttttttttatgataacggcgttcgtagtcgtttgtattcgggttcgcgagcgtttttggtgaggggggagggcgcgcgtttcggttttatttttttttttaatatgtgtcgtcgaggtggtt

SEQ ID NO: 1464 - DNA, 1086 bp, Artificial Sequence
  chemically treated genomic DNA (Homo sapiens) CpG-island No: 1464
aaccacctcgacgacacatattaaaaaaaaaaataaaaccgaaacgcgcgccctcccccctcaccaaaaacgctcgcgaacccgaatacaaacgactacgaacgccgttatcataaaaaaaaaacgaaaaaaaaaataaaacccgcgcgcgacaaaaacgacgaaaaaaaaaaaaaaaaacgaaaacgtccgcgccaacgaaaaacgtcgaacgcgcgtacgcgcgaaaaaactcgacgacctaaacaattctccgcgcgctttaacctcgcgccgaaaccgccgcccctcccccacccgactcgctaactccctcaccctctcacccgccgcctccgcccgccgcctccgaaaaaaaaaaatcttaccgccgccgctactcgaactcccgaatccctcgaacctaaaaccgccgcctcgcctcgccgatccgcccgcctcaaccgacgccgacgcctcctcgcttcctcaaaaaccgcaacgaactccgactacgccactcgcaccccgcctaaaccgcgctacacgtcaacacgactaactacgtacgtcaacacgcaaacgcgcgtcgcgaaacctaccgaaaactaaaatacgccccgcgaccttttacgcaaacgccgaaaccacaccgcgaaataccgttttttcaaacacaaaaaaaatttcaccccgttaccgaaaaactaaacgtcccgttaaccaatacaacgaaaaacgaaaaaaacgacgtaaaacaccgcgtattcgtaaaccttccgctacgaaaaaaaacacaaaacctaacgacaacaaaacgacgcccgaacgcgtctcgtctcccgctatcgatacaaaacattctaaaaattataattcgaacgtatcgcgaaacccgaatataatttcgactcgaaacgtaacgaccattttatctccccatattaaaaaacgatatcccaaccgcgataatactaccgctttcgtataactttaaatttcccgaacgaacccgcaactacacaacaatccgccttcccgtacccgaaaaaaaccgcctcaaaccccaaccaacgaacacccccgaaaaccccgaacctaactaca

SEQ ID NO: 1465 - DNA, 1173 bp, Artificial Sequence
  chemically treated genomic DNA (Homo sapiens) CpG-island No: 1465
attacggacgcgttggaggtcggtgggcggtcgtcgtagtcgtttttttattatttcgtttaggttttttcggtttggggtaagaggtttgtggttcgcgcgggaacgtattgtttatttttagatttgggattgggtcggcgcgcggacgttattaagaggttgcggttttcgttttcgcggtcggacgtggcgttttttttgaggtcgcggtcggagtttggaggtggggtcggagttagagttcggggttttgatgttatcgcgcggttgcgacggtttaggagcgcgtttcggcgggagttttaggtacgcggcgggggcgggggagcgggaagcgggcggttgggttcgtttttttcgggaggtcggcggggttgcgggcggacgggggtgaagagcgggcggcgaggcggtggtcgcggggtagttcgggtatcgttcggtcgggacgtgtttggttcggcgtcgcgttaggttgcgttagtggagtcggattttagcgcgttttttttagttgtagagttgtagggcggagaggcggtttattttaagttggcggcgcggtttaggggcgcggttgggcgcgtcgcgtgtggcgtcggcgggtagcgcggttttatttcgttatttttcgtttttgttttttgtcgttaagtatttggagaagtcgggtttttttttttcgggttcgcgttgttttttgcgcgcgattttttttcgacggtgaatttaacgggaaaggtttagaattgcgcggggttgcggttatttgttgtcgagtcgtttcgcgtgtttttgtcgttttttgcggtcgtcggggtttgcgtttttttttttttcgtgtttcggtttttagagattgaattttaggtaatcgggtttgtttacgttcgcggtcgttttttttcgggtgtcgttagttttttgtattttttgtgtatggtacggagttcgggtttttagagattttgtatttggggtgtagcgatcgatgagttcgtaaattagtcgtatattcggagcgtggatgttgcgtggggtgcgttgttagcgcggataggttgggagaacgggggacgttggggatagggagagtcggtgaattttttagaacgttcgtttagttagatttagttgcgggtattgggttttgagacgtggtttagtatt

SEQ ID NO: 1466 - DNA, 1173 bp, Artificial Sequence
  chemically treated genomic DNA (Homo sapiens) CpG-island No: 1466
aatactaaaccacgtctcaaaacccaatacccgcaactaaatctaactaaacgaacgttctaaaaaattcaccgactctccctatccccaacgtcccccgttctcccaacctatccgcgctaacaacgcaccccacgcaacatccacgctccgaatatacgactaatttacgaactcatcgatcgctacaccccaaatacaaaatctctaaaaacccgaactccgtaccatacacaaaaaatacaaaaaactaacgacacccgaaaaaaaacgaccgcgaacgtaaacaaacccgattacctaaaattcaatctctaaaaaccgaaacacgaaaaaaaaaaaaacgcaaaccccgacgaccgcaaaaaacgacaaaaacacgcgaaacgactcgacaacaaataaccgcaaccccgcgcaattctaaacctttcccgttaaattcaccgtcgaaaaaaaatcgcgcgcaaaaaacaacgcgaacccgaaaaaaaaaaacccgacttctccaaatacttaacgacaaaaaacaaaaacgaaaaataacgaaataaaaccgcgctacccgccgacgccacacgcgacgcgcccaaccgcgcccctaaaccgcgccgccaacttaaaataaaccgcctctccgccctacaactctacaactaaaaaaaacgcgctaaaatccgactccactaacgcaacctaacgcgacgccgaaccaaacacgtcccgaccgaacgatacccgaactaccccgcgaccaccgcctcgccgcccgctcttcacccccgtccgcccgcaaccccgccgacctcccgaaaaaaacgaacccaaccgcccgcttcccgctcccccgcccccgccgcgtacctaaaactcccgccgaaacgcgctcctaaaccgtcgcaaccgcgcgataacatcaaaaccccgaactctaactccgaccccacctccaaactccgaccgcgacctcaaaaaaaacgccacgtccgaccgcgaaaacgaaaaccgcaacctcttaataacgtccgcgcgccgacccaatcccaaatctaaaaataaacaatacgttcccgcgcgaaccacaaacctcttaccccaaaccgaaaaaacctaaacgaaataataaaaaaacgactacgacgaccgcccaccgacctccaacgcgtccgtaat

SEQ ID NO: 1467 - DNA, 1173 bp, Artificial Sequence
  chemically treated genomic DNA (Homo sapiens) CpG-island No: 1467
ggtattggattacgttttaaaatttagtattcgtagttgggtttggttaggcggacgttttgggaagtttatcggttttttttgtttttagcgtttttcgtttttttagtttgttcgcgttgatagcgtattttacgtagtatttacgtttcgagtgtgcgattggtttacgggtttatcggtcgttgtattttagatgtagagtttttggagattcgagtttcgtgttatgtataggaaatgtaggaagttggcgatattcggggagaggcggtcgcgggcgtggatagattcggttatttggggtttaatttttgggagtcgaggtacgggagggagagaggcgtaggtttcggcggtcgtagggggcggtagagatacgcggagcggttcgatagtagatggtcgtagtttcgcgtagttttgggtttttttcgttgggtttatcgtcggggaaggatcgcgcgtaggggatagcgcgagttcgggagggaaggattcggtttttttagatgtttggcgataaagggtaggagcggagggtggcggagtgagatcgcgttgttcgtcggcgttatacgcggcgcgtttagtcgcgtttttgagtcgcgtcgttagtttagagtgggtcgttttttcgttttgtagttttgtagttgggagaggcgcgttggggttcgattttattggcgtaatttgacgcggcgtcgagttagatacgtttcggtcgaacgatgttcgggttgtttcgcgattatcgtttcgtcgttcgttttttattttcgttcgttcgtagtttcgtcggtttttcgggggaagcggatttagtcgttcgtttttcgttttttcgttttcgtcgcgtatttgaggttttcgtcgagacgcgtttttgggtcgtcgtagtcgcgcggtgatattagagtttcgggttttgatttcgattttatttttaggtttcggtcgcggttttaggggaggcgttacgttcggtcgcgggggcgggagtcgtagttttttggtagcgttcgcgcgtcggtttagttttaggtttgagggtggatagtgcgttttcgcgcgggttataggttttttgttttaggtcggagaaatttgagcgaggtggtgggagggcgattacggcgatcgtttatcggtttttagcgcgttcgtgat

SEQ ID NO: 1468 - DNA, 1173 bp, Artificial Sequence
  chemically treated genomic DNA (Homo sapiens) CpG-island No: 1468
atcacgaacgcgctaaaaaccgataaacgatcgccgtaatcgccctcccaccacctcgctcaaatttctccgacctaaaacaaaaaacctataacccgcgcgaaaacgcactatccaccctcaaacctaaaactaaaccgacgcgcgaacgctaccaaaaaactacgactcccgcccccgcgaccgaacgtaacgcctcccctaaaaccgcgaccgaaacctaaaaataaaatcgaaatcaaaacccgaaactctaatatcaccgcgcgactacgacgacccaaaaacgcgtctcgacgaaaacctcaaatacgcgacgaaaacgaaaaaacgaaaaacgaacgactaaatccgcttcccccgaaaaaccgacgaaactacgaacgaacgaaaataaaaaacgaacgacgaaacgataatcgcgaaacaacccgaacatcgttcgaccgaaacgtatctaactcgacgccgcgtcaaattacgccaataaaatcgaaccccaacgcgcctctcccaactacaaaactacaaaacgaaaaaacgacccactctaaactaacgacgcgactcaaaaacgcgactaaacgcgccgcgtataacgccgacgaacaacgcgatctcactccgccaccctccgctcctaccctttatcgccaaacatctaaaaaaaccgaatccttccctcccgaactcgcgctatcccctacgcgcgatccttccccgacgataaacccaacgaaaaaaacccaaaactacgcgaaactacgaccatctactatcgaaccgctccgcgtatctctaccgccccctacgaccgccgaaacctacgcctctctccctcccgtacctcgactcccaaaaattaaaccccaaataaccgaatctatccacgcccgcgaccgcctctccccgaatatcgccaacttcctacatttcctatacataacacgaaactcgaatctccaaaaactctacatctaaaatacaacgaccgataaacccgtaaaccaatcgcacactcgaaacgtaaatactacgtaaaatacgctatcaacgcgaacaaactaaaaaaacgaaaaacgctaaaaacaaaaaaaaccgataaacttcccaaaacgtccgcctaaccaaacccaactacgaatactaaattttaaaacgtaatccaatacc

SEQ ID NO: 1469 - DNA, 532 bp, Artificial Sequence
  chemically treated genomic DNA (Homo sapiens) CpG-island No: 1469
gttcgtttagttttgagatttagacgcggacgtcgggttttatcgtatcgtatagcgcgggtaattttttaggaatcgcggttcgtacgtcgcgggcgcggaggtcgttttagcgttttatgtcgttgtcgtagaggggtaggggacgcgtttcggttttatttatttatgttaattacgttaagttggtgcggattggaatcgcgtttcgggcggagttgggatgttttgataagaagaagttcgggagtggggatattggtacggagtaaatttcgtttagttttgatttttttatagcggttacgttcggacgaacggatcgtcgagcgttaggacgcgtttcgttttttttcgtcgtcgtcgaatcgcgtcgagaggagtcgttagttcggcgcgcggttatttatcgttttcgtcgagtttcgatagtaaatcgacgtttttgttgcggttttaagtgttaagttgtttttagtcggtggttgtttacggtttagtggattagggtatattggtttcggcgggtatt

SEQ ID NO: 1470 - DNA, 532 bp, Artificial Sequence
  chemically treated genomic DNA (Homo sapiens) CpG-island No: 1470
aatacccgccgaaaccaatataccctaatccactaaaccgtaaacaaccaccgactaaaaacaacttaacacttaaaaccgcaacaaaaacgtcgatttactatcgaaactcgacgaaaacgataaataaccgcgcgccgaactaacgactcctctcgacgcgattcgacgacgacgaaaaaaaacgaaacgcgtcctaacgctcgacgatccgttcgtccgaacgtaaccgctataaaaaaatcaaaactaaacgaaatttactccgtaccaatatccccactcccgaacttcttcttatcaaaacatcccaactccgcccgaaacgcgattccaatccgcaccaacttaacgtaattaacataaataaataaaaccgaaacgcgtcccctacccctctacgacaacgacataaaacgctaaaacgacctccgcgcccgcgacgtacgaaccgcgattcctaaaaaattacccgcgctatacgatacgataaaacccgacgtccgcgtctaaatctcaaaactaaacgaac

SEQ ID NO: 1471 - DNA, 532 bp, Artificial Sequence
  chemically treated genomic DNA (Homo sapiens) CpG-island No: 1471
ggtgttcgtcggaattaatgtgttttggtttattgggtcgtgagtagttatcgattgggggtaatttggtatttagaatcgtagtagggacgtcggtttgttatcgggattcggcgaggacggtgagtggtcgcgcgtcgggttagcggtttttttcggcgcggttcggcggcggcgagaggggacgggacgcgttttggcgttcggcggttcgttcgttcgagcgtgatcgttgtggggaggttagggttgggcgggatttatttcgtgttaatatttttattttcgaatttttttttgttaaagtattttaatttcgttcgggacgcggttttagttcgtattaatttggcgtaattgatatgggtaggtggggtcgggacgcgttttttgtttttttgcggtaacgatatggagcgttggggcggttttcgcgttcgcggcgtgcggatcgcggtttttgaaaaattattcgcgttgtgcggtacggtaagattcggcgttcgcgtttggattttaaggttgagcgagt

SEQ ID NO: 1472 - DNA, 532 bp, Artificial Sequence
  chemically treated genomic DNA (Homo sapiens) CpG-island No: 1472
actcgctcaaccttaaaatccaaacgcgaacgccgaatcttaccgtaccgcacaacgcgaataatttttcaaaaaccgcgatccgcacgccgcgaacgcgaaaaccgccccaacgctccatatcgttaccgcaaaaaaacaaaaaacgcgtcccgaccccacctacccatatcaattacgccaaattaatacgaactaaaaccgcgtcccgaacgaaattaaaatactttaacaaaaaaaaattcgaaaataaaaatattaacacgaaataaatcccgcccaaccctaacctccccacaacgatcacgctcgaacgaacgaaccgccgaacgccaaaacgcgtcccgtcccctctcgccgccgccgaaccgcgccgaaaaaaaccgctaacccgacgcgcgaccactcaccgtcctcgccgaatcccgataacaaaccgacgtccctactacgattctaaataccaaattacccccaatcgataactactcacgacccaataaaccaaaacacattaattccgacgaacacc

SEQ ID NO: 1473 - DNA, 937 bp, Artificial Sequence
  chemically treated genomic DNA (Homo sapiens) CpG-island No: 1473
gtagggtattcggttagcgtttaattaaatcgaaatatcgtcgtagcgattataggtgtagattattaagtttatatcgttagtcgttcgggcgtttttaattagtagttggggcgggattaagttttcgagttgtcgtcgtagcggcggttgaaagttttattttttgcgcgtgcgcggtgcgcgtttcgtttttttgttgggtattaggcgttcgcgaagagcgcgcgcgttttcgtcggcgtcgggttcgcgtacgcgtacggcgacggcggcggtggcggtagtttttgttttaggttgcgagcggttggcggtttcgaggggagttgaggcgcggaggggttcggcggtagcggcggcggttcggtattgttatttttcggttcggttggcgtcggggcgcgcggtttggtttttttcgggcgcgcgggggcgatagcggtagcgattcgaggtttgcggtttaggttttagcgcggcggcgggttcgagtgtagcgcggaatcggttcgagggttttattcggaggtattatgagcgtggaggcgtacgggtttagttcgtagatttttatttttttggatacggaggaggtcgagttgtttggcgtcgatatatagggtttcgagttcgagtttatcgattttattttttttagttagacgtagacgtttttcggcggtttcggcggttcgggcggtggcggcgcgggaggttcgggcggcgcgggcgcgggcgttgcggcgggatagttcgacgcgtaggtgagcggtatatggcggtgtcggaagttcgggttcggtttcggcgtttgagatttgtttcgaattcgtttcgggttcggtttgtgtttggtcggagttttttatcgcggtcgggtttggggcgatttgtttcgggttttttattttggttcggtttgagtttatttgtt

SEQ ID NO: 1474 - DNA, 937 bp, Artificial Sequence
  chemically treated genomic DNA (Homo sapiens) CpG-island No: 1474
aacaaataaactcaaaccgaaccaaaataaaaaacccgaaacaaatcgccccaaacccgaccgcgataaaaaactccgaccaaacacaaaccgaacccgaaacgaattcgaaacaaatctcaaacgccgaaaccgaacccgaacttccgacaccgccatataccgctcacctacgcgtcgaactatcccgccgcaacgcccgcgcccgcgccgcccgaacctcccgcgccgccaccgcccgaaccgccgaaaccgccgaaaaacgtctacgtctaactaaaaaaaataaaatcgataaactcgaactcgaaaccctatatatcgacgccaaacaactcgacctcctccgtatccaaaaaaataaaaatctacgaactaaacccgtacgcctccacgctcataatacctccgaataaaaccctcgaaccgattccgcgctacactcgaacccgccgccgcgctaaaacctaaaccgcaaacctcgaatcgctaccgctatcgcccccgcgcgcccgaaaaaaaccaaaccgcgcgccccgacgccaaccgaaccgaaaaataacaataccgaaccgccgccgctaccgccgaacccctccgcgcctcaactcccctcgaaaccgccaaccgctcgcaacctaaaacaaaaactaccgccaccgccgccgtcgccgtacgcgtacgcgaacccgacgccgacgaaaacgcgcgcgctcttcgcgaacgcctaatacccaacaaaaaaacgaaacgcgcaccgcgcacgcgcaaaaaataaaactttcaaccgccgctacgacgacaactcgaaaacttaatcccgccccaactactaattaaaaacgcccgaacgactaacgatataaacttaataatctacacctataatcgctacgacgatatttcgatttaattaaacgctaaccgaataccctac

SEQ ID NO: 1475 - DNA, 937 bp, Artificial Sequence
  chemically treated genomic DNA (Homo sapiens) CpG-island No: 1475
ggtaggtaagtttaggtcgagttagagtaggggattcggggtagatcgttttaggttcggtcgcgatgggggatttcggttaaatataggtcgggttcgaggcgagttcggggtaggttttaggcgtcgaggtcgggttcgggttttcggtatcgttatgtgtcgtttatttgcgcgtcgagttgtttcgtcgtagcgttcgcgttcgcgtcgttcgggtttttcgcgtcgttatcgttcgggtcgtcggggtcgtcggggggcgtttgcgtttggttaggaagagtaaagtcggtgaattcgaattcggagttttgtgtgtcggcgttaagtagttcggtttttttcgtgtttaggaaagtgagagtttgcgagttgggttcgtacgtttttacgtttatggtgttttcgggtagggttttcgggtcggtttcgcgttgtattcgagttcgtcgtcgcgttgaggtttaggtcgtaggtttcgggtcgttgtcgttgtcgttttcgcgcgttcggaaaggattaaatcgcgcgtttcggcgttagtcggatcgagaggtaatagtgtcgagtcgtcgtcgttgtcgtcgagttttttcgcgttttagtttttttcgaagtcgttagtcgttcgtagtttagagtaggaattgtcgttatcgtcgtcgtcgtcgtgcgcgtgcgcgagttcgacgtcggcggaagcgcgcgcgtttttcgcgggcgtttggtgtttagtaggaagacgggacgcgtatcgcgtacgcgtagggggtggggtttttaatcgtcgttgcggcggtagttcgaggatttggtttcgttttaattgttaattggggacgttcgggcggttggcggtgtggatttggtggtttgtatttgtggtcgttgcgacggtgtttcggtttaattgagcgttagtcgaatattttat

SEQ ID NO: 1476 - DNA, 937 bp, Artificial Sequence
  chemically treated genomic DNA (Homo sapiens) CpG-island No: 1476
ataaaatattcgactaacgctcaattaaaccgaaacaccgtcgcaacgaccacaaatacaaaccaccaaatccacaccgccaaccgcccgaacgtccccaattaacaattaaaacgaaaccaaatcctcgaactaccgccgcaacgacgattaaaaaccccaccccctacgcgtacgcgatacgcgtcccgtcttcctactaaacaccaaacgcccgcgaaaaacgcgcgcgcttccgccgacgtcgaactcgcgcacgcgcacgacgacgacgacgataacgacaattcctactctaaactacgaacgactaacgacttcgaaaaaaactaaaacgcgaaaaaactcgacgacaacgacgacgactcgacactattacctctcgatccgactaacgccgaaacgcgcgatttaatcctttccgaacgcgcgaaaacgacaacgacaacgacccgaaacctacgacctaaacctcaacgcgacgacgaactcgaatacaacgcgaaaccgacccgaaaaccctacccgaaaacaccataaacgtaaaaacgtacgaacccaactcgcaaactctcactttcctaaacacgaaaaaaaccgaactacttaacgccgacacacaaaactccgaattcgaattcaccgactttactcttcctaaccaaacgcaaacgccccccgacgaccccgacgacccgaacgataacgacgcgaaaaacccgaacgacgcgaacgcgaacgctacgacgaaacaactcgacgcgcaaataaacgacacataacgataccgaaaacccgaacccgacctcgacgcctaaaacctaccccgaactcgcctcgaacccgacctatatttaaccgaaatcccccatcgcgaccgaacctaaaacgatctaccccgaatcccctactctaactcgacctaaacttacctacc

SEQ ID NO: 1477 - DNA, 557 bp, Artificial Sequence
  chemically treated genomic DNA (Homo sapiens) CpG-island No: 1477
ggcgtagacgtcgtatttcgttcgtttttcgttttgtatttatttcgttcgtatattcgttagcgttcggtatttgagtcgtcggtttcgcgggtgtttttttttttttttcggcgtttaaggggttatttcgagtcgttcgggggttttcgtcgtttttttgtatagtttggttgtcgtcgtttacgttggcgtcggttttttcggtggacgaggcggcggcggcgtcgagtagttcgtgggtttcgttcgcgttttcggtagttacgttgtgtattagttatgtatttacgttggtgcgagggacgaaggggatttcgagcgcgcgtatttttcggagtagttggttttcgggcggcgcggtagggtttagttttcggtttttggggtgtaagtggttcgcgcgtttttattttttcgaggtcgagaaggggttgagcgcgtaggcggagttggtcgggtcgtttaggaatagtagttcgttttgtagtagggtgggcggcggtagtagtaggtaaagatttaggtttacgcggagtttcgttaagtttagtagg

SEQ ID NO: 1478 - DNA, 557 bp, Artificial Sequence
  chemically treated genomic DNA (Homo sapiens) CpG-island No: 1478
cctactaaacttaacgaaactccgcgtaaacctaaatctttacctactactaccgccgcccaccctactacaaaacgaactactattcctaaacgacccgaccaactccgcctacgcgctcaaccccttctcgacctcgaaaaaataaaaacgcgcgaaccacttacaccccaaaaaccgaaaactaaaccctaccgcgccgcccgaaaaccaactactccgaaaaatacgcgcgctcgaaatccccttcgtccctcgcaccaacgtaaatacataactaatacacaacgtaactaccgaaaacgcgaacgaaacccacgaactactcgacgccgccgccgcctcgtccaccgaaaaaaccgacgccaacgtaaacgacgacaaccaaactatacaaaaaaacgacgaaaacccccgaacgactcgaaataaccccttaaacgccgaaaaaaaaaaaaaaacacccgcgaaaccgacgactcaaataccgaacgctaacgaatatacgaacgaaataaatacaaaacgaaaaacgaacgaaatacgacgtctacgcc

SEQ ID NO: 1479 - DNA, 557 bp, Artificial Sequence
  chemically treated genomic DNA (Homo sapiens) CpG-island No: 1479
tttgttgagtttggcggggtttcgcgtagatttagatttttatttgttgttgtcgtcgtttattttgttgtaggacgagttgttgtttttgggcggttcggttagtttcgtttacgcgtttagttttttttcggtttcgggagggtgggggcgcgcgggttatttgtattttaagggtcgggagttggattttgtcgcgtcgttcgagggttagttgtttcgggaggtgcgcgcgttcggggtttttttcgtttttcgtattagcgtggatgtatggttggtgtatagcgtggttgtcgggagcgcggacgaggtttacgggttgttcggcgtcgtcgtcgtttcgtttatcggaggagtcggcgttagcgtggacggcggtagttaggttgtgtaggggggcggcggggattttcgagcggttcggagtggttttttggacgtcggggaagaggagaaggtattcgcggaatcgacggtttaggtgtcggacgttggcggatgtgcgagcgaggtaggtgtagagcgggaagcgagcgaagtgcggcgtttacgtt

SEQ ID NO: 1480 - DNA, 557 bp, Artificial Sequence
  chemically treated genomic DNA (Homo sapiens) CpG-island No: 1480
aacgtaaacgccgcacttcgctcgcttcccgctctacacctacctcgctcgcacatccgccaacgtccgacacctaaaccgtcgattccgcgaataccttctcctcttccccgacgtccaaaaaaccactccgaaccgctcgaaaatccccgccgcccccctacacaacctaactaccgccgtccacgctaacgccgactcctccgataaacgaaacgacgacgacgccgaacaacccgtaaacctcgtccgcgctcccgacaaccacgctatacaccaaccatacatccacgctaatacgaaaaacgaaaaaaaccccgaacgcgcgcacctcccgaaacaactaaccctcgaacgacgcgacaaaatccaactcccgacccttaaaatacaaataacccgcgcgcccccaccctcccgaaaccgaaaaaaaactaaacgcgtaaacgaaactaaccgaaccgcccaaaaacaacaactcgtcctacaacaaaataaacgacgacaacaacaaataaaaatctaaatctacgcgaaaccccgccaaactcaacaaa

SEQ ID NO: 1481 - DNA, 502 bp, Artificial Sequence
  chemically treated genomic DNA (Homo sapiens) CpG-island No: 1481
aggtcgtcgtcggtcgattattatcgttttaggtgttttatcgtcgtcgcgcgttcgggaacgtttttgtcggcgttcgcgggtttcggcgttttagtcgtcggggtgatacgtgcggatttcgcgcgtcgttcgtatttgtttggaatttagataagcgaaataatggatcggggcgcgtggcggtcgtcgcgggtttttagtatcgggtataaaggcgttttttcggtagtcggtatcgtgtttggtatcgtcggggatcgggagaagcgaagaaggagttatttgagcgtcgagttcgttcgtttagtcgttcgtagttcggcgcggtggttaagtttcgttttcggtcgcgggcgtagtcgataggaatacgttttttgtcgttcggggttcgcgttcgtgggaggggtcgtacggggcggggtttttcgagtttaaagtttttttatgttcggggaacgtaaggttttttgggagtagaagttgttttgggtattaa

SEQ ID NO: 1482 - DNA, 502 bp, Artificial Sequence
  chemically treated genomic DNA (Homo sapiens) CpG-island No: 1482
ttaatacccaaaacaacttctactcccaaaaaaccttacgttccccgaacataaaaaaactttaaactcgaaaaaccccgccccgtacgacccctcccacgaacgcgaaccccgaacgacaaaaaacgtattcctatcgactacgcccgcgaccgaaaacgaaacttaaccaccgcgccgaactacgaacgactaaacgaacgaactcgacgctcaaataactccttcttcgcttctcccgatccccgacgataccaaacacgataccgactaccgaaaaaacgcctttatacccgatactaaaaacccgcgacgaccgccacgcgccccgatccattatttcgcttatctaaattccaaacaaatacgaacgacgcgcgaaatccgcacgtatcaccccgacgactaaaacgccgaaacccgcgaacgccgacaaaaacgttcccgaacgcgcgacgacgataaaacacctaaaacgataataatcgaccgacgacgacct

SEQ ID NO: 1483 - DNA, 502 bp, Artificial Sequence
  chemically treated genomic DNA (Homo sapiens) CpG-island No: 1483
ttggtgtttagaataatttttgtttttagaaagttttgcgtttttcggatataaagaggttttgagttcggggagtttcgtttcgtgcggttttttttacgggcgcgggtttcgggcggtagggggcgtgtttttgtcggttgcgttcgcggtcgggggcggagtttggttatcgcgtcgggttgcgggcggttgggcgaacgggttcggcgtttaggtggtttttttttcgtttttttcgattttcggcggtgttaggtacggtgtcggttgtcgagggaacgtttttgtgttcggtgttgggaattcgcgacggtcgttacgcgtttcggtttattgtttcgtttatttgggttttaggtaggtgcgggcggcgcgcggggttcgtacgtgttatttcggcggttggggcgtcgggattcgcgggcgtcggtaggggcgttttcgggcgcgcggcggcgatgaagtatttgaagcggtggtggtcggtcggcggcggttt

SEQ ID NO: 1484 - DNA, 502 bp, Artificial Sequence
  chemically treated genomic DNA (Homo sapiens) CpG-island No: 1484
aaaccgccgccgaccgaccaccaccgcttcaaatacttcatcgccgccgcgcgcccgaaaacgcccctaccgacgcccgcgaatcccgacgccccaaccgccgaaataacacgtacgaaccccgcgcgccgcccgcacctacctaaaacccaaataaacgaaacaataaaccgaaacgcgtaacgaccgtcgcgaattcccaacaccgaacacaaaaacgttccctcgacaaccgacaccgtacctaacaccgccgaaaatcgaaaaaaacgaaaaaaaaaccacctaaacgccgaacccgttcgcccaaccgcccgcaacccgacgcgataaccaaactccgcccccgaccgcgaacgcaaccgacaaaaacacgccccctaccgcccgaaacccgcgcccgtaaaaaaaaccgcacgaaacgaaactccccgaactcaaaacctctttatatccgaaaaacgcaaaactttctaaaaacaaaaattattctaaacaccaa

SEQ ID NO: 1485 - DNA, 706 bp, Artificial Sequence
  chemically treated genomic DNA (Homo sapiens) CpG-island No: 1485
ggtgtttacgtatttcgggtttcgcgttttcgttgtcgttcggcggtaaggacggaatcgggcgttgtttcgcgcgtatcgagagtcgcgggttcgggtttcgttcggagtcggggtggttttcgtggttttcgtcggcggtcgagtttttttcgaacgtttttagtcggcgtgttcgggcgatattttcgtaattcgattcgcgcgcgggtttcggattttatttgcgcgtttttgttttattcgtcgttcgggcgtttaagcgggaagtgggggatttttgggtggtttttttttggttcgcgtcgcgcggggtttttttgggcgcggagatttagttcgtttcggttttttgtttttcgtttcggcgttcggtagatttgtatgcgtcgtttcgttcggcgcgttcggttcgggtttcggttatttcgcgtttttgtcgttgttttcgtcgtcgtcgtcggatagttcgagtcgtcgtttttttttgggggcgattttagtatttcgttgggtgttttgtcgcgcgtttttttttacgttgtagttcgaggttacgtttagcggagaattttgtagtggatttttttggtttcggaataaaacgtttacgtcgattaggtttttaggatttgtttttgtttggttttcgcggttttttttgcgtcggggtagttgcgtttgtggggggagggttgggcgattg

SEQ ID NO: 1486 - DNA, 706 bp, Artificial Sequence
  chemically treated genomic DNA (Homo sapiens) CpG-island No: 1486
caatcgcccaaccctccccccacaaacgcaactaccccgacgcaaaaaaaaccgcgaaaaccaaacaaaaacaaatcctaaaaacctaatcgacgtaaacgttttattccgaaaccaaaaaaatccactacaaaattctccgctaaacgtaacctcgaactacaacgtaaaaaaaaacgcgcgacaaaacacccaacgaaatactaaaatcgcccccaaaaaaaaacgacgactcgaactatccgacgacgacgacgaaaacaacgacaaaaacgcgaaataaccgaaacccgaaccgaacgcgccgaacgaaacgacgcatacaaatctaccgaacgccgaaacgaaaaacaaaaaaccgaaacgaactaaatctccgcgcccaaaaaaaccccgcgcgacgcgaaccaaaaaaaaaccacccaaaaatcccccacttcccgcttaaacgcccgaacgacgaataaaacaaaaacgcgcaaataaaatccgaaacccgcgcgcgaatcgaattacgaaaatatcgcccgaacacgccgactaaaaacgttcgaaaaaaactcgaccgccgacgaaaaccacgaaaaccaccccgactccgaacgaaacccgaacccgcgactctcgatacgcgcgaaacaacgcccgattccgtccttaccgccgaacgacaacgaaaacgcgaaacccgaaatacgtaaacacc

SEQ ID NO: 1487 - DNA, 706 bp, Artificial Sequence
  chemically treated genomic DNA (Homo sapiens) CpG-island No: 1487
tagtcgtttagttttttttttataaacgtaattgtttcggcgtaaaagaggtcgcggaggttaggtaggagtaggttttggaggtttggtcggcgtgggcgttttatttcgagattaaggggatttattgtagagtttttcgttgggcgtgatttcgggttgtagcgtgggaggaagcgcgcggtaagatatttagcgaggtgttggggtcgtttttaggagaggacggcggttcggattgttcggcggcggcggcggggatagcgataggggcgcgaggtggtcgggattcgggtcgggcgcgtcgggcggggcggcgtatgtaaatttgtcgggcgtcggggcggggagtaggaagtcggggcgggttgggttttcgcgtttaggaaagtttcgcgcggcgcgggttagggaagggttatttaggggttttttatttttcgtttgggcgttcggacggcgaatggagtaggggcgcgtaggtaggattcggggttcgcgcgcggatcgggttgcgaaggtatcgttcgggtacgtcggttgagggcgttcgggaagggttcggtcgtcggcggggattacggggattatttcgatttcgagcggggttcgagttcgcgattttcggtgcgcgcggagtagcgttcggtttcgtttttgtcgtcgaacggtagcggaggcgcgaggttcggggtacgtggatatt

SEQ ID NO: 1488 - DNA, 706 bp, Artificial Sequence
  chemically treated genomic DNA (Homo sapiens) CpG-island No: 1488
aatatccacgtaccccgaacctcgcgcctccgctaccgttcgacgacaaaaacgaaaccgaacgctactccgcgcgcaccgaaaatcgcgaactcgaaccccgctcgaaatcgaaataatccccgtaatccccgccgacgaccgaacccttcccgaacgccctcaaccgacgtacccgaacgataccttcgcaacccgatccgcgcgcgaaccccgaatcctacctacgcgcccctactccattcgccgtccgaacgcccaaacgaaaaataaaaaacccctaaataacccttccctaacccgcgccgcgcgaaactttcctaaacgcgaaaacccaacccgccccgacttcctactccccgccccgacgcccgacaaatttacatacgccgccccgcccgacgcgcccgacccgaatcccgaccacctcgcgcccctatcgctatccccgccgccgccgccgaacaatccgaaccgccgtcctctcctaaaaacgaccccaacacctcgctaaatatcttaccgcgcgcttcctcccacgctacaacccgaaatcacgcccaacgaaaaactctacaataaatccccttaatctcgaaataaaacgcccacgccgaccaaacctccaaaacctactcctacctaacctccgcgacctcttttacgccgaaacaattacgtttataaaaaaaaaactaaacgacta

SEQ ID NO: 1489 - DNA, 612 bp, Artificial Sequence
  chemically treated genomic DNA (Homo sapiens) CpG-island No: 1489
aaacgttatagaggtagcggcggttaattagtggagggcgcgcgcggtcgcgtgtttttcgcgtttttcgttttttttcgcgcgtcgcgtacgtgtagtaatcgatttcgtttagcgaggcggagtttagggaagtcgcgggcggttcgtcgttgttttggagttgttgttgttgttgcggcggttgtatcggcggcgtcgaggtcgagatcgaggtcggggtgcgcgtttcgtaaacgtgttttattcgtgcggtttggttgcgttagtttttgcggttattcgggcgtttaggcgggtttgtgcgtcgttcgggcgaggatgcggttgtttcggtggttgttgaagtagtcggtgtttaagtagatcgagcgttattcgcgtttttcgtcgtcgtcgttttttattaaataatttttggatttcggtgagtacggggttaagggtttttatgggttcggggtcgtcgttattcgggttgttatttcggattttcgtagtttcggggtaaagtttgtgggaatcgtaggcggggttagggaatattcggggggtttttttggggttcggatttcggggcgcggaggggtagggtttggttttttcgtattt

SEQ ID NO: 1490 - DNA, 612 bp, Artificial Sequence
  chemically treated genomic DNA (Homo sapiens) CpG-island No: 1490
aaatacgaaaaaaccaaaccctacccctccgcgccccgaaatccgaaccccaaaaaaaccccccgaatattccctaaccccgcctacgattcccacaaactttaccccgaaactacgaaaatccgaaataacaacccgaataacgacgaccccgaacccataaaaacccttaaccccgtactcaccgaaatccaaaaattatttaataaaaaacgacgacgacgaaaaacgcgaataacgctcgatctacttaaacaccgactacttcaacaaccaccgaaacaaccgcatcctcgcccgaacgacgcacaaacccgcctaaacgcccgaataaccgcaaaaactaacgcaaccaaaccgcacgaataaaacacgtttacgaaacgcgcaccccgacctcgatctcgacctcgacgccgccgatacaaccgccgcaacaacaacaacaactccaaaacaacgacgaaccgcccgcgacttccctaaactccgcctcgctaaacgaaatcgattactacacgtacgcgacgcgcgaaaaaaaacgaaaaacgcgaaaaacacgcgaccgcgcgcgccctccactaattaaccgccgctacctctataacgttt

SEQ ID NO: 1491 - DNA, 612 bp, Artificial Sequence
  chemically treated genomic DNA (Homo sapiens) CpG-island No: 1491
gggtgcgagggggttaggttttgttttttcgcgtttcgaaattcgagttttaggagagtttttcggatattttttagtttcgtttgcggtttttatagattttatttcgaagttgcggagattcggggtggtagttcgaatggcggcggtttcgggtttatggggatttttggtttcgtatttatcgaagtttaggaattgtttgatggagagcggcgacggcgaaaagcgcgagtagcgttcgatttgtttgggtatcggttgttttagtagttatcggaatagtcgtattttcgttcgggcggcgtatagattcgtttagacgttcgggtggtcgtaagggttggcgtagttaagtcgtacggatagggtacgtttgcgaagcgcgtatttcggtttcgatttcggtttcggcgtcgtcggtgtagtcgtcgtagtagtagtagtagttttaggatagcggcgggtcgttcgcggtttttttaggtttcgtttcgttgggcggagtcggttgttgtacgtacgcggcgcgcgaggggaggcgaggagcgcgaggggtacgcggtcgcgcgcgttttttattgattggtcgtcgttgtttttgtgacgttt

SEQ ID NO: 1492 - DNA, 612 bp, Artificial Sequence
  chemically treated genomic DNA (Homo sapiens) CpG-island No: 1492
aaacgtcacaaaaacaacgacgaccaatcaataaaaaacgcgcgcgaccgcgtacccctcgcgctcctcgcctcccctcgcgcgccgcgtacgtacaacaaccgactccgcccaacgaaacgaaacctaaaaaaaccgcgaacgacccgccgctatcctaaaactactactactactacgacgactacaccgacgacgccgaaaccgaaatcgaaaccgaaatacgcgcttcgcaaacgtaccctatccgtacgacttaactacgccaacccttacgaccacccgaacgtctaaacgaatctatacgccgcccgaacgaaaatacgactattccgataactactaaaacaaccgatacccaaacaaatcgaacgctactcgcgcttttcgccgtcgccgctctccatcaaacaattcctaaacttcgataaatacgaaaccaaaaatccccataaacccgaaaccgccgccattcgaactaccaccccgaatctccgcaacttcgaaataaaatctataaaaaccgcaaacgaaactaaaaaatatccgaaaaactctcctaaaactcgaatttcgaaacgcgaaaaaacaaaacctaaccccctcgcaccc

SEQ ID NO: 1493 - DNA, 1182 bp, Artificial Sequence
  chemically treated genomic DNA (Homo sapiens) CpG-island No: 1493
tttaagcgtggttatatttatcggcgcgttgttttgttaagggggttgacgcggcgcgtacggttagggagtttttgggggtagacgtcgtttagtttttcggtcgtcgggtgtttattttagatcggttttttttttttttaggcgttttttacgttcgggtcggagagcgggcgttcggggcgacggacgattttgcgcgtacgtgggcgtagtttggaggtcgcggggatttttttttatgggggcgacgggagacgttttgtcggtagattttggttagggggtcgcgtttttcgttcgtatttttttcggagtttcggcggggacgtgcggggacgcgttcgggcgggagcgcgcgcgttaggcgttttcgaggtttcggtagcggttcggggcgggcggaggaggggtcgagggcggggcggtcgtagttttcgttattttcggtttttttcggttacggcgtatcgttttttcgttttcgttcgtttttttttatcgcgcgcgtttcgttcgtttcggagtttcgtttttcgttacgatgagtaaatgagcgcgagcgagggtatgaaatttaaattttatttaggggagaaagtgttgtgtttcgagtttgattttattaaggcgcgagtgttgtacgatgttaaggtgtcgtcgcggagggatagggaggaggcgcgggttgggggattcgggatcgggggcgggggcgggggcggacggtcgcgcggagttgagggatcggtcgggtttttcggtttgcgaggagcggtgcggtcggtagggggcgtttatagggcgttacgttcgggagtcggggcggggtttgggatgtttttattttttttcgttaggtcgggcggcgtacgcgcggttgggagtttcgtttatgttttgtcgcgttatcggggttatcgtttgcgttttcgattgtaacggtggtcgttgagggaggaggtttttcgaatacggtttttgttttcgcgttaaatgtttttttttgtgcggtttggtgtcgggtgggtttttgtgggacgttttggtcgttcgatttaggttttaatttatagttatacggcgttggtcgttgatttgcgacgttgtgtttttgggattttagtttagtttaggttttatttcgtttgtaggtcgtgaattttatttcgagggtaaggt

SEQ ID NO: 1494 - DNA, 1182 bp, Artificial Sequence
  chemically treated genomic DNA (Homo sapiens) CpG-island No: 1494
accttaccctcgaaataaaattcacgacctacaaacgaaataaaacctaaactaaactaaaatcccaaaaacacaacgtcgcaaatcaacgaccaacgccgtataactataaattaaaacctaaatcgaacgaccaaaacgtcccacaaaaacccacccgacaccaaaccgcacaaaaaaaaacatttaacgcgaaaacaaaaaccgtattcgaaaaacctcctccctcaacgaccaccgttacaatcgaaaacgcaaacgataaccccgataacgcgacaaaacataaacgaaactcccaaccgcgcgtacgccgcccgacctaacgaaaaaaaataaaaacatcccaaaccccgccccgactcccgaacgtaacgccctataaacgccccctaccgaccgcaccgctcctcgcaaaccgaaaaacccgaccgatccctcaactccgcgcgaccgtccgcccccgcccccgcccccgatcccgaatcccccaacccgcgcctcctccctatccctccgcgacgacaccttaacatcgtacaacactcgcgccttaataaaatcaaactcgaaacacaacactttctcccctaaataaaatttaaatttcataccctcgctcgcgctcatttactcatcgtaacgaaaaacgaaactccgaaacgaacgaaacgcgcgcgataaaaaaaaacgaacgaaaacgaaaaaacgatacgccgtaaccgaaaaaaaccgaaaataacgaaaactacgaccgccccgccctcgacccctcctccgcccgccccgaaccgctaccgaaacctcgaaaacgcctaacgcgcgcgctcccgcccgaacgcgtccccgcacgtccccgccgaaactccgaaaaaaatacgaacgaaaaacgcgaccccctaaccaaaatctaccgacaaaacgtctcccgtcgcccccataaaaaaaaatccccgcgacctccaaactacgcccacgtacgcgcaaaatcgtccgtcgccccgaacgcccgctctccgacccgaacgtaaaaaacgcctaaaaaaaaaaaaaaccgatctaaaataaacacccgacgaccgaaaaactaaacgacgtctacccccaaaaactccctaaccgtacgcgccgcgtcaacccccttaacaaaacaacgcgccgataaatataaccacgcttaaa

SEQ ID NO: 1495 - DNA, 1182 bp, Artificial Sequence
  chemically treated genomic DNA (Homo sapiens) CpG-island No: 1495
attttgttttcgggatggggtttacggtttataggcgggatggggtttaaattggattagggttttagggatataacgtcgtaagttagcggttagcgtcgtgtaattatgaattagaatttggatcggacggttagggcgttttataggagtttattcggtattaggtcgtatagaaggagatatttaacgcgaagatagaaatcgtattcgagaagtttttttttttagcggttatcgttgtagtcgggggcgtaaacggtagtttcggtaacgcgataaagtatgggcgaggtttttaatcgcgcgtgcgtcgttcggtttgacggaaggaagtggaagtattttagatttcgtttcgattttcgggcgtagcgttttgtgagcgttttttgtcggtcgtatcgtttttcgtaggtcgaggagttcggtcggttttttagtttcgcgcggtcgttcgttttcgttttcgttttcggtttcgggttttttagttcgcgttttttttttgttttttcgcggcggtattttggtatcgtatagtattcgcgttttggtggggttaggttcgaagtatagtatttttttttttgagtggaatttaaattttatgttttcgttcgcgtttatttgtttatcgtggcggagggcgaggtttcggggcgggcggagcgcgcgcggtgggggagggcgggcgggggcggggaggcggtgcgtcgtggtcggggggggtcgggaatggcggaggttgcggtcgtttcgttttcggtttttttttcgttcgtttcgagtcgttgtcgggatttcggaggcgtttggcgcgcgcgttttcgttcgggcgcgttttcgtacgttttcgtcggggtttcgggaggggtgcgggcggggagcgcgattttttggttaaggtttatcggtaggacgtttttcgtcgtttttatgggagagggttttcgcggtttttaggttgcgtttacgtgcgcgtagggtcgttcgtcgtttcgagcgttcgtttttcggttcgggcgtgggaggcgtttagggagagagagagtcggtttggagtaggtattcggcggtcgggaggttggacggcgtttgtttttaagagttttttggtcgtgcgcgtcgcgttagtttttttggtagagtagcgcgtcgatgagtgtggttacgtttgga

SEQ ID NO: 1496 - DNA, 1182 bp, Artificial Sequence
  chemically treated genomic DNA (Homo sapiens) CpG-island No: 1496
tccaaacgtaaccacactcatcgacgcgctactctaccaaaaaaactaacgcgacgcgcacgaccaaaaaactcttaaaaacaaacgccgtccaacctcccgaccgccgaatacctactccaaaccgactctctctctccctaaacgcctcccacgcccgaaccgaaaaacgaacgctcgaaacgacgaacgaccctacgcgcacgtaaacgcaacctaaaaaccgcgaaaaccctctcccataaaaacgacgaaaaacgtcctaccgataaaccttaaccaaaaaatcgcgctccccgcccgcacccctcccgaaaccccgacgaaaacgtacgaaaacgcgcccgaacgaaaacgcgcgcgccaaacgcctccgaaatcccgacaacgactcgaaacgaacgaaaaaaaaaccgaaaacgaaacgaccgcaacctccgccattcccgaccccccccgaccacgacgcaccgcctccccgcccccgcccgccctcccccaccgcgcgcgctccgcccgccccgaaacctcgccctccgccacgataaacaaataaacgcgaacgaaaacataaaatttaaattccactcaaaaaaaaaaatactatacttcgaacctaaccccaccaaaacgcgaatactatacgataccaaaataccgccgcgaaaaaacaaaaaaaaaacgcgaactaaaaaacccgaaaccgaaaacgaaaacgaaaacgaacgaccgcgcgaaactaaaaaaccgaccgaactcctcgacctacgaaaaacgatacgaccgacaaaaaacgctcacaaaacgctacgcccgaaaatcgaaacgaaatctaaaatacttccacttccttccgtcaaaccgaacgacgcacgcgcgattaaaaacctcgcccatactttatcgcgttaccgaaactaccgtttacgcccccgactacaacgataaccgctaaaaaaaaaaacttctcgaatacgatttctatcttcgcgttaaatatctccttctatacgacctaataccgaataaactcctataaaacgccctaaccgtccgatccaaattctaattcataattacacgacgctaaccgctaacttacgacgttatatccctaaaaccctaatccaatttaaaccccatcccgcctataaaccgtaaaccccatcccgaaaacaaaat

SEQ ID NO: 1497 - DNA, 532 bp, Artificial Sequence
  chemically treated genomic DNA (Homo sapiens) CpG-island No: 1497
aggtcgggagtttcgcgtcggagtaggaaaatttttcgttaagtttcgtaaaggagcgggatatagcgcgcgttttcgcgagggtcgtcgagtttcgagagtcgttttcgtttcggaggtttcgtaacggtatttcgggcgttacgtacgcgttgttttggcgtgtaggagtcgcggtcgcgcggcgagggatatttagtaggattcgcgttcggcgatttgtttcgtttcggtcgtttttcgtttcggtcggcgttgtagtaggtggcggtttcgcgcgttttgttttttttcgcggttcgcggttcggttttcgtgggaggtttttagtatcggagttagcgcggttttcgacgttattttcgggattcgtgggtttcgtatttatgtttcgcgggatcggtaattcgttcgacgaggacgtcggttatcgtggtaagtaaatgtttttattcgaatgtgcgcgcgagttatttttagtttaatatgggtttcgtatttttttttaaatcgtttttttcgtttgatattt

SEQ ID NO: 1498 - DNA, 532 bp, Artificial Sequence
  chemically treated genomic DNA (Homo sapiens) CpG-island No: 1498
aaatatcaaacgaaaaaaacgatttaaaaaaaaatacgaaacccatattaaactaaaaataactcgcgcgcacattcgaataaaaacatttacttaccacgataaccgacgtcctcgtcgaacgaattaccgatcccgcgaaacataaatacgaaacccacgaatcccgaaaataacgtcgaaaaccgcgctaactccgatactaaaaacctcccacgaaaaccgaaccgcgaaccgcgaaaaaaaacaaaacgcgcgaaaccgccacctactacaacgccgaccgaaacgaaaaacgaccgaaacgaaacaaatcgccgaacgcgaatcctactaaatatccctcgccgcgcgaccgcgactcctacacgccaaaacaacgcgtacgtaacgcccgaaataccgttacgaaacctccgaaacgaaaacgactctcgaaactcgacgaccctcgcgaaaacgcgcgctatatcccgctcctttacgaaacttaacgaaaaattttcctactccgacgcgaaactcccgacct

SEQ ID NO: 1499 - DNA, 532 bp, Artificial Sequence
  chemically treated genomic DNA (Homo sapiens) CpG-island No: 1499
agatattagacgaagggggcggtttaagagagggtgcgaaatttatgttagattagggatagttcgcgcgtatattcgggtagaaatatttgtttattacggtgatcggcgttttcgtcgagcgagttgtcggtttcgcggggtatgggtgcggggtttacgggtttcggggatggcgtcggaaatcgcgttaatttcggtattgagagttttttacgagggtcggatcgcgggtcgcgagggagggtagggcgcgcgggatcgttatttgttgtagcgtcggtcgaggcggggagcggtcggggcgagataggtcgtcgggcgcgggttttgttgggtgtttttcgtcgcgcggtcgcggtttttgtacgttagggtagcgcgtgcgtggcgttcggggtgtcgttacggggttttcggggcgggggcgattttcgggattcggcggttttcgcggaggcgcgcgttgtgtttcgtttttttacggaatttgacgaaaagtttttttatttcgacgcgaggttttcggttt

SEQ ID NO: 1500 - DNA, 532 bp, Artificial Sequence
  chemically treated genomic DNA (Homo sapiens) CpG-island No: 1500
aaaccgaaaacctcgcgtcgaaataaaaaaacttttcgtcaaattccgtaaaaaaacgaaacacaacgcgcgcctccgcgaaaaccgccgaatcccgaaaatcgcccccgccccgaaaaccccgtaacgacaccccgaacgccacgcacgcgctaccctaacgtacaaaaaccgcgaccgcgcgacgaaaaacacccaacaaaacccgcgcccgacgacctatctcgccccgaccgctccccgcctcgaccgacgctacaacaaataacgatcccgcgcgccctaccctccctcgcgacccgcgatccgaccctcgtaaaaaactctcaataccgaaattaacgcgatttccgacgccatccccgaaacccgtaaaccccgcacccataccccgcgaaaccgacaactcgctcgacgaaaacgccgatcaccgtaataaacaaatatttctacccgaatatacgcgcgaactatccctaatctaacataaatttcgcaccctctcttaaaccgcccccttcgtctaatatct

SEQ ID NO: 1501 - DNA, 523 bp, Artificial Sequence
  chemically treated genomic DNA (Homo sapiens) CpG-island No: 1501
tcggtcgcgcgttttcgtattaggcggatttttagtagatcgattattttttgatcgtagaacgttcgtattttttttttagttatcggtttatatagtcgggtttttattaagtatcgatttagtattcgggaggttatcggtaatttcgatttgagatgtttttttaaattcgggcgagttttaattcgaggtcgcggtttacgttcggaaatacgtagtcgacggcgttatcgtatatacggtcgaaaggagttataggatgttagtcgcgtacgcgtcggatatatataggaggtcgttcggttattatcgtagacgtcgttcgtagattcgttagcggtttagttatgtttagaaagaatagtcgcgttcgtaagggcgcgtcgttttttcgcgttttttcgggtttcgttttttttcggtagtaaattataattataacgatttatttttcgagcggtcgtcgcgtattaagtatcgcgttaggtttttaaatacgttttttattatatatttttta

SEQ ID NO: 1502 - DNA, 523 bp, Artificial Sequence
  chemically treated genomic DNA (Homo sapiens) CpG-island No: 1502
taaaaaatatataataaaaaacgtatttaaaaacctaacgcgatacttaatacgcgacgaccgctcgaaaaataaatcgttataattataatttactaccgaaaaaaaacgaaacccgaaaaaacgcgaaaaaacgacgcgcccttacgaacgcgactattctttctaaacataactaaaccgctaacgaatctacgaacgacgtctacgataataaccgaacgacctcctatatatatccgacgcgtacgcgactaacatcctataactcctttcgaccgtatatacgataacgccgtcgactacgtatttccgaacgtaaaccgcgacctcgaattaaaactcgcccgaatttaaaaaaacatctcaaatcgaaattaccgataacctcccgaatactaaatcgatacttaataaaaacccgactatataaaccgataactaaaaaaaaaatacgaacgttctacgatcaaaaaataatcgatctactaaaaatccgcctaatacgaaaacgcgcgaccga

SEQ ID NO: 1503 - DNA, 523 bp, Artificial Sequence
  chemically treated genomic DNA (Homo sapiens) CpG-island No: 1503
tgggaggtatgtagtagagggcgtgtttggaggtttgacgcgatatttaatgcgcgacgatcgttcggggggtaagtcgttgtaattatagtttattatcggggaggggcgggattcgaagggacgcgaaaggacgacgcgtttttgcggacgcgattattttttttaggtataattaagtcgttaacgaatttacgagcgacgtttacgatgatggtcgagcggttttttatatatattcgacgcgtgcgcgattaatattttgtaatttttttcggtcgtatatacgatagcgtcgtcgattacgtattttcgagcgtaggtcgcggtttcgggttaggattcgttcgagtttgggagggtattttaaatcggaattgtcgatagtttttcgaatattaggtcggtatttaatggaggttcgattatatgggtcgataattaaggggaggatacgagcgttttacggttagagaatggtcggtttattaggggttcgtttaatgcgggggcgcgcggtcga

SEQ ID NO: 1504 - DNA, 523 bp, Artificial Sequence
  chemically treated genomic DNA (Homo sapiens) CpG-island No: 1504
tcgaccgcgcgcccccgcattaaacgaacccctaataaaccgaccattctctaaccgtaaaacgctcgtatcctccccttaattatcgacccatataatcgaacctccattaaataccgacctaatattcgaaaaactatcgacaattccgatttaaaataccctcccaaactcgaacgaatcctaacccgaaaccgcgacctacgctcgaaaatacgtaatcgacgacgctatcgtatatacgaccgaaaaaaattacaaaatattaatcgcgcacgcgtcgaatatatataaaaaaccgctcgaccatcatcgtaaacgtcgctcgtaaattcgttaacgacttaattatacctaaaaaaaataatcgcgtccgcaaaaacgcgtcgtcctttcgcgtcccttcgaatcccgcccctccccgataataaactataattacaacgacttaccccccgaacgatcgtcgcgcattaaatatcgcgtcaaacctccaaacacgccctctactacatacctccca

SEQ ID NO: 1505 - DNA, 680 bp, Artificial Sequence
  chemically treated genomic DNA (Homo sapiens) CpG-island No: 1505
ttagggggcggaacggcggaggagagggttagcgaaaggttcgtttcgcgagcgtattttttttttaacgttcggaagattttattagtaaggttattcgattcggagtttttttcgcgagtttttaaattatcgatttaatttcgtcgtcgtcgtcgtcgaggtataatatataaatcgcgatcgtcgagcgtcgaggaaggattcggagaggtacgggaatatgaggtcgtagggttcgtattcgggaaggagatcggtgacgaggtggtagggtcgggaaggtttcggtcgataggtcgtcgttgcggttacgttttttcgcggagcgatcgtttcgggttttatttatagtcgacgcgttagattagacgcggttcgaaatttttcgggtagcgggaattgacgagaagcgttaagtaggatagtaggaattatttttttaagcgtacgtggttgtttagaatagcggtttttagatttaggcgcgtattggagttatcgtagggtttgtcgaattagagatcgtcggattttatttggggtttacggttttataggttcgggcgggatttaagaaattcgcgtttttagttagcgtttaggtgacgttgtcgtcggtttagattttttattcgagaattatagggttcgattgtatttattaatcggtttttttt

SEQ ID NO: 1506 - DNA, 680 bp, Artificial Sequence
  chemically treated genomic DNA (Homo sapiens) CpG-island No: 1506
aaaaaaaaccgattaataaatacaatcgaaccctataattctcgaataaaaaatctaaaccgacgacaacgtcacctaaacgctaactaaaaacgcgaatttcttaaatcccgcccgaacctataaaaccgtaaaccccaaataaaatccgacgatctctaattcgacaaaccctacgataactccaatacgcgcctaaatctaaaaaccgctattctaaacaaccacgtacgcttaaaaaaataattcctactatcctacttaacgcttctcgtcaattcccgctacccgaaaaatttcgaaccgcgtctaatctaacgcgtcgactataaataaaacccgaaacgatcgctccgcgaaaaaacgtaaccgcaacgacgacctatcgaccgaaaccttcccgaccctaccacctcgtcaccgatctccttcccgaatacgaaccctacgacctcatattcccgtacctctccgaatccttcctcgacgctcgacgatcgcgatttatatattatacctcgacgacgacgacgacgaaattaaatcgataatttaaaaactcgcgaaaaaaactccgaatcgaataaccttactaataaaatcttccgaacgttaaaaaaaaaatacgctcgcgaaacgaacctttcgctaaccctctcctccgccgttccgccccctaa

SEQ ID NO: 1507 - DNA, 680 bp, Artificial Sequence
  chemically treated genomic DNA (Homo sapiens) CpG-island No: 1507
aagaaaaatcggttggtaggtgtagtcgggttttataattttcggataaaaggtttaagtcgacgataacgttatttaaacgttaattgagggcgcgggttttttagatttcgttcgagtttgtaaggtcgtgggttttaaataaagttcgacggtttttaattcggtagattttacgataattttagtacgcgtttaagtttagaggtcgttattttaggtaattacgtacgtttgagggaatagtttttattattttgtttggcgtttttcgttaattttcgttgttcgaaagatttcgggtcgcgtttaatttgacgcgtcgattgtaaataaaattcgagacgatcgtttcgcgggaaaacgtggtcgtagcggcgatttgtcgatcgggattttttcgattttattatttcgttatcgatttttttttcgggtgcgagttttacgattttatattttcgtattttttcgggttttttttcggcgttcggcgatcgcggtttgtgtgttgtgtttcggcggcggcggcggcggggttggatcggtggtttgagggttcgcgggaggggtttcgaatcgggtaattttgttaataggatttttcgggcgttggaaggagggtgcgttcgcgaggcgagtttttcgttgattttttttttcgtcgtttcgttttttaa

SEQ ID NO: 1508 - DNA, 680 bp, Artificial Sequence
  chemically treated genomic DNA (Homo sapiens) CpG-island No: 1508
ttaaaaaacgaaacgacgaaaaaaaaaatcaacgaaaaactcgcctcgcgaacgcaccctccttccaacgcccgaaaaatcctattaacaaaattacccgattcgaaacccctcccgcgaaccctcaaaccaccgatccaaccccgccgccgccgccgccgaaacacaacacacaaaccgcgatcgccgaacgccgaaaaaaaacccgaaaaaatacgaaaatataaaatcgtaaaactcgcacccgaaaaaaaaatcgataacgaaataataaaatcgaaaaaatcccgatcgacaaatcgccgctacgaccacgttttcccgcgaaacgatcgtctcgaattttatttacaatcgacgcgtcaaattaaacgcgacccgaaatctttcgaacaacgaaaattaacgaaaaacgccaaacaaaataataaaaactattccctcaaacgtacgtaattacctaaaataacgacctctaaacttaaacgcgtactaaaattatcgtaaaatctaccgaattaaaaaccgtcgaactttatttaaaacccacgaccttacaaactcgaacgaaatctaaaaaacccgcgccctcaattaacgtttaaataacgttatcgtcgacttaaaccttttatccgaaaattataaaacccgactacacctaccaaccgatttttctt

SEQ ID NO: 1509 - DNA, 656 bp, Artificial Sequence
  chemically treated genomic DNA (Homo sapiens) CpG-island No: 1509
acggcggcgggaggtttttggggttgggaggggtgcgggcgtgggcggggcgcgagtagtaggggcgcgggttcgggttttaggttgtggggtcgggagtgcggggcgggattgttgcggtttcgcgttttgtggagtttgcggcgcggggagtgggggtcggggcggggaggaacgtggggtgcgggataggaggggggtagggagggagaagaaggcggcgcggggcggggcgggcgtagggttggggacggtacgggcgggcggtacgggcgttggcgcgtgcggggggggcggcgcggttttcggaagcgagggggcgttgtgttaggcggcggtcgtgcggggcgggcgcgttgtttttttcgtttcgcggatttcggaagcgcgcgtggtcgttatggcgcggaatgtggtgtgagtaggggtcgttattttttcgtcgcggggcgttttttagtgttataagtagacggattttatagggcgcgcggatttcggggagcggggtgggcgtttttgggtcgttttttggttcgggcgaggtagggtttttcgggattttttgttatgttttgagatacgcgaggcgggtggcggaggagtttttcgttaggtttagggtaattttagggggcgggcgtggtcgggttggg

SEQ ID NO: 1510 - DNA, 656 bp, Artificial Sequence
  chemically treated genomic DNA (Homo sapiens) CpG-island No: 1510
cccaacccgaccacgcccgccccctaaaattaccctaaacctaacgaaaaactcctccgccacccgcctcgcgtatctcaaaacataacaaaaaatcccgaaaaaccctacctcgcccgaaccaaaaaacgacccaaaaacgcccaccccgctccccgaaatccgcgcgccctataaaatccgtctacttataacactaaaaaacgccccgcgacgaaaaaataacgacccctactcacaccacattccgcgccataacgaccacgcgcgcttccgaaatccgcgaaacgaaaaaaacaacgcgcccgccccgcacgaccgccgcctaacacaacgccccctcgcttccgaaaaccgcgccgccccccccgcacgcgccaacgcccgtaccgcccgcccgtaccgtccccaaccctacgcccgccccgccccgcgccgccttcttctccctccctacccccctcctatcccgcaccccacgttcctccccgccccgacccccactccccgcgccgcaaactccacaaaacgcgaaaccgcaacaatcccgccccgcactcccgaccccacaacctaaaacccgaacccgcgcccctactactcgcgccccgcccacgcccgcacccctcccaaccccaaaaacctcccgccgccgt

SEQ ID NO: 1511 - DNA, 656 bp, Artificial Sequence
  chemically treated genomic DNA (Homo sapiens) CpG-island No: 1511
tttagttcggttacgttcgttttttggggttgttttaaatttggcggggggttttttcgttattcgtttcgcgtgttttaaggtatgatagggggtttcggagaattttgtttcgttcgggttaggaggcggtttagggacgtttatttcgtttttcggagttcgcgcgttttgtggggttcgtttgtttgtgatattaaggggcgtttcgcgacgggggggtgacgatttttatttatattatatttcgcgttatggcggttacgcgcgttttcggggttcgcgaggcggaaggagtagcgcgttcgtttcgtacggtcgtcgtttggtatagcgttttttcgttttcggaggtcgcgtcgtttttttcgtacgcgttagcgttcgtgtcgttcgttcgtgtcgtttttagttttgcgttcgtttcgtttcgcgtcgtttttttttttttttttgttttttttttgtttcgtattttacgttttttttcgtttcgatttttatttttcgcgtcgtagattttataggacgcggggtcgtagtagtttcgtttcgtattttcggttttatagtttgaagttcgggttcgcgtttttgttgttcgcgtttcgtttacgttcgtattttttttagttttagagatttttcgtcgtcgt

SEQ ID NO: 1512 - DNA, 656 bp, Artificial Sequence
  chemically treated genomic DNA (Homo sapiens) CpG-island No: 1512
acgacgacgaaaaatctctaaaactaaaaaaaatacgaacgtaaacgaaacgcgaacaacaaaaacgcgaacccgaacttcaaactataaaaccgaaaatacgaaacgaaactactacgaccccgcgtcctataaaatctacgacgcgaaaaataaaaatcgaaacgaaaaaaaacgtaaaatacgaaacaaaaaaaaaacaaaaaaaaaaaaaaaaacgacgcgaaacgaaacgaacgcaaaactaaaaacgacacgaacgaacgacacgaacgctaacgcgtacgaaaaaaacgacgcgacctccgaaaacgaaaaaacgctataccaaacgacgaccgtacgaaacgaacgcgctactccttccgcctcgcgaaccccgaaaacgcgcgtaaccgccataacgcgaaatataatataaataaaaatcgtcacccccccgtcgcgaaacgccccttaatatcacaaacaaacgaaccccacaaaacgcgcgaactccgaaaaacgaaataaacgtccctaaaccgcctcctaacccgaacgaaacaaaattctccgaaaccccctatcataccttaaaacacgcgaaacgaataacgaaaaaaccccccgccaaatttaaaacaaccccaaaaaacgaacgtaaccgaactaaa

SEQ ID NO: 1513 - DNA, 677 bp, Artificial Sequence
  chemically treated genomic DNA (Homo sapiens) CpG-island No: 1513
tgatgtcgcgagagaggtggttttgcgtaaatggggggtttggggcgagaatgggtcgcgtatacgtaaaagcgtatacgttagtaaagatgggggttataacgtgtgaatacgtggtgttagcgtcggtgaataatattttgtttgcgtcgagaaacgacggtttatttaagaagcgtttgtcggagatgagaatttttttaagtgtaattcgttgcgggaagttttatggaaaggtagaagtcgcgagagggcgggagacgtttgggggcgcgggaaatcggagagggttgtgtagcgagtgtggtatcgcggtgtgtcggcgtaaaaaagagagtatcgtcgaggagtagcgcgcgaaattagtggggcgtatagagagattttgcgtggggggggtttgtagaacggtcgtaaaaaaatcgcgtgacgcggtggagttcgttacggggggggggtcgtataagaggcgtagaatgtgcgttttacgggtggcgtatgttagagatcgtgtgatattaagtgtagtgtacgtgcgcgcgggagggtgtgtagacggtggaggagttcgagatcggcgagacgtaggggtgtttgggggggtataaaaattgcgtgatgggggagagtttgttataaacgtttagagcgtaagagcgggggtggttttaatatat

SEQ ID NO: 1514 - DNA, 677 bp, Artificial Sequence
  chemically treated genomic DNA (Homo sapiens) CpG-island No: 1514
atatattaaaaccacccccgctcttacgctctaaacgtttataacaaactctcccccatcacgcaatttttatacccccccaaacacccctacgtctcgccgatctcgaactcctccaccgtctacacaccctcccgcgcgcacgtacactacacttaatatcacacgatctctaacatacgccacccgtaaaacgcacattctacgcctcttatacgaccccccccccgtaacgaactccaccgcgtcacgcgatttttttacgaccgttctacaaaccccccccacgcaaaatctctctatacgccccactaatttcgcgcgctactcctcgacgatactctcttttttacgccgacacaccgcgataccacactcgctacacaaccctctccgatttcccgcgcccccaaacgtctcccgccctctcgcgacttctacctttccataaaacttcccgcaacgaattacacttaaaaaaattctcatctccgacaaacgcttcttaaataaaccgtcgtttctcgacgcaaacaaaatattattcaccgacgctaacaccacgtattcacacgttataacccccatctttactaacgtatacgcttttacgtatacgcgacccattctcgccccaaaccccccatttacgcaaaaccacctctctcgcgacatca

SEQ ID NO: 1515 - DNA, 677 bp, Artificial Sequence
  chemically treated genomic DNA (Homo sapiens) CpG-island No: 1515
gtgtgttggagttattttcgtttttgcgttttaggcgtttgtgataagtttttttttattacgtaatttttgtatttttttaggtatttttgcgtttcgtcgatttcggatttttttatcgtttatatattttttcgcgcgtacgtgtattatatttggtgttatacggtttttgatatacgttattcgtggagcgtatattttgcgttttttgtgcgatttttttttcgtggcgagttttatcgcgttacgcggtttttttgcggtcgttttgtagattttttttacgtagggtttttttgtgcgttttattggtttcgcgcgttgtttttcgacgatgtttttttttttgcgtcgatatatcgcgatgttatattcgttatataatttttttcgatttttcgcgtttttaagcgtttttcgttttttcgcgatttttgtttttttatgaagtttttcgtaacgggttatatttggggaggtttttattttcggtaggcgttttttgggtgggtcgtcgtttttcggcgtaaataaaatgttgtttatcggcgttggtattacgtgtttatacgttgtaatttttatttttattggcgtgtgcgtttttacgtgtgcgcggtttattttcgttttaggttttttatttgcgtaaggttatttttttcgcgatatta

SEQ ID NO: 1516 - DNA, 677 bp, Artificial Sequence
  chemically treated genomic DNA (Homo sapiens) CpG-island No: 1516
taatatcgcgaaaaaaataaccttacgcaaataaaaaacctaaaacgaaaataaaccgcgcacacgtaaaaacgcacacgccaataaaaataaaaattacaacgtataaacacgtaataccaacgccgataaacaacattttatttacgccgaaaaacgacgacccacccaaaaaacgcctaccgaaaataaaaacctccccaaatataacccgttacgaaaaacttcataaaaaaacaaaaatcgcgaaaaaacgaaaaacgcttaaaaacgcgaaaaatcgaaaaaaattatataacgaatataacatcgcgatatatcgacgcaaaaaaaaaaacatcgtcgaaaaacaacgcgcgaaaccaataaaacgcacaaaaaaaccctacgtaaaaaaaatctacaaaacgaccgcaaaaaaaccgcgtaacgcgataaaactcgccacgaaaaaaaaatcgcacaaaaaacgcaaaatatacgctccacgaataacgtatatcaaaaaccgtataacaccaaatataatacacgtacgcgcgaaaaaatatataaacgataaaaaaatccgaaatcgacgaaacgcaaaaatacctaaaaaaatacaaaaattacgtaataaaaaaaaacttatcacaaacgcctaaaacgcaaaaacgaaaataactccaacacac

SEQ ID NO: 1517 - DNA, 594 bp, Artificial Sequence
  chemically treated genomic DNA (Homo sapiens) CpG-island No: 1517
gacgttggagaaggcggagtgaaggaattcgaggtcgagtggaaaaagttcgtgaacgggtaatacgtattttgcgatacgaagtttttcgagtatcgttgtggtttcggtttcgagttgcggtacggaaatgagtaattatagtttttgtttagggtatattcggttcggttcggtttcgttgcgtgattttggataaagttcgagtttttttggtcgtttttttaatcgtataagttgcggttgtttttgcgttcgtgagcgtcgagatcgtgaatgcgcgcgaggcgtcgtcgtaggttttggattatacgcgtacgtgggttatcgtatttttcgagttaaacgtttttcgcgttgcggttttttttttttgatacggcgttcgttcgttttacgttttttaagttttgagttggtagtttggtagtagagtaggttttagcggggcggttcgcgtttcgcggcggggaatcgcgagttcggagatgtttagtttcggggtcgaggtcgggaaggaggtttcggggtcgggaaaggtttttatcggagcgggaggtcgcgttgttatttttatttagggagattaagtgt

SEQ ID NO: 1518 - DNA, 594 bp, Artificial Sequence
  chemically treated genomic DNA (Homo sapiens) CpG-island No: 1518
acacttaatctccctaaataaaaataacaacgcgacctcccgctccgataaaaacctttcccgaccccgaaacctccttcccgacctcgaccccgaaactaaacatctccgaactcgcgattccccgccgcgaaacgcgaaccgccccgctaaaacctactctactaccaaactaccaactcaaaacttaaaaaacgtaaaacgaacgaacgccgtatcaaaaaaaaaaaaccgcaacgcgaaaaacgtttaactcgaaaaatacgataacccacgtacgcgtataatccaaaacctacgacgacgcctcgcgcgcattcacgatctcgacgctcacgaacgcaaaaacaaccgcaacttatacgattaaaaaaacgaccaaaaaaactcgaactttatccaaaatcacgcaacgaaaccgaaccgaaccgaatataccctaaacaaaaactataattactcatttccgtaccgcaactcgaaaccgaaaccacaacgatactcgaaaaacttcgtatcgcaaaatacgtattacccgttcacgaactttttccactcgacctcgaattccttcactccgccttctccaacgtc

SEQ ID NO: 1519 - DNA, 594 bp, Artificial Sequence
  chemically treated genomic DNA (Homo sapiens) CpG-island No: 1519
gtatttggtttttttgggtggaggtggtagcgcgatttttcgtttcgatgggggtttttttcggtttcggggtttttttttcggtttcggtttcggagttgggtattttcgggttcgcggtttttcgtcgcgggacgcggatcgtttcgttggggtttgttttgttgttaggttgttagtttagggtttgggaagcgtggagcgggcgggcgtcgtgttaggaggagaggatcgtagcgcggggggcgtttggttcggaaggtacggtggtttacgtgcgcgtgtggtttagggtttgcggcgacgtttcgcgcgtatttacggtttcggcgtttacgggcgtagaggtagtcgtaatttgtgcggttgaagaagcgattaaagaagttcgagttttgtttaaggttacgtagcgaggtcgagtcgggtcgggtgtgttttgggtaggagttgtggttatttattttcgtgtcgtagttcgaggtcggggttatagcggtgttcgggaaatttcgtgtcgtaaggtgcgtgttgttcgtttacgggttttttttattcgatttcgaatttttttatttcgttttttttagcgtt

SEQ ID NO: 1520 - DNA, 594 bp, Artificial Sequence
  chemically treated genomic DNA (Homo sapiens) CpG-island No: 1520
aacgctaaaaaaaacgaaataaaaaaattcgaaatcgaataaaaaaaacccgtaaacgaacaacacgcaccttacgacacgaaatttcccgaacaccgctataaccccgacctcgaactacgacacgaaaataaataaccacaactcctacccaaaacacacccgacccgactcgacctcgctacgtaaccttaaacaaaactcgaacttctttaatcgcttcttcaaccgcacaaattacgactacctctacgcccgtaaacgccgaaaccgtaaatacgcgcgaaacgtcgccgcaaaccctaaaccacacgcgcacgtaaaccaccgtaccttccgaaccaaacgccccccgcgctacgatcctctcctcctaacacgacgcccgcccgctccacgcttcccaaaccctaaactaacaacctaacaacaaaacaaaccccaacgaaacgatccgcgtcccgcgacgaaaaaccgcgaacccgaaaatacccaactccgaaaccgaaaccgaaaaaaaaaccccgaaaccgaaaaaaacccccatcgaaacgaaaaatcgcgctaccacctccacccaaaaaaaccaaatac

SEQ ID NO: 1521 - DNA, 885 bp, Artificial Sequence
  chemically treated genomic DNA (Homo sapiens) CpG-island No: 1521
cggtttcgttcgggtgtttcgcggtgtttcgggtaggggtcgcggcgagcgcgtggaggttatttacgttgttgttttcgttcgtttagtgtattatcgtttggttgtgcgtcgcgttttttttgagtacgaacgacgtgttgatgagcgagatttgcgttcgcgaagttatttcggttagcggcgtcgttcgtttttagcgtcggtagttcgcggcgggggcgtcgttttcgtcgggattaggagcgggatcgggattcggattcggggcgtttggtttcgtgtcgcgcgtttgtcggttttcgtcgttatcgggtttcgcgcgtttcgcgggagggtttcgcggtattcgggttagttgggcgtgaggatttaggcgttcgggtttaggggagcgtttcgtcgtttcgtaggcgtttagtagtagtagtagtagtaggagcggtcgcgagcgcggcgagcgcggtggcggcggagtttcggggttcggggttcgggcggtggggtcggggtttttttatgtgcgcgagggttttcggtgcgttatggtcgttaggggcggtagcggagtcggcggcggggcggcgcgaacgaggggatcgcggtcgggaaagtaggagggcgttggggagcgcgagcgagagcgtagagaaaggagtcggcgaggggagggaacggcgggagaaggggattcggcggtttcggcgttattcgcgacgtcgagcgcgtatcgttatttgtcggtcggttcgtcgtttaggcgttcgtgggaagttcggcgtattcgagcgcggttttatttttaggttaggattttttttttagttcggtggttttttcggttttttttttcggtttttttattttttttcgtttttttttttt

SEQ ID NO: 1522 - DNA, 885 bp, Artificial Sequence
  chemically treated genomic DNA (Homo sapiens) CpG-island No: 1522
aaaaaaaaaaaacgaaaaaaaataaaaaaaccgaaaaaaaaaaccgaaaaaaccaccgaactaaaaaaaaaatcctaacctaaaaataaaaccgcgctcgaatacgccgaacttcccacgaacgcctaaacgacgaaccgaccgacaaataacgatacgcgctcgacgtcgcgaataacgccgaaaccgccgaatccccttctcccgccgttccctcccctcgccgactcctttctctacgctctcgctcgcgctccccaacgccctcctactttcccgaccgcgatcccctcgttcgcgccgccccgccgccgactccgctaccgcccctaacgaccataacgcaccgaaaaccctcgcgcacataaaaaaaccccgaccccaccgcccgaaccccgaaccccgaaactccgccgccaccgcgctcgccgcgctcgcgaccgctcctactactactactactactaaacgcctacgaaacgacgaaacgctcccctaaacccgaacgcctaaatcctcacgcccaactaacccgaataccgcgaaaccctcccgcgaaacgcgcgaaacccgataacgacgaaaaccgacaaacgcgcgacacgaaaccaaacgccccgaatccgaatcccgatcccgctcctaatcccgacgaaaacgacgcccccgccgcgaactaccgacgctaaaaacgaacgacgccgctaaccgaaataacttcgcgaacgcaaatctcgctcatcaacacgtcgttcgtactcaaaaaaaacgcgacgcacaaccaaacgataatacactaaacgaacgaaaacaacaacgtaaataacctccacgcgctcgccgcgacccctacccgaaacaccgcgaaacacccgaacgaaaccg

SEQ ID NO: 1523 - DNA, 885 bp, Artificial Sequence
  chemically treated genomic DNA (Homo sapiens) CpG-island No: 1523
agggagggaggacgggaagaggtgggagagtcgggaaggaagatcggaggaattatcgagttgggaaggggattttggtttggaggtggggtcgcgttcgggtacgtcgggttttttacgagcgtttgggcggcgggtcggtcggtaggtggcggtgcgcgttcggcgtcgcgggtggcgtcggggtcgtcgagtttttttttttcgtcgtttttttttttcgtcggtttttttttttgcgttttcgttcgcgttttttagcgtttttttgttttttcggtcgcggttttttcgttcgcgtcgtttcgtcgtcggtttcgttgtcgtttttggcgattatggcgtatcgggggttttcgcgtatatagaagggtttcggttttatcgttcgagtttcgagtttcggggtttcgtcgttatcgcgttcgtcgcgttcgcggtcgtttttgttgttgttgttgttgttgggcgtttgcggggcggcggggcgtttttttgagttcgggcgtttgggtttttacgtttaattgattcgggtgtcgcggagttttttcgcggggcgcgcggagttcggtggcggcgaggatcggtaggcgcgcggtacggagttaggcgtttcgggttcgagtttcggtttcgtttttggtttcggcgaggacggcgttttcgtcgcgggttatcggcgttgggagcgggcggcgtcgttggtcggagtggtttcgcgggcgtaggtttcgtttattagtacgtcgttcgtgtttaagggggacgcgacgtataattaggcgatggtgtattggacgggcgagaatagtagcgtaagtgatttttacgcgttcgtcgcggtttttattcgggatatcgcgggatattcgggcgggatcg

SEQ ID NO: 1524 - DNA, 885 bp, Artificial Sequence
  chemically treated genomic DNA (Homo sapiens) CpG-island No: 1524
cgatcccgcccgaatatcccgcgatatcccgaataaaaaccgcgacgaacgcgtaaaaatcacttacgctactattctcgcccgtccaatacaccatcgcctaattatacgtcgcgtcccccttaaacacgaacgacgtactaataaacgaaacctacgcccgcgaaaccactccgaccaacgacgccgcccgctcccaacgccgataacccgcgacgaaaacgccgtcctcgccgaaaccaaaaacgaaaccgaaactcgaacccgaaacgcctaactccgtaccgcgcgcctaccgatcctcgccgccaccgaactccgcgcgccccgcgaaaaaactccgcgacacccgaatcaattaaacgtaaaaacccaaacgcccgaactcaaaaaaacgccccgccgccccgcaaacgcccaacaacaacaacaacaacaaaaacgaccgcgaacgcgacgaacgcgataacgacgaaaccccgaaactcgaaactcgaacgataaaaccgaaacccttctatatacgcgaaaacccccgatacgccataatcgccaaaaacgacaacgaaaccgacgacgaaacgacgcgaacgaaaaaaccgcgaccgaaaaaacaaaaaaacgctaaaaaacgcgaacgaaaacgcaaaaaaaaaaaccgacgaaaaaaaaaaacgacgaaaaaaaaaaactcgacgaccccgacgccacccgcgacgccgaacgcgcaccgccacctaccgaccgacccgccgcccaaacgctcgtaaaaaacccgacgtacccgaacgcgaccccacctccaaaccaaaatccccttcccaactcgataattcctccgatcttccttcccgactctcccacctcttcccgtcctccctccct

SEQ ID NO: 1525 - DNA, 548 bp, Artificial Sequence
  chemically treated genomic DNA (Homo sapiens) CpG-island No: 1525
aggcggtgtcgttttaggcgttgtggtggggtcgcgtataggttgtttgggtgattttaggagggcgaagttttacgacgtaggtttggggcggttttgtttaattttttgcgtatttcgggtgtttagaaacgtaggttgaacgttggagttcggggcgttttcggtgtcggaagcggtcgtgcggtcggagtttcggggagggatagtcgggtagaggagtcgggttttggggttttagtcgtttgtaggggttttcgggttttcgtttttttacgcggagggcgtgaagcggcggggacgcggttggggagtttttttcgcggcggtgaggacgcggcgtcgttttttttcggtgttgtttatttggaagtcggaggtcgttgggggtttggggcggttgtacgtttcggggtggggggatgcgggagttcggttaggtttagtcgtttttttcggtggtgaggagcgttgtgtcgggtttcgggggttttacgtttttagttgtcgggtttgttttcggttataataaggttttgatttagttt

SEQ ID NO: 1526 - DNA, 548 bp, Artificial Sequence
  chemically treated genomic DNA (Homo sapiens) CpG-island No: 1526
aaactaaatcaaaaccttattataaccgaaaacaaacccgacaactaaaaacgtaaaacccccgaaacccgacacaacgctcctcaccaccgaaaaaaacgactaaacctaaccgaactcccgcatccccccaccccgaaacgtacaaccgccccaaacccccaacgacctccgacttccaaataaacaacaccgaaaaaaaacgacgccgcgtcctcaccgccgcgaaaaaaactccccaaccgcgtccccgccgcttcacgccctccgcgtaaaaaaacgaaaacccgaaaacccctacaaacgactaaaaccccaaaacccgactcctctacccgactatccctccccgaaactccgaccgcacgaccgcttccgacaccgaaaacgccccgaactccaacgttcaacctacgtttctaaacacccgaaatacgcaaaaaattaaacaaaaccgccccaaacctacgtcgtaaaacttcgccctcctaaaatcacccaaacaacctatacgcgaccccaccacaacgcctaaaacgacaccgcct

SEQ ID NO: 1527 - DNA, 548 bp, Artificial Sequence
  chemically treated genomic DNA (Homo sapiens) CpG-island No: 1527
gagttgggttagggttttgttgtggtcgggggtaggttcggtagttgaaagcgtaagattttcggagttcggtatagcgttttttattatcgggaaaggcggttgggtttgatcgggttttcgtatttttttatttcggagcgtgtagtcgttttaaatttttagcggttttcggtttttaggtgagtagtatcggaagggagcggcgtcgcgtttttatcgtcgcggggggggttttttagtcgcgttttcgtcgttttacgtttttcgcgtggaaggacgggggttcggggatttttgtaaacggttgagattttaaagttcggtttttttgttcggttgttttttttcggagtttcggtcgtacggtcgttttcggtatcgaggacgtttcgggttttagcgtttagtttgcgtttttggatattcgggatgcgtagggggttggataggatcgttttaaatttgcgtcgtggggtttcgtttttttgagattatttaggtagtttgtgcgcggttttattatagcgtttgaggcggtatcgttt

SEQ ID NO: 1528 - DNA, 548 bp, Artificial Sequence
  chemically treated genomic DNA (Homo sapiens) CpG-island No: 1528
aaacgataccgcctcaaacgctataataaaaccgcgcacaaactacctaaataatctcaaaaaaacgaaaccccacgacgcaaatttaaaacgatcctatccaaccccctacgcatcccgaatatccaaaaacgcaaactaaacgctaaaacccgaaacgtcctcgataccgaaaacgaccgtacgaccgaaactccgaaaaaaaacaaccgaacaaaaaaaccgaactttaaaatctcaaccgtttacaaaaatccccgaacccccgtccttccacgcgaaaaacgtaaaacgacgaaaacgcgactaaaaaaccccccccgcgacgataaaaacgcgacgccgctcccttccgatactactcacctaaaaaccgaaaaccgctaaaaatttaaaacgactacacgctccgaaataaaaaaatacgaaaacccgatcaaacccaaccgcctttcccgataataaaaaacgctataccgaactccgaaaatcttacgctttcaactaccgaacctacccccgaccacaacaaaaccctaacccaactc

SEQ ID NO: 1529 - DNA, 694 bp, Artificial Sequence
  chemically treated genomic DNA (Homo sapiens) CpG-island No: 1529
gttattcgattcgcgttttggatagttatagttagtgtgagcgttattattcgtcgcggcgtgattaagagcgtttcgggttaagtagtttttcgtgggagtgcgggagtgcgtgcgtgcggcggaaatttcgtttttcggcgttcgttgttggttttggtcgtagttagggcgttttaagtaggaagataagcgggattgttggaagcgggagagtcgggaggagcggcgaagggttttttttttttattggttgcgtttacggagtagtttcgttgcgattggtcgtacgcggggggcggtagtttcgcgtcggttcgtttttcgggtcgcgagaggcgtcgggatcgcgggcgtcggttgagttagcggtttttgggaggttgcgttcgcgcgtcggcgaggcgaggcggtcgggttttgcgcgttaggttttggtttggggtatttgggcggtcggtggcgggggcggtacgggcgcggggttggcgggcggtcgagttcgggaggcgggcgtgggcgcggcggtcgtatcggggtttgcgcggattattcgcggggtagtttcgggtttttttttattttttaagtggtggtggttgtgggtttttttgtaggcgatttttttgagtaattttttgttttacgtacgcgttttgttgtggggtaaagcggtagatttatgttgttgtta

SEQ ID NO: 1530 - DNA, 694 bp, Artificial Sequence
  chemically treated genomic DNA (Homo sapiens) CpG-island No: 1530
taacaacaacataaatctaccgctttaccccacaacaaaacgcgtacgtaaaacaaaaaattactcaaaaaaatcgcctacaaaaaaacccacaaccaccaccacttaaaaaataaaaaaaaacccgaaactaccccgcgaataatccgcgcaaaccccgatacgaccgccgcgcccacgcccgcctcccgaactcgaccgcccgccaaccccgcgcccgtaccgcccccgccaccgaccgcccaaataccccaaaccaaaacctaacgcgcaaaacccgaccgcctcgcctcgccgacgcgcgaacgcaacctcccaaaaaccgctaactcaaccgacgcccgcgatcccgacgcctctcgcgacccgaaaaacgaaccgacgcgaaactaccgccccccgcgtacgaccaatcgcaacgaaactactccgtaaacgcaaccaataaaaaaaaaaaacccttcgccgctcctcccgactctcccgcttccaacaatcccgcttatcttcctacttaaaacgccctaactacgaccaaaaccaacaacgaacgccgaaaaacgaaatttccgccgcacgcacgcactcccgcactcccacgaaaaactacttaacccgaaacgctcttaatcacgccgcgacgaataataacgctcacactaactataactatccaaaacgcgaatcgaataac

SEQ ID NO: 1531 - DNA, 694 bp, Artificial Sequence
  chemically treated genomic DNA (Homo sapiens) CpG-island No: 1531
tgatagtagtatgaatttgtcgttttattttatagtagggcgcgtgcgtgaaataaaaaattatttaaaaggatcgtttgtagaaaaatttatagttattattatttaagagatggagagaggttcgaggttgtttcgcgggtggttcgcgtaggtttcggtgcggtcgtcgcgtttacgttcgtttttcgggttcggtcgttcgttagtttcgcgttcgtatcgttttcgttatcggtcgtttaggtgttttaggttaggatttgacgcgtagggttcggtcgtttcgtttcgtcggcgcgcggacgtagttttttaagagtcgttggtttagtcggcgttcgcgatttcggcgtttttcgcggttcgaggggcgggtcgacgcgggattgtcgtttttcgcgtacggttaatcgtaacgaggttgtttcgtgggcgtagttaatggggaagaggagtttttcgtcgtttttttcgattttttcgtttttagtaatttcgtttatttttttatttggagcgttttggttgcggttaaggttaatagcgggcgtcggaaggcgggattttcgtcgtacgtacgtattttcgtatttttacgggagattgtttggttcggagcgtttttgattacgtcgcggcgggtggtggcgtttatattaattatagttatttagggcgcgggtcgagtggt

SEQ ID NO: 1532 - DNA, 694 bp, Artificial Sequence
  chemically treated genomic DNA (Homo sapiens) CpG-island No: 1532
accactcgacccgcgccctaaataactataattaatataaacgccaccacccgccgcgacgtaatcaaaaacgctccgaaccaaacaatctcccgtaaaaatacgaaaatacgtacgtacgacgaaaatcccgccttccgacgcccgctattaaccttaaccgcaaccaaaacgctccaaataaaaaaataaacgaaattactaaaaacgaaaaaatcgaaaaaaacgacgaaaaactcctcttccccattaactacgcccacgaaacaacctcgttacgattaaccgtacgcgaaaaacgacaatcccgcgtcgacccgcccctcgaaccgcgaaaaacgccgaaatcgcgaacgccgactaaaccaacgactcttaaaaaactacgtccgcgcgccgacgaaacgaaacgaccgaaccctacgcgtcaaatcctaacctaaaacacctaaacgaccgataacgaaaacgatacgaacgcgaaactaacgaacgaccgaacccgaaaaacgaacgtaaacgcgacgaccgcaccgaaacctacgcgaaccacccgcgaaacaacctcgaacctctctccatctcttaaataataataactataaatttttctacaaacgatccttttaaataattttttatttcacgcacgcgccctactataaaataaaacgacaaattcatactactatca

SEQ ID NO: 1533 - DNA, 648 bp, Artificial Sequence
  chemically treated genomic DNA (Homo sapiens) CpG-island No: 1533
tcgcgtttttgttttatttacgttttattatttcgtttgtacgcgtttagtatcgtgttagattcgtttttattttattgttttttttttcgtatacgttttttgatttatcgcgtagttggtttttttttatttacgtattttcgcgatcggtgaatgttttttttttatacgtttacgttgtttcgtcgttgttattcgtttattcgtcggcgtcgttgttaattttattagttgtgcgttgttgcgttgatatatttatttatcgttcgagttcgttgtgatttacgaattatcgcggtggttttgttttcgtcgtttgttttcgtttatcgacgcgtagtttttttgtatgtcgtatatagacgttatttgtttcggtgttgatatttttttttttgtagcgttgtttgtgttttttttcgttaggtttatgtcggttacgtatttttgtcggtttattttttattttcggttcgtttttttttacgtttttttttcggtcgtttttttttttttttttcgggaagtcggattattttttttttttttttttttaagcggtttggtatttttatcgggtttaggttttcgggtttttacgtaaatttcgtgtttttttggtttttaattaatttttgttttttt

SEQ ID NO: 1534 - DNA, 648 bp, Artificial Sequence
  chemically treated genomic DNA (Homo sapiens) CpG-island No: 1534
aaaaaaacaaaaattaattaaaaaccaaaaaaacacgaaatttacgtaaaaacccgaaaacctaaacccgataaaaataccaaaccgcttaaaaaaaaaaaaaaaaaaaataatccgacttcccgaaaaaaaaaaaaaaaaacgaccgaaaaaaaaacgtaaaaaaaaacgaaccgaaaataaaaaataaaccgacaaaaatacgtaaccgacataaacctaacgaaaaaaaacacaaacaacgctacaaaaaaaaaaatatcaacaccgaaacaaataacgtctatatacgacatacaaaaaaactacgcgtcgataaacgaaaacaaacgacgaaaacaaaaccaccgcgataattcgtaaatcacaacgaactcgaacgataaataaatatatcaacgcaacaacgcacaactaataaaattaacaacgacgccgacgaataaacgaataacaacgacgaaacaacgtaaacgtataaaaaaaaaacattcaccgatcgcgaaaatacgtaaataaaaaaaaaccaactacgcgataaatcaaaaaacgtatacgaaaaaaaaaacaataaaataaaaacgaatctaacacgatactaaacgcgtacaaacgaaataataaaacgtaaataaaacaaaaacgcga

SEQ ID NO: 1535 - DNA, 648 bp, Artificial Sequence
  chemically treated genomic DNA (Homo sapiens) CpG-island No: 1535
gaaggagtaaaagttggttgaaagttaggggggtacgaagtttgcgtgagagttcgagggtttaagttcgatgggagtgttaagtcgtttggaggggaaaaaggggggggtggttcggtttttcgaagaaaagagaggagagcgatcggaagagaagcgtgaagaggggcgaatcgaggatagagggtgggtcgataaagatgcgtgatcgatataagtttggcgaggaggagtatagatagcgttgtagagagagagatgttagtatcgaggtagatagcgtttatgtgcgatatgtagagagattgcgcgtcgatagacgagagtaagcgacgagagtaaggttatcgcggtggttcgtggattatagcgagttcgagcggtaggtggatgtgttaacgtagtagcgtataattagtgaggttggtagcggcgtcgacgagtggacgagtgatagcggcgggatagcgtagacgtgtagaggagagatatttatcgatcgcgggagtgcgtaggtgaagaaaagttagttgcgcgatgagttagagagcgtgtgcgagaggaggagtagtgaggtgagagcgagtttgatacggtgttagacgcgtatagacgaagtagtagagcgtgagtgaggtagaggcgcga

SEQ ID NO: 1536 - DNA, 648 bp, Artificial Sequence
  chemically treated genomic DNA (Homo sapiens) CpG-island No: 1536
tcgcgcctctacctcactcacgctctactacttcgtctatacgcgtctaacaccgtatcaaactcgctctcacctcactactcctcctctcgcacacgctctctaactcatcgcgcaactaacttttcttcacctacgcactcccgcgatcgataaatatctctcctctacacgtctacgctatcccgccgctatcactcgtccactcgtcgacgccgctaccaacctcactaattatacgctactacgttaacacatccacctaccgctcgaactcgctataatccacgaaccaccgcgataaccttactctcgtcgcttactctcgtctatcgacgcgcaatctctctacatatcgcacataaacgctatctacctcgatactaacatctctctctctacaacgctatctatactcctcctcgccaaacttatatcgatcacgcatctttatcgacccaccctctatcctcgattcgcccctcttcacgcttctcttccgatcgctctcctctcttttcttcgaaaaaccgaaccacccccccctttttcccctccaaacgacttaacactcccatcgaacttaaaccctcgaactctcacgcaaacttcgtacccccctaactttcaaccaacttttactccttc

SEQ ID NO: 1537 - DNA, 732 bp, Artificial Sequence
  chemically treated genomic DNA (Homo sapiens) CpG-island No: 1537
tttaggcgcgtatcgttacgatcgtttagttcggtttgcgtcgtacgattcgttttttagttaagtataacgtagtattttttttacgcgagtttttattttataatttatgacgtttcgtatataaaatatattttttttttatagcgcgtcgtttagtaaatcgttgcgaagatatatttttattacgcgatatacgtatttcgttaacggtaagttttttttaaatatacggcgaggatttacgcgcgtagatttttttagtcgtagagagattttttatatttcgtagcgtatacgtattcgtttcgaatttcgcgtttatatataaaatagttttatcgcgttaatatcgaaaatagttcgtagcgatagaatcgtttacgaaacgtatttcgttcggaagaaatatcgtttttgttttatatagagtacgacgcgtacgcgtttgttaagacgattattttttttatttttatagttttcgacggtttacgtttatataaatttttttttcgatatacgtacgtcgtacgatatatataatatattatttcgttcgtgtttcgatatataagcgtttttttcgtacgagtagatacgcgcgcgtttattttattaagttacgcgttcgcgttcgtaatggggggtttcgaggattaaatattattacggtggttaagtattttatattgtgttatgtagtgtaatttttgtgtatgcgggattcgt

SEQ ID NO: 1538 - DNA, 732 bp, Artificial Sequence
  chemically treated genomic DNA (Homo sapiens) CpG-island No: 1538
acgaatcccgcatacacaaaaattacactacataacacaatataaaatacttaaccaccgtaataatatttaatcctcgaaaccccccattacgaacgcgaacgcgtaacttaataaaataaacgcgcgcgtatctactcgtacgaaaaaaacgcttatatatcgaaacacgaacgaaataatatattatatatatcgtacgacgtacgtatatcgaaaaaaaaatttatataaacgtaaaccgtcgaaaactataaaaataaaaaaaataatcgtcttaacaaacgcgtacgcgtcgtactctatataaaacaaaaacgatatttcttccgaacgaaatacgtttcgtaaacgattctatcgctacgaactattttcgatattaacgcgataaaactattttatatataaacgcgaaattcgaaacgaatacgtatacgctacgaaatataaaaaatctctctacgactaaaaaaatctacgcgcgtaaatcctcgccgtatatttaaaaaaaacttaccgttaacgaaatacgtatatcgcgtaataaaaatatatcttcgcaacgatttactaaacgacgcgctataaaaaaaaaatatattttatatacgaaacgtcataaattataaaataaaaactcgcgtaaaaaaaatactacgttatacttaactaaaaaacgaatcgtacgacgcaaaccgaactaaacgatcgtaacgatacgcgcctaaa

SEQ ID NO: 1539 - DNA, 732 bp, Artificial Sequence
  chemically treated genomic DNA (Homo sapiens) CpG-island No: 1539
acgggtttcgtatatatagaggttatattgtatggtatagtgtgaagtgtttgattatcgtggtggtgtttagttttcgaggttttttattgcgggcgcgggcgcgtggtttggtggggtgggcgcgcgcgtgtttgttcgtgcgggaggggcgtttgtgtgtcggggtacgggcggggtggtgtgttgtgtgtgtcgtgcggcgtgcgtgtgtcgagagaggagtttgtgtggacgtagatcgtcgagagttgtgggagtgaggagagtggtcgttttggtaggcgcgtgcgcgtcgtgttttgtgtgaggtagaggcggtgtttttttcgagcggggtgcgtttcgtgggcggttttgtcgttgcggattgttttcggtgttggcgcggtagagttgttttgtgtgtgagcgcggagttcgggacggatgcgtgtgcgttgcggagtgtgggggatttttttgcggttgggggagtttgcgcgcgtgggttttcgtcgtgtgtttgggaggggtttgtcgttgacgaagtgcgtgtgtcgcgtggtgggggtgtgttttcgtagcggtttgttgggcggcgcgttgtggggaggaggtgtgttttgtgtgcgggacgttatggattgtggggtgagggttcgcgtgaggggggtgttgcgttgtgtttggttggggagcgagtcgtgcggcgtaggtcgggttggacggtcgtggcggtgcgcgtttggg

SEQ ID NO: 1540 - DNA, 732 bp, Artificial Sequence
  chemically treated genomic DNA (Homo sapiens) CpG-island No: 1540
cccaaacgcgcaccgccacgaccgtccaacccgacctacgccgcacgactcgctccccaaccaaacacaacgcaacacccccctcacgcgaaccctcaccccacaatccataacgtcccgcacacaaaacacacctcctccccacaacgcgccgcccaacaaaccgctacgaaaacacacccccaccacgcgacacacgcacttcgtcaacgacaaacccctcccaaacacacgacgaaaacccacgcgcgcaaactcccccaaccgcaaaaaaatcccccacactccgcaacgcacacgcatccgtcccgaactccgcgctcacacacaaaacaactctaccgcgccaacaccgaaaacaatccgcaacgacaaaaccgcccacgaaacgcaccccgctcgaaaaaaacaccgcctctacctcacacaaaacacgacgcgcacgcgcctaccaaaacgaccactctcctcactcccacaactctcgacgatctacgtccacacaaactcctctctcgacacacgcacgccgcacgacacacacaacacaccaccccgcccgtaccccgacacacaaacgcccctcccgcacgaacaaacacgcgcgcgcccaccccaccaaaccacgcgcccgcgcccgcaataaaaaacctcgaaaactaaacaccaccacgataatcaaacacttcacactataccatacaatataacctctatatatacgaaacccgt

SEQ ID NO: 1541 - DNA, 1091 bp, Artificial Sequence
  chemically treated genomic DNA (Homo sapiens) CpG-island No: 1541
tcgcggtcgttttttcggggagttcgcggggcgaagagtcgagttcgggggcgggggtacggtagcggggtttgagggacgcgtcgggcggtcgcgaggattttgggatcgtttgttttattttttatttgtttttattaggagtcggagtacgcgggcgttttagaaggtttcgtagggtagtcgcgcggggtcggacgcgttggggtttacggcgttgggaacgcgggttcgtagtcgggttcgggcggtatgggcggcgggcggacgagtcggagtcggcggtggtggcggcggcggcggtcggggaagcgcggaggtggcgtcgcgagggggaggggcgcggcggcggaggaggaggtgttcgggtcgttgtcgtcgtcgtcgtcgttgatagcggttcgagtaaataagtcgcgtcgtcgcggttcggtcgttgttttcgttcgcgtcggagttggagtttaggtcgagttttgttttggtcgtcggtcgggtcgaggtcgcgtcgtcgcgttttttcgttttcgcgtcgtgacgttgtcgtcgggcgcggggatcgcgtcgagtttaggttttcgtcgtcgggtttttcgttcggtcgaggggcgttcgagtcgtcgcggcggtcgtttggaaaagttttttcgttagggttttttagggtaagtagcgagggcgcggggttcggggttcggggaaggtaagcgcgtttgggagtcgggttcgaggggagtcggtcgggtcgggtcgtggagttttgttttaggagcgggtttcgcggttcgggtgttcgggtcggggagggtcggggtattggcgtcggtgtagttttgattcgggtttttcggggttcggttgttcgtcggtttttcggaattggtttcggggtcggtttcgagggtggagttgtcgggagtagatagggcgtttcgtagtttatttgagcgcgtcgggttcgtttcggtttttcggtcgtggttggtattttttcgcgtggggttagggcgagttttttgattttaggaagcgtttgcggggtttttgttgggggcgggatggggagaaaatttcgtaggcgtcgggtgttt

SEQ ID NO: 1542 - DNA, 1091 bp, Artificial Sequence
  chemically treated genomic DNA (Homo sapiens) CpG-island No: 1542
aaacacccgacgcctacgaaattttctccccatcccgcccccaacaaaaaccccgcaaacgcttcctaaaatcaaaaaactcgccctaaccccacgcgaaaaaataccaaccacgaccgaaaaaccgaaacgaacccgacgcgctcaaataaactacgaaacgccctatctactcccgacaactccaccctcgaaaccgaccccgaaaccaattccgaaaaaccgacgaacaaccgaaccccgaaaaacccgaatcaaaactacaccgacgccaataccccgaccctccccgacccgaacacccgaaccgcgaaacccgctcctaaaacaaaactccacgacccgacccgaccgactcccctcgaacccgactcccaaacgcgcttaccttccccgaaccccgaaccccgcgccctcgctacttaccctaaaaaaccctaacgaaaaaacttttccaaacgaccgccgcgacgactcgaacgcccctcgaccgaacgaaaaacccgacgacgaaaacctaaactcgacgcgatccccgcgcccgacgacaacgtcacgacgcgaaaacgaaaaaacgcgacgacgcgacctcgacccgaccgacgaccaaaacaaaactcgacctaaactccaactccgacgcgaacgaaaacaacgaccgaaccgcgacgacgcgacttatttactcgaaccgctatcaacgacgacgacgacgacaacgacccgaacacctcctcctccgccgccgcgcccctccccctcgcgacgccacctccgcgcttccccgaccgccgccgccgccaccaccgccgactccgactcgtccgcccgccgcccataccgcccgaacccgactacgaacccgcgttcccaacgccgtaaaccccaacgcgtccgaccccgcgcgactaccctacgaaaccttctaaaacgcccgcgtactccgactcctaataaaaacaaataaaaaataaaacaaacgatcccaaaatcctcgcgaccgcccgacgcgtccctcaaaccccgctaccgtacccccgcccccgaactcgactcttcgccccgcgaactccccgaaaaaacgaccgcga

SEQ ID NO: 1543 - DNA, 1091 bp, Artificial Sequence
  chemically treated genomic DNA (Homo sapiens) CpG-island No: 1543
gagtattcggcgtttgcggaattttttttttatttcgtttttagtaggggtttcgtaggcgttttttgaggttagagggttcgttttggttttacgcggaaaagtattagttacggtcggggggtcgagacgggttcggcgcgtttaggtgggttgcggagcgttttgtttgttttcggtagttttattttcggggtcggtttcggggttagtttcggaaagtcggcgggtagtcgggtttcgggggattcgggttagggttgtatcggcgttagtgtttcgatttttttcggttcgagtattcgggtcgcggagttcgtttttggggtagagttttacggttcggttcggtcggtttttttcgggttcggtttttagacgcgtttgtttttttcgggtttcgggtttcgcgttttcgttatttattttggggagttttggcggggaaatttttttaggcgatcgtcgcggcggttcgggcgtttttcggtcgagcggagagttcggcggcgggggtttgggttcggcgcggttttcgcgttcggcggtagcgttacggcgcggaggcggggaggcgcggcggcgcggtttcggttcggtcggcgattagggtagggttcggtttgggttttagtttcggcgcgggcgggggtagcggtcgggtcgcggcggcgcggtttgtttattcgggtcgttgttagcggcggcggcggcggtagcggttcgggtattttttttttcgtcgtcgcgtttttttttttcgcggcgttattttcgcgttttttcggtcgtcgtcgtcgttattatcgtcggtttcggttcgttcgttcgtcgtttatgtcgttcgggttcgattgcgggttcgcgtttttagcgtcgtgggttttagcgcgttcggtttcgcgcggttgttttgcggggttttttggggcgttcgcgtgtttcggtttttggtaggggtaggtaggaagtggggtaggcgattttaaagttttcgcggtcgttcggcgcgttttttaggtttcgttgtcgtgttttcgttttcgggttcggtttttcgtttcgcgagtttttcgggaagacggtcgcgg

SEQ ID NO: 1544 - DNA, 1091 bp, Artificial Sequence
  chemically treated genomic DNA (Homo sapiens) CpG-island No: 1544
ccgcgaccgtcttcccgaaaaactcgcgaaacgaaaaaccgaacccgaaaacgaaaacacgacaacgaaacctaaaaaacgcgccgaacgaccgcgaaaactttaaaatcgcctaccccacttcctacctacccctaccaaaaaccgaaacacgcgaacgccccaaaaaaccccgcaaaacaaccgcgcgaaaccgaacgcgctaaaacccacgacgctaaaaacgcgaacccgcaatcgaacccgaacgacataaacgacgaacgaacgaaccgaaaccgacgataataacgacgacgacgaccgaaaaaacgcgaaaataacgccgcgaaaaaaaaaaacgcgacgacgaaaaaaaaaatacccgaaccgctaccgccgccgccgccgctaacaacgacccgaataaacaaaccgcgccgccgcgacccgaccgctacccccgcccgcgccgaaactaaaacccaaaccgaaccctaccctaatcgccgaccgaaccgaaaccgcgccgccgcgcctccccgcctccgcgccgtaacgctaccgccgaacgcgaaaaccgcgccgaacccaaacccccgccgccgaactctccgctcgaccgaaaaacgcccgaaccgccgcgacgatcgcctaaaaaaatttccccgccaaaactccccaaaataaataacgaaaacgcgaaacccgaaacccgaaaaaaacaaacgcgtctaaaaaccgaacccgaaaaaaaccgaccgaaccgaaccgtaaaactctaccccaaaaacgaactccgcgacccgaatactcgaaccgaaaaaaatcgaaacactaacgccgatacaaccctaacccgaatcccccgaaacccgactacccgccgactttccgaaactaaccccgaaaccgaccccgaaaataaaactaccgaaaacaaacaaaacgctccgcaacccacctaaacgcgccgaacccgtctcgaccccccgaccgtaactaatacttttccgcgtaaaaccaaaacgaaccctctaacctcaaaaaacgcctacgaaacccctactaaaaacgaaataaaaaaaaaattccgcaaacgccgaatactc

SEQ ID NO: 1545 - DNA, 874 bp, Artificial Sequence
  chemically treated genomic DNA (Homo sapiens) CpG-island No: 1545
atgcgttgtatcgataggaggtagtatttttttgttcgaggggcgtaacgatagagatttaaggttatttgggtcggagtcgggtgaggtcgcggagaacgtatttcgttacgcgtttgtcgagacggaggcgggcgtttcgattattgttcgattatgcgtttatttaagtaggatttcgaaaaaatttagtcgcgcgttttttttgaggtttcgtagttggttaggttcggttcgggttggtgcggttgcgtattgtagtttagcggacgggttcgggaggagtcgggcggggatcgcggcggttagagtttttgttagtttcgtcgggtatacgtaggtcggggcgggcggcgcggttgttttcgtttcgtacgttgttgggttcggtagttttagaggttggcggattcgcgcggagtcggcgtagcggagcgcgtcggttgttcggggtttagcgggagagttgtagtagcgcgcggagtagggggttacgggtgggcgggcgttcgttttcgtttgcgtcgttgtttgtacgcgggtcgtcgttttcgggcgtgtgagagtcggtagttcggtcgattgggttcggagcggcgcggaggtcgggcgttgacggtaacgggtcgggtgcgcgcgcgggagggtttcggttgtttcgatagaggtcgggttcgggcggcgggagtgcgagcgttattgcggcgttagaggggttaggaagggataggaggttgtttgaggttcgtatttggcgtttgtttttgcggttttcggggtcgacgaagtcggagcgggtggggagggagtcgggcgggcggttagagatttggcggtaggtgtttgttttttgtgatttaattttttttttagt

SEQ ID NO: 1546 - DNA, 874 bp, Artificial Sequence
  chemically treated genomic DNA (Homo sapiens) CpG-island No: 1546
actaaaaaaaaaattaaatcacaaaaaacaaacacctaccgccaaatctctaaccgcccgcccgactccctccccacccgctccgacttcgtcgaccccgaaaaccgcaaaaacaaacgccaaatacgaacctcaaacaacctcctatcccttcctaacccctctaacgccgcaataacgctcgcactcccgccgcccgaacccgacctctatcgaaacaaccgaaaccctcccgcgcgcgcacccgacccgttaccgtcaacgcccgacctccgcgccgctccgaacccaatcgaccgaactaccgactctcacacgcccgaaaacgacgacccgcgtacaaacaacgacgcaaacgaaaacgaacgcccgcccacccgtaaccccctactccgcgcgctactacaactctcccgctaaaccccgaacaaccgacgcgctccgctacgccgactccgcgcgaatccgccaacctctaaaactaccgaacccaacaacgtacgaaacgaaaacaaccgcgccgcccgccccgacctacgtatacccgacgaaactaacaaaaactctaaccgccgcgatccccgcccgactcctcccgaacccgtccgctaaactacaatacgcaaccgcaccaacccgaaccgaacctaaccaactacgaaacctcaaaaaaaacgcgcgactaaattttttcgaaatcctacttaaataaacgcataatcgaacaataatcgaaacgcccgcctccgtctcgacaaacgcgtaacgaaatacgttctccgcgacctcacccgactccgacccaaataaccttaaatctctatcgttacgcccctcgaacaaaaaaatactacctcctatcgatacaacgcat

SEQ ID NO: 1547 - DNA, 874 bp, Artificial Sequence
  chemically treated genomic DNA (Homo sapiens) CpG-island No: 1547
gttggggagagagttggattatagagggtaggtatttgtcgttaggtttttggtcgttcgttcggttttttttttattcgtttcgatttcgtcggtttcggggatcgtagagataggcgttaggtacgggttttaggtagttttttgtttttttttggtttttttgacgtcgtagtggcgttcgtattttcgtcgttcgagttcggtttttgtcggggtagtcggagttttttcgcgcgcgtattcggttcgttatcgttagcgttcggttttcgcgtcgtttcgggtttagtcggtcgagttgtcggtttttatacgttcggggacggcggttcgcgtgtaggtagcgacgtaggcgaaggcgggcgttcgtttattcgtagttttttgtttcgcgcgttgttgtagttttttcgttgggtttcgggtagtcggcgcgtttcgttgcgtcggtttcgcgcgggttcgttagtttttgaagttgtcgggtttagtagcgtgcggggcggggatagtcgcgtcgttcgtttcggtttgcgtgtgttcggcggagttgataggagttttggtcgtcgcggttttcgttcggtttttttcgggttcgttcgttgggttgtagtgcgtagtcgtattagttcgggtcgggtttggttagttgcggaattttaggagggacgcgcgattgaattttttcggaattttatttgagtaagcgtatgatcgggtagtggtcgaaacgttcgttttcgtttcggtagacgcgtagcggggtgcgtttttcgcggttttattcggtttcggtttaggtagttttaggtttttgtcgttgcgtttttcgggtaaaggggtgttgttttttgtcggtatagcgtat

SEQ ID NO: 1548 - DNA, 874 bp, Artificial Sequence
  chemically treated genomic DNA (Homo sapiens) CpG-island No: 1548
atacgctataccgacaaaaaacaacacccctttacccgaaaaacgcaacgacaaaaacctaaaactacctaaaccgaaaccgaataaaaccgcgaaaaacgcaccccgctacgcgtctaccgaaacgaaaacgaacgtttcgaccactacccgatcatacgcttactcaaataaaattccgaaaaaattcaatcgcgcgtccctcctaaaattccgcaactaaccaaacccgacccgaactaatacgactacgcactacaacccaacgaacgaacccgaaaaaaaccgaacgaaaaccgcgacgaccaaaactcctatcaactccgccgaacacacgcaaaccgaaacgaacgacgcgactatccccgccccgcacgctactaaacccgacaacttcaaaaactaacgaacccgcgcgaaaccgacgcaacgaaacgcgccgactacccgaaacccaacgaaaaaactacaacaacgcgcgaaacaaaaaactacgaataaacgaacgcccgccttcgcctacgtcgctacctacacgcgaaccgccgtccccgaacgtataaaaaccgacaactcgaccgactaaacccgaaacgacgcgaaaaccgaacgctaacgataacgaaccgaatacgcgcgcgaaaaaactccgactaccccgacaaaaaccgaactcgaacgacgaaaatacgaacgccactacgacgtcaaaaaaaccaaaaaaaaacaaaaaactacctaaaacccgtacctaacgcctatctctacgatccccgaaaccgacgaaatcgaaacgaataaaaaaaaaaccgaacgaacgaccaaaaacctaacgacaaatacctaccctctataatccaactctctccccaac

SEQ ID NO: 1549 - DNA, 720 bp, Artificial Sequence
  chemically treated genomic DNA (Homo sapiens) CpG-island No: 1549
ggttatcggttttcgttttcgagtttcgttagagcgcgcgagggtttttagcggtcgttttttttttatagtaggggcggggtttcgcgtttatcggaaggagcgggttcggggcgggcggcgttgattggtcggggcgggtttgacgtcgacgcggttataagagattataagcgattcgtagggttagacgtttttcgtcgagagtcgtcggggttttttgttttaatagtgtttggacggaattcggcgttcgttttttatttcggtcggtcgtttatagttagtttttcgttatttttttatcgtattttcggattgttttaaggttttcgtcgtcgttttagcgtcgcgtagttatcgtcgtcgtcgtcgtttttttttagtcgtcgttatgacgatcgcgtttatttcgtaggtgcgttagaattattattaggatttagaggtcgttattaatcgttagattaatttggagttttacgttttttacgtttatttgtttatggtgagcgcgggcgggtttaagcggtggcgggggtcgggcgcggttttcggggcgcgcgttggggcgggtcgggggtgtggttattcgcgggttttttcgtttttttgcgtttttttggaaaatggaggttgttcgaggttttcgaggatttttttggcgtagaaagtcggggtagttggtttttttcggttgtattttgagaatgttttttt

SEQ ID NO: 1550 - DNA, 720 bp, Artificial Sequence
  chemically treated genomic DNA (Homo sapiens) CpG-island No: 1550
aaaaaaacattctcaaaatacaaccgaaaaaaaccaactaccccgactttctacgccaaaaaaatcctcgaaaacctcgaacaacctccattttccaaaaaaacgcaaaaaaacgaaaaaacccgcgaataaccacacccccgacccgccccaacgcgcgccccgaaaaccgcgcccgacccccgccaccgcttaaacccgcccgcgctcaccataaacaaataaacgtaaaaaacgtaaaactccaaattaatctaacgattaataacgacctctaaatcctaataataattctaacgcacctacgaaataaacgcgatcgtcataacgacgactaaaaaaaaacgacgacgacgacgataactacgcgacgctaaaacgacgacgaaaaccttaaaacaatccgaaaatacgataaaaaaataacgaaaaactaactataaacgaccgaccgaaataaaaaacgaacgccgaattccgtccaaacactattaaaacaaaaaaccccgacgactctcgacgaaaaacgtctaaccctacgaatcgcttataatctcttataaccgcgtcgacgtcaaacccgccccgaccaatcaacgccgcccgccccgaacccgctccttccgataaacgcgaaaccccgcccctactataaaaaaaaaacgaccgctaaaaaccctcgcgcgctctaacgaaactcgaaaacgaaaaccgataacc

SEQ ID NO: 1551 - DNA, 720 bp, Artificial Sequence
  chemically treated genomic DNA (Homo sapiens) CpG-island No: 1551
gagggagtatttttagggtatagtcgagaagaattagttgtttcgattttttgcgttagagaagttttcggaaatttcgagtagtttttattttttagaagggcgtagggaggcgggagagttcgcgggtggttatattttcggttcgttttagcgcgcgtttcgggaatcgcgttcggttttcgttatcgtttaggttcgttcgcgtttattatggataggtaaacgtaggaggcgtagagttttaggttgatttggcggttgatggcggtttttgagttttggtggtagttttggcgtatttgcgaggtggacgcggtcgttatggcggcgattaaggagaggcggcggcggcggcggtggttgcgcggcgttggagcggcggcgggggttttggggtagttcgagggtgcggtgaagaggtgacggagggttggttatgggcggtcggtcggggtggggaacgagcgtcgggtttcgtttaagtattgttgaagtaggaaatttcgacgattttcggcgaagaacgtttggttttgcgggtcgtttgtggttttttatagtcgcgtcggcgttaggttcgtttcggttaattagcgtcgttcgtttcgagttcgtttttttcggtgggcgcgggatttcgtttttgttgtgggggaggggcggtcgttggaggttttcgcgcgttttggcggagttcgggagcggggatcggtagtt

SEQ ID NO: 1552 - DNA, 720 bp, Artificial Sequence
  chemically treated genomic DNA (Homo sapiens) CpG-island No: 1552
aactaccgatccccgctcccgaactccgccaaaacgcgcgaaaacctccaacgaccgcccctcccccacaacaaaaacgaaatcccgcgcccaccgaaaaaaacgaactcgaaacgaacgacgctaattaaccgaaacgaacctaacgccgacgcgactataaaaaaccacaaacgacccgcaaaaccaaacgttcttcgccgaaaatcgtcgaaatttcctacttcaacaatacttaaacgaaacccgacgctcgttccccaccccgaccgaccgcccataaccaaccctccgtcacctcttcaccgcaccctcgaactaccccaaaacccccgccgccgctccaacgccgcgcaaccaccgccgccgccgccgcctctccttaatcgccgccataacgaccgcgtccacctcgcaaatacgccaaaactaccaccaaaactcaaaaaccgccatcaaccgccaaatcaacctaaaactctacgcctcctacgtttacctatccataataaacgcgaacgaacctaaacgataacgaaaaccgaacgcgattcccgaaacgcgcgctaaaacgaaccgaaaatataaccacccgcgaactctcccgcctccctacgcccttctaaaaaataaaaactactcgaaatttccgaaaacttctctaacgcaaaaaatcgaaacaactaattcttctcgactataccctaaaaatactccctc

SEQ ID NO: 1553 - DNA, 1082 bp, Artificial Sequence
  chemically treated genomic DNA (Homo sapiens) CpG-island No: 1553
ttcgagcgatcgcgtttttttttttttttttgtgtgtgcgcgagcggagttggggcggagggagaagggggaggtcgttttgtttgttcgtttttcgtcgtttttgttcggtttattcgaagtgcggcgggagaggcgggagtttaggagagggtgcgggagttggcggggcggttcggagttgttaggacgttttggttttagtcgcgtataggggagcgtggacggtagaggggttcggcgggagtcgagattcgttcgtttcggttgtttttcggtttttttttgtttttatttattttttgatatttatagaaaagcgtgtaaaggcgcggagcgggacggaaattataaataaatagcggcggcggtagcgcgttatttggtggagtaggaagtgtaggtagagttcggaggttggtgttttttgcgcgtttttaggattttgttatgggttgggggtcgcggaggttgcgagcggtcgggcgagggtagcggcggcggcgttcgtatcggggttgagcgagtagcgacgcgaggggcgcgcggagatggtagcgtttagtaattttagtttgttcggttcgtcggtgtttttcggtgagttttagttcgtcgggcgttgttgtcgcgtcgggtttcgttttattgttttcgtttcgtagtttgggatggatagagtttatttgtggttatttcgttcgttttttcggaatgggggtaggcgttcggggtgatatttgtttggttcgttagtatttcggtgtttagagtattttcgcgtttgatatttgatagcgtagaggtgggagagcggtggtgtttttagtgtgcggacgcgggtgtttcggggtttggagtgtagcgagcgaaaagcgaaaggagcgggtaggttcgtattttttggcgtagttggagcgggggttggcggggcggagaaggttggggtgaagtagagcgtttcgatttgtttgtcgtgtcgcgttcgttattttggatatttaaattcggagtagaggggagtaaattttcgtttttcgtagatttgattttttttgtttgttttagaaattagttttatg

SEQ ID NO: 1554 - DNA, 1082 bp, Artificial Sequence
  chemically treated genomic DNA (Homo sapiens) CpG-island No: 1554
cataaaactaatttctaaaacaaacaaaaaaaatcaaatctacgaaaaacgaaaatttactcccctctactccgaatttaaatatccaaaataacgaacgcgacacgacaaacaaatcgaaacgctctacttcaccccaaccttctccgccccgccaacccccgctccaactacgccaaaaaatacgaacctacccgctcctttcgcttttcgctcgctacactccaaaccccgaaacacccgcgtccgcacactaaaaacaccaccgctctcccacctctacgctatcaaatatcaaacgcgaaaatactctaaacaccgaaatactaacgaaccaaacaaatatcaccccgaacgcctacccccattccgaaaaaacgaacgaaataaccacaaataaactctatccatcccaaactacgaaacgaaaacaataaaacgaaacccgacgcgacaacaacgcccgacgaactaaaactcaccgaaaaacaccgacgaaccgaacaaactaaaattactaaacgctaccatctccgcgcgcccctcgcgtcgctactcgctcaaccccgatacgaacgccgccgccgctaccctcgcccgaccgctcgcaacctccgcgacccccaacccataacaaaatcctaaaaacgcgcaaaaaacaccaacctccgaactctacctacacttcctactccaccaaataacgcgctaccgccgccgctatttatttataatttccgtcccgctccgcgcctttacacgcttttctataaatatcaaaaaataaataaaaacaaaaaaaaaccgaaaaacaaccgaaacgaacgaatctcgactcccgccgaacccctctaccgtccacgctcccctatacgcgactaaaaccaaaacgtcctaacaactccgaaccgccccgccaactcccgcaccctctcctaaactcccgcctctcccgccgcacttcgaataaaccgaacaaaaacgacgaaaaacgaacaaacaaaacgacctcccccttctccctccgccccaactccgctcgcgcacacacaaaaaaaaaaaaaaaaacgcgatcgctcgaa

SEQ ID NO: 1555 - DNA, 1082 bp, Artificial Sequence
  chemically treated genomic DNA (Homo sapiens) CpG-island No: 1555
tatagagttaatttttgaaataaataaagaaaattaagtttgcgaggagcgagggtttgtttttttttgtttcggatttgggtgtttagggtagcgggcgcggtacggtaaataggtcggggcgttttgttttattttaatttttttcgtttcgttagttttcgttttagttgcgttagaaagtgcgagtttgttcgtttttttcgtttttcgttcgttgtattttaagtttcggaatattcgcgttcgtatattaagggtattatcgtttttttatttttgcgttgttagatgttaggcgcggaggtgttttgggtatcgaggtgttggcgaattaaataagtattatttcggacgtttgtttttatttcgagagagcgggcgggatggttataggtaggttttgtttattttaggttgcggggcgagggtagtggggcgagattcggcgcggtagtagcgttcgacgggttgaaatttatcggaggatatcgacgagtcggataggttggagttgttggacgttgttattttcgcgcgtttttcgcgtcgttgttcgtttagtttcggtgcggacgtcgtcgtcgttgttttcgttcggtcgttcgtagttttcgcggtttttagtttatggtaaagttttggggacgcgtagaaagtattagttttcggattttgtttgtattttttgttttattagatgacgcgttgtcgtcgtcgttatttatttgtggttttcgtttcgtttcgcgtttttgtacgtttttttatgggtgttagggggtaggtgggagtagagggaggtcgaggggtagtcgggacgggcggatttcggttttcgtcgagtttttttgtcgtttacgtttttttgtgcgcggttgggattagggcgttttggtagtttcgagtcgtttcgttagttttcgtatttttttttgggttttcgtttttttcgtcgtatttcgagtagatcgggtagaggcggcgggagacggatagatagagcgatttttttttttttttttcgttttaatttcgttcgcgtatatataaaggaagaagaggagacgcggtcgttcggg

SEQ ID NO: 1556 - DNA, 1082 bp, Artificial Sequence
  chemically treated genomic DNA (Homo sapiens) CpG-island No: 1556
cccgaacgaccgcgtctcctcttcttcctttatatatacgcgaacgaaattaaaacgaaaaaaaaaaaaaaaaatcgctctatctatccgtctcccgccgcctctacccgatctactcgaaatacgacgaaaaaaacgaaaacccaaaaaaaaatacgaaaactaacgaaacgactcgaaactaccaaaacgccctaatcccaaccgcgcacaaaaaaacgtaaacgacaaaaaaactcgacgaaaaccgaaatccgcccgtcccgactacccctcgacctccctctactcccacctaccccctaacacccataaaaaaacgtacaaaaacgcgaaacgaaacgaaaaccacaaataaataacgacgacgacaacgcgtcatctaataaaacaaaaaatacaaacaaaatccgaaaactaatactttctacgcgtccccaaaactttaccataaactaaaaaccgcgaaaactacgaacgaccgaacgaaaacaacgacgacgacgtccgcaccgaaactaaacgaacaacgacgcgaaaaacgcgcgaaaataacaacgtccaacaactccaacctatccgactcgtcgatatcctccgataaatttcaacccgtcgaacgctactaccgcgccgaatctcgccccactaccctcgccccgcaacctaaaataaacaaaacctacctataaccatcccgcccgctctctcgaaataaaaacaaacgtccgaaataatacttatttaattcgccaacacctcgatacccaaaacacctccgcgcctaacatctaacaacgcaaaaataaaaaaacgataatacccttaatatacgaacgcgaatattccgaaacttaaaatacaacgaacgaaaaacgaaaaaaacgaacaaactcgcactttctaacgcaactaaaacgaaaactaacgaaacgaaaaaaattaaaataaaacaaaacgccccgacctatttaccgtaccgcgcccgctaccctaaacacccaaatccgaaacaaaaaaaaacaaaccctcgctcctcgcaaacttaattttctttatttatttcaaaaattaactctata

SEQ ID NO: 1557 - DNA, 597 bp, Artificial Sequence
  chemically treated genomic DNA (Homo sapiens) CpG-island No: 1557
ttacgtcgtcgttcgtttaatcgtcgagcgtttcgggtgtgagttcgtttcgcggggagcggtttggagtcgaggaggcggcggtagaggtggtttgggtagtttcgcgcggcggataggtttaggtaaataatatttattttttttttttttcgtttagtttaatttttattcggtttcggttacgttttgtcgttatcgttttttcgggtagtttttcgttcggtagttaggtttcggtcgggggcgggagagaggcggtgtttcgaagaaggtatcgcgatcgtcggaaattacgagtatcgatagttttcgcggtagtgttttatttttttttttttattatttagcgcgcgttattttgggtttagttaatggagatagagttagggaaaaagggcgttcgggttcggatgcgttttaggaaagttatgttttttgcgcgggggtagcgggtagtttatttagcgcgtcgatttgttggtggttcgcgcgcgtttacgttcgtcgttttcgtttgtttggattaagggttttatttttttttttagtggtaattggagggattgttggagggggtttttgagtggagggcgt

SEQ ID NO: 1558 - DNA, 597 bp, Artificial Sequence
  chemically treated genomic DNA (Homo sapiens) CpG-island No: 1558
acgccctccactcaaaaaccccctccaacaatccctccaattaccactaaaaaaaaaaataaaacccttaatccaaacaaacgaaaacgacgaacgtaaacgcgcgcgaaccaccaacaaatcgacgcgctaaataaactacccgctacccccgcgcaaaaaacataactttcctaaaacgcatccgaacccgaacgccctttttccctaactctatctccattaactaaacccaaaataacgcgcgctaaataataaaaaaaaaaaaataaaacactaccgcgaaaactatcgatactcgtaatttccgacgatcgcgataccttcttcgaaacaccgcctctctcccgcccccgaccgaaacctaactaccgaacgaaaaactacccgaaaaaacgataacgacaaaacgtaaccgaaaccgaataaaaattaaactaaacgaaaaaaaaaaaaaataaatattatttacctaaacctatccgccgcgcgaaactacccaaaccacctctaccgccgcctcctcgactccaaaccgctccccgcgaaacgaactcacacccgaaacgctcgacgattaaacgaacgacgacgtaa

SEQ ID NO: 1559 - DNA, 597 bp, Artificial Sequence
  chemically treated genomic DNA (Homo sapiens) CpG-island No: 1559
gcgttttttatttaaaaattttttttagtaatttttttaattgttattaaagaaaaaagtagggtttttgatttaggtaagcgagagcggcggacgtgggcgcgcgcggattattaataggtcggcgcgttgggtgaattgttcgttgttttcgcgtagggagtatggtttttttgaggcgtattcggattcgggcgttttttttttttggttttgtttttattggttgagtttagggtgacgcgcgttgagtggtgggagaaagggggtggggtattatcgcgaaggttgtcggtattcgtagttttcggcggtcgcggtgtttttttcgaggtatcgtttttttttcgttttcgatcgaggtttggttgtcgagcggaaagttgttcgagggggcggtggcggtagggcgtggtcggggtcgagtgggagttgaattgagcgaggaggagggggaatgggtgttgtttgtttgggtttattcgtcgcgcggggttgtttaaattatttttgtcgtcgttttttcggttttaagtcgtttttcgcggggcgagtttatattcggagcgttcggcgattgagcgggcggcggcgtgg

SEQ ID NO: 1560 - DNA, 597 bp, Artificial Sequence
  chemically treated genomic DNA (Homo sapiens) CpG-island No: 1560
ccacgccgccgcccgctcaatcgccgaacgctccgaatataaactcgccccgcgaaaaacgacttaaaaccgaaaaaacgacgacaaaaataatttaaacaaccccgcgcgacgaataaacccaaacaaacaacacccattccccctcctcctcgctcaattcaactcccactcgaccccgaccacgccctaccgccaccgccccctcgaacaactttccgctcgacaaccaaacctcgatcgaaaacgaaaaaaaaacgatacctcgaaaaaaacaccgcgaccgccgaaaactacgaataccgacaaccttcgcgataataccccaccccctttctcccaccactcaacgcgcgtcaccctaaactcaaccaataaaaacaaaaccaaaaaaaaaaaacgcccgaatccgaatacgcctcaaaaaaaccatactccctacgcgaaaacaacgaacaattcacccaacgcgccgacctattaataatccgcgcgcgcccacgtccgccgctctcgcttacctaaatcaaaaaccctacttttttctttaataacaattaaaaaaattactaaaaaaaatttttaaataaaaaacgc

SEQ ID NO: 1561 - DNA, 660 bp, Artificial Sequence
  chemically treated genomic DNA (Homo sapiens) CpG-island No: 1561
acgcggtttttcggtcgtgttcgggatttagagttcgagggttttttttttcggttttggttttggcgtatattgggcggtggcgcggtgcgtttatttcgtttttagcgggttggggcggggatatcgtttttcgggaaacgggacgcgttgtttgttttaggttttcgtttcggtttgcgaggttatagttgtgcgtagtggcgcggttgttaagtagtagtaggtgggagattagggtttgcgttcgcggcgatcgcggaggagggtgggcgtttgcggaggtgttttcgtttatttcggggggtttagagtttcgggtgaggagttagtcggtttcgcgttttttcggacggttgtttaatggtagtttaggtggtagttcgggaggcgcgagattttagagaagtttcgatttttcgtttaatttcgggggtcggtttggaggtagtgggcgttgtggagttcgaggaggaggaggagaacgaggaggaggcggcggttaggagagcgcggagtttcgtttaagacgcgcgggtgcgttttttcggcggtcgtttggcgatgatgttggggtttacggaggagaaatggagttagtatttggaaagcgaggataatcggtaggtttttggggagtttttggaaagtattagttcg

SEQ ID NO: 1562 - DNA, 660 bp, Artificial Sequence
  chemically treated genomic DNA (Homo sapiens) CpG-island No: 1562
cgaactaatactttccaaaaactccccaaaaacctaccgattatcctcgctttccaaatactaactccatttctcctccgtaaaccccaacatcatcgccaaacgaccgccgaaaaaacgcacccgcgcgtcttaaacgaaactccgcgctctcctaaccgccgcctcctcctcgttctcctcctcctcctcgaactccacaacgcccactacctccaaaccgacccccgaaattaaacgaaaaatcgaaacttctctaaaatctcgcgcctcccgaactaccacctaaactaccattaaacaaccgtccgaaaaaacgcgaaaccgactaactcctcacccgaaactctaaaccccccgaaataaacgaaaacacctccgcaaacgcccaccctcctccgcgatcgccgcgaacgcaaaccctaatctcccacctactactacttaacaaccgcgccactacgcacaactataacctcgcaaaccgaaacgaaaacctaaaacaaacaacgcgtcccgtttcccgaaaaacgatatccccgccccaacccgctaaaaacgaaataaacgcaccgcgccaccgcccaatatacgccaaaaccaaaaccgaaaaaaaaaaccctcgaactctaaatcccgaacacgaccgaaaaaccgcgt

SEQ ID NO: 1563 - DNA, 660 bp, Artificial Sequence
  chemically treated genomic DNA (Homo sapiens) CpG-island No: 1563
cgggttggtgttttttagaaattttttaagaatttgtcggttgttttcgttttttaaatattggttttatttttttttcgtgaattttagtattatcgttaggcggtcgtcgaggaagcgtattcgcgcgttttgggcgaaatttcgcgtttttttggtcgtcgtttttttttcgttttttttttttttttcgagttttatagcgtttattgtttttaggtcggttttcgaggttaggcgaagggtcggggtttttttgaagtttcgcgtttttcgggttgttatttgggttgttattgggtaatcgttcgagggaacgcgaggtcggttggttttttattcgagattttgggtttttcgaagtgagcgaggatattttcgtaggcgtttattttttttcgcggtcgtcgcgagcgtagattttagttttttatttgttgttatttagtagtcgcgttattgcgtatagttgtagtttcgtaggtcgaagcgaaggtttgggataagtagcgcgtttcgtttttcgggggacggtgttttcgttttagttcgttgggggcggagtgagcgtatcgcgttatcgtttagtatacgttaaggttaaggtcgaggggagaggttttcgggttttaggtttcgaatacggtcgagaagtcgcgt

SEQ ID NO: 1564 - DNA, 660 bp, Artificial Sequence
  chemically treated genomic DNA (Homo sapiens) CpG-island No: 1564
acgcgacttctcgaccgtattcgaaacctaaaacccgaaaacctctcccctcgaccttaaccttaacgtatactaaacgataacgcgatacgctcactccgcccccaacgaactaaaacgaaaacaccgtcccccgaaaaacgaaacgcgctacttatcccaaaccttcgcttcgacctacgaaactacaactatacgcaataacgcgactactaaataacaacaaataaaaaactaaaatctacgctcgcgacgaccgcgaaaaaaaataaacgcctacgaaaatatcctcgctcacttcgaaaaacccaaaatctcgaataaaaaaccaaccgacctcgcgttccctcgaacgattacccaataacaacccaaataacaacccgaaaaacgcgaaacttcaaaaaaaccccgacccttcgcctaacctcgaaaaccgacctaaaaacaataaacgctataaaactcgaaaaaaaaaaaaaaaacgaaaaaaaaacgacgaccaaaaaaacgcgaaatttcgcccaaaacgcgcgaatacgcttcctcgacgaccgcctaacgataatactaaaattcacgaaaaaaaaataaaaccaatatttaaaaaacgaaaacaaccgacaaattcttaaaaaatttctaaaaaacaccaacccg

SEQ ID NO: 1565 - DNA, 510 bp, Artificial Sequence
  chemically treated genomic DNA (Homo sapiens) CpG-island No: 1565
ggcgaggtcggggtggttcgggaggcggcggcgtcgaggcggttttgacgggtaagcgttcggagcggcgttgcgttgcgtcgaggcgggcgggcgggcgggcggagcggggcgggcggagcgcggcgcgtggggttcgttattagtcgtcgtttcgtttcgttatttcgggttttgtttggcgattcgttgtttcggcgtcggttgtagcggagttgcggttcgattgttcggttcgtcgtgtttttaggtgttttcggtttgcgtttttatttatacgttcggtaagtgagttcgggagtcgcggatttcgggggagaggggttgttacgagtggcggcggcgtcgatttttatgcgttcgggtaggtttggagaattatgtcgggttggattgaatcggtttttatagcggttttttcgtcggagttcgtcgtttttttgtcgttttcggggtgtaaagagtaacggggattttttttttttaatgtagaggttttagttttcgggt

SEQ ID NO: 1566 - DNA, 510 bp, Artificial Sequence
  chemically treated genomic DNA (Homo sapiens) CpG-island No: 1566
acccgaaaactaaaacctctacattaaaaaaaaaaaatccccgttactctttacaccccgaaaacgacaaaaaaacgacgaactccgacgaaaaaaccgctataaaaaccgattcaatccaacccgacataattctccaaacctacccgaacgcataaaaatcgacgccgccgccactcgtaacaacccctctcccccgaaatccgcgactcccgaactcacttaccgaacgtataaataaaaacgcaaaccgaaaacacctaaaaacacgacgaaccgaacaatcgaaccgcaactccgctacaaccgacgccgaaacaacgaatcgccaaacaaaacccgaaataacgaaacgaaacgacgactaataacgaaccccacgcgccgcgctccgcccgccccgctccgcccgcccgcccgcccgcctcgacgcaacgcaacgccgctccgaacgcttacccgtcaaaaccgcctcgacgccgccgcctcccgaaccaccccgacctcgcc

SEQ ID NO: 1567 - DNA, 510 bp, Artificial Sequence
  chemically treated genomic DNA (Homo sapiens) CpG-island No: 1567
attcgaaaattaaaatttttgtattaaaaaaaaaaaattttcgttgttttttatatttcggaaacggtaagggaacgacgggtttcggcggaggggtcgttgtgggagtcggtttaatttagttcggtatggttttttaggtttgttcgggcgtatgaagatcggcgtcgtcgttattcgtagtaatttttttttttcgaaattcgcggttttcgggtttatttatcgagcgtgtggatgggagcgtaggtcgggggtatttgggagtacggcgggtcgaatagtcgagtcgtagtttcgttgtagtcgacgtcggggtagcgagtcgttagataaagttcgagatggcgaagcggagcgacggttaatggcgagttttacgcgtcgcgtttcgttcgtttcgtttcgttcgttcgttcgttcgtttcggcgtagcgtagcgtcgtttcgagcgtttgttcgttagagtcgtttcggcgtcgtcgtttttcgggttatttcggtttcgtt

SEQ ID NO: 1568 - DNA, 510 bp, Artificial Sequence
  chemically treated genomic DNA (Homo sapiens) CpG-island No: 1568
aacgaaaccgaaataacccgaaaaacgacgacgccgaaacgactctaacgaacaaacgctcgaaacgacgctacgctacgccgaaacgaacgaacgaacgaacgaaacgaaacgaacgaaacgcgacgcgtaaaactcgccattaaccgtcgctccgcttcgccatctcgaactttatctaacgactcgctaccccgacgtcgactacaacgaaactacgactcgactattcgacccgccgtactcccaaatacccccgacctacgctcccatccacacgctcgataaataaacccgaaaaccgcgaatttcgaaaaaaaaaaattactacgaataacgacgacgccgatcttcatacgcccgaacaaacctaaaaaaccataccgaactaaattaaaccgactcccacaacgacccctccgccgaaacccgtcgttcccttaccgtttccgaaatataaaaaacaacgaaaattttttttttttaatacaaaaattttaattttcgaat

SEQ ID NO: 1569 - DNA, 1651 bp, Artificial Sequence
  chemically treated genomic DNA (Homo sapiens) CpG-island No: 1569
cgcggtcgtatttcggttttttttcgtcggcgaagtttgttagttttttcgcgggtttggcgaggtcgttttcggcgttcgttcgttcgtttaggtttcgagtttcgtcgttattcgggcggttgcgtgtttttttgtttcggttttttttttttttttcggcggcggtagtagtagtagtagtagtcgtcgtcgtcgttagtattattattattatttttttttttttttttttttttttcgtttcggtcgttcgggtttttttagttttcgtttttttttttagttgtttttcgcggagttcgttcgggtaggttgtgggagggagcggagtcggcgaggcgggcgggttggcgttcgtttttcgggggtcggtgtgcgttttacggggaaggacgcgttcgttgtttcgtttttttcgttttttttttcgtttttttttttttttttttttttttttttttcgtttcggcggttgaggttgcggcggcggcggggggtgtgcgagttgaggtcggggtcggcggcgggcgggttgtttgtaggcggagggcgttgtgttttgtgtttttcgtcgcgaggagtagtaggtagtagttatagtcgtcgtcgtcgtcgtcgtcgttatagtagtagtagtcgtcgttttagcgtcgtcgtttcgttcggaggaggagtcgttgtcgtcgcgggagggagttgcggttgtgttcggtcgagcgggggagggcgtcgttatttagagttagggagggagtcgttggagcgggaagttcggaggtcgcgttgcgtcgggtaatcgaggcggttgaggacgcgcgttggggtcggggtcggacggcgggagcgaatcgcggggtgcggtgggcgtttagcggggattcgaagcgattatcgagtaggcgatcgggcgcgagtagattagggtatttgggaggacgtcgagagtcgggggaggggaaggtaggaagcgaggtttgagtcgagtttcggtcgttggcggaggagttcgcgtttttcggagtcggtaggcgtagtttttttcggtcgtcggagggggcggcggggtcggtgagcgttgcgttttcgtttttcggtcgtcgttttttcgttttttttttggttcggtttttcggaggtcggggcgggggcgtcggcggggttgggtcgtaggttcgggggaggaggcggcggttttcgtcgcggtcgcgtttttgtgtcgggttttttcgtgcgcgtcggggtggttgggcggtggcggcgtttttggtcggggtgggtggttcgggggcggggggtaggttaggtcgttttttttcggttgtttgttcgtttgtgcgggcggggacggcgaagggagttcgggaggggggagcggcgggaattcggattcggttttcgggggcggtgcggtcgtttcgtttcggggttggcggcggttgcgttgcgttcgggttttcgtcgggttgcggaggcggggggaatcggtcggggggaggcgggaggaggagattggggcgcgtgttcgttttcgtggtcgcgcgcgttttttattcgtttttttttttttttcgttttttagtttggggttttttcggggcgggcgtttcgaggaggaggagattttttttttttttttttttttggttgg

SEQ ID NO: 1570 - DNA, 1651 bp, Artificial Sequence
  chemically treated genomic DNA (Homo sapiens) CpG-island No: 1570
ccaaccaaaaaaaaaaaaaaaaaaaaaatctcctcctcctcgaaacgcccgccccgaaaaaaccccaaactaaaaaacgaaaaaaaaaaaaaaacgaataaaaaacgcgcgcgaccacgaaaacgaacacgcgccccaatctcctcctcccgcctccccccgaccgattccccccgcctccgcaacccgacgaaaacccgaacgcaacgcaaccgccgccaaccccgaaacgaaacgaccgcaccgcccccgaaaaccgaatccgaattcccgccgctcccccctcccgaactcccttcgccgtccccgcccgcacaaacgaacaaacaaccgaaaaaaaacgacctaacctaccccccgcccccgaaccacccaccccgaccaaaaacgccgccaccgcccaaccaccccgacgcgcacgaaaaaacccgacacaaaaacgcgaccgcgacgaaaaccgccgcctcctcccccgaacctacgacccaaccccgccgacgcccccgccccgacctccgaaaaaccgaaccaaaaaaaaaacgaaaaaacgacgaccgaaaaacgaaaacgcaacgctcaccgaccccgccgccccctccgacgaccgaaaaaaactacgcctaccgactccgaaaaacgcgaactcctccgccaacgaccgaaactcgactcaaacctcgcttcctaccttcccctcccccgactctcgacgtcctcccaaataccctaatctactcgcgcccgatcgcctactcgataatcgcttcgaatccccgctaaacgcccaccgcaccccgcgattcgctcccgccgtccgaccccgaccccaacgcgcgtcctcaaccgcctcgattacccgacgcaacgcgacctccgaacttcccgctccaacgactccctccctaactctaaataacgacgccctcccccgctcgaccgaacacaaccgcaactccctcccgcgacgacaacgactcctcctccgaacgaaacgacgacgctaaaacgacgactactactactataacgacgacgacgacgacgacgactataactactacctactactcctcgcgacgaaaaacacaaaacacaacgccctccgcctacaaacaacccgcccgccgccgaccccgacctcaactcgcacaccccccgccgccgccgcaacctcaaccgccgaaacgaaaaaaaaaaaaaaaaaaaaaaaaaaaaaaacgaaaaaaaaaacgaaaaaaacgaaacaacgaacgcgtccttccccgtaaaacgcacaccgacccccgaaaaacgaacgccaacccgcccgcctcgccgactccgctccctcccacaacctacccgaacgaactccgcgaaaaacaactaaaaaaaaaaacgaaaactaaaaaaacccgaacgaccgaaacgaaaaaaaaaaaaaaaaaaaaaaaaataataataataatactaacgacgacgacgactactactactactactaccgccgccgaaaaaaaaaaaaaaaaccgaaacaaaaaaacacgcaaccgcccgaataacgacgaaactcgaaacctaaacgaacgaacgaacgccgaaaacgacctcgccaaacccgcgaaaaaactaacaaacttcgccgacgaaaaaaaaccgaaatacgaccgcg

SEQ ID NO: 1571 - DNA, 1651 bp, Artificial Sequence
  chemically treated genomic DNA (Homo sapiens) CpG-island No: 1571
ttagttaaaaaaaaaaaaaaagaaaaaattttttttttttcggagcgttcgtttcggggaggttttaggttggagggcgggggaagaggaagggcgggtaaagggcgcgcgcggttacggaagcgggtacgcgttttagtttttttttttcgttttttttcggtcggtttttttcgttttcgtaattcggcggggattcggacgtagcgtagtcgtcgttagtttcggagcggagcggtcgtatcgttttcggggatcggattcggattttcgtcgtttttttttttcgggtttttttcgtcgttttcgttcgtataggcgggtaagtagtcggagagaagcggtttagtttgtttttcgttttcgagttatttatttcggttagaggcgtcgttatcgtttagttatttcgacgcgtacggaggagttcggtatagaggcgcgatcgcggcgggaatcgtcgttttttttttcgagtttgcggtttagtttcgtcggcgttttcgtttcggttttcggggagtcgagttaaggagagggcgggaggacggcggtcgggaggcgggggcgtagcgtttatcggtttcgtcgtttttttcggcggtcggggagaattgcgtttgtcggtttcgagaagcgcgggttttttcgttagcggtcggggttcggtttaggtttcgttttttgtttttttttttttcggttttcggcgtttttttaagtgttttggtttgttcgcgttcggtcgtttgttcggtggtcgtttcgggttttcgttgggcgtttatcgtatttcgcggttcgttttcgtcgttcggtttcgattttagcgcgcgtttttagtcgtttcggttattcggcgtagcgcggttttcgggtttttcgttttagcggttttttttttggttttgagtggcggcgttttttttcgttcggtcgggtatagtcgtagttttttttcgcggcggtagcggtttttttttcgggcgaggcggcggcgttggggcggcggttgttgttgttgtggcggcggcggcggcggcggcggttgtggttgttgtttgttgtttttcgcggcgaaaagtataaagtatagcgtttttcgtttgtaggtagttcgttcgtcgtcggtttcggttttagttcgtatatttttcgtcgtcgtcgtagttttagtcgtcggagcggggaggaggagggagaagggaggaggaggagcgggagggggggcgggagaagcggggtagcgagcgcgttttttttcgtagagcgtatatcgattttcggggagcgagcgttagttcgttcgtttcgtcggtttcgtttttttttatagtttgttcgggcgggtttcgcggggggtagttgggaggaggggcgggagttggggggattcgggcggtcgaggcggagggaaggaaggaggggaggggggtggtggtggtggtgttggcggcggcggcggttgttgttgttgttgttgtcgtcgtcggggaagggggggggggtcggggtagggagatacgtagtcgttcggatggcggcggggttcggagtttaggcgggcgggcgggcgtcgagagcgatttcgttagattcgcgggggaattagtaggtttcgtcggcgagggagggtcgaggtgcggtcgcg

SEQ ID NO: 1572 - DNA, 1651 bp, Artificial Sequence
  chemically treated genomic DNA (Homo sapiens) CpG-island No: 1572
cgcgaccgcacctcgaccctccctcgccgacgaaacctactaattcccccgcgaatctaacgaaatcgctctcgacgcccgcccgcccgcctaaactccgaaccccgccgccatccgaacgactacgtatctccctaccccgacccccccccccttccccgacgacgacaacaacaacaacaacaaccgccgccgccgccaacaccaccaccaccacccccctcccctccttccttccctccgcctcgaccgcccgaatccccccaactcccgcccctcctcccaactaccccccgcgaaacccgcccgaacaaactataaaaaaaaacgaaaccgacgaaacgaacgaactaacgctcgctccccgaaaatcgatatacgctctacgaaaaaaaacgcgctcgctaccccgcttctcccgccccccctcccgctcctcctcctcccttctccctcctcctccccgctccgacgactaaaactacgacgacgacgaaaaatatacgaactaaaaccgaaaccgacgacgaacgaactacctacaaacgaaaaacgctatactttatacttttcgccgcgaaaaacaacaaacaacaaccacaaccgccgccgccgccgccgccgccacaacaacaacaaccgccgccccaacgccgccgcctcgcccgaaaaaaaaaccgctaccgccgcgaaaaaaaactacgactatacccgaccgaacgaaaaaaaacgccgccactcaaaaccaaaaaaaaaaccgctaaaacgaaaaacccgaaaaccgcgctacgccgaataaccgaaacgactaaaaacgcgcgctaaaatcgaaaccgaacgacgaaaacgaaccgcgaaatacgataaacgcccaacgaaaacccgaaacgaccaccgaacaaacgaccgaacgcgaacaaaccaaaacacttaaaaaaacgccgaaaaccgaaaaaaaaaaaaacaaaaaacgaaacctaaaccgaaccccgaccgctaacgaaaaaacccgcgcttctcgaaaccgacaaacgcaattctccccgaccgccgaaaaaaacgacgaaaccgataaacgctacgcccccgcctcccgaccgccgtcctcccgccctctccttaactcgactccccgaaaaccgaaacgaaaacgccgacgaaactaaaccgcaaactcgaaaaaaaaaacgacgattcccgccgcgatcgcgcctctataccgaactcctccgtacgcgtcgaaataactaaacgataacgacgcctctaaccgaaataaataactcgaaaacgaaaaacaaactaaaccgcttctctccgactacttacccgcctatacgaacgaaaacgacgaaaaaaacccgaaaaaaaaaaacgacgaaaatccgaatccgatccccgaaaacgatacgaccgctccgctccgaaactaacgacgactacgctacgtccgaatccccgccgaattacgaaaacgaaaaaaaccgaccgaaaaaaaacgaaaaaaaaaaactaaaacgcgtacccgcttccgtaaccgcgcgcgccctttacccgcccttcctcttcccccgccctccaacctaaaacctccccgaaacgaacgctccgaaaaaaaaaaaattttttctttttttttttttttaactaa

SEQ ID NO: 1573 - DNA, 823 bp, Artificial Sequence
  chemically treated genomic DNA (Homo sapiens) CpG-island No: 1573
ggaagggcgggggagtttgggtcggaaggcgttttaggttcggttggtagtcggcgttttttttcgacgttattcgttgttttcgttttcgagtcggtcgggacggtaaaacgttttcgtttttagcgtatcgcgtattttattttgaacgtcgttttatttatttttattttattggttttttcgggtcgaggtttttttgcgattggtcggggaggttcgcgaaggtttcgtttattttttcgttttcgttttcgttcgtcggtattttggacggcggcgtggcgtttttttttttttttcggttttcgttttttggagtaaatgttgtcgagttgcggtcgcggggtagatgtacgcgttcgggtttttttagtaggcgcgagtagtcgttgggcgcgcgaaagcgaaagaaggaagaggaagggagggggagggcggggtgttggggaggggcgggaggaggaagaggaggaggttggagcgcgttcgcgtttggtttcgcgttcgcgtagagggagggggagaggggcgcgcgcgcgtacgttcgcgtttacgttcgttttatttatttatttttcggtcgcggtatacgcgcgcgcgtttcgggttcgcgtcgtatttttcgttcgggagaggcgggttggagtggggggcggggggaggggcgcgcggacggcgcgcggattgcgcgcgggcggggtgaggtgaggaggaggaggcggcgacgggataagaagggaggggaaggggttatggtcgttcggtgaggcggttaggcgggggggcggttcgatttttcggtttcgggttttgggtttcg

SEQ ID NO: 1574 - DNA, 823 bp, Artificial Sequence
  chemically treated genomic DNA (Homo sapiens) CpG-island No: 1574
cgaaacccaaaacccgaaaccgaaaaatcgaaccgcccccccgcctaaccgcctcaccgaacgaccataaccccttcccctcccttcttatcccgtcgccgcctcctcctcctcacctcaccccgcccgcgcgcaatccgcgcgccgtccgcgcgcccctccccccgccccccactccaacccgcctctcccgaacgaaaaatacgacgcgaacccgaaacgcgcgcgcgtataccgcgaccgaaaaataaataaataaaacgaacgtaaacgcgaacgtacgcgcgcgcgcccctctccccctccctctacgcgaacgcgaaaccaaacgcgaacgcgctccaacctcctcctcttcctcctcccgcccctccccaacaccccgccctccccctcccttcctcttccttctttcgctttcgcgcgcccaacgactactcgcgcctactaaaaaaacccgaacgcgtacatctaccccgcgaccgcaactcgacaacatttactccaaaaaacgaaaaccgaaaaaaaaaaaaaaacgccacgccgccgtccaaaataccgacgaacgaaaacgaaaacgaaaaaataaacgaaaccttcgcgaacctccccgaccaatcgcaaaaaaacctcgacccgaaaaaaccaataaaataaaaataaataaaacgacgttcaaaataaaatacgcgatacgctaaaaacgaaaacgttttaccgtcccgaccgactcgaaaacgaaaacaacgaataacgtcgaaaaaaaacgccgactaccaaccgaacctaaaacgccttccgacccaaactcccccgcccttcc

SEQ ID NO: 1575 - DNA, 823 bp, Artificial Sequence
  chemically treated genomic DNA (Homo sapiens) CpG-island No: 1575
cggggtttagggttcggggtcggggggtcgggtcgttttttcgtttggtcgttttatcgggcggttatggtttttttttttttttttttgtttcgtcgtcgtttttttttttttattttatttcgttcgcgcgtagttcgcgcgtcgttcgcgcgttttttttttcgttttttattttagttcgtttttttcgggcggggggtgcggcgcgagttcggagcgcgcgcgcgtgtgtcgcgatcggaggatggatggatggagcgagcgtgaacgcgagcgtgcgcgcgcgcgtttttttttttttttttttgcgcgggcgcgaggttaagcgcgagcgcgttttaattttttttttttttttttttcgtttttttttaatatttcgtttttttttttttttttttttttttttttcgttttcgcgcgtttagcgattgttcgcgtttgttagaagggttcgagcgcgtgtatttgtttcgcggtcgtagttcggtagtatttgttttagggggcggggatcgggaggggaggaggggcgttacgtcgtcgtttaaagtatcggcggacggggacgggggcggagagatgggcggggttttcgcggattttttcgattaatcgtagggaggtttcggttcgggaggattaataagatgggggtgggtggggcggcgtttaaggtgaggtgcgcggtgcgttgggggcggagacgttttgtcgtttcggtcggttcgggggcgggggtagcgggtggcgtcgaaagagagcgtcggttgttagtcgagtttgggacgtttttcggtttaggttttttcgttttttt

SEQ ID NO: 1576 - DNA, 823 bp, Artificial Sequence
  chemically treated genomic DNA (Homo sapiens) CpG-island No: 1576
aaaaaaacgaaaaaacctaaaccgaaaaacgtcccaaactcgactaacaaccgacgctctctttcgacgccacccgctacccccgcccccgaaccgaccgaaacgacaaaacgtctccgcccccaacgcaccgcgcacctcaccttaaacgccgccccacccacccccatcttattaatcctcccgaaccgaaacctccctacgattaatcgaaaaaatccgcgaaaaccccgcccatctctccgcccccgtccccgtccgccgatactttaaacgacgacgtaacgcccctcctcccctcccgatccccgccccctaaaacaaatactaccgaactacgaccgcgaaacaaatacacgcgctcgaacccttctaacaaacgcgaacaatcgctaaacgcgcgaaaacgaaaaaaaaaaaaaaaaaaaaaaaaaaaaacgaaatattaaaaaaaaacgaaaaaaaaaaaaaaaaaaaattaaaacgcgctcgcgcttaacctcgcgcccgcgcaaaaaaaaaaaaaaaaaaacgcgcgcgcgcacgctcgcgttcacgctcgctccatccatccatcctccgatcgcgacacacgcgcgcgcgctccgaactcgcgccgcaccccccgcccgaaaaaaacgaactaaaataaaaaacgaaaaaaaaaacgcgcgaacgacgcgcgaactacgcgcgaacgaaataaaataaaaaaaaaaaaacgacgacgaaacaaaaaaaaaaaaaaaaaaaccataaccgcccgataaaacgaccaaacgaaaaaacgacccgaccccccgaccccgaaccctaaaccccg

SEQ ID NO: 1577 - DNA, 547 bp, Artificial Sequence
  chemically treated genomic DNA (Homo sapiens) CpG-island No: 1577
acgtatttatataaatttattttatatatatatatataatttatttttatatatatatatgtagtttatttttatatatacgtatttatataatttatttttatatatatttatatatacgtaatttattcgtatttaaataatttatttttatatatatatttatatatacgtaatttatttttatatatatatacgtaatttattcgtatttatataatttatttttatatatatatttatatatacgtaatttattcgtaaataatttatttttatatatatatttatatatacgtaatttatttttatatatatacgtaatttatttgtatttaaatttatttttatatatatatttatatatacgtaatttatttttatatatatatttatataatttatttttatatatatttatatatacgtaatttatttttatatatacgtgtatatttatttttatacgtgtatttttatatatgtatatttatttttatacgtgtgtatttatatatatatattagcgtatttttatttttttata

SEQ ID NO: 1578 - DNA, 547 bp, Artificial Sequence
  chemically treated genomic DNA (Homo sapiens) CpG-island No: 1578
tataaaaaaataaaaatacgctaatatatatatataaatacacacgtataaaaataaatatacatatataaaaatacacgtataaaaataaatatacacgtatatataaaaataaattacgtatatataaatatatataaaaataaattatataaatatatatataaaaataaattacgtatatataaatatatatataaaaataaatttaaatacaaataaattacgtatatatataaaaataaattacgtatatataaatatatatataaaaataaattatttacgaataaattacgtatatataaatatatatataaaaataaattatataaatacgaataaattacgtatatatatataaaaataaattacgtatatataaatatatatataaaaataaattatttaaatacgaataaattacgtatatataaatatatataaaaataaattatataaatacgtatatataaaaataaactacatatatatatataaaaataaattatatatatatatataaaataaatttatataaatacgt

SEQ ID NO: 1579 - DNA, 547 bp, Artificial Sequence
  chemically treated genomic DNA (Homo sapiens) CpG-island No: 1579
tatggggaggtaggggtgcgttggtgtgtatgtgtaggtgtatacgtgtaggggtgggtgtgtatgtgtgagggtgtacgtgtgggggtgggtgtgtacgtgtgtgtaggggtgggttgcgtgtgtgtgaatgtgtataggggtgggttgtgtgaatgtgtgtgtaggggtgggttgcgtgtgtgtgaatgtgtgtgtaggggtgggtttgaatgtaggtaggttgcgtgtgtgtgtaggggtgggttgcgtgtgtgtgaatgtgtgtgtaggggtgggttgtttgcgggtaggttgcgtgtgtgtgaatgtgtgtgtaggggtgggttgtgtgaatgcgggtaggttgcgtgtgtgtgtgtaggggtgggttgcgtgtgtgtgaatgtgtgtgtaggggtgggttgtttgaatgcgggtaggttgcgtgtgtgtgaatgtgtataggggtgggttgtgtgaatgcgtgtgtgtaggggtgggttgtatgtgtgtgtgtaggggtgggttgtgtgtgtgtgtatggggtgggtttgtgtgaatgcgt

SEQ ID NO: 1580 - DNA, 547 bp, Artificial Sequence
  chemically treated genomic DNA (Homo sapiens) CpG-island No: 1580
acgcattcacacaaacccaccccatacacacacacacaacccacccctacacacacacatacaacccacccctacacacacgcattcacacaacccacccctatacacattcacacacacgcaacctacccgcattcaaacaacccacccctacacacacattcacacacacgcaacccacccctacacacacacacgcaacctacccgcattcacacaacccacccctacacacacattcacacacacgcaacctacccgcaaacaacccacccctacacacacattcacacacacgcaacccacccctacacacacacgcaacctacctacattcaaacccacccctacacacacattcacacacacgcaacccacccctacacacacattcacacaacccacccctatacacattcacacacacgcaacccacccctacacacacgtacacacccacccccacacgtacaccctcacacatacacacccacccctacacgtatacacctacacatacacaccaacgcacccctacctccccata

SEQ ID NO: 1581 - DNA, 589 bp, Artificial Sequence
  chemically treated genomic DNA (Homo sapiens) CpG-island No: 1581
gcgttatttgtttagggtcgaagtatttatcggttcgtgagtggggtcgacgcggggtttgcgacgttttggggttttgggtcgggtaaaaaagttgttcgggagtagttgaacgcggcgtaaacgggagatttgcgttcgcgggggagtaatttgtattcgttgttaaatattcggttagcgcggttttttgtattagggggcgggataggggcgggggttttcgatttttttttattttaaacgcggtttttcgaatgcggcgttagttcggtttgttgagtggtcggtgtagtcgttaattattttatattttcgttaattacggtgcgtttcgtttagttgcggttcggtattttttttgcgtggttgggttcgaggggttagaaggcgggttcggttcgtttatagcgaaagttttcgagcggattcgggtttcggtttcgttttcgtttcgttcgcggaacgtttagttgtttagcgaggtcgttcgtttttttttgtaataggtggtttggattcgtggaaaaggtttcggttattttttatttattatttcggttttagcgtttttaattgtagatttatt

SEQ ID NO: 1582 - DNA, 589 bp, Artificial Sequence
  chemically treated genomic DNA (Homo sapiens) CpG-island No: 1582
aataaatctacaattaaaaacgctaaaaccgaaataataaataaaaaataaccgaaaccttttccacgaatccaaaccacctattacaaaaaaaaacgaacgacctcgctaaacaactaaacgttccgcgaacgaaacgaaaacgaaaccgaaacccgaatccgctcgaaaactttcgctataaacgaaccgaacccgccttctaacccctcgaacccaaccacgcaaaaaaaataccgaaccgcaactaaacgaaacgcaccgtaattaacgaaaatataaaataattaacgactacaccgaccactcaacaaaccgaactaacgccgcattcgaaaaaccgcgtttaaaataaaaaaaaatcgaaaacccccgcccctatcccgccccctaatacaaaaaaccgcgctaaccgaatatttaacaacgaatacaaattactcccccgcgaacgcaaatctcccgtttacgccgcgttcaactactcccgaacaacttttttacccgacccaaaaccccaaaacgtcgcaaaccccgcgtcgaccccactcacgaaccgataaatacttcgaccctaaacaaataacgc

SEQ ID NO: 1583 - DNA, 589 bp, Artificial Sequence
  chemically treated genomic DNA (Homo sapiens) CpG-island No: 1583
aatgaatttgtagttggggacgttgaggtcggagtggtggatgaaaggtggtcggagttttttttacgggtttaaattatttgttataggagaaggcgagcggtttcgttaagtaattggacgtttcgcgggcggggcgggggcggggtcggggttcgagttcgttcggaaattttcgttgtgggcgagtcggattcgttttttggtttttcgggtttaattacgtagggggagtgtcgggtcgtagttaggcgaggcgtatcgtgattggcggagatgtggagtgattggcggttatatcggttatttagtaggtcgagttggcgtcgtattcggggggtcgcgtttggagtggagggaggtcgaaagttttcgtttttgtttcgttttttagtgtagaaggtcgcgttagtcggatatttagtagcgagtgtagattgttttttcgcggacgtagatttttcgtttgcgtcgcgtttagttgttttcgaataatttttttgttcggtttaaggttttagggcgtcgtaggtttcgcgtcggttttatttacgggtcggtgagtatttcggttttgggtaagtggcgt

SEQ ID NO: 1584 - DNA, 589 bp, Artificial Sequence
  chemically treated genomic DNA (Homo sapiens) CpG-island No: 1584
acgccacttacccaaaaccgaaatactcaccgacccgtaaataaaaccgacgcgaaacctacgacgccctaaaaccttaaaccgaacaaaaaaattattcgaaaacaactaaacgcgacgcaaacgaaaaatctacgtccgcgaaaaaacaatctacactcgctactaaatatccgactaacgcgaccttctacactaaaaaacgaaacaaaaacgaaaactttcgacctccctccactccaaacgcgaccccccgaatacgacgccaactcgacctactaaataaccgatataaccgccaatcactccacatctccgccaatcacgatacgcctcgcctaactacgacccgacactccccctacgtaattaaacccgaaaaaccaaaaaacgaatccgactcgcccacaacgaaaatttccgaacgaactcgaaccccgaccccgcccccgccccgcccgcgaaacgtccaattacttaacgaaaccgctcgccttctcctataacaaataatttaaacccgtaaaaaaaactccgaccacctttcatccaccactccgacctcaacgtccccaactacaaattcatt

SEQ ID NO: 1585 - DNA, 1081 bp, Artificial Sequence
  chemically treated genomic DNA (Homo sapiens) CpG-island No: 1585
tttcgtttcgtttcgggttcgttcgcgttttttcgggcgataaaattttttcgtcgtcgtttagttaggattgatagttacggttgtagtagtcgcggttattaggggtttatttttggtattagttttttcggattacgcgtttttaaatattcgtttcggcggcggggggcggggaaggggggtgtcgatttcgttatagcgggtttcgaaggtcggtcgagtgacggaggggagttagcgtcgtttggcgtaggtcgcggtaatattgatttgtcgtcgttttcgcgtttgggttgcggcggtcgttttattggtcgtagtcgttttcgttcgtcgttttcgttcgttatcgtttcgttttttttcgttgtcgttatcgtcggggtttatgcgggattcgcgtttttttattcggaaaacgaggtcgggaaagggagcgtcggggtcgtcgaaatttcggcgttcgtcgttagtcgtcgttgtttgtttatatcggggggttgaggggtttttttgttaggggttataggtcgcgagttatttcgaggaggagtcgaaggaggcgtcgtcgttcgtagtcgagcgcgtcgggtcggtagaggtgaagcgtaagtaggcggcggatggcgggcgttcgcgttggcggatggttacgcggcggaggggtgcgcgagcgagcgaagtttggtgtgtcgggttttggcgaagggaaaaggtttcgtcgttttttgtagttatttcgagtttagcgttattattttgggagatatacggatttcgcggtcgcggcgtaagacgggaggattggttgggcgggtcgagtatttcggtaggtagcgcgcgtcgttcggtcgggcgagggttttaggtcgggacgcggggacgtggggcggggttaagacgcgcgggagggcgtcgcgtttcgtttttttttttttcgtcggtttcgtttttttttcgtttgtcgtcgtcgtcggcgtacgggttattgggaagaggaggtggtttgcggtttttcggagttttattaggttcggtcgttattttgcgattggatagaaagggtaatttttttttt

SEQ ID NO: 1586 - DNA, 1081 bp, Artificial Sequence
  chemically treated genomic DNA (Homo sapiens) CpG-island No: 1586
aaaaaaaaaattaccctttctatccaatcgcaaaataacgaccgaacctaataaaactccgaaaaaccgcaaaccacctcctcttcccaataacccgtacgccgacgacgacgacaaacgaaaaaaaaacgaaaccgacgaaaaaaaaaaaaacgaaacgcgacgccctcccgcgcgtcttaaccccgccccacgtccccgcgtcccgacctaaaaccctcgcccgaccgaacgacgcgcgctacctaccgaaatactcgacccgcccaaccaatcctcccgtcttacgccgcgaccgcgaaatccgtatatctcccaaaataataacgctaaactcgaaataactacaaaaaacgacgaaaccttttcccttcgccaaaacccgacacaccaaacttcgctcgctcgcgcacccctccgccgcgtaaccatccgccaacgcgaacgcccgccatccgccgcctacttacgcttcacctctaccgacccgacgcgctcgactacgaacgacgacgcctccttcgactcctcctcgaaataactcgcgacctataacccctaacaaaaaaacccctcaaccccccgatataaacaaacaacgacgactaacgacgaacgccgaaatttcgacgaccccgacgctccctttcccgacctcgttttccgaataaaaaaacgcgaatcccgcataaaccccgacgataacgacaacgaaaaaaaacgaaacgataacgaacgaaaacgacgaacgaaaacgactacgaccaataaaacgaccgccgcaacccaaacgcgaaaacgacgacaaatcaatattaccgcgacctacgccaaacgacgctaactcccctccgtcactcgaccgaccttcgaaacccgctataacgaaatcgacaccccccttccccgccccccgccgccgaaacgaatatttaaaaacgcgtaatccgaaaaaactaataccaaaaataaacccctaataaccgcgactactacaaccgtaactatcaatcctaactaaacgacgacgaaaaaattttatcgcccgaaaaaacgcgaacgaacccgaaacgaaacgaaa

SEQ ID NO: 1587 - DNA, 1081 bp, Artificial Sequence
  chemically treated genomic DNA (Homo sapiens) CpG-island No: 1587
aaaagagggattattttttttgtttagtcgtaagatggcgatcgagtttggtgggatttcgaggggtcgtaggttattttttttttttaatggttcgtgcgtcggcggcgacggtaagcgggagggaggcggggtcggcgaaggaaggaggggcggagcgcggcgttttttcgcgcgttttggtttcgttttacgttttcgcgtttcggtttggagttttcgttcggtcgggcggcgcgcgttgtttgtcgggatattcggttcgtttagttagttttttcgttttgcgtcgcggtcgcgagattcgtgtgttttttaagatggtggcgttgggttcggggtgattataggagacgacggggtttttttttttcgttaggattcgatatattaggtttcgttcgttcgcgtattttttcgtcgcgtagttattcgttagcgcgggcgttcgttattcgtcgtttatttacgttttatttttgtcgattcggcgcgttcggttgcgggcggcggcgtttttttcggttttttttcggaatagttcgcggtttgtagtttttggtaggagggttttttagtttttcggtgtggataggtagcggcggttggcgacgaacgtcgggatttcggcggtttcggcgttttttttttcggtttcgtttttcggataaggaagcgcgggtttcgtatgagtttcggcggtggcggtagcgaaagagaacgaggcggtggcgggcggaggcggcgggcgagggcgattacgattagtgaggcggtcgtcgtagtttaggcgcgggggcgacgataggttagtgttgtcgcggtttgcgttaggcggcgttggttttttttcgttattcggtcggttttcggggttcgttgtggcgaggtcgatatttttttttttcgtttttcgtcgtcgaggcgagtgtttgggggcgcgtggttcgaaggggttggtgttagaagtaggtttttggtggtcgcggttgttgtagtcgtaattgttagttttggttgagcgacggcgggagggttttgtcgttcgaggggacgcgagcgggttcggggcggggcggga

SEQ ID NO: 1588 - DNA, 1081 bp, Artificial Sequence
  chemically treated genomic DNA (Homo sapiens) CpG-island No: 1588
tcccgccccgccccgaacccgctcgcgtcccctcgaacgacaaaaccctcccgccgtcgctcaaccaaaactaacaattacgactacaacaaccgcgaccaccaaaaacctacttctaacaccaaccccttcgaaccacgcgcccccaaacactcgcctcgacgacgaaaaacgaaaaaaaaaaatatcgacctcgccacaacgaaccccgaaaaccgaccgaataacgaaaaaaaaccaacgccgcctaacgcaaaccgcgacaacactaacctatcgtcgcccccgcgcctaaactacgacgaccgcctcactaatcgtaatcgccctcgcccgccgcctccgcccgccaccgcctcgttctctttcgctaccgccaccgccgaaactcatacgaaacccgcgcttccttatccgaaaaacgaaaccgaaaaaaaaaacgccgaaaccgccgaaatcccgacgttcgtcgccaaccgccgctacctatccacaccgaaaaactaaaaaaccctcctaccaaaaactacaaaccgcgaactattccgaaaaaaaaccgaaaaaaacgccgccgcccgcaaccgaacgcgccgaatcgacaaaaataaaacgtaaataaacgacgaataacgaacgcccgcgctaacgaataactacgcgacgaaaaaatacgcgaacgaacgaaacctaatatatcgaatcctaacgaaaaaaaaaaaccccgtcgtctcctataatcaccccgaacccaacgccaccatcttaaaaaacacacgaatctcgcgaccgcgacgcaaaacgaaaaaactaactaaacgaaccgaatatcccgacaaacaacgcgcgccgcccgaccgaacgaaaactccaaaccgaaacgcgaaaacgtaaaacgaaaccaaaacgcgcgaaaaaacgccgcgctccgcccctccttccttcgccgaccccgcctccctcccgcttaccgtcgccgccgacgcacgaaccattaaaaaaaaaaaataacctacgacccctcgaaatcccaccaaactcgatcgccatcttacgactaaacaaaaaaaataatccctctttt

SEQ ID NO: 1589 - DNA, 510 bp, Artificial Sequence
  chemically treated genomic DNA (Homo sapiens) CpG-island No: 1589
gatcggcggggggtttttaaggcgtatgttttatattaaattttattttttttatcgatagggacggaagggaagtcgttgttttgttggaagggtgaatatcgttgttacgttggttttcgttttgtttacgttttgggcgggatttatcggtttaggtcgtagggttttcgttcgggtcgtcgtttttgttcgtaacgtagttgtttttgttggcgtcgtagtttttcgcgttcgcggtggatgcgtttttgtttttttttgcgtttacgttttacgcgtatgcgttcgcgttttagtcgttttcgttttatgcgttttcgttttagtcgttggcgttggtattcgagttgtaggcgttttcgttgtagtcgggtttttttttttcgtttatggaaggtttcgaggcgttgttttcgttttcgttgttcgcgttttttgcggggataggtgaggttgttttgaattttttgcgtgagtttttaaggagaaagttcggtgtttaaaatt

SEQ ID NO: 1590 - DNA, 510 bp, Artificial Sequence
  chemically treated genomic DNA (Homo sapiens) CpG-island No: 1590
aattttaaacaccgaactttctccttaaaaactcacgcaaaaaattcaaaacaacctcacctatccccgcaaaaaacgcgaacaacgaaaacgaaaacaacgcctcgaaaccttccataaacgaaaaaaaaaaacccgactacaacgaaaacgcctacaactcgaataccaacgccaacgactaaaacgaaaacgcataaaacgaaaacgactaaaacgcgaacgcatacgcgtaaaacgtaaacgcaaaaaaaaacaaaaacgcatccaccgcgaacgcgaaaaactacgacgccaacaaaaacaactacgttacgaacaaaaacgacgacccgaacgaaaaccctacgacctaaaccgataaatcccgcccaaaacgtaaacaaaacgaaaaccaacgtaacaacgatattcacccttccaacaaaacaacgacttcccttccgtccctatcgataaaaaaaataaaatttaatataaaacatacgccttaaaaaccccccgccgatc

SEQ ID NO: 1591 - DNA, 510 bp, Artificial Sequence
  chemically treated genomic DNA (Homo sapiens) CpG-island No: 1591
agttttgggtatcgggttttttttttggaggtttacgtagggagtttagggtagttttatttgttttcgtagggagcgcgagtagcgggagcgggagtaacgtttcgaggttttttatgagcggaaggagaaggttcggttatagcgggaacgtttgtagttcgagtgttagcgttagcggttggagcgggagcgtatggagcgggagcggttggagcgcgagcgtatgcgcgtggagcgtgagcgtaggaaggagtaggagcgtatttatcgcgagcgcgaggagttgcggcgttagtaggagtagttgcgttacgagtaggagcggcggttcgggcggaggttttacgatttggatcggtgagtttcgtttagagcgtgggtaggacggagattagcgtggtagcggtgtttatttttttagtagaatagcggtttttttttcgtttttgtcggtggggagaatgaaatttgatatggagtatgcgttttggggatttttcgtcgatt

SEQ ID NO: 1592 - DNA, 510 bp, Artificial Sequence
  chemically treated genomic DNA (Homo sapiens) CpG-island No: 1592
aatcgacgaaaaatccccaaaacgcatactccatatcaaatttcattctccccaccgacaaaaacgaaaaaaaaaccgctattctactaaaaaaataaacaccgctaccacgctaatctccgtcctacccacgctctaaacgaaactcaccgatccaaatcgtaaaacctccgcccgaaccgccgctcctactcgtaacgcaactactcctactaacgccgcaactcctcgcgctcgcgataaatacgctcctactccttcctacgctcacgctccacgcgcatacgctcgcgctccaaccgctcccgctccatacgctcccgctccaaccgctaacgctaacactcgaactacaaacgttcccgctataaccgaaccttctccttccgctcataaaaaacctcgaaacgttactcccgctcccgctactcgcgctccctacgaaaacaaataaaactaccctaaactccctacgtaaacctccaaaaaaaaaacccgatacccaaaact

SEQ ID NO: 1593 - DNA, 821 bp, Artificial Sequence
  chemically treated genomic DNA (Homo sapiens) CpG-island No: 1593
tcggggtcggttaagacgcggggcgaatttagggcgtttcgggttcgggagtcgcggtgataggtgtaggcgggggcgtgttcgggttttttgcgttattttcgagtttcgcgtcgttttatttttttgagtcgttttattaggacgtttttgttgtcgttcgtgtttaggtttcgtttttttagtttcgttcgtagatcgattattcgtagttcgttgagtcgtttcgttttagttttcgtaacgttcgggtcgagagaagtcgtgttagggttcgagtcgttcgattcgggtagagttttcgttatcgtcgcgttttcgttttcgttatcgatttagtcgtatatcgtcggtagttatagcggttttgaatataaaatggcgtcgtttaagaggaaaacgtattcgttttttttcgtttcgttttgcggtcgcgtacgcgtacgcgtatcgtttttattagcgtatttagtagtaaggacgttcgcgcgtttattaatcgcgggtttttcggtataacgcgtaagcgttgaatttgtagttcgtatgcgtttcggtagttttcggcgggaggttgacgagacgtaacgcgtttgcgtatattttcgcgttgtttttattgcgtatgtgtagttgtaatcgggatattagaatttacgtttggtgcgtttgcgtagaagcgaggcgcgttggggcgattggagcggttttttcgtaggcggcgttattttgtgttaggagtttgataaaatcggttcggttttgtggaaagtgggcggcggagttagggtttttggaatggcggagattttgttaggttt

SEQ ID NO: 1594 - DNA, 821 bp, Artificial Sequence
  chemically treated genomic DNA (Homo sapiens) CpG-island No: 1594
aaacctaacaaaatctccgccattccaaaaaccctaactccgccgcccactttccacaaaaccgaaccgattttatcaaactcctaacacaaaataacgccgcctacgaaaaaaccgctccaatcgccccaacgcgcctcgcttctacgcaaacgcaccaaacgtaaattctaatatcccgattacaactacacatacgcaataaaaacaacgcgaaaatatacgcaaacgcgttacgtctcgtcaacctcccgccgaaaactaccgaaacgcatacgaactacaaattcaacgcttacgcgttataccgaaaaacccgcgattaataaacgcgcgaacgtccttactactaaatacgctaataaaaacgatacgcgtacgcgtacgcgaccgcaaaacgaaacgaaaaaaaacgaatacgttttcctcttaaacgacgccattttatattcaaaaccgctataactaccgacgatatacgactaaatcgataacgaaaacgaaaacgcgacgataacgaaaactctacccgaatcgaacgactcgaaccctaacacgacttctctcgacccgaacgttacgaaaactaaaacgaaacgactcaacgaactacgaataatcgatctacgaacgaaactaaaaaaacgaaacctaaacacgaacgacaacaaaaacgtcctaataaaacgactcaaaaaaataaaacgacgcgaaactcgaaaataacgcaaaaaacccgaacacgcccccgcctacacctatcaccgcgactcccgaacccgaaacgccctaaattcgccccgcgtcttaaccgaccccga

SEQ ID NO: 1595 - DNA, 821 bp, Artificial Sequence
  chemically treated genomic DNA (Homo sapiens) CpG-island No: 1595
aggtttgatagagttttcgttattttagggattttggtttcgtcgtttattttttatagaatcgggtcggttttattaggtttttagtataaaatggcgtcgtttgcgagggaatcgttttagtcgttttagcgcgtttcgtttttgcgtaggcgtattaagcgtaggttttagtatttcggttgtaattgtatatgcgtagtgagaataacgcggggatgtgcgtagacgcgttgcgtttcgttagtttttcgtcgggaattgtcgggacgtatgcgagttgtagatttagcgtttgcgcgttgtgtcggggaattcgcggttggtggacgcgcgagcgtttttgttgttaagtacgttagtgggggcggtgcgcgtgcgcgtgcgcggtcgtaaagcggggcgggaggaaacgagtgcgttttttttttaggcggcgttattttgtgtttagagtcgttatagttgtcggcggtgtgcgattgagtcggtggcgaagacgggaacgcgacgatggcggagattttgttcgggtcgggcgattcgggttttggtacggtttttttcggttcgggcgttgcggagattgggacgaggcggtttagcgagttgcgggtgatcgatttgcgggcggagttgaagaagcggaatttggatacgggcggtaataagagcgttttgatggagcggtttaagaaggtgaggcggcgcggggttcgggggtggcgtaggaggttcgggtacgttttcgtttgtatttgttatcgcggttttcggattcggggcgttttgggttcgtttcgcgttttggtcgatttcgg

SEQ ID NO: 1596 - DNA, 821 bp, Artificial Sequence
  chemically treated genomic DNA (Homo sapiens) CpG-island No: 1596
ccgaaatcgaccaaaacgcgaaacgaacccaaaacgccccgaatccgaaaaccgcgataacaaatacaaacgaaaacgtacccgaacctcctacgccacccccgaaccccgcgccgcctcaccttcttaaaccgctccatcaaaacgctcttattaccgcccgtatccaaattccgcttcttcaactccgcccgcaaatcgatcacccgcaactcgctaaaccgcctcgtcccaatctccgcaacgcccgaaccgaaaaaaaccgtaccaaaacccgaatcgcccgacccgaacaaaatctccgccatcgtcgcgttcccgtcttcgccaccgactcaatcgcacaccgccgacaactataacgactctaaacacaaaataacgccgcctaaaaaaaaaacgcactcgtttcctcccgccccgctttacgaccgcgcacgcgcacgcgcaccgcccccactaacgtacttaacaacaaaaacgctcgcgcgtccaccaaccgcgaattccccgacacaacgcgcaaacgctaaatctacaactcgcatacgtcccgacaattcccgacgaaaaactaacgaaacgcaacgcgtctacgcacatccccgcgttattctcactacgcatatacaattacaaccgaaatactaaaacctacgcttaatacgcctacgcaaaaacgaaacgcgctaaaacgactaaaacgattccctcgcaaacgacgccattttatactaaaaacctaataaaaccgacccgattctataaaaaataaacgacgaaaccaaaatccctaaaataacgaaaactctatcaaacct

SEQ ID NO: 1597 - DNA, 516 bp, Artificial Sequence
  chemically treated genomic DNA (Homo sapiens) CpG-island No: 1597
gagcgttcgtgtcgtttgcggttttttgagttttttgtattgtttggtacgagcgttcgtgtcgtgtgcggttttcgaattatttgtattgtttggtacgagagcgcgcgttttatgcggtttttgagtttttagaattatcgattattgtttggtataagcgtgcgcgtcgtgtgtagtttttgagtttcgtggattgtttggtataagagtatttattgggtgcggttttcgagttttcgtgtattgttaggtacgagcgcgtaattatgtgattttcgtgagttttttgtacggtttggtacgagcgttcgtgttgtgtgcggttttcgatttttttgtattgtttgaaaagagtacgtaagttatgtatagtttttgatttttttgtataatttgttacgagcgcgtgtatcgtttgcggtgtttgagtttcgttagttatcgtattttattggataagggcgtttttgtcgtgtgcggtttttgagttatttaagttattgtgttttgttt

SEQ ID NO: 1598 - DNA, 516 bp, Artificial Sequence
  chemically treated genomic DNA (Homo sapiens) CpG-island No: 1598
aaacaaaacacaataacttaaataactcaaaaaccgcacacgacaaaaacgcccttatccaataaaatacgataactaacgaaactcaaacaccgcaaacgatacacgcgctcgtaacaaattatacaaaaaaatcaaaaactatacataacttacgtactcttttcaaacaatacaaaaaaatcgaaaaccgcacacaacacgaacgctcgtaccaaaccgtacaaaaaactcacgaaaatcacataattacgcgctcgtacctaacaatacacgaaaactcgaaaaccgcacccaataaatactcttataccaaacaatccacgaaactcaaaaactacacacgacgcgcacgcttataccaaacaataatcgataattctaaaaactcaaaaaccgcataaaacgcgcgctctcgtaccaaacaatacaaataattcgaaaaccgcacacgacacgaacgctcgtaccaaacaatacaaaaaactcaaaaaaccgcaaacgacacgaacgctc

SEQ ID NO: 1599 - DNA, 516 bp, Artificial Sequence
  chemically treated genomic DNA (Homo sapiens) CpG-island No: 1599
aaatagggtatagtggtttaggtggtttagagatcgtatacggtaaaagcgtttttgtttagtagagtacggtggttgacgaggtttaggtatcgtaggcggtgtacgcgttcgtgataaattgtgtaggagggttagggattgtatatggtttgcgtgttttttttaaatagtgtagggggatcggggatcgtatataatacgggcgttcgtgttaaatcgtgtaggaggtttacggaggttatatggttgcgcgttcgtgtttaatagtgtacggaagttcggggatcgtatttagtgggtgtttttgtgttaaatagtttacgaggtttagggattgtatacggcgcgtacgtttgtgttaaatagtgatcggtggttttggaggtttagggatcgtatagggcgcgcgttttcgtgttaaatagtgtaggtggttcgggagtcgtatacggtacgggcgttcgtgttaaatagtgtagggggtttaggggatcgtaaacggtacgggcgttt

SEQ ID NO: 1600 - DNA, 516 bp, Artificial Sequence
  chemically treated genomic DNA (Homo sapiens) CpG-island No: 1600
aaacgcccgtaccgtttacgatcccctaaaccccctacactatttaacacgaacgcccgtaccgtatacgactcccgaaccacctacactatttaacacgaaaacgcgcgccctatacgatccctaaacctccaaaaccaccgatcactatttaacacaaacgtacgcgccgtatacaatccctaaacctcgtaaactatttaacacaaaaacacccactaaatacgatccccgaacttccgtacactattaaacacgaacgcgcaaccatataacctccgtaaacctcctacacgatttaacacgaacgcccgtattatatacgatccccgatccccctacactatttaaaaaaaacacgcaaaccatatacaatccctaaccctcctacacaatttatcacgaacgcgtacaccgcctacgatacctaaacctcgtcaaccaccgtactctactaaacaaaaacgcttttaccgtatacgatctctaaaccacctaaaccactataccctattt

SEQ ID NO: 1601 - DNA, 684 bp, Artificial Sequence
  chemically treated genomic DNA (Homo sapiens) CpG-island No: 1601
tggcgcgtagttttcgggttgggaggtgtcgtaggatttggaagattttcgaaagttttggaaggtttttttagggatcgtcgcgggcgggggagtttgtttttttatcgagattcgcgagggcggtgttcggggtttgattgtaggataaagggtcgggagcgcgggagggcggcgttcgggagcggttatatatgtttcgttaatcggtttttttaggtagtattttcgggaaaaaggggtagacgcgcggcggaaggggcggggtcggcgcgcggtcgtggacgtcggagagggcgaggtcggcgttttttgggagcgcgcgcgttttattgggtagcgggcggaagggggcggagtttggcgtcgtcgcgaggtaagtttcgttttcggtttcgcggggagcggcggcggcggcggcggcggcggtggcggaggcggtgagcgcgggcggcgcggacggtagcggttggcgggcgggtttttcgttgttgcggtcgttgcggtttttttgttcgggtttggggcgtcgcgttggggaaagtcgggggttcggtgagttcgcgggatgcgttttttcggtttcgtcgggcggggttgaggcgaggaggtcgggtttggggggagggggggtttcggtttagagattttttcgggagcgttcggtttttatcgtcgtgggtt

SEQ ID NO: 1602 - DNA, 684 bp, Artificial Sequence
  chemically treated genomic DNA (Homo sapiens) CpG-island No: 1602
aacccacgacgataaaaaccgaacgctcccgaaaaaatctctaaaccgaaaccccccctccccccaaacccgacctcctcgcctcaaccccgcccgacgaaaccgaaaaaacgcatcccgcgaactcaccgaacccccgactttccccaacgcgacgccccaaacccgaacaaaaaaaccgcaacgaccgcaacaacgaaaaacccgcccgccaaccgctaccgtccgcgccgcccgcgctcaccgcctccgccaccgccgccgccgccgccgccgccgctccccgcgaaaccgaaaacgaaacttacctcgcgacgacgccaaactccgcccccttccgcccgctacccaataaaacgcgcgcgctcccaaaaaacgccgacctcgccctctccgacgtccacgaccgcgcgccgaccccgccccttccgccgcgcgtctacccctttttcccgaaaatactacctaaaaaaaccgattaacgaaacatatataaccgctcccgaacgccgccctcccgcgctcccgaccctttatcctacaatcaaaccccgaacaccgccctcgcgaatctcgataaaaaaacaaactcccccgcccgcgacgatccctaaaaaaaccttccaaaactttcgaaaatcttccaaatcctacgacacctcccaacccgaaaactacgcgcca

SEQ ID NO: 1603 - DNA, 684 bp, Artificial Sequence
  chemically treated genomic DNA (Homo sapiens) CpG-island No: 1603
gatttacggcggtagggatcgggcgttttcggaggagtttttaggtcggggttttttttttttttaggttcggttttttcgttttagtttcgttcggcggaatcgaggggacgtatttcgcgggtttatcgggttttcggttttttttagcgcggcgttttaagttcgggtaaggaggtcgtagcggtcgtaatagcggaggattcgttcgttaatcgttgtcgttcgcgtcgttcgcgtttatcgttttcgttatcgtcgtcgtcgtcgtcgtcgtcgtttttcgcggggtcgggggcggggtttgtttcgcggcggcgttaagtttcgttttttttcgttcgttgtttaatgggacgcgcgcgtttttaaggagcgtcggtttcgtttttttcggcgtttacggtcgcgcgtcggtttcgtttttttcgtcgcgcgtttatttttttttttcgggagtgttgtttgaggagatcggttggcggggtatgtgtggtcgttttcgggcgtcgttttttcgcgttttcggttttttgttttgtagttagatttcggatatcgttttcgcgggtttcggtgggaaaataggttttttcgttcgcggcgatttttgagagaattttttagaattttcgagaattttttaggttttacggtattttttagttcgggagttgcgcgtta

SEQ ID NO: 1604 - DNA, 684 bp, Artificial Sequence
  chemically treated genomic DNA (Homo sapiens) CpG-island No: 1604
taacgcgcaactcccgaactaaaaaataccgtaaaacctaaaaaattctcgaaaattctaaaaaattctctcaaaaatcgccgcgaacgaaaaaacctattttcccaccgaaacccgcgaaaacgatatccgaaatctaactacaaaacaaaaaaccgaaaacgcgaaaaaacgacgcccgaaaacgaccacacataccccgccaaccgatctcctcaaacaacactcccgaaaaaaaaaaataaacgcgcgacgaaaaaaacgaaaccgacgcgcgaccgtaaacgccgaaaaaaacgaaaccgacgctccttaaaaacgcgcgcgtcccattaaacaacgaacgaaaaaaaacgaaacttaacgccgccgcgaaacaaaccccgcccccgaccccgcgaaaaacgacgacgacgacgacgacgacgataacgaaaacgataaacgcgaacgacgcgaacgacaacgattaacgaacgaatcctccgctattacgaccgctacgacctccttacccgaacttaaaacgccgcgctaaaaaaaaccgaaaacccgataaacccgcgaaatacgtcccctcgattccgccgaacgaaactaaaacgaaaaaaccgaacctaaaaaaaaaaaaaaccccgacctaaaaactcctccgaaaacgcccgatccctaccgccgtaaatc

SEQ ID NO: 1605 - DNA, 821 bp, Artificial Sequence
  chemically treated genomic DNA (Homo sapiens) CpG-island No: 1605
cggttgtttcggtttggttttaaaaattgtgaacgtcgtttttttttttcgtttagtttttcgtcgcgttcgcggggtcgggggttgcgttgtcggcgtcgcgagtcgggcgagttttttagtacgggaggagggagggggcggcgtcgggcggggcggagttttcgcgttttttggagttttattttcggtcgcgagtcgggtagcgtttattcggtcgaaggagttacgcgggttacgttgttggttggtttgatttaggcgcgcggggtcgggcggtcgcgcgggcgggttgagtgagtaagataagatatttaagaagagcgagttgcgtttgggtttcggttaggtttgtacgtagaggcgggcggtagacggtgttcggcggaattttttgagtttcgtcgtttagttttggtgttagcgtttagtggtcgtcgtttcgaaagtgattggtgtttcgtcgttttttttcggtgcgggattatgaagttgttgtcgtcggtggtgttgaagttttttttggttgtaggtaagagggttgtcgacgttttcggagatcggggggatgggggcgttgtgttgggggtatgggggaaggtcgtcgtagcgtattcggtacgggttatttggtggggtttttgcgttttggcggacgggcgtcggtatcggtgcgtgttggttaggggtttgggcgggtgtttgatgcggtttggtttttcgttcgtagttttttcggtattggtgattggcgagagtttggagcggtttcggagagggttagttgttggaattagtaattcggatttttttattgtatt

SEQ ID NO: 1606 - DNA, 821 bp, Artificial Sequence
  chemically treated genomic DNA (Homo sapiens) CpG-island No: 1606
aatacaataaaaaaatccgaattactaattccaacaactaaccctctccgaaaccgctccaaactctcgccaatcaccaataccgaaaaaactacgaacgaaaaaccaaaccgcatcaaacacccgcccaaacccctaaccaacacgcaccgataccgacgcccgtccgccaaaacgcaaaaaccccaccaaataacccgtaccgaatacgctacgacgaccttcccccatacccccaacacaacgcccccatccccccgatctccgaaaacgtcgacaaccctcttacctacaaccaaaaaaaacttcaacaccaccgacgacaacaacttcataatcccgcaccgaaaaaaaacgacgaaacaccaatcactttcgaaacgacgaccactaaacgctaacaccaaaactaaacgacgaaactcaaaaaattccgccgaacaccgtctaccgcccgcctctacgtacaaacctaaccgaaacccaaacgcaactcgctcttcttaaatatcttatcttactcactcaacccgcccgcgcgaccgcccgaccccgcgcgcctaaatcaaaccaaccaacaacgtaacccgcgtaactccttcgaccgaataaacgctacccgactcgcgaccgaaaataaaactccaaaaaacgcgaaaactccgccccgcccgacgccgccccctccctcctcccgtactaaaaaactcgcccgactcgcgacgccgacaacgcaacccccgaccccgcgaacgcgacgaaaaactaaacgaaaaaaaaaaacgacgttcacaatttttaaaaccaaaccgaaacaaccg

SEQ ID NO: 1607 - DNA, 821 bp, Artificial Sequence
  chemically treated genomic DNA (Homo sapiens) CpG-island No: 1607
gatatagtgggagggttcgggttgttggttttagtagttagtttttttcgaagtcgttttaggttttcgttagttattagtgtcgagagaattgcgggcgagaggttaggtcgtattagatattcgtttagatttttgattaatacgtatcgatgtcgacgttcgttcgttagagcgtaagggttttattaagtggttcgtgtcgggtgcgttgcggcgatttttttttatgtttttagtataacgtttttattttttcgattttcgggggcgtcggtagtttttttatttgtagttagaaagagttttagtattatcgacggtagtagttttatggtttcgtatcgagaggaggcggcgaggtattagttattttcgaagcggcggttattgggcgttggtattagagttgggcggcggagtttaggagatttcgtcgggtatcgtttgtcgttcgtttttgcgtgtaagtttggtcgggatttaggcgtagttcgttttttttgagtgttttgttttgtttatttagttcgttcgcgcggtcgttcgatttcgcgcgtttaggttaggttagttagtagcgtggttcgcgtagttttttcggtcgaatgagcgttgttcggttcgcggtcgggaataaggttttaggaggcgcggaagtttcgtttcgttcggcgtcgtttttttttttttttcgtgttgggaagttcgttcggttcgcggcgtcggtagcgtagttttcgatttcgcgggcgcggcggaggattgggcgggaggagagggcggcgtttataatttttgggattaggtcgaggtagtcg

SEQ ID NO: 1608 - DNA, 821 bp, Artificial Sequence
  chemically treated genomic DNA (Homo sapiens) CpG-island No: 1608
cgactacctcgacctaatcccaaaaattataaacgccgccctctcctcccgcccaatcctccgccgcgcccgcgaaatcgaaaactacgctaccgacgccgcgaaccgaacgaacttcccaacacgaaaaaaaaaaaaaaacgacgccgaacgaaacgaaacttccgcgcctcctaaaaccttattcccgaccgcgaaccgaacaacgctcattcgaccgaaaaaactacgcgaaccacgctactaactaacctaacctaaacgcgcgaaatcgaacgaccgcgcgaacgaactaaataaacaaaacaaaacactcaaaaaaaacgaactacgcctaaatcccgaccaaacttacacgcaaaaacgaacgacaaacgatacccgacgaaatctcctaaactccgccgcccaactctaataccaacgcccaataaccgccgcttcgaaaataactaatacctcgccgcctcctctcgatacgaaaccataaaactactaccgtcgataatactaaaactctttctaactacaaataaaaaaactaccgacgcccccgaaaatcgaaaaaataaaaacgttatactaaaaacataaaaaaaaatcgccgcaacgcacccgacacgaaccacttaataaaacccttacgctctaacgaacgaacgtcgacatcgatacgtattaatcaaaaatctaaacgaatatctaatacgacctaacctctcgcccgcaattctctcgacactaataactaacgaaaacctaaaacgacttcgaaaaaaactaactactaaaaccaacaacccgaaccctcccactatatc

SEQ ID NO: 1609 - DNA, 681 bp, Artificial Sequence
  chemically treated genomic DNA (Homo sapiens) CpG-island No: 1609
aacggggatttttagcggcgtttacgtcgagtcgttttcggttcgggagcggtgggaggtagtttttcgtaggtttttcgtttttcggcgcggttttagtttcgtttttttcgcggttttaggggattgtttcgttttaggtttttggaatcggcggcgttttcgtagcgatcgtgtagttttcgtttcggtttcgtagtttcgcgattttcggcgttcggacgagtttagcgggtcgtagtttcgggaggtcgggtcgttatttgtcgtcgtttcgttttttgtcgtttacgtcgttttcgagggtacggttttcgttttagcgtttttcgtttcgttcggtatttttagttttatggtcgcgcgcggacggcggcgggggcgttcgagggggattcgagttgcgatcgtcgtcgtcgaataataagcgtcgtcggttaagggagggcgcgtcgggtcggcgcggggcggacggggcggggtttgcgtgcgtgcgacgtcgcggacggcgcgcggttaatcggggttcgggggcggggtttgtttgcgattcgtagttaggagcgtttcgagtgttttttcgcgtttaggggtgggagtatagagttaggttcgttattttatcgtattaggttagtaagattgataggtacgatacgtattaataatattgttgtgtat

SEQ ID NO: 1610 - DNA, 681 bp, Artificial Sequence
  chemically treated genomic DNA (Homo sapiens) CpG-island No: 1610
atacacaacaatattattaatacgtatcgtacctatcaatcttactaacctaatacgataaaataacgaacctaactctatactcccacccctaaacgcgaaaaaacactcgaaacgctcctaactacgaatcgcaaacaaaccccgcccccgaaccccgattaaccgcgcgccgtccgcgacgtcgcacgcacgcaaaccccgccccgtccgccccgcgccgacccgacgcgccctcccttaaccgacgacgcttattattcgacgacgacgatcgcaactcgaatccccctcgaacgcccccgccgccgtccgcgcgcgaccataaaactaaaaataccgaacgaaacgaaaaacgctaaaacgaaaaccgtaccctcgaaaacgacgtaaacgacaaaaaacgaaacgacgacaaataacgacccgacctcccgaaactacgacccgctaaactcgtccgaacgccgaaaatcgcgaaactacgaaaccgaaacgaaaactacacgatcgctacgaaaacgccgccgattccaaaaacctaaaacgaaacaatcccctaaaaccgcgaaaaaaacgaaactaaaaccgcgccgaaaaacgaaaaacctacgaaaaactacctcccaccgctcccgaaccgaaaacgactcgacgtaaacgccgctaaaaatccccgtt

SEQ ID NO: 1611 - DNA, 681 bp, Artificial Sequence
  chemically treated genomic DNA (Homo sapiens) CpG-island No: 1611
gtgtatagtaatgttattgatacgtatcgtgtttgttaattttattgatttaatacgatggaatggcgagtttggttttgtatttttatttttgggcgcgagggggtattcgaggcgtttttggttgcgggtcgtaagtaggtttcgttttcgagtttcgattggtcgcgcgtcgttcgcggcgtcgtacgtacgtaggtttcgtttcgttcgtttcgcgtcggttcggcgcgtttttttttggtcggcggcgtttgttgttcggcggcggcggtcgtagttcgggtttttttcgggcgttttcgtcgtcgttcgcgcgcggttatggagttggaggtatcggacgaggcggagagcgttgaggcgggggtcgtgttttcggaggcggcgtgggcggtagagagcggggcggcggtaggtaacggttcggtttttcggggttgcggttcgttgggttcgttcgagcgtcgagagtcgcggggttgcggggtcggggcgggggttgtacggtcgttgcgggggcgtcgtcggttttaggagtttggggcggggtagttttttggagtcgcggggaggacggggttgaagtcgcgtcgggaagcgggaggtttgcgaggggttattttttatcgttttcgggtcgggggcgattcggcgtgggcgtcgttggggattttcgtt

SEQ ID NO: 1612 - DNA, 681 bp, Artificial Sequence
  chemically treated genomic DNA (Homo sapiens) CpG-island No: 1612
aacgaaaatccccaacgacgcccacgccgaatcgcccccgacccgaaaacgataaaaaataacccctcgcaaacctcccgcttcccgacgcgacttcaaccccgtcctccccgcgactccaaaaaactaccccgccccaaactcctaaaaccgacgacgcccccgcaacgaccgtacaacccccgccccgaccccgcaaccccgcgactctcgacgctcgaacgaacccaacgaaccgcaaccccgaaaaaccgaaccgttacctaccgccgccccgctctctaccgcccacgccgcctccgaaaacacgacccccgcctcaacgctctccgcctcgtccgatacctccaactccataaccgcgcgcgaacgacgacgaaaacgcccgaaaaaaacccgaactacgaccgccgccgccgaacaacaaacgccgccgaccaaaaaaaaacgcgccgaaccgacgcgaaacgaacgaaacgaaacctacgtacgtacgacgccgcgaacgacgcgcgaccaatcgaaactcgaaaacgaaacctacttacgacccgcaaccaaaaacgcctcgaataccccctcgcgcccaaaaataaaaatacaaaaccaaactcgccattccatcgtattaaatcaataaaattaacaaacacgatacgtatcaataacattactatacac

SEQ ID NO: 1613 - DNA, 606 bp, Artificial Sequence
  chemically treated genomic DNA (Homo sapiens) CpG-island No: 1613
tattcggaaaacgaggagtttgggcgtaacggggtcggtagtcgttttagttattcggttggcgttggggatttcgtttttcgaattgtatatcgcgtggcgggggaaggggttttagttttcgcggagtatttttggtttagggcgggagtttcgagcgtcggtttttcgcgtttcgtacggttcggtttagtttggaagaaggtttgaggaaggttcgatcgcgtcgttcgcgtttttaggttcggttcgaatgttggaaagttcgtcggttcgttttcggttcggtgagtttcggtttattttagttgtcggtcgtatttttgttttttgagtagtttttttagttgcgttatggtcgcgtttgtcgcgcggaaaatagtcgagtttttgcggagcgtcgttattagttttataagcgcgtaggcgtattgagcgttttttcgtcgttatcgttttttgcgcgttgtttgtagggggcgtcgtattgtattgcgtacgcgtcgtcggtacgtcggggtttaagcggttttggtattcgagcgggtttggggtttttggtttttatcggttagaaaggtagattcgttagtttgttaatttgtt

SEQ ID NO: 1614 - DNA, 606 bp, Artificial Sequence
  chemically treated genomic DNA (Homo sapiens) CpG-island No: 1614
aacaaattaacaaactaacgaatctacctttctaaccgataaaaaccaaaaaccccaaacccgctcgaataccaaaaccgcttaaaccccgacgtaccgacgacgcgtacgcaatacaatacgacgccccctacaaacaacgcgcaaaaaacgataacgacgaaaaaacgctcaatacgcctacgcgcttataaaactaataacgacgctccgcaaaaactcgactattttccgcgcgacaaacgcgaccataacgcaactaaaaaaactactcaaaaaacaaaaatacgaccgacaactaaaataaaccgaaactcaccgaaccgaaaacgaaccgacgaactttccaacattcgaaccgaacctaaaaacgcgaacgacgcgatcgaaccttcctcaaaccttcttccaaactaaaccgaaccgtacgaaacgcgaaaaaccgacgctcgaaactcccgccctaaaccaaaaatactccgcgaaaactaaaaccccttcccccgccacgcgatatacaattcgaaaaacgaaatccccaacgccaaccgaataactaaaacgactaccgaccccgttacgcccaaactcctcgttttccgaata

SEQ ID NO: 1615 - DNA, 606 bp, Artificial Sequence
  chemically treated genomic DNA (Homo sapiens) CpG-island No: 1615
ggtaaattggtaggttagcgggtttgtttttttggtcgatggggattaagagttttagattcgttcgggtattagggtcgtttaggtttcggcgtatcggcgacgcgtgcgtagtgtagtgcggcgttttttgtaggtagcgcgtaggagacggtagcggcgaaggggcgtttagtgcgtttgcgcgtttgtggagttggtggcggcgtttcgtaggggttcggttgtttttcgcgcggtaggcgcggttatggcgtagttgggaaagttgtttaaggagtagaagtacgatcggtagttgaggtgagtcgaggtttatcgagtcgagggcgggtcggcgggttttttagtattcgggtcgggtttaagggcgcgggcggcgcggtcgggttttttttaggtttttttttaggttgggtcgggtcgtgcggggcgcgggaagtcggcgttcggagttttcgttttgggttaaaggtgtttcgcgagggttgggattttttttttcgttacgcggtgtgtagttcgggggacggggtttttagcgttagtcgggtagttaaggcggttgtcggtttcgttgcgtttaggtttttcgtttttcgaatg

SEQ ID NO: 1616 - DNA, 606 bp, Artificial Sequence
  chemically treated genomic DNA (Homo sapiens) CpG-island No: 1616
cattcgaaaaacgaaaaacctaaacgcaacgaaaccgacaaccgccttaactacccgactaacgctaaaaaccccgtcccccgaactacacaccgcgtaacgaaaaaaaaaatcccaaccctcgcgaaacacctttaacccaaaacgaaaactccgaacgccgacttcccgcgccccgcacgacccgacccaacctaaaaaaaaacctaaaaaaaacccgaccgcgccgcccgcgcccttaaacccgacccgaatactaaaaaacccgccgacccgccctcgactcgataaacctcgactcacctcaactaccgatcgtacttctactccttaaacaactttcccaactacgccataaccgcgcctaccgcgcgaaaaacaaccgaacccctacgaaacgccgccaccaactccacaaacgcgcaaacgcactaaacgccccttcgccgctaccgtctcctacgcgctacctacaaaaaacgccgcactacactacgcacgcgtcgccgatacgccgaaacctaaacgaccctaatacccgaacgaatctaaaactcttaatccccatcgaccaaaaaaacaaacccgctaacctaccaatttacc

SEQ ID NO: 1617 - DNA, 503 bp, Artificial Sequence
  chemically treated genomic DNA (Homo sapiens) CpG-island No: 1617
agacgtaaagttcgcgttgcgtttcgggtggtttcgtcgttagtaagcgatttggcggttgtgttttgtcgtttttttcgcgaagtttttgattgtttagttcgtttagatttaggtttagatttttatttattcgtttcgggcgtgcgtagcgcgtgggggtggtttagggtagcggggggcgggcgtcgcggagcgttgtgcgcgggtgtttgcggggagcgcgtacggtaagtgagcggggatttcgggggagcggggtttcgcgtggtaagggcgtagtgtttttcggagagaattttttcgtagaagtggtcgagttgttttttcggtcggtacgtgagggaagggggtatttgggggcgtaagtatgtgtttgggtgtttatatcgagtagggtgtttgcgtacgttcgggtgtgagtcgtgggagttcgtggtttatattagttttttgggttgacgcggaagagagtttttttattttgttttagtttttttagg

SEQ ID NO: 1618 - DNA, 503 bp, Artificial Sequence
  chemically treated genomic DNA (Homo sapiens) CpG-island No: 1618
cctaaaaaaactaaaacaaaataaaaaaactctcttccgcgtcaacccaaaaaactaatataaaccacgaactcccacgactcacacccgaacgtacgcaaacaccctactcgatataaacacccaaacacatacttacgcccccaaatacccccttccctcacgtaccgaccgaaaaaacaactcgaccacttctacgaaaaaattctctccgaaaaacactacgcccttaccacgcgaaaccccgctcccccgaaatccccgctcacttaccgtacgcgctccccgcaaacacccgcgcacaacgctccgcgacgcccgccccccgctaccctaaaccacccccacgcgctacgcacgcccgaaacgaataaataaaaatctaaacctaaatctaaacgaactaaacaatcaaaaacttcgcgaaaaaaacgacaaaacacaaccgccaaatcgcttactaacgacgaaaccacccgaaacgcaacgcgaactttacgtct

SEQ ID NO: 1619 - DNA, 503 bp, Artificial Sequence
  chemically treated genomic DNA (Homo sapiens) CpG-island No: 1619
tttaaggaaattgaggtaggatgaaggagttttttttcgcgttagtttaggaggttggtgtgggttacgggtttttacgatttatattcggacgtgcgtaaatattttgttcggtgtagatatttagatatatgtttgcgtttttaagtgttttttttttttacgtatcggtcgagaaggtagttcggttatttttgcggggaaatttttttcgggggatattgcgtttttgttacgcggagtttcgttttttcgaggttttcgtttatttgtcgtgcgcgtttttcgtagatattcgcgtatagcgtttcgcggcgttcgtttttcgttgttttgggttatttttacgcgttgcgtacgttcggggcgagtgagtgagagtttgggtttgggtttgagcgggttgggtaattaggggtttcgcggaggaggcggtaggatatagtcgttaggtcgtttgttggcggcggggttattcggggcgtagcgcggattttgcgttt

SEQ ID NO: 1620 - DNA, 503 bp, Artificial Sequence
  chemically treated genomic DNA (Homo sapiens) CpG-island No: 1620
aaacgcaaaatccgcgctacgccccgaataaccccgccgccaacaaacgacctaacgactatatcctaccgcctcctccgcgaaacccctaattacccaacccgctcaaacccaaacccaaactctcactcactcgccccgaacgtacgcaacgcgtaaaaataacccaaaacaacgaaaaacgaacgccgcgaaacgctatacgcgaatatctacgaaaaacgcgcacgacaaataaacgaaaacctcgaaaaaacgaaactccgcgtaacaaaaacgcaatatcccccgaaaaaaatttccccgcaaaaataaccgaactaccttctcgaccgatacgtaaaaaaaaaaaacacttaaaaacgcaaacatatatctaaatatctacaccgaacaaaatatttacgcacgtccgaatataaatcgtaaaaacccgtaacccacaccaacctcctaaactaacgcgaaaaaaaactccttcatcctacctcaatttccttaaa

SEQ ID NO: 1621 - DNA, 879 bp, Artificial Sequence
  chemically treated genomic DNA (Homo sapiens) CpG-island No: 1621
ggcgataggaagaaatgcgggggcgggggtacgggcgggggcgggggaaaggcggatagcggttatgggtcgcgggtttcgggggtcgttagtaggttgaagggagagggtcgcgcgggtagcggcggtagcggatgcgggggcggttcggagattaggggcgggcggtcgcgcgcgtttacgggttcgggggttgcggcgacggcggtttcgggtagcggaggtagcggtaggtgcgcgggcggcggcgcgggcgcgggtaggcgcggtaggttttgtagtgcgagtacggcggcggggagcgcgggtgagtaggtttcgggcggtagttcgggtagtgttagatgcgcgtcggggttttagggcgttagcggttcgggtcgtagcgggagcgcgggtagcggtggtagttcggttagggcgagagcggagggcggcggcggttcggggtttaggtcgggcggtaggtcgggtaacggcgggtgcggtagggacggcgggggtagcggggtgggcggtagcgtcgagcgggttcggtttaatcgcgagtgggcgcgggcgcgggcgagtcgcgggtgcgagttggagcggggtagtcgcgtcgttagtttggttgcggtcgttatttcggttgcggtcgttagtttagggttttagagcgcgtcgttagtcgtgatttggtatttcgggaggtggttaagcgtcgtatttcgagcggtttagttaatcgtagatgttcgtcgtcgtattttaattaattacgggttagtgcgttcgcggtttacgggttttattcggtagttgttaagggttatttttggtagttaattagagatatgagcgcgtttcgttaagttttttttttcgtttttttttggt

SEQ ID NO: 1622 - DNA, 879 bp, Artificial Sequence
  chemically treated genomic DNA (Homo sapiens) CpG-island No: 1622
accaaaaaaaaacgaaaaaaaaaacttaacgaaacgcgctcatatctctaattaactaccaaaaataacccttaacaactaccgaataaaacccgtaaaccgcgaacgcactaacccgtaattaattaaaatacgacgacgaacatctacgattaactaaaccgctcgaaatacgacgcttaaccacctcccgaaataccaaatcacgactaacgacgcgctctaaaaccctaaactaacgaccgcaaccgaaataacgaccgcaaccaaactaacgacgcgactaccccgctccaactcgcacccgcgactcgcccgcgcccgcgcccactcgcgattaaaccgaacccgctcgacgctaccgcccaccccgctacccccgccgtccctaccgcacccgccgttacccgacctaccgcccgacctaaaccccgaaccgccgccgccctccgctctcgccctaaccgaactaccaccgctacccgcgctcccgctacgacccgaaccgctaacgccctaaaaccccgacgcgcatctaacactacccgaactaccgcccgaaacctactcacccgcgctccccgccgccgtactcgcactacaaaacctaccgcgcctacccgcgcccgcgccgccgcccgcgcacctaccgctacctccgctacccgaaaccgccgtcgccgcaacccccgaacccgtaaacgcgcgcgaccgcccgcccctaatctccgaaccgcccccgcatccgctaccgccgctacccgcgcgaccctctcccttcaacctactaacgacccccgaaacccgcgacccataaccgctatccgcctttcccccgcccccgcccgtacccccgcccccgcatttcttcctatcgcc

SEQ ID NO: 1623 - DNA, 879 bp, Artificial Sequence
  chemically treated genomic DNA (Homo sapiens) CpG-island No: 1623
attaggagagggcgggaagaagaatttggcggagcgcgtttatatttttgattggttgttaagggtagtttttgatagttgtcgggtgggattcgtagatcgcgagcgtattggttcgtgattggttggggtgcggcggcgagtatttgcgattggttgggtcgttcggagtgcggcgtttggttatttttcgaggtattaggttacggttggcggcgcgttttggggttttgggttggcggtcgtaatcggggtggcggtcgtagttaagttggcggcgcggttgtttcgttttagttcgtattcgcggttcgttcgcgttcgcgtttattcgcgattgggtcgggttcgttcgacgttgtcgtttatttcgttgttttcgtcgtttttgtcgtattcgtcgttgttcggtttgtcgttcggtttgagtttcgggtcgtcgtcgtttttcgttttcgttttggtcgagttgttatcgttgttcgcgttttcgttgcggttcgagtcgttggcgttttggggtttcggcgcgtatttggtattgttcgagttgtcgttcgaagtttgtttattcgcgtttttcgtcgtcgtgttcgtattgtaggatttgtcgcgtttgttcgcgttcgcgtcgtcgttcgcgtatttgtcgttgttttcgttgttcgaggtcgtcgtcgtcgtagttttcgggttcgtgggcgcgcgcggtcgttcgtttttggttttcgagtcgttttcgtattcgttgtcgtcgttgttcgcgcgattttttttttttagtttgttggcggttttcgagattcgcgatttatggtcgttgttcgtttttttttcgttttcgttcgtgttttcgttttcgtatttttttttgtcgtt

SEQ ID NO: 1624 - DNA, 879 bp, Artificial Sequence
  chemically treated genomic DNA (Homo sapiens) CpG-island No: 1624
aacgacaaaaaaaaatacgaaaacgaaaacacgaacgaaaacgaaaaaaaaacgaacaacgaccataaatcgcgaatctcgaaaaccgccaacaaactaaaaaaaaaaaatcgcgcgaacaacgacgacaacgaatacgaaaacgactcgaaaaccaaaaacgaacgaccgcgcgcgcccacgaacccgaaaactacgacgacgacgacctcgaacaacgaaaacaacgacaaatacgcgaacgacgacgcgaacgcgaacaaacgcgacaaatcctacaatacgaacacgacgacgaaaaacgcgaataaacaaacttcgaacgacaactcgaacaataccaaatacgcgccgaaaccccaaaacgccaacgactcgaaccgcaacgaaaacgcgaacaacgataacaactcgaccaaaacgaaaacgaaaaacgacgacgacccgaaactcaaaccgaacgacaaaccgaacaacgacgaatacgacaaaaacgacgaaaacaacgaaataaacgacaacgtcgaacgaacccgacccaatcgcgaataaacgcgaacgcgaacgaaccgcgaatacgaactaaaacgaaacaaccgcgccgccaacttaactacgaccgccaccccgattacgaccgccaacccaaaaccccaaaacgcgccgccaaccgtaacctaatacctcgaaaaataaccaaacgccgcactccgaacgacccaaccaatcgcaaatactcgccgccgcaccccaaccaatcacgaaccaatacgctcgcgatctacgaatcccacccgacaactatcaaaaactacccttaacaaccaatcaaaaatataaacgcgctccgccaaattcttcttcccgccctctcctaat

SEQ ID NO: 1625 - DNA, 550 bp, Artificial Sequence
  chemically treated genomic DNA (Homo sapiens) CpG-island No: 1625
ggttttcgagtataatgttttgttgagtagcgtttaggaacgtcgggttttggtaggtcggttgtgcgcgggagatcgcggagattgggtttgagttagggcgcgatcgggtttttttttgttaggtagagcgttggcgagatttcgagatttttgatataggtaaggttcgaggtagtcggggaatcggcgggtttttacgcgggggttttagtgcgtttcgatacgcgtttaggtttcgcggtgcggtatttagggcgttcggcggtttggttcgcgttcggggtagataacgagtaatcggagcgtcggtacgcgtcggtaggtcgtttcggagtgttcgggttttgttcgttggttgggggttcgttggattagggtagttaggttttttttcgtcgtcgttatattcgcgatttttttttttttttcgcgagaaattcgaggattcgcggacgatatttattttagtaggcgagagaggtggtgtttagtatttattcggttatttttaaaaatgattttggttggtatttttttgcggatgatt

SEQ ID NO: 1626 - DNA, 550 bp, Artificial Sequence
  chemically treated genomic DNA (Homo sapiens) CpG-island No: 1626
aatcatccgcaaaaaaataccaaccaaaatcatttttaaaaataaccgaataaatactaaacaccacctctctcgcctactaaaataaatatcgtccgcgaatcctcgaatttctcgcgaaaaaaaaaaaaaaatcgcgaatataacgacgacgaaaaaaaacctaactaccctaatccaacgaacccccaaccaacgaacaaaacccgaacactccgaaacgacctaccgacgcgtaccgacgctccgattactcgttatctaccccgaacgcgaaccaaaccgccgaacgccctaaataccgcaccgcgaaacctaaacgcgtatcgaaacgcactaaaacccccgcgtaaaaacccgccgattccccgactacctcgaaccttacctatatcaaaaatctcgaaatctcgccaacgctctacctaacaaaaaaaaacccgatcgcgccctaactcaaacccaatctccgcgatctcccgcgcacaaccgacctaccaaaacccgacgttcctaaacgctactcaacaaaacattatactcgaaaacc

SEQ ID NO: 1627 - DNA, 550 bp, Artificial Sequence
  chemically treated genomic DNA (Homo sapiens) CpG-island No: 1627
gattattcgtaaggaaatattagttaaaattatttttgaggatgatcgggtaggtattgggtattatttttttcgtttgttgaggtgggtatcgttcgcggattttcgggtttttcgcggagggagaggaggggtcgcgagtgtagcggcgacgggaggggatttggttgttttggtttagcgggtttttagttagcggatagggttcgggtatttcgaggcggtttgtcggcgcgtgtcggcgtttcggttattcgttatttgtttcgggcgcgggttaggtcgtcgggcgttttgagtgtcgtatcgcggggtttgggcgcgtgtcggggcgtattggggttttcgcgtggaagttcgtcggtttttcggttgtttcggattttgtttgtattaggaatttcgaaatttcgttagcgttttgtttgatagagagaaattcgatcgcgttttgatttaggtttaattttcgcgatttttcgcgtatagtcggtttgttagggttcggcgtttttgggcgttgtttagtaaggtattgtgttcgagggtt

SEQ ID NO: 1628 - DNA, 550 bp, Artificial Sequence
  chemically treated genomic DNA (Homo sapiens) CpG-island No: 1628
aaccctcgaacacaataccttactaaacaacgcccaaaaacgccgaaccctaacaaaccgactatacgcgaaaaatcgcgaaaattaaacctaaatcaaaacgcgatcgaatttctctctatcaaacaaaacgctaacgaaatttcgaaattcctaatacaaacaaaatccgaaacaaccgaaaaaccgacgaacttccacgcgaaaaccccaatacgccccgacacgcgcccaaaccccgcgatacgacactcaaaacgcccgacgacctaacccgcgcccgaaacaaataacgaataaccgaaacgccgacacgcgccgacaaaccgcctcgaaatacccgaaccctatccgctaactaaaaacccgctaaaccaaaacaaccaaatcccctcccgtcgccgctacactcgcgacccctcctctccctccgcgaaaaacccgaaaatccgcgaacgatacccacctcaacaaacgaaaaaaataatacccaatacctacccgatcatcctcaaaaataattttaactaatatttccttacgaataatc

SEQ ID NO: 1629 - DNA, 671 bp, Artificial Sequence
  chemically treated genomic DNA (Homo sapiens) CpG-island No: 1629
aaacgatttaattacgtttatttttttgttcgttcgcgtttttttttcgggaaaatgggttttgagaattagagcgtttttttttttacgcgtttaaatttttttttattagtatgcgtgcgtttgcgtagtttttaggcggtttttttttagcgttcgatcgttttttttttttgttttttttcggtttttttttagttttagtttttttttaaggggttattatagggcgttaaacgcgcgttcgcgggaaggtcgggggcggagcgcggcgcggcgcggtacgttagtggtttttcggtcggaagttcgtagtttttcgagtcgttgattggtttttaggttggcgtttgtttcggttttcgcgttagttttgggttggttggcgcggaatcgggagattcgggattatggtatttgtgtacggcgacgattgtgagataggggcgagtggtgagggataatttcgcgcgcggggtttcgggttgggatagtggtatgattgtcggtggtgggggttttgagggaggcgtatattcgggtttgtttgggcgtagattttggtcgttttcggcgggggtttttttggcgtcggatcgggttttttttaggcgcggtttgtttttggaggattagagtttggagggatttttgtttgggaggttgtttta

SEQ ID NO: 1630 - DNA, 671 bp, Artificial Sequence
  chemically treated genomic DNA (Homo sapiens) CpG-island No: 1630
taaaacaacctcccaaacaaaaatccctccaaactctaatcctccaaaaacaaaccgcgcctaaaaaaaacccgatccgacgccaaaaaaacccccgccgaaaacgaccaaaatctacgcccaaacaaacccgaatatacgcctccctcaaaacccccaccaccgacaatcataccactatcccaacccgaaaccccgcgcgcgaaattatccctcaccactcgcccctatctcacaatcgtcgccgtacacaaataccataatcccgaatctcccgattccgcgccaaccaacccaaaactaacgcgaaaaccgaaacaaacgccaacctaaaaaccaatcaacgactcgaaaaactacgaacttccgaccgaaaaaccactaacgtaccgcgccgcgccgcgctccgcccccgaccttcccgcgaacgcgcgtttaacgccctataataaccccttaaaaaaaaactaaaactaaaaaaaaaccgaaaaaaaacaaaaaaaaaaaacgatcgaacgctaaaaaaaaaccgcctaaaaactacgcaaacgcacgcatactaataaaaaaaaatttaaacgcgtaaaaaaaaaaacgctctaattctcaaaacccattttcccgaaaaaaaaacgcgaacgaacaaaaaaataaacgtaattaaatcgttt

SEQ ID NO: 1631 - DNA, 671 bp, Artificial Sequence
  chemically treated genomic DNA (Homo sapiens) CpG-island No: 1631
tgagatagttttttaaataaaaatttttttaggttttggttttttaagagtaaatcgcgtttaaaggaagttcggttcgacgttagaagggttttcgtcggggacgattaaggtttgcgtttaaataaattcgggtgtgcgttttttttagaatttttattatcggtaattatgttattgttttaattcggagtttcgcgcgcggaattgttttttattattcgtttttattttatagtcgtcgtcgtgtataggtgttatggtttcgaatttttcgatttcgcgttaattagtttaaaattggcgcgggggtcgagataggcgttagtttgaaagttaattagcggttcgggaggttgcggattttcggtcggaaggttattgacgtgtcgcgtcgcgtcgcgtttcgttttcggttttttcgcggacgcgcgtttggcgttttgtgatgattttttagggaaaagttagagttgaggggaagtcggaggagagtaggagaaagaagcggtcgggcgttggaaaggagtcgtttggagattgcgtaagcgtacgtatgttgatgggaaaagatttgggcgcgtgggagaaagggcgttttggtttttagagtttattttttcggaaaggaggcgcgggcgggtaggagagtgggcgtggttggatcgttt

SEQ ID NO: 1632 - DNA, 671 bp, Artificial Sequence
  chemically treated genomic DNA (Homo sapiens) CpG-island No: 1632
aaacgatccaaccacgcccactctcctacccgcccgcgcctcctttccgaaaaaataaactctaaaaaccaaaacgccctttctcccacgcgcccaaatcttttcccatcaacatacgtacgcttacgcaatctccaaacgactcctttccaacgcccgaccgcttctttctcctactctcctccgacttcccctcaactctaacttttccctaaaaaatcatcacaaaacgccaaacgcgcgtccgcgaaaaaaccgaaaacgaaacgcgacgcgacgcgacacgtcaataaccttccgaccgaaaatccgcaacctcccgaaccgctaattaactttcaaactaacgcctatctcgacccccgcgccaattttaaactaattaacgcgaaatcgaaaaattcgaaaccataacacctatacacgacgacgactataaaataaaaacgaataataaaaaacaattccgcgcgcgaaactccgaattaaaacaataacataattaccgataataaaaattctaaaaaaaacgcacacccgaatttatttaaacgcaaaccttaatcgtccccgacgaaaacccttctaacgtcgaaccgaacttcctttaaacgcgatttactcttaaaaaaccaaaacctaaaaaaatttttatttaaaaaactatctca

SEQ ID NO: 1633 - DNA, 503 bp, Artificial Sequence
  chemically treated genomic DNA (Homo sapiens) CpG-island No: 1633
agggcggcggagaagtggggacgtgggcgtagggagcgttttatacgtttgattttagcgtttcggattttttatttgttcgtaattttcgcgtcgtagttatatcgagttttcgcgtcgagtcgcggagtttttatttatcggcgttcggagcggcgggggcggtttgttcgcgtttcggtttgcgcgttgcgttcggatgtaggagtcggagttcggcgaagcgttcggtcggggtcgcggggattcgttagggattgtgtagtatcggcgcggggatcggatcgtggaggtatcggcgcggagtcgggacgcgttatgttgcgggagggattcgggtcggttttgcgtttacgtgggtgtgggggtatcgagcggtcgggggagggggcgggatttttttcgcgatgtttttcgtttttttcgcgtttagtttaggtttcgtagtcgtgtgggagaagggggatagcgtgtttgcgaagggagggggattgggggtgggt

SEQ ID NO: 1634 - DNA, 503 bp, Artificial Sequence
  chemically treated genomic DNA (Homo sapiens) CpG-island No: 1634
acccacccccaatccccctcccttcgcaaacacgctatcccccttctcccacacgactacgaaacctaaactaaacgcgaaaaaaacgaaaaacatcgcgaaaaaaatcccgccccctcccccgaccgctcgatacccccacacccacgtaaacgcaaaaccgacccgaatccctcccgcaacataacgcgtcccgactccgcgccgatacctccacgatccgatccccgcgccgatactacacaatccctaacgaatccccgcgaccccgaccgaacgcttcgccgaactccgactcctacatccgaacgcaacgcgcaaaccgaaacgcgaacaaaccgcccccgccgctccgaacgccgataaataaaaactccgcgactcgacgcgaaaactcgatataactacgacgcgaaaattacgaacaaataaaaaatccgaaacgctaaaatcaaacgtataaaacgctccctacgcccacgtccccacttctccgccgccct

SEQ ID NO: 1635 - DNA, 503 bp, Artificial Sequence
  chemically treated genomic DNA (Homo sapiens) CpG-island No: 1635
gtttatttttagttttttttttttcgtaagtacgttgtttttttttttttatacggttgcggagtttgggttgggcgcgggggaggcggagggtatcgcggaggggatttcgttttttttttcggtcgttcggtgtttttatatttacgtgagcgtagggtcggttcggatttttttcgtagtatagcgcgtttcggtttcgcgtcggtgtttttacggttcggttttcgcgtcggtgttgtatagtttttggcgggttttcgcggtttcggtcgggcgtttcgtcgggtttcggtttttgtattcgggcgtagcgcgtaggtcgaggcgcgggtaggtcgttttcgtcgtttcggacgtcggtgagtggggatttcgcggttcggcgcggggattcggtgtggttgcggcgcggaggttgcgggtaggtgggggattcgaggcgttggggttaggcgtgtggggcgttttttgcgtttacgtttttattttttcgtcgtttt

SEQ ID NO: 1636 - DNA, 503 bp, Artificial Sequence
  chemically treated genomic DNA (Homo sapiens) CpG-island No: 1636
aaaacgacgaaaaaataaaaacgtaaacgcaaaaaacgccccacacgcctaaccccaacgcctcgaatcccccacctacccgcaacctccgcgccgcaaccacaccgaatccccgcgccgaaccgcgaaatccccactcaccgacgtccgaaacgacgaaaacgacctacccgcgcctcgacctacgcgctacgcccgaatacaaaaaccgaaacccgacgaaacgcccgaccgaaaccgcgaaaacccgccaaaaactatacaacaccgacgcgaaaaccgaaccgtaaaaacaccgacgcgaaaccgaaacgcgctatactacgaaaaaaatccgaaccgaccctacgctcacgtaaatataaaaacaccgaacgaccgaaaaaaaaaacgaaatcccctccgcgataccctccgcctcccccgcgcccaacccaaactccgcaaccgtataaaaaaaaaaaaacaacgtacttacgaaaaaaaaaaaactaaaaataaac

SEQ ID NO: 1637 - DNA, 567 bp, Artificial Sequence
  chemically treated genomic DNA (Homo sapiens) CpG-island No: 1637
cgtgttggtattttcggttgagcgtagttaggatatacgcgttggggttttagtatggcgcgaggtagtttaggttatggcgaggatcgcgtatattttgatcgatcgttgcgggtaggaggcggtgattatgtggtagtttaaggatagcgtgttggattcgaacgtggtttattatttcggtcgcgtcgtttatatttagttttggcgttttcgcgtggagatgattaaaggcggcggtattttggagaagtcgtcgttaggcgagggcgttacgttgtggaagggtaagatgaagtcgttcgtttggtacgttcgtttgtcgttatttttgtatcgtaaagcgcgcgttttgtagattatcgaggtggtgtacgcgtacgcgcgtggagcgcgttttatcgtcgttcgtttcggtcgcgcgtagtattagattaacgggcgggtgcgatagttgttgcgttagcgcgaggttatcgattataggtttagcgaagtgcgtaagggtttgtttattaattagtagagcgttaagttgcggggttataggtttaagtttgagaaggt

SEQ ID NO: 1638 - DNA, 567 bp, Artificial Sequence
  chemically treated genomic DNA (Homo sapiens) CpG-island No: 1638
accttctcaaacttaaacctataaccccgcaacttaacgctctactaattaataaacaaacccttacgcacttcgctaaacctataatcgataacctcgcgctaacgcaacaactatcgcacccgcccgttaatctaatactacgcgcgaccgaaacgaacgacgataaaacgcgctccacgcgcgtacgcgtacaccacctcgataatctacaaaacgcgcgctttacgatacaaaaataacgacaaacgaacgtaccaaacgaacgacttcatcttacccttccacaacgtaacgccctcgcctaacgacgacttctccaaaataccgccgcctttaatcatctccacgcgaaaacgccaaaactaaatataaacgacgcgaccgaaataataaaccacgttcgaatccaacacgctatccttaaactaccacataatcaccgcctcctacccgcaacgatcgatcaaaatatacgcgatcctcgccataacctaaactacctcgcgccatactaaaaccccaacgcgtatatcctaactacgctcaaccgaaaataccaacacg

SEQ ID NO: 1639 - DNA, 567 bp, Artificial Sequence
  chemically treated genomic DNA (Homo sapiens) CpG-island No: 1639
atttttttagatttgggtttgtagtttcgtagtttgacgttttgttggttaataagtagatttttgcgtatttcgttgagtttgtggtcggtgatttcgcgttggcgtagtagttgtcgtattcgttcgttaatttggtgttgcgcgcggtcgaggcgggcggcggtgaggcgcgttttacgcgcgtgcgcgtgtattatttcggtggtttgtagggcgcgcgttttgcggtgtaagggtagcggtaggcgggcgtattaggcgggcggttttattttgtttttttatagcgtgacgttttcgtttggcggcggtttttttaaggtgtcgtcgtttttgattatttttacgcggaagcgttagggttggatgtaggcggcgcggtcgaggtggtgggttacgttcgggtttagtacgttgtttttgggttgttatatggttatcgttttttgttcgtagcgatcggttagaatgtgcgcggttttcgttatggtttgagttgtttcgcgttatgttggggttttaacgcgtgtgttttggttgcgtttagtcgggggtattaatacg

SEQ ID NO: 1640 - DNA, 567 bp, Artificial Sequence
  chemically treated genomic DNA (Homo sapiens) CpG-island No: 1640
cgtattaatacccccgactaaacgcaaccaaaacacacgcgttaaaaccccaacataacgcgaaacaactcaaaccataacgaaaaccgcgcacattctaaccgatcgctacgaacaaaaaacgataaccatataacaacccaaaaacaacgtactaaacccgaacgtaacccaccacctcgaccgcgccgcctacatccaaccctaacgcttccgcgtaaaaataatcaaaaacgacgacaccttaaaaaaaccgccgccaaacgaaaacgtcacgctataaaaaaacaaaataaaaccgcccgcctaatacgcccgcctaccgctacccttacaccgcaaaacgcgcgccctacaaaccaccgaaataatacacgcgcacgcgcgtaaaacgcgcctcaccgccgcccgcctcgaccgcgcgcaacaccaaattaacgaacgaatacgacaactactacgccaacgcgaaatcaccgaccacaaactcaacgaaatacgcaaaaatctacttattaaccaacaaaacgtcaaactacgaaactacaaacccaaatctaaaaaaat

SEQ ID NO: 1641 - DNA, 1341 bp, Artificial Sequence
  chemically treated genomic DNA (Homo sapiens) CpG-island No: 1641
cggaacgtgtggttaggcgttttggacgtgatatgtgtggcggggttcgagtttcgttgcgtgttagcgtgtgtttgcgttggaacgcgggttagtacgtgttagggcggtcgcgtcggtgtgcgttttcgcgcgcgcgtgtgcgtgtgttcgtgtgtgtgtgtgtatgtgtgtgtttgtgtgtgtgcgtcggtcgtcgttttttcgttttgttcgttttttttcgcgttttttttttcgttcgcgtcgttcgttcgtttttttttttcggagtgcgtcgtttttaaattttgtttaaatttttatttttatagcgcggcggttgcggcggcggcggcggcgggcgagggtgatcggtcgagcggcggcggtatggagtagacgcgcggcggtagcggcggcggcggcggacgcgagaggtagcggcgagcgcggcggcggcggcggtagcggcggtttcggagtcggcggggtcgagtttgcgagcggcgagcgcggagcggcgtcgggtcgagcgcggggtcgcgggtcgggcgggcgtagcgcggcggaggtcggaggagtcgagtcggagttcgagttcgagcgcggtcgtcgtttgtcgggttttttttcgtcgcggtcggtcgtcgcgttttcgttcgggcgtttagttatgtatttttcgtattgttttatttaggtatcggtcgtcgttttcgcgcgatcgggggaggggagcgggcgcgggaggtcggtcggcggcgcgggcggaggggacgcgcggcggtcgggaagggggggtcgagagttcgcgggtcgtcgaggggtgtaggttgtgtcgcggggagtttaggtacgcgtgcgggcgttatcgtgcgcgtgcgattttggttatcgggcggattttttttgggggtttcgggggtggttagttgcgtcgtggcgttgttcgtggagcgtaggcgggagtgcgtgtacgtgtgtgtgtgtgtgtgtgtgtgtgtgcgcgttcgattggggtgcgatgggtagcgggatttcggttgatttgtgggttattgtagcgcgtattcgggtagcgtggtcgttggtagtgtttgcggggttgatagagtggtaagagggtggtttcgagggcgtagaggggatattgggtttcgcgacgttttttggggagggcgtagcggttttcgagggtggtagtggtcggcgtgcgtggcggcggtttttgcgtgcggtcggggtgtttggggtgggtcgagcggttcgggcgtttttttaaagtttttgtttaggttttatatgggagcggggttaagaaaatggcggggtttttaaatttcggaggggtaggggagg

SEQ ID NO: 1642 - DNA, 1341 bp, Artificial Sequence
  chemically treated genomic DNA (Homo sapiens) CpG-island No: 1642
cctcccctacccctccgaaatttaaaaaccccgccattttcttaaccccgctcccatataaaacctaaacaaaaactttaaaaaaacgcccgaaccgctcgacccaccccaaacaccccgaccgcacgcaaaaaccgccgccacgcacgccgaccactaccaccctcgaaaaccgctacgccctccccaaaaaacgtcgcgaaacccaatatcccctctacgccctcgaaaccaccctcttaccactctatcaaccccgcaaacactaccaacgaccacgctacccgaatacgcgctacaataacccacaaatcaaccgaaatcccgctacccatcgcaccccaatcgaacgcgcacacacacacacacacacacacacacgtacacgcactcccgcctacgctccacgaacaacgccacgacgcaactaaccacccccgaaacccccaaaaaaaatccgcccgataaccaaaatcgcacgcgcacgataacgcccgcacgcgtacctaaactccccgcgacacaacctacacccctcgacgacccgcgaactctcgacccccccttcccgaccgccgcgcgtcccctccgcccgcgccgccgaccgacctcccgcgcccgctcccctcccccgatcgcgcgaaaacgacgaccgatacctaaataaaacaatacgaaaaatacataactaaacgcccgaacgaaaacgcgacgaccgaccgcgacgaaaaaaaacccgacaaacgacgaccgcgctcgaactcgaactccgactcgactcctccgacctccgccgcgctacgcccgcccgacccgcgaccccgcgctcgacccgacgccgctccgcgctcgccgctcgcaaactcgaccccgccgactccgaaaccgccgctaccgccgccgccgccgcgctcgccgctacctctcgcgtccgccgccgccgccgctaccgccgcgcgtctactccataccgccgccgctcgaccgatcaccctcgcccgccgccgccgccgccgcaaccgccgcgctataaaaataaaaatttaaacaaaatttaaaaacgacgcactccgaaaaaaaaaaacgaacgaacgacgcgaacgaaaaaaaaaacgcgaaaaaaaacgaacaaaacgaaaaaacgacgaccgacgcacacacacaaacacacacatacacacacacacacgaacacacgcacacgcgcgcgcgaaaacgcacaccgacgcgaccgccctaacacgtactaacccgcgttccaacgcaaacacacgctaacacgcaacgaaactcgaaccccgccacacatatcacgtccaaaacgcctaaccacacgttccg

SEQ ID NO: 1643 - DNA, 1341 bp, Artificial Sequence
  chemically treated genomic DNA (Homo sapiens) CpG-island No: 1643
ttttttttgttttttcgaaatttgggagtttcgttatttttttagtttcgtttttatgtgaggtttaaataaagattttggggagacgttcgggtcgttcggtttattttaggtatttcggtcgtacgtaagggtcgtcgttacgtacgtcggttattgttattttcgggaatcgttgcgttttttttaggaagcgtcgcgggatttagtgttttttttgcgttttcgggattatttttttgttattttgttaatttcgtaaatattgttagcgattacgttgttcgggtgcgcgttatagtagtttataggttagtcggagtttcgttgtttatcgtattttagtcgagcgcgtatatatatatatatatatatatatacgtatacgtattttcgtttgcgttttacgggtagcgttacgacgtagttggttattttcggaatttttaaaaggagttcgttcggtggttagggtcgtacgcgtacggtgacgttcgtacgcgtgtttgggtttttcgcggtatagtttgtatttttcggcggttcgcgggttttcggtttttttttttcggtcgtcgcgcgtttttttcgttcgcgtcgtcggtcggtttttcgcgttcgtttttttttttcggtcgcgcgggggcggcggtcggtatttgggtgaggtagtacggggagtatatagttgggcgttcgggcgggagcgcggcggtcggtcgcggcgaggggaggttcggtaggcggcggtcgcgttcgggttcgggtttcggttcggttttttcggttttcgtcgcgttgcgttcgttcggttcgcggtttcgcgttcggttcggcgtcgtttcgcgttcgtcgttcgtaagttcggtttcgtcggtttcggggtcgtcgttgtcgtcgtcgtcgtcgcgttcgtcgttgtttttcgcgttcgtcgtcgtcgtcgttgtcgtcgcgcgtttattttatgtcgtcgtcgttcggtcggttattttcgttcgtcgtcgtcgtcgtcgtagtcgtcgcgttgtgaaagtgaaagtttagataaagtttggaagcggcgtatttcggggagagggagcgggcgggcggcgcgggcgggaggaggggcgcggggaggggcgggtagggcgggggagcggcggtcggcgtatatatataagtatatatatgtatatatatatacgaatatacgtatacgcgcgcgcgggggcgtatatcgacgcggtcgttttgatacgtgttggttcgcgttttagcgtagatatacgttgatacgtagcgggattcggatttcgttatatatgttacgtttagaacgtttggttatacgtttcg

SEQ ID NO: 1644 - DNA, 1341 bp, Artificial Sequence
  chemically treated genomic DNA (Homo sapiens) CpG-island No: 1644
cgaaacgtataaccaaacgttctaaacgtaacatatataacgaaatccgaatcccgctacgtatcaacgtatatctacgctaaaacgcgaaccaacacgtatcaaaacgaccgcgtcgatatacgcccccgcgcgcgcgtatacgtatattcgtatatatatatacatatatatacttatatatatacgccgaccgccgctcccccgccctacccgcccctccccgcgcccctcctcccgcccgcgccgcccgcccgctccctctccccgaaatacgccgcttccaaactttatctaaactttcactttcacaacgcgacgactacgacgacgacgacgacgaacgaaaataaccgaccgaacgacgacgacataaaataaacgcgcgacgacaacgacgacgacgacgaacgcgaaaaacaacgacgaacgcgacgacgacgacgacaacgacgaccccgaaaccgacgaaaccgaacttacgaacgacgaacgcgaaacgacgccgaaccgaacgcgaaaccgcgaaccgaacgaacgcaacgcgacgaaaaccgaaaaaaccgaaccgaaacccgaacccgaacgcgaccgccgcctaccgaacctcccctcgccgcgaccgaccgccgcgctcccgcccgaacgcccaactatatactccccgtactacctcacccaaataccgaccgccgcccccgcgcgaccgaaaaaaaaaaacgaacgcgaaaaaccgaccgacgacgcgaacgaaaaaaacgcgcgacgaccgaaaaaaaaaaaccgaaaacccgcgaaccgccgaaaaatacaaactataccgcgaaaaacccaaacacgcgtacgaacgtcaccgtacgcgtacgaccctaaccaccgaacgaactccttttaaaaattccgaaaataaccaactacgtcgtaacgctacccgtaaaacgcaaacgaaaatacgtatacgtatatatatatatatatatatatatacgcgctcgactaaaatacgataaacaacgaaactccgactaacctataaactactataacgcgcacccgaacaacgtaatcgctaacaatatttacgaaattaacaaaataacaaaaaaataatcccgaaaacgcaaaaaaaacactaaatcccgcgacgcttcctaaaaaaaacgcaacgattcccgaaaataacaataaccgacgtacgtaacgacgacccttacgtacgaccgaaatacctaaaataaaccgaacgacccgaacgtctccccaaaatctttatttaaacctcacataaaaacgaaactaaaaaaataacgaaactcccaaatttcgaaaaaacaaaaaaaa

SEQ ID NO: 1645 - DNA, 1035 bp, Artificial Sequence
  chemically treated genomic DNA (Homo sapiens) CpG-island No: 1645
gaggacgtgttttcgaagttgtttcgtttttttatcgttttgggacgttatagttagattcgtcgacgagttttttttttagcgtttacgagaaggagggttgcgggcggcggcggcggcgataggcgaggaagcgagtgtagggaatttaggttttggcggggttaggcgcgttcgtttcgtttttatagtaaaatttgcggcggttttcgttcgtcgcgtttcggtttagttgtgcgttagcggaatacggatttatcgttcgttcggtttttcggttcgttcggtttggcgtagcgttttttattttggaaacgttgagtagatttcgtcgtaaatattaattttttatttagtcggtagtcgcgtcgtcgcgttttagcgtttcggtttcgtttttggttttacgggtcgttcgtttcgagtttttaaaagtattacgtttatttagaagtttagggtcgtttcgcgatttttatttatttttttcggtatcgtcgttgtcggaattgtagttagttttttgttagttggttagttggttttttcggggttcggttcggtcgcgttaggagagtttaaggcgtaggcgcgggagggttttaaagagattcggtagtttttatcgtagaatgggttggagtaggttaggggtcgggcgggtcggtcgagaaaaggagaaggcgaagggattggacggagtgtagaggaggcggggaaatcgttttcgtttttcgttttttttttaaagtattagtttttagttttgtaagtcgtcgattttttcggttattggaatcgttttttttatgttaaaacggtagaagatatattttttcgggggttcgaagcgatttcgagtttaggattgtaggtttcgcgttgtcgtatcgacgcggagtttgatttttagggttttggtacgcggtgttgacgcgtatgtttcggaaggtagtttcgagtttttttagaggtggttttagggtattcgtaaaaataataattaacgcgtaaatgatatttgtaattgtaatg

SEQ ID NO: 1646 - DNA, 1035 bp, Artificial Sequence
  chemically treated genomic DNA (Homo sapiens) CpG-island No: 1646
cattacaattacaaatatcatttacgcgttaattattatttttacgaataccctaaaaccacctctaaaaaaactcgaaactaccttccgaaacatacgcgtcaacaccgcgtaccaaaaccctaaaaatcaaactccgcgtcgatacgacaacgcgaaacctacaatcctaaactcgaaatcgcttcgaacccccgaaaaaatatatcttctaccgttttaacataaaaaaaacgattccaataaccgaaaaaatcgacgacttacaaaactaaaaactaatactttaaaaaaaaaacgaaaaacgaaaacgatttccccgcctcctctacactccgtccaatcccttcgccttctccttttctcgaccgacccgcccgacccctaacctactccaacccattctacgataaaaactaccgaatctctttaaaaccctcccgcgcctacgccttaaactctcctaacgcgaccgaaccgaaccccgaaaaaaccaactaaccaactaacaaaaaactaactacaattccgacaacgacgataccgaaaaaaataaataaaaatcgcgaaacgaccctaaacttctaaataaacgtaatacttttaaaaactcgaaacgaacgacccgtaaaaccaaaaacgaaaccgaaacgctaaaacgcgacgacgcgactaccgactaaataaaaaattaatatttacgacgaaatctactcaacgtttccaaaataaaaaacgctacgccaaaccgaacgaaccgaaaaaccgaacgaacgataaatccgtattccgctaacgcacaactaaaccgaaacgcgacgaacgaaaaccgccgcaaattttactataaaaacgaaacgaacgcgcctaaccccgccaaaacctaaattccctacactcgcttcctcgcctatcgccgccgccgccgcccgcaaccctccttctcgtaaacgctaaaaaaaaaactcgtcgacgaatctaactataacgtcccaaaacgataaaaaaacgaaacaacttcgaaaacacgtcctc

SEQ ID NO: 1647 - DNA, 1035 bp, Artificial Sequence
  chemically treated genomic DNA (Homo sapiens) CpG-island No: 1647
tattataattataagtgttatttacgcgttgattattgtttttgcgagtgttttaaggttatttttgggggagttcggggttgtttttcgaagtatgcgcgttagtatcgcgtgttagggttttgaaagttaggtttcgcgtcggtgcggtagcgcgaggtttgtagttttaagttcggggtcgtttcgggttttcgagggggtgtgttttttatcgttttaatatggaaggggcggttttagtggtcggggaagtcggcgatttgtaggattgaaggttggtgttttgaaagagaggcggagggcgagagcgattttttcgttttttttgtatttcgtttaattttttcgttttttttttttttcggtcggttcgttcggtttttaatttgttttaatttattttgcggtagaggttgtcgggtttttttaaggttttttcgcgtttgcgttttgggtttttttgacgcggtcgggtcggatttcggaggaattagttggttagttggtaaggggttggttgtagtttcgatagcggcggtgtcgggaggggtaggtgagggtcgcgaggcggttttgagtttttgagtgagcgtggtgtttttgggaattcgggacgggcgattcgtggagttaggagcggggtcgaggcgttgagacgcggcggcgcggttgtcggttggatgggaagttaatgtttacggcgaagtttatttaacgtttttaaggtgaggggcgttgcgttaggtcgggcgggtcgggaggtcgggcgggcggtgagttcgtgtttcgttggcgtatagttgggtcgaggcgcggcgggcgggggtcgtcgtaagttttgttgtgggagcggggcgggcgcgtttggtttcgttagggtttaagttttttgtattcgttttttcgtttgtcgtcgtcgtcgtcgttcgtagttttttttttcgtgggcgttggggaagaaattcgtcggcgggtttaattgtggcgttttagggcggtggagggacggagtagtttcgggggtacgttttt

SEQ ID NO: 1648 - DNA, 1035 bp, Artificial Sequence
  chemically treated genomic DNA (Homo sapiens) CpG-island No: 1648
aaaaacgtacccccgaaactactccgtccctccaccgccctaaaacgccacaattaaacccgccgacgaatttcttccccaacgcccacgaaaaaaaaaactacgaacgacgacgacgacgacaaacgaaaaaacgaatacaaaaaacttaaaccctaacgaaaccaaacgcgcccgccccgctcccacaacaaaacttacgacgacccccgcccgccgcgcctcgacccaactatacgccaacgaaacacgaactcaccgcccgcccgacctcccgacccgcccgacctaacgcaacgcccctcaccttaaaaacgttaaataaacttcgccgtaaacattaacttcccatccaaccgacaaccgcgccgccgcgtctcaacgcctcgaccccgctcctaactccacgaatcgcccgtcccgaattcccaaaaacaccacgctcactcaaaaactcaaaaccgcctcgcgaccctcacctacccctcccgacaccgccgctatcgaaactacaaccaaccccttaccaactaaccaactaattcctccgaaatccgacccgaccgcgtcaaaaaaacccaaaacgcaaacgcgaaaaaaccttaaaaaaacccgacaacctctaccgcaaaataaattaaaacaaattaaaaaccgaacgaaccgaccgaaaaaaaaaaaaaacgaaaaaattaaacgaaatacaaaaaaaacgaaaaaatcgctctcgccctccgcctctctttcaaaacaccaaccttcaatcctacaaatcgccgacttccccgaccactaaaaccgccccttccatattaaaacgataaaaaacacaccccctcgaaaacccgaaacgaccccgaacttaaaactacaaacctcgcgctaccgcaccgacgcgaaacctaactttcaaaaccctaacacgcgatactaacgcgcatacttcgaaaaacaaccccgaactcccccaaaaataaccttaaaacactcgcaaaaacaataatcaacgcgtaaataacacttataattataata

SEQ ID NO: 1649 - DNA, 664 bp, Artificial Sequence
  chemically treated genomic DNA (Homo sapiens) CpG-island No: 1649
agtgcgttcgcggttatcggcgtggtagtcgaagttgtcgtagaggtaggcgggcgagttgtaggcggggtcgtagcggttgttgttgaagaggcgttagtattgtagcgtttcgtattgtcgttaggggtcgtttacgtttagcgagtagtcgtcgtcgttttagtcgtagtttgggttgttgtattcgcggtcgtagcgttggttttcgcgtttggtttggtaggcggcgcgcgggtatcgcggttttttcgagatttcgggtgtcgcggcgggcgtttcgtagcgcggttcggtttagttttgcgcgtaagcgtagcggaagaagggcgcgagcggcgcggggcggtaggagttttcgtggagatagggggcggtcgcgtagttggcgttgttggttttcggcggcgatttcgggaagttgcggtaggagggtttcgataattttggggggtaggcgtagcgcggttcgcggggcgtttgttggtatgggacgtttatcgggtattgtagttttcggtaggagcgcgttattcgttcgtaacgcggattttagaacggttgggggtcgggtttggggagggagggataaaaatgagggtggggagtggagggaaggaggagaagaaatggaggagtggggaaaagaagagttaaggggaga

SEQ ID NO: 1650 - DNA, 664 bp, Artificial Sequence
  chemically treated genomic DNA (Homo sapiens) CpG-island No: 1650
tctccccttaactcttcttttccccactcctccatttcttctcctccttccctccactccccaccctcatttttatccctccctccccaaacccgacccccaaccgttctaaaatccgcgttacgaacgaataacgcgctcctaccgaaaactacaatacccgataaacgtcccataccaacaaacgccccgcgaaccgcgctacgcctaccccccaaaattatcgaaaccctcctaccgcaacttcccgaaatcgccgccgaaaaccaacaacgccaactacgcgaccgccccctatctccacgaaaactcctaccgccccgcgccgctcgcgcccttcttccgctacgcttacgcgcaaaactaaaccgaaccgcgctacgaaacgcccgccgcgacacccgaaatctcgaaaaaaccgcgatacccgcgcgccgcctaccaaaccaaacgcgaaaaccaacgctacgaccgcgaatacaacaacccaaactacgactaaaacgacgacgactactcgctaaacgtaaacgacccctaacgacaatacgaaacgctacaatactaacgcctcttcaacaacaaccgctacgaccccgcctacaactcgcccgcctacctctacgacaacttcgactaccacgccgataaccgcgaacgcact

SEQ ID NO: 1651 - DNA, 664 bp, Artificial Sequence
  chemically treated genomic DNA (Homo sapiens) CpG-island No: 1651
tttttttttgattttttttttttttatttttttatttttttttttttttttttttattttttatttttatttttatttttttttttttaaattcgatttttagtcgttttggggttcgcgttgcgagcgggtggcgcgtttttgtcgggagttgtagtgttcggtgggcgttttatgttagtagacgtttcgcgggtcgcgttgcgtttgttttttagggttgtcgggatttttttgtcgtagtttttcggggtcgtcgtcgggggttagtaacgttagttgcgcggtcgttttttgtttttacgggggtttttgtcgtttcgcgtcgttcgcgtttttttttcgttgcgtttgcgcgtagggttggatcgggtcgcgttgcgaggcgttcgtcgcggtattcgaggtttcggaggagtcgcggtgttcgcgcgtcgtttgttaggttaagcgcggggattagcgttgcgatcgcgagtgtaatagtttaggttgcggttgggacggcggcgattgttcgttgagcgtgggcgatttttggcggtaatgcgaggcgttgtagtgttggcgtttttttaataatagtcgttgcgatttcgtttgtagttcgttcgtttgtttttacgataatttcgattgttacgtcggtggtcgcgagcgtatt

SEQ ID NO: 1652 - DNA, 664 bp, Artificial Sequence
  chemically treated genomic DNA (Homo sapiens) CpG-island No: 1652
aatacgctcgcgaccaccgacgtaacaatcgaaattatcgtaaaaacaaacgaacgaactacaaacgaaatcgcaacgactattattaaaaaaacgccaacactacaacgcctcgcattaccgccaaaaatcgcccacgctcaacgaacaatcgccgccgtcccaaccgcaacctaaactattacactcgcgatcgcaacgctaatccccgcgcttaacctaacaaacgacgcgcgaacaccgcgactcctccgaaacctcgaataccgcgacgaacgcctcgcaacgcgacccgatccaaccctacgcgcaaacgcaacgaaaaaaaaacgcgaacgacgcgaaacgacaaaaacccccgtaaaaacaaaaaacgaccgcgcaactaacgttactaacccccgacgacgaccccgaaaaactacgacaaaaaaatcccgacaaccctaaaaaacaaacgcaacgcgacccgcgaaacgtctactaacataaaacgcccaccgaacactacaactcccgacaaaaacgcgccacccgctcgcaacgcgaaccccaaaacgactaaaaatcgaatttaaaaaaaaaaaaataaaaataaaaataaaaaataaaaaaaaaaaaaaaaaaaaataaaaaaataaaaaaaaaaaaaatcaaaaaaaaa

SEQ ID NO: 1653 - DNA, 756 bp, Artificial Sequence
  chemically treated genomic DNA (Homo sapiens) CpG-island No: 1653
gatagttttgacggtgcggggcggggttggcggttgtttaggtttggttgaggcgtcgcggtcgggtttttttttatttgtcgggcggagcgtacgggttatgggttgagtttcgttgagttcgtcgggtcggttatgggcgatcgcgagcgtaataagaagcggttgttggagttgttgcgggcgtcggatataggtaacgcgtattgcgtcgattgcggggcggtaggtaagggcgcggcggcgcgggtagcgcgagattttcggtcggattttaggtttattcgattttttttttcggttttatcgggtttcgttttcggttttttggatttagacgtggtatttgcgggtttcgattttttttatttatatcgtgaattttttattcgagtttcgagggtcgtttttattatattttgtttcggtttttacgagtttaggttttgtttttttcgcgggattagatgcgtatttttttacgtgtttggattcggatacgagagtcggtagtttagagtttttttagtttcgtttttttttttggttaggtattcgatcgttcgagttcgggttttcgatgtttgcgtatttaggcgcgttttacgttttcggatttagatattttagttagggttaaacgtcgggtttaggtcgtcgatagttttgtgttttttgttcgtttttagacgtttttcgaaggtttttttagcgttttatttcggggacgtcgagggttttttaatttagtttttt

SEQ ID NO: 1654 - DNA, 756 bp, Artificial Sequence
  chemically treated genomic DNA (Homo sapiens) CpG-island No: 1654
aaaaaactaaattaaaaaaccctcgacgtccccgaaataaaacgctaaaaaaaccttcgaaaaacgtctaaaaacgaacaaaaaacacaaaactatcgacgacctaaacccgacgtttaaccctaactaaaatatctaaatccgaaaacgtaaaacgcgcctaaatacgcaaacatcgaaaacccgaactcgaacgatcgaatacctaaccaaaaaaaaaaacgaaactaaaaaaactctaaactaccgactctcgtatccgaatccaaacacgtaaaaaaatacgcatctaatcccgcgaaaaaaacaaaacctaaactcgtaaaaaccgaaacaaaatataataaaaacgaccctcgaaactcgaataaaaaattcacgatataaataaaaaaaatcgaaacccgcaaataccacgtctaaatccaaaaaaccgaaaacgaaacccgataaaaccgaaaaaaaaaatcgaataaacctaaaatccgaccgaaaatctcgcgctacccgcgccgccgcgcccttacctaccgccccgcaatcgacgcaatacgcgttacctatatccgacgcccgcaacaactccaacaaccgcttcttattacgctcgcgatcgcccataaccgacccgacgaactcaacgaaactcaacccataacccgtacgctccgcccgacaaataaaaaaaaacccgaccgcgacgcctcaaccaaacctaaacaaccgccaaccccgccccgcaccgtcaaaactatc

SEQ ID NO: 1655 - DNA, 756 bp, Artificial Sequence
  chemically treated genomic DNA (Homo sapiens) CpG-island No: 1655
gggaggttgagttagggggttttcggcgttttcgaggtggggcgttggggaggttttcggggggcgtttgggagcgggtagggggtataggattgtcggcggtttgggttcgacgtttagttttggttgggatgtttgagttcgagggcgtggggcgcgtttgggtgcgtagatatcgagagttcggattcgggcggtcgggtgtttggttagggaagagagcgggattggaagggttttaggttgtcggttttcgtgttcgggtttaagtacgtgggaagatgcgtatttggtttcgcgaggggagtagagtttgggttcgtaggggtcggggtagggtgtggtggagacggttttcggggttcgggtgagaggtttacggtgtgggtgggaggggtcggggttcgtaggtgttacgtttgggtttagggggtcgagggcgggattcggtggggtcgaggggaggagtcgggtgggtttggggttcggtcgggggtttcgcgttgttcgcgtcgtcgcgtttttatttgtcgtttcgtagtcggcgtagtgcgcgttgtttgtgttcggcgttcgtagtagttttagtagtcgttttttgttgcgttcgcgatcgtttatggtcggttcggcgggtttagcggggtttagtttatggttcgtgcgtttcgttcggtaggtggagagggattcggtcgcggcgttttagttaggtttgggtagtcgttagtttcgtttcgtatcgttaggattgtt

SEQ ID NO: 1656 - DNA, 756 bp, Artificial Sequence
  chemically treated genomic DNA (Homo sapiens) CpG-island No: 1656
aacaatcctaacgatacgaaacgaaactaacgactacccaaacctaactaaaacgccgcgaccgaatccctctccacctaccgaacgaaacgcacgaaccataaactaaaccccgctaaacccgccgaaccgaccataaacgatcgcgaacgcaacaaaaaacgactactaaaactactacgaacgccgaacacaaacaacgcgcactacgccgactacgaaacgacaaataaaaacgcgacgacgcgaacaacgcgaaacccccgaccgaaccccaaacccacccgactcctcccctcgaccccaccgaatcccgccctcgaccccctaaacccaaacgtaacacctacgaaccccgacccctcccacccacaccgtaaacctctcacccgaaccccgaaaaccgtctccaccacaccctaccccgacccctacgaacccaaactctactcccctcgcgaaaccaaatacgcatcttcccacgtacttaaacccgaacacgaaaaccgacaacctaaaacccttccaatcccgctctcttccctaaccaaacacccgaccgcccgaatccgaactctcgatatctacgcacccaaacgcgccccacgccctcgaactcaaacatcccaaccaaaactaaacgtcgaacccaaaccgccgacaatcctataccccctacccgctcccaaacgccccccgaaaacctccccaacgccccacctcgaaaacgccgaaaaccccctaactcaacctccc

SEQ ID NO: 1657 - DNA, 566 bp, Artificial Sequence
  chemically treated genomic DNA (Homo sapiens) CpG-island No: 1657
ggggcggcgcgcggggaagttattggcggagttgtgcgtattgcgggtgttgtaggcgttggggagagtgtggagaggttgcgtggagttgtgcgttcggggtgggggttgtatttttaatgaagcgcgtgaagggtaagcggtgatgggttttgcgttagtggggttgggagtttgtcgggggttgtacgtgaggttgcgcgtaaggtgagaattgcgtatgtgggtttaggaattgcgcgtatcgaagtttgtaggcgttggggagggtgtggggggttgtgcgtggggttgtttttatcggaagttgtacgttcggggaagcgcggaggcgggggtgttgcgcgcgttggggagtacgtggggggatacgtagggattgttcgcgcgaatggtttttaacgtatgcgttttattttatattttatagtcgttatgacgattaggaggttcgttagttaacggttcgttaacggttgcggggataagttcgttgaggttgttaggcgagttaggtttttttggatttcgtttgattcggttgggttgtgtttgaaattgattta

SEQ ID NO: 1658 - DNA, 566 bp, Artificial Sequence
  chemically treated genomic DNA (Homo sapiens) CpG-island No: 1658
taaatcaatttcaaacacaacccaaccgaatcaaacgaaatccaaaaaaacctaactcgcctaacaacctcaacgaacttatccccgcaaccgttaacgaaccgttaactaacgaacctcctaatcgtcataacgactataaaatataaaataaaacgcatacgttaaaaaccattcgcgcgaacaatccctacgtatccccccacgtactccccaacgcgcgcaacacccccgcctccgcgcttccccgaacgtacaacttccgataaaaacaaccccacgcacaaccccccacaccctccccaacgcctacaaacttcgatacgcgcaattcctaaacccacatacgcaattctcaccttacgcgcaacctcacgtacaacccccgacaaactcccaaccccactaacgcaaaacccatcaccgcttacccttcacgcgcttcattaaaaatacaacccccaccccgaacgcacaactccacgcaacctctccacactctccccaacgcctacaacacccgcaatacgcacaactccgccaataacttccccgcgcgccgcccc

SEQ ID NO: 1659 - DNA, 566 bp, Artificial Sequence
  chemically treated genomic DNA (Homo sapiens) CpG-island No: 1659
tgggttaattttaggtatagtttagtcgagttaggcgaggtttagaaaggtttgattcgtttggtagttttaacggatttgttttcgtagtcgttgacgagtcgttgattagcggattttttggtcgttatggcgattgtgaaatgtagggtggggcgtatgcgttggaagttattcgcgcgggtagtttttgcgtgtttttttacgtgttttttagcgcgcgtagtattttcgttttcgcgttttttcgagcgtgtagttttcggtgagggtagttttacgtatagttttttatattttttttagcgtttgtagatttcggtgcgcgtagtttttaagtttatatgcgtagtttttattttgcgcgtagttttacgtatagttttcgataggtttttagttttattggcgtagaatttattatcgtttgttttttacgcgttttattgggagtgtagtttttatttcgagcgtatagttttacgtagtttttttatattttttttagcgtttgtagtattcgtagtgcgtatagtttcgttagtagttttttcgcgcgtcgtttt

SEQ ID NO: 1660 - DNA, 566 bp, Artificial Sequence
  chemically treated genomic DNA (Homo sapiens) CpG-island No: 1660
aaaacgacgcgcgaaaaaactactaacgaaactatacgcactacgaatactacaaacgctaaaaaaaatataaaaaaactacgtaaaactatacgctcgaaataaaaactacactcccaataaaacgcgtaaaaaacaaacgataataaattctacgccaataaaactaaaaacctatcgaaaactatacgtaaaactacgcgcaaaataaaaactacgcatataaacttaaaaactacgcgcaccgaaatctacaaacgctaaaaaaaatataaaaaactatacgtaaaactaccctcaccgaaaactacacgctcgaaaaaacgcgaaaacgaaaatactacgcgcgctaaaaaacacgtaaaaaaacacgcaaaaactacccgcgcgaataacttccaacgcatacgccccaccctacatttcacaatcgccataacgaccaaaaaatccgctaatcaacgactcgtcaacgactacgaaaacaaatccgttaaaactaccaaacgaatcaaacctttctaaacctcgcctaactcgactaaactatacctaaaattaaccca

SEQ ID NO: 1661 - DNA, 578 bp, Artificial Sequence
  chemically treated genomic DNA (Homo sapiens) CpG-island No: 1661
  unsure (242)
ttattatatttttattaattttattttttttttcgtatttttttatatttttatttttttttttattagttatttttatttcgcgtttttttttagtttcgttttatattttttatcgattatttttcgttattttttatattttcgtatttttatacgttttttttatttcgatttttttagttaagatttttagattatttttttatattgttttttatatacgtttttttattttattnttttttttcgtcgcgtgattgcgttttttcgattcgtttttttttattttcgttacgttttttttttttcgtttatttatagttatatattatttttttattttattttatttgtattcgtgttttttttcgtttatttttttttatatttattattcgttttttattcgttttatttttttttttaatttttattttttttttttttttcgttttttttacgttattatatacgttttacgcgtgtataattttttattcgcgattttatttttttattttatattcgcgtattaatattttcgcgttcgttttttagtattttcgttttttttt

SEQ ID NO: 1662 - DNA, 578 bp, Artificial Sequence
  chemically treated genomic DNA (Homo sapiens) CpG-island No: 1662
  unsure (337)
aaaaaaaaacgaaaatactaaaaaacgaacgcgaaaatattaatacgcgaatataaaataaaaaaataaaatcgcgaataaaaaattatacacgcgtaaaacgtatataataacgtaaaaaaaacgaaaaaaaaaaaaaaaataaaaattaaaaaaaaaaataaaacgaataaaaaacgaataataaatataaaaaaaaataaacgaaaaaaaacacgaatacaaataaaataaaataaaaaaataatatataactataaataaacgaaaaaaaaaaaacgtaacgaaaataaaaaaaaacgaatcgaaaaaacgcaatcacgcgacgaaaaaaaanaataaaataaaaaaacgtatataaaaaacaatataaaaaaataatctaaaaatcttaactaaaaaaatcgaaataaaaaaaacgtataaaaatacgaaaatataaaaaataacgaaaaataatcgataaaaaatataaaacgaaactaaaaaaaaacgcgaaataaaaataactaataaaaaaaaaaataaaaatataaaaaaatacgaaaaaaaaaataaaattaataaaaatataataa

SEQ ID NO: 1663 - DNA, 578 bp, Artificial Sequence
  chemically treated genomic DNA (Homo sapiens) CpG-island No: 1663
  unsure (337)
gaaagaggacggaagtattagaggacgagcgcggagatattggtacgcggatgtgaagtgagaggatgggatcgcgagtaggagattgtatacgcgtagggcgtgtatagtgacgtggagaggacgagagagggagagagagtggggattagaggaaagagtgagacggatagagagcgagtggtggatgtggagagaggtaggcgggggagagtacggatataggtagagtgaggtagaggagtggtatgtggttgtggatagacgagagggaagaggcgtagcgggggtagagggaggcggatcgaggaggcgtaattacgcggcgagagagagnggtgaggtgaggaggcgtgtgtaggaggtagtatgaaagagtgatttagaagttttggttggaaggatcggagtgggaggggcgtataagagtgcgggagtgtgaggggtagcggggggtgatcggtggggggtgtggggcggagttgagggggagcgcgaggtggagatggttagtggagggggggatgggagtgtggagggatacggagaagggggtgagattggtggggatgtggtga

SEQ ID NO: 1664 - DNA, 578 bp, Artificial Sequence
  chemically treated genomic DNA (Homo sapiens) CpG-island No: 1664
  unsure (242)
tcaccacatccccaccaatctcacccccttctccgtatccctccacactcccatccccccctccactaaccatctccacctcgcgctccccctcaactccgccccacaccccccaccgatcaccccccgctacccctcacactcccgcactcttatacgcccctcccactccgatccttccaaccaaaacttctaaatcactctttcatactacctcctacacacgcctcctcacctcaccnctctctctcgccgcgtaattacgcctcctcgatccgcctccctctacccccgctacgcctcttccctctcgtctatccacaaccacataccactcctctacctcactctacctatatccgtactctcccccgcctacctctctccacatccaccactcgctctctatccgtctcactctttcctctaatccccactctctctccctctctcgtcctctccacgtcactatacacgccctacgcgtatacaatctcctactcgcgatcccatcctctcacttcacatccgcgtaccaatatctccgcgctcgtcctctaatacttccgtcctctttc

SEQ ID NO: 1665 - DNA, 1750 bp, Artificial Sequence
  chemically treated genomic DNA (Homo sapiens) CpG-island No: 1665
ggacgcgtagtaagaaagcggaggatataatttttttttttttttagagtttcgggtttcgtagacgtcgaggtgggcgttcgtgttaggatcgcggggcgcgggtacgggttttttgggcgtttcgagggggttgttggtcggggtaagagtcgcggttttttcggaggatcgggtcgagttttaggagaagggggtagtaggcgtgcggcgtcgggagaagggggtcgggcggcggagatttttcgttcgtattttcgcggcgaggttttcgggtcgttttgtttaggggtcgagggagtcgggcgggaggtaggtgcggaggtcgcggttttagcgtttgggaggagttttcgggagggtgtcgcggttcggttggtgggtaggagcgagtcggggtcggcgcggttgtcgggggcggggaggaggcgcgggaggcggggcggaggcggcggcgtttttaggatttattcgtttagcgtcgggttttgtatttcgagtcgcggtcgttattcgtttcgtagttaatttgggtcgaaattttttcgggtttcgcgtttcggagtagggcgcgtagttcggcgagatcgacggcggtttttcgagttcgcgtttcgggtttagggttttttttcggatcggtcgtaggttgcgcgttttcgatcgttttcgttcgttgagttcgggggttttcggcgcggagtagggagtttttcgggcggtaggagggcgcgtagatttcgagcgtcggggttgtttggtcgggtttcggtggatatttcggaggttgttttagtatcggggggggggttcgagacgtttcggcgggatttcgggagtcgagtacgttcgttcgcgtcgttagtttcgcgtttcggtcgcggatgaagagtcggaggcggcggttcgagcggttcgcgcgttgagaggagcgggtagggtttgtttcgggtttcgtcggtcgttttttgcgttttcgcgggtcgcgtttcgttcgtcgatttagcgtagtcgggcgtaggaagagtcgggtcgggtcgagcggcgttcggagttcgcgggtttgatacgcggcgggatatgtaggtaagcgtcggttttcgttttcggggacggtttcgtcgtcgtcgtcgtcgtttcggttgtcgaatttcgcgcggttttttcgttttttcggtttcgcggtcgcgttgggtgttcgtcgggtgggtttgcgcgtcgcgggcgtcgggtcggggcgggtcggggttaggtcgggggaagggagtcgtttcgggtcggggcggcgaataaagttggggatcgtcgggttttcgcgcgggtaggtataggaggtttcggggtcggcggcgtaggcggggcggtttttgagtttcgcgtttattttttcgggtttggtcgggtttagtttcgatttttcgtcgaggtttgcgtcggtatcgaggattttatttgggttattttattcgtcggacgcgggtgggagtttgcgtttttgttcggatcgcgtaggtagagttcgagcgtcgttcggttttgtgttttttcggtcgtttcggcgttttacgttttcgtcgtgggagaggcgggacgagatttttttttttatttttttggagtttcggtggacgcgtagttcgcgttttagtcggagtcgaattttcgggtatttgttgtagatcgttgggagaggtagttcggtttgcggggagtttgttcggttttgttttatagggagggaaattgaggt

SEQ ID NO: 1666 - DNA, 1750 bp, Artificial Sequence
  chemically treated genomic DNA (Homo sapiens) CpG-island No: 1666
acctcaatttccctccctataaaacaaaaccgaacaaactccccgcaaaccgaactacctctcccaacgatctacaacaaatacccgaaaattcgactccgactaaaacgcgaactacgcgtccaccgaaactccaaaaaaataaaaaaaaaaatctcgtcccgcctctcccacgacgaaaacgtaaaacgccgaaacgaccgaaaaaacacaaaaccgaacgacgctcgaactctacctacgcgatccgaacaaaaacgcaaactcccacccgcgtccgacgaataaaataacccaaataaaatcctcgataccgacgcaaacctcgacgaaaaatcgaaactaaacccgaccaaacccgaaaaaataaacgcgaaactcaaaaaccgccccgcctacgccgccgaccccgaaacctcctatacctacccgcgcgaaaacccgacgatccccaactttattcgccgccccgacccgaaacgactcccttcccccgacctaaccccgacccgccccgacccgacgcccgcgacgcgcaaacccacccgacgaacacccaacgcgaccgcgaaaccgaaaaaacgaaaaaaccgcgcgaaattcgacaaccgaaacgacgacgacgacgacgaaaccgtccccgaaaacgaaaaccgacgcttacctacatatcccgccgcgtatcaaacccgcgaactccgaacgccgctcgacccgacccgactcttcctacgcccgactacgctaaatcgacgaacgaaacgcgacccgcgaaaacgcaaaaaacgaccgacgaaacccgaaacaaaccctacccgctcctctcaacgcgcgaaccgctcgaaccgccgcctccgactcttcatccgcgaccgaaacgcgaaactaacgacgcgaacgaacgtactcgactcccgaaatcccgccgaaacgtctcgaaccccccccccgatactaaaacaacctccgaaatatccaccgaaacccgaccaaacaaccccgacgctcgaaatctacgcgccctcctaccgcccgaaaaactccctactccgcgccgaaaacccccgaactcaacgaacgaaaacgatcgaaaacgcgcaacctacgaccgatccgaaaaaaaaccctaaacccgaaacgcgaactcgaaaaaccgccgtcgatctcgccgaactacgcgccctactccgaaacgcgaaacccgaaaaaatttcgacccaaattaactacgaaacgaataacgaccgcgactcgaaatacaaaacccgacgctaaacgaataaatcctaaaaacgccgccgcctccgccccgcctcccgcgcctcctccccgcccccgacaaccgcgccgaccccgactcgctcctacccaccaaccgaaccgcgacaccctcccgaaaactcctcccaaacgctaaaaccgcgacctccgcacctacctcccgcccgactccctcgacccctaaacaaaacgacccgaaaacctcgccgcgaaaatacgaacgaaaaatctccgccgcccgacccccttctcccgacgccgcacgcctactacccccttctcctaaaactcgacccgatcctccgaaaaaaccgcgactcttaccccgaccaacaaccccctcgaaacgcccaaaaaacccgtacccgcgccccgcgatcctaacacgaacgcccacctcgacgtctacgaaacccgaaactctaaaaaaaaaaaaaaattatatcctccgctttcttactacgcgtcc

SEQ ID NO: 1667 - DNA, 1750 bp, Artificial Sequence
  chemically treated genomic DNA (Homo sapiens) CpG-island No: 1667
attttagtttttttttttgtaaaatagggtcgggtaggtttttcgtaaatcgaattgttttttttagcggtttgtagtaaatattcgggggttcggtttcgattggagcgcgggttacgcgtttatcgaggttttaagaaagtgaaggaggaggtttcgtttcgttttttttacggcggggacgtggagcgtcggagcgatcggagaagtataaagtcgagcggcgttcgggttttatttgcgcggttcgggtagaaacgtaggtttttattcgcgttcggcgggtaaagtaatttagatggggttttcgatgtcggcgtagatttcggcggagggtcggggttgggttcgattagattcgggagagtgagcgcgaagtttagaggtcgtttcgtttgcgtcgtcgatttcggagttttttatgtttgttcgcgcgagggttcggcggtttttagttttgttcgtcgtttcggttcggggcgatttttttttttcgatttgatttcggttcgtttcgattcgacgttcgcggcgcgtagatttattcggcggatatttagcgcggtcgcggggtcgggaaggcggaggagtcgcgcgaggttcggtagtcggggcggcggcggcggcggcggggtcgttttcgggggcgagggtcggcgtttatttgtatgtttcgtcgcgtgttaggttcgcgggtttcgggcgtcgttcggttcggttcggttttttttgcgttcggttgcgttgggtcggcgggcgaggcgcggttcgcgggggcgtagggggcggtcggcggggttcggggtagattttgttcgttttttttagcgcgcgggtcgttcgggtcgtcgttttcgattttttattcgcggtcggggcgcggggttggcggcgcgggcgggcgtgttcggttttcggggtttcgtcgaggcgtttcgggtttttttttcgatgttggggtagttttcgaggtgtttatcggagttcggttaggtagtttcggcgttcggagtttgcgcgtttttttgtcgttcggagggttttttgtttcgcgtcggggattttcgaatttagcgggcggggacggtcgggggcgcgtagtttgcggtcgattcggagggaggttttgggttcgaggcgcgggttcgggaggtcgtcgtcgatttcgtcgggttgcgcgttttgtttcggagcgcgggattcggggaagtttcggtttaagttggttgcggggcgggtggcggtcgcggttcggagtgtagggttcggcgttgggcgagtggattttgggggcgtcgtcgttttcgtttcgtttttcgcgtttttttttcgttttcgatagtcgcgtcggtttcggttcgtttttgtttattagtcgggtcgcgatattttttcgagggttttttttaggcgttgggatcgcgattttcgtatttgtttttcgttcggttttttcggtttttaagtagagcggttcgggggtttcgtcgcgggggtgcggacggggagttttcgtcgttcggtttttttttttcggcgtcgtacgtttgttgttttttttttttggaattcgattcgatttttcgaagaaatcgcggtttttatttcggttagtagttttttcggggcgtttaaggagttcgtattcgcgtttcgcgattttggtacgagcgtttatttcggcgtttgcggggttcgaggttttgagaggggaagagagttatgtttttcgtttttttgttacgcgttt

SEQ ID NO: 1668 - DNA, 1750 bp, Artificial Sequence
  chemically treated genomic DNA (Homo sapiens) CpG-island No: 1668
aaacgcgtaacaaaaaaacgaaaaacataactctcttcccctctcaaaacctcgaaccccgcaaacgccgaaataaacgctcgtaccaaaatcgcgaaacgcgaatacgaactccttaaacgccccgaaaaaactactaaccgaaataaaaaccgcgatttcttcgaaaaatcgaatcgaattccaaaaaaaaaaaacaacaaacgtacgacgccgaaaaaaaaaaaccgaacgacgaaaactccccgtccgcacccccgcgacgaaacccccgaaccgctctacttaaaaaccgaaaaaaccgaacgaaaaacaaatacgaaaatcgcgatcccaacgcctaaaaaaaaccctcgaaaaaatatcgcgacccgactaataaacaaaaacgaaccgaaaccgacgcgactatcgaaaacgaaaaaaaaacgcgaaaaacgaaacgaaaacgacgacgcccccaaaatccactcgcccaacgccgaaccctacactccgaaccgcgaccgccacccgccccgcaaccaacttaaaccgaaacttccccgaatcccgcgctccgaaacaaaacgcgcaacccgacgaaatcgacgacgacctcccgaacccgcgcctcgaacccaaaacctccctccgaatcgaccgcaaactacgcgcccccgaccgtccccgcccgctaaattcgaaaatccccgacgcgaaacaaaaaaccctccgaacgacaaaaaaacgcgcaaactccgaacgccgaaactacctaaccgaactccgataaacacctcgaaaactaccccaacatcgaaaaaaaaacccgaaacgcctcgacgaaaccccgaaaaccgaacacgcccgcccgcgccgccaaccccgcgccccgaccgcgaataaaaaatcgaaaacgacgacccgaacgacccgcgcgctaaaaaaaacgaacaaaatctaccccgaaccccgccgaccgccccctacgcccccgcgaaccgcgcctcgcccgccgacccaacgcaaccgaacgcaaaaaaaaccgaaccgaaccgaacgacgcccgaaacccgcgaacctaacacgcgacgaaacatacaaataaacgccgaccctcgcccccgaaaacgaccccgccgccgccgccgccgccccgactaccgaacctcgcgcgactcctccgccttcccgaccccgcgaccgcgctaaatatccgccgaataaatctacgcgccgcgaacgtcgaatcgaaacgaaccgaaatcaaatcgaaaaaaaaaaatcgccccgaaccgaaacgacgaacaaaactaaaaaccgccgaaccctcgcgcgaacaaacataaaaaactccgaaatcgacgacgcaaacgaaacgacctctaaacttcgcgctcactctcccgaatctaatcgaacccaaccccgaccctccgccgaaatctacgccgacatcgaaaaccccatctaaattactttacccgccgaacgcgaataaaaacctacgtttctacccgaaccgcgcaaataaaacccgaacgccgctcgactttatacttctccgatcgctccgacgctccacgtccccgccgtaaaaaaaacgaaacgaaacctcctccttcactttcttaaaacctcgataaacgcgtaacccgcgctccaatcgaaaccgaacccccgaatatttactacaaaccgctaaaaaaaacaattcgatttacgaaaaacctacccgaccctattttacaaaaaaaaaaactaaaat

SEQ ID NO: 1669 - DNA, 612 bp, Artificial Sequence
  chemically treated genomic DNA (Homo sapiens) CpG-island No: 1669
ggcgcgcgttggtcgagtgtttgtgcggcggttcgtttaggtcggcgttgatgttttggttcgttttggttcgtagtagttgttcgtttttcgggtggtgtcgtacgaagttggagaggtcgtagaggcgggtttcgcggcggatttagtacgcgtcggtcgttaggcgtcgttggatttcggagggcgagaaggaggcggcggggggcggagcgggggttatggtcggagatcgtagtttttagcgcgtagttcggcgtttgttttgttgttattttgagcgtttttaatatttcgggagtttcgcggtcgtttcgggcgggtcgttatcgtatttgtttatttgtatatcgcgtttttattggtcggtcgggagtttcggtagagtcgcgaggggcgggttcggcgtcgggagttgcgcgttaggtggtcgcggatagggagtgtcgcgttcgttaggtgtgtttcgcgcgggaggagggtgggcggatataggcggagcgagttttttcgtcgcgggtggttgtttgggcggatattttcggtggtttgatcgttgttggaataattttaattgtttttacggaggagttggtcgtatgggattttttg

SEQ ID NO: 1670 - DNA, 612 bp, Artificial Sequence
  chemically treated genomic DNA (Homo sapiens) CpG-island No: 1670
caaaaaatcccatacgaccaactcctccgtaaaaacaattaaaattattccaacaacgatcaaaccaccgaaaatatccgcccaaacaaccacccgcgacgaaaaaactcgctccgcctatatccgcccaccctcctcccgcgcgaaacacacctaacgaacgcgacactccctatccgcgaccacctaacgcgcaactcccgacgccgaacccgcccctcgcgactctaccgaaactcccgaccgaccaataaaaacgcgatatacaaataaacaaatacgataacgacccgcccgaaacgaccgcgaaactcccgaaatattaaaaacgctcaaaataacaacaaaacaaacgccgaactacgcgctaaaaactacgatctccgaccataacccccgctccgccccccgccgcctccttctcgccctccgaaatccaacgacgcctaacgaccgacgcgtactaaatccgccgcgaaacccgcctctacgacctctccaacttcgtacgacaccacccgaaaaacgaacaactactacgaaccaaaacgaaccaaaacatcaacgccgacctaaacgaaccgccgcacaaacactcgaccaacgcgcgcc

SEQ ID NO: 1671 - DNA, 612 bp, Artificial Sequence
  chemically treated genomic DNA (Homo sapiens) CpG-island No: 1671
tagagggttttatgcggttagttttttcgtggaagtagttgaagttattttagtagcgattaggttatcgaggatgttcgtttagataattattcgcgacggggagattcgtttcgtttgtgttcgtttatttttttttcgcgcgggatatatttggcgggcgcggtattttttgttcgcggttatttggcgcgtagttttcggcgtcgggttcgtttttcgcggttttgtcggggttttcggtcggttaatgggagcgcggtatgtaaatgagtaggtgcggtggcggttcgttcggaacggtcgcggggttttcgggatgttagaggcgtttagggtggtagtagagtagacgtcgggttgcgcgttgggagttgcggttttcggttatggttttcgtttcgtttttcgtcgtttttttttcgtttttcgaggtttagcggcgtttggcggtcggcgcgtgttgggttcgtcgcggggttcgtttttacgatttttttagtttcgtgcggtattattcggggggcgagtagttgttgcgggttagggcgggttaggatattagcgtcgatttggacgggtcgtcgtataggtattcggttaacgcgcgtt

SEQ ID NO: 1672 - DNA, 612 bp, Artificial Sequence
  chemically treated genomic DNA (Homo sapiens) CpG-island No: 1672
aacgcgcgttaaccgaatacctatacgacgacccgtccaaatcgacgctaatatcctaacccgccctaacccgcaacaactactcgccccccgaataataccgcacgaaactaaaaaaatcgtaaaaacgaaccccgcgacgaacccaacacgcgccgaccgccaaacgccgctaaacctcgaaaaacgaaaaaaaaacgacgaaaaacgaaacgaaaaccataaccgaaaaccgcaactcccaacgcgcaacccgacgtctactctactaccaccctaaacgcctctaacatcccgaaaaccccgcgaccgttccgaacgaaccgccaccgcacctactcatttacataccgcgctcccattaaccgaccgaaaaccccgacaaaaccgcgaaaaacgaacccgacgccgaaaactacgcgccaaataaccgcgaacaaaaaataccgcgcccgccaaatatatcccgcgcgaaaaaaaaataaacgaacacaaacgaaacgaatctccccgtcgcgaataattatctaaacgaacatcctcgataacctaatcgctactaaaataacttcaactacttccacgaaaaaactaaccgcataaaaccctcta

SEQ ID NO: 1673 - DNA, 1085 bp, Artificial Sequence
  chemically treated genomic DNA (Homo sapiens) CpG-island No: 1673
gggtcgcggtgttcgttaggtcgcgtagggtgagagttagagcgggcgcgggcgggcggtatttcgttcgggattggaagggagggcgtagcggggttacggcggggggatttcgttagtcgggcggttcgcgagttttttgagtgtattagttttcgttgtcgcgggatcgcggtcgggacggagttttttgcgcgtttttcgggggtcggtagcggttaggaggcggcgcggggttcggtcgttcggttttgtagtttcgcgtattcggtagcggcggcggtgtagtttcgggcgttcggatagttttcgagtttatggcggggagcgacgtggatagcgagggtttcgtacggaggggcggcgcggcgcggcgttcgggggtttttggcgggttaggaagcgaggcggtagtcggttgttcggagtcgttgtttattgttgaagcgtcggttgagagcgttacgttgttcgtttggatgcgtttttatttttacgggatgtacgggattattttggacgtgttggtgttttcggttcggcgtttcgttcgtagttcggatttgcggatgttaggttttttttcgttttatcgttgtttgttgtattcgtttatttatttcgttttggagaaggtgtatttgtagtagcggcgttgttttaacgttttcgtttttaatttttttttttatttttcggtttacgtggggttgtagattttagcgggttaggcgttattatttagtttgggcggcggggcgggggtcgcggtggcgttaggggcgttggatttggcgttgtagtacgtgttggcgttttattattgttaagtgtttttgaagcgttttttgcgtttgcggtacgggcgatagaggcggcggtagtagtaatagtagtagtagtagtagtagtagtagcggaggggcgcgtttttcgtttttttcggcgttcgggtttttattgcggtcggagttcggcggcgacgatttcgtggttttaggggcgtcgggggagtttttagttaggggttgttcgatttatttcgttttttttttttcggaatgtacggttttttggatgagatt

SEQ ID NO: 1674 - DNA, 1085 bp, Artificial Sequence
  chemically treated genomic DNA (Homo sapiens) CpG-island No: 1674
aatctcatccaaaaaaccgtacattccgaaaaaaaaaaaacgaaataaatcgaacaacccctaactaaaaactcccccgacgcccctaaaaccacgaaatcgtcgccgccgaactccgaccgcaataaaaacccgaacgccgaaaaaaacgaaaaacgcgcccctccgctactactactactactactactactattactactaccgccgcctctatcgcccgtaccgcaaacgcaaaaaacgcttcaaaaacacttaacaataataaaacgccaacacgtactacaacgccaaatccaacgcccctaacgccaccgcgacccccgccccgccgcccaaactaaataataacgcctaacccgctaaaatctacaaccccacgtaaaccgaaaaataaaaaaaaaaattaaaaacgaaaacgttaaaacaacgccgctactacaaatacaccttctccaaaacgaaataaataaacgaatacaacaaacaacgataaaacgaaaaaaaacctaacatccgcaaatccgaactacgaacgaaacgccgaaccgaaaacaccaacacgtccaaaataatcccgtacatcccgtaaaaataaaaacgcatccaaacgaacaacgtaacgctctcaaccgacgcttcaacaataaacaacgactccgaacaaccgactaccgcctcgcttcctaacccgccaaaaacccccgaacgccgcgccgcgccgcccctccgtacgaaaccctcgctatccacgtcgctccccgccataaactcgaaaactatccgaacgcccgaaactacaccgccgccgctaccgaatacgcgaaactacaaaaccgaacgaccgaaccccgcgccgcctcctaaccgctaccgacccccgaaaaacgcgcaaaaaactccgtcccgaccgcgatcccgcgacaacgaaaactaatacactcaaaaaactcgcgaaccgcccgactaacgaaatccccccgccgtaaccccgctacgccctcccttccaatcccgaacgaaataccgcccgcccgcgcccgctctaactctcaccctacgcgacctaacgaacaccgcgaccc

SEQ ID NO: 1675 - DNA, 1085 bp, Artificial Sequence
  chemically treated genomic DNA (Homo sapiens) CpG-island No: 1675
gattttatttagaaagtcgtgtatttcgaagaaaagaaagcggggtaggtcgggtagtttttggttgggggttttttcggcgtttttggggttacggggtcgtcgtcgtcgggtttcggtcgtagtagggattcgggcgtcgggagggacggggagcgcgttttttcgttgttgttgttgttgttgttgttgttgttgttgttgtcgtcgtttttgtcgttcgtatcgtaagcgtaggaagcgttttaggaatatttggtagtggtagagcgttagtacgtattgtagcgttaggtttagcgtttttggcgttatcgcgattttcgtttcgtcgtttaggttgagtagtagcgtttggttcgttagggtttgtagttttacgtgggtcgaggggtagaggaggaaattgaagacgaaggcgttgggatagcgtcgttgttgtaggtatattttttttagggcgaaatgggtgagcgagtgtagtaggtagcggtagggcgaggagaagtttagtattcgtaggttcgggttgcgggcgaagcgtcgggtcgaggatattagtacgtttagggtgatttcgtgtatttcgtagaagtagaggcgtatttaggcgggtagcgtggcgtttttagtcggcgttttagtagtggatagcggtttcgggtagtcggttgtcgtttcgttttttggttcgttaggggttttcggacgtcgcgtcgcgtcgttttttcgtgcggggttttcgttgtttacgtcgtttttcgttatgggttcggaggttgttcgaacgttcgaggttgtatcgtcgtcgttgtcgggtgcgcggagttgtagggtcgagcggtcgagtttcgcgtcgttttttggtcgttgtcggttttcggggggcgcgtagggagtttcgtttcggtcgcggtttcgcggtagcgggggttgatgtatttaggggattcgcgggtcgttcggttagcggaattttttcgtcgtggtttcgttgcgtttttttttttagtttcgggcgaggtgtcgttcgttcgcgttcgttttagtttttattttgcgcggtttaacgggtatcgcggttt

SEQ ID NO: 1676 - DNA, 1085 bp, Artificial Sequence
  chemically treated genomic DNA (Homo sapiens) CpG-island No: 1676
aaaccgcgatacccgttaaaccgcgcaaaataaaaactaaaacgaacgcgaacgaacgacacctcgcccgaaactaaaaaaaaaaacgcaacgaaaccacgacgaaaaaattccgctaaccgaacgacccgcgaatcccctaaatacatcaacccccgctaccgcgaaaccgcgaccgaaacgaaactccctacgcgccccccgaaaaccgacaacgaccaaaaaacgacgcgaaactcgaccgctcgaccctacaactccgcgcacccgacaacgacgacgatacaacctcgaacgttcgaacaacctccgaacccataacgaaaaacgacgtaaacaacgaaaaccccgcacgaaaaaacgacgcgacgcgacgtccgaaaacccctaacgaaccaaaaaacgaaacgacaaccgactacccgaaaccgctatccactactaaaacgccgactaaaaacgccacgctacccgcctaaatacgcctctacttctacgaaatacacgaaatcaccctaaacgtactaatatcctcgacccgacgcttcgcccgcaacccgaacctacgaatactaaacttctcctcgccctaccgctacctactacactcgctcacccatttcgccctaaaaaaaatatacctacaacaacgacgctatcccaacgccttcgtcttcaatttcctcctctacccctcgacccacgtaaaactacaaaccctaacgaaccaaacgctactactcaacctaaacgacgaaacgaaaatcgcgataacgccaaaaacgctaaacctaacgctacaatacgtactaacgctctaccactaccaaatattcctaaaacgcttcctacgcttacgatacgaacgacaaaaacgacgacaacaacaacaacaacaacaacaacaacaacaacaacgaaaaaacgcgctccccgtccctcccgacgcccgaatccctactacgaccgaaacccgacgacgacgaccccgtaaccccaaaaacgccgaaaaaacccccaaccaaaaactacccgacctaccccgctttcttttcttcgaaatacacgactttctaaataaaatc

SEQ ID NO: 1677 - DNA, 742 bp, Artificial Sequence
  chemically treated genomic DNA (Homo sapiens) CpG-island No: 1677
gcgtattttttagcgcggggcgcgggcggtggcgcgtattcggtttcgaagcgttgcgtttttttggttgttggattcgggtcgggcggtcgcgttgggttgtacggtttttcgcggcgtatttaggttttgcgttgcgttcggggtttttcggatcgtcgcggttcgttcgttcgttttggtttcgcggtcgtcggcgggacggggcgtttagagtcgcgcggggagcgtcggtaattggtcgttcgtgggcgatatttgtatagcgtagtttcgtttcgttcggttcgtttagttttattttcggggcgggattcgtttagttatcgtttcgttttcgttttatttgttcgtgggtcgggtttagggtttttaggcggtgggtatttcgcgtcgggggagattagtttgtatttttcgttttcgttttcgtttcgcgggcggcgttttcgtttcgttttggttttgtttttttgtgaatatatcgtatatatcgcgtttggtgtttattcgggtatttaattttttggcgagaagggttgtagcgttagggagtaacgagtttgcgtttatttgagtattttttttcgcgttttttatttttattcgtcgtcggtcgtgtttttggtttcgtgcgtgggtttcgcggcgtaggatttttgattgttcgggttgtttagtaggtggcggtgtagtttttgggacggttggtatcgtcggattttttcgcgggtttagtttt

SEQ ID NO: 1678 - DNA, 742 bp, Artificial Sequence
  chemically treated genomic DNA (Homo sapiens) CpG-island No: 1678
aaaactaaacccgcgaaaaaatccgacgataccaaccgtcccaaaaactacaccgccacctactaaacaacccgaacaatcaaaaatcctacgccgcgaaacccacgcacgaaaccaaaaacacgaccgacgacgaataaaaataaaaaacgcgaaaaaaaatactcaaataaacgcaaactcgttactccctaacgctacaacccttctcgccaaaaaattaaatacccgaataaacaccaaacgcgatatatacgatatattcacaaaaaaacaaaaccaaaacgaaacgaaaacgccgcccgcgaaacgaaaacgaaaacgaaaaatacaaactaatctcccccgacgcgaaatacccaccgcctaaaaaccctaaacccgacccacgaacaaataaaacgaaaacgaaacgataactaaacgaatcccgccccgaaaataaaactaaacgaaccgaacgaaacgaaactacgctatacaaatatcgcccacgaacgaccaattaccgacgctccccgcgcgactctaaacgccccgtcccgccgacgaccgcgaaaccaaaacgaacgaacgaaccgcgacgatccgaaaaaccccgaacgcaacgcaaaacctaaatacgccgcgaaaaaccgtacaacccaacgcgaccgcccgacccgaatccaacaaccaaaaaaacgcaacgcttcgaaaccgaatacgcgccaccgcccgcgccccgcgctaaaaaatacgc

SEQ ID NO: 1679 - DNA, 742 bp, Artificial Sequence
  chemically treated genomic DNA (Homo sapiens) CpG-island No: 1679
gaggttgagttcgcgggaaggttcggcggtgttagtcgttttaggggttgtatcgttatttgttgagtagttcgggtagttaggggttttgcgtcgcggggtttacgtacgggattaggggtacggtcggcggcgagtgggaatgagggacgcggaagggggtgtttaggtgagcgtaggttcgttgttttttggcgttgtagtttttttcgttagggagttgaatgttcgggtaaatattaggcgcgatgtgtgcggtgtatttatagagagataaagttagggcggggcgggggcgtcgttcgcgaagcgggggcgggggcgaggggtgtagattagtttttttcggcgcggggtgtttatcgtttgggaattttgagttcggtttacggataggtggagcgggggcggggcggtggttgggcgggtttcgtttcgggggtggggttgggcgggtcgggcggggcggggttgcgttatgtaaatgtcgtttacgggcggttaattgtcggcgtttttcgcgcggttttgagcgtttcgtttcgtcggcggtcgcgagattagagcgagcgaacgaatcgcggcggttcggagagtttcgagcgtagcgtaggatttgggtacgtcgcgaggaatcgtgtagtttagcgcggtcgttcggttcgggtttagtagttaggagagcgtagcgtttcgaagtcgagtgcgcgttatcgttcgcgtttcgcgttggggaatgcgt

SEQ ID NO: 1680 - DNA, 742 bp, Artificial Sequence
  chemically treated genomic DNA (Homo sapiens) CpG-island No: 1680
acgcattccccaacgcgaaacgcgaacgataacgcgcactcgacttcgaaacgctacgctctcctaactactaaacccgaaccgaacgaccgcgctaaactacacgattcctcgcgacgtacccaaatcctacgctacgctcgaaactctccgaaccgccgcgattcgttcgctcgctctaatctcgcgaccgccgacgaaacgaaacgctcaaaaccgcgcgaaaaacgccgacaattaaccgcccgtaaacgacatttacataacgcaaccccgccccgcccgacccgcccaaccccacccccgaaacgaaacccgcccaaccaccgccccgcccccgctccacctatccgtaaaccgaactcaaaattcccaaacgataaacaccccgcgccgaaaaaaactaatctacacccctcgcccccgcccccgcttcgcgaacgacgcccccgccccgccctaactttatctctctataaatacaccgcacacatcgcgcctaatatttacccgaacattcaactccctaacgaaaaaaactacaacgccaaaaaacaacgaacctacgctcacctaaacacccccttccgcgtccctcattcccactcgccgccgaccgtacccctaatcccgtacgtaaaccccgcgacgcaaaacccctaactacccgaactactcaacaaataacgatacaacccctaaaacgactaacaccgccgaaccttcccgcgaactcaacctc

SEQ ID NO: 1681 - DNA, 535 bp, Artificial Sequence
  chemically treated genomic DNA (Homo sapiens) CpG-island No: 1681
gtttttcgcgaaattcgtgcgttttagtttagggttttcgggatcggtgttcgttagtgggtataggacgtcgggtgttcgaagggttgtttggagatgtaattgattttggcgggtattagaatgacgagtggtagtagtaggagcggggtgacgaataagattacgaaggatttgaatttggagatatagtttagcgtcgaggttatcgcgcgggagggagattggcgggcgagacgagtgaggggtagttagaggcgtcgcgggtttaagaaggggttatagttttcggggattggggagggggcggtgataatttcgtttcgtacgggggcgttttttcgcggttttggggcggggttatttttcggggtttgtgggacgcgtttgtttttaattttgttattcggcggcggtgggaggcgtttttggattttaacgtttcgggttagttttttaggggtagtttgggttttagtatttcgcgttgtttaagttttttttgcgttgtcgaggtagaggtgcgtttcggggt

SEQ ID NO: 1682 - DNA, 535 bp, Artificial Sequence
  chemically treated genomic DNA (Homo sapiens) CpG-island No: 1682
accccgaaacgcacctctacctcgacaacgcaaaaaaaacttaaacaacgcgaaatactaaaacccaaactacccctaaaaaactaacccgaaacgttaaaatccaaaaacgcctcccaccgccgccgaataacaaaattaaaaacaaacgcgtcccacaaaccccgaaaaataaccccgccccaaaaccgcgaaaaaacgcccccgtacgaaacgaaattatcaccgccccctccccaatccccgaaaactataaccccttcttaaacccgcgacgcctctaactacccctcactcgtctcgcccgccaatctccctcccgcgcgataacctcgacgctaaactatatctccaaattcaaatccttcgtaatcttattcgtcaccccgctcctactactaccactcgtcattctaatacccgccaaaatcaattacatctccaaacaacccttcgaacacccgacgtcctatacccactaacgaacaccgatcccgaaaaccctaaactaaaacgcacgaatttcgcgaaaaac

SEQ ID NO: 1683 - DNA, 535 bp, Artificial Sequence
  chemically treated genomic DNA (Homo sapiens) CpG-island No: 1683
gtttcgggacgtatttttgtttcggtagcgtaggagaggtttggatagcgcgagatgttagggtttaggttgtttttagagggttggttcgaagcgttggagtttaaagacgttttttatcgtcgtcgggtggtagaattgggggtaggcgcgttttatagatttcgaggggtggtttcgttttagggtcgcggggaggcgttttcgtgcggggcggagttgttatcgttttttttttaattttcggggattgtggtttttttttaagttcgcggcgtttttagttgttttttattcgtttcgttcgttagtttttttttcgcgcgatggtttcggcgttgagttatgtttttaagtttaagtttttcgtgattttgttcgttatttcgtttttgttgttgttattcgttattttgatgttcgttaaggttagttgtatttttaggtagtttttcggatattcggcgttttgtgtttattaacgggtatcgatttcgggagttttgagttggagcgtacggatttcgcggggagt

SEQ ID NO: 1684 - DNA, 535 bp, Artificial Sequence
  chemically treated genomic DNA (Homo sapiens) CpG-island No: 1684
actccccgcgaaatccgtacgctccaactcaaaactcccgaaatcgatacccgttaataaacacaaaacgccgaatatccgaaaaactacctaaaaatacaactaaccttaacgaacatcaaaataacgaataacaacaacaaaaacgaaataacgaacaaaatcacgaaaaacttaaacttaaaaacataactcaacgccgaaaccatcgcgcgaaaaaaaaactaacgaacgaaacgaataaaaaacaactaaaaacgccgcgaacttaaaaaaaaaccacaatccccgaaaattaaaaaaaaaacgataacaactccgccccgcacgaaaacgcctccccgcgaccctaaaacgaaaccacccctcgaaatctataaaacgcgcctacccccaattctaccacccgacgacgataaaaaacgtctttaaactccaacgcttcgaaccaaccctctaaaaacaacctaaaccctaacatctcgcgctatccaaacctctcctacgctaccgaaacaaaaatacgtcccgaaac

SEQ ID NO: 1685 - DNA, 610 bp, Artificial Sequence
  chemically treated genomic DNA (Homo sapiens) CpG-island No: 1685
ttcgcgggttacgggtgaacgtgaatcgagttcgtagtttttaattttattttttcggcggcggcgacgtgtagtgtattattttgggtattagggggcgtgttcgtatacgttcgggtcgttttggtttagtttattttagtggtcgcggaaggtgacgtggatacggaagtggtcgtcgtcgcggtatcggtgggagttaggcgcgaggttcggagtgcggttagcgggcggaggcggtttcgtatcggcggcgacggagggtttaggcgtcgtcgtttgggtggggggtcgttgaattgataagcgatattttagttttttttattcgtcggaatttcggagtcggggttcgtttagtcggcgttattatgattaaggtcggtagtaagggcgggaattttcgcgataagttggacggtaacgaattggatttgagttttagcgatttgaatgaggtttcggtgaaggagttggttagtatcgtttcgcgaggtttaggcgtttattttcgtcgggcgttggtttttacgtgggttatttattttttttttttttaaaagtattagtttttttttttttaaaaagaagcggggtggtgggattaagt

SEQ ID NO: 1686 - DNA, 610 bp, Artificial Sequence
  chemically treated genomic DNA (Homo sapiens) CpG-island No: 1686
acttaatcccaccaccccgcttctttttaaaaaaaaaaaaactaatacttttaaaaaaaaaaaaaataaataacccacgtaaaaaccaacgcccgacgaaaataaacgcctaaacctcgcgaaacgatactaaccaactccttcaccgaaacctcattcaaatcgctaaaactcaaatccaattcgttaccgtccaacttatcgcgaaaattcccgcccttactaccgaccttaatcataataacgccgactaaacgaaccccgactccgaaattccgacgaataaaaaaaactaaaatatcgcttatcaattcaacgaccccccacccaaacgacgacgcctaaaccctccgtcgccgccgatacgaaaccgcctccgcccgctaaccgcactccgaacctcgcgcctaactcccaccgataccgcgacgacgaccacttccgtatccacgtcaccttccgcgaccactaaaataaactaaaccaaaacgacccgaacgtatacgaacacgccccctaatacccaaaataatacactacacgtcgccgccgccgaaaaaataaaattaaaaactacgaactcgattcacgttcacccgtaacccgcgaa

SEQ ID NO: 1687 - DNA, 610 bp, Artificial Sequence
  chemically treated genomic DNA (Homo sapiens) CpG-island No: 1687
atttagttttattatttcgtttttttttaaagaaaaggaaattgatgtttttagagaagaggaaagtaagtggtttacgtaggggttagcgttcggcgaaggtgggcgtttgggtttcgcgggacgatattgattagtttttttatcgggattttatttaggtcgttgaggtttaggtttagttcgttgtcgtttagtttgtcgcggaggttttcgtttttgttatcggttttggttatggtaacgtcggttgagcgggtttcggtttcggggtttcggcgggtgaaaggagttgaaatgtcgtttgttagtttagcggttttttatttaaacgacgacgtttgagtttttcgtcgtcgtcgatgcgagatcgttttcgttcgttggtcgtatttcgagtttcgcgtttagtttttatcggtgtcgcgacgacgattattttcgtgtttacgttatttttcgcgattattgagatgggttgggttagagcggttcgagcgtgtgcgggtacgttttttggtgtttagggtgatgtattgtacgtcgtcgtcgtcggaggggtggggttggaggttgcgagttcggtttacgtttattcgtggttcgcggg

SEQ ID NO: 1688 - DNA, 610 bp, Artificial Sequence
  chemically treated genomic DNA (Homo sapiens) CpG-island No: 1688
cccgcgaaccacgaataaacgtaaaccgaactcgcaacctccaaccccacccctccgacgacgacgacgtacaatacatcaccctaaacaccaaaaaacgtacccgcacacgctcgaaccgctctaacccaacccatctcaataatcgcgaaaaataacgtaaacacgaaaataatcgtcgtcgcgacaccgataaaaactaaacgcgaaactcgaaatacgaccaacgaacgaaaacgatctcgcatcgacgacgacgaaaaactcaaacgtcgtcgtttaaataaaaaaccgctaaactaacaaacgacatttcaactcctttcacccgccgaaaccccgaaaccgaaacccgctcaaccgacgttaccataaccaaaaccgataacaaaaacgaaaacctccgcgacaaactaaacgacaacgaactaaacctaaacctcaacgacctaaataaaatcccgataaaaaaactaatcaatatcgtcccgcgaaacccaaacgcccaccttcgccgaacgctaacccctacgtaaaccacttactttcctcttctctaaaaacatcaatttccttttctttaaaaaaaaacgaaataataaaactaaat

SEQ ID NO: 1689 - DNA, 833 bp, Artificial Sequence
  chemically treated genomic DNA (Homo sapiens) CpG-island No: 1689
tatatattttttttcgattttgaattttttaggcgttagtttttcggtttatttttgttcgcggggaggtataggacgttgttttttcgtttcgtttttttgatgggtaaattgttatttattcgcgcgtagcgggacgagtacgggttttcgaagagcgtttagatgcgcggttgttagcggcgttaaaagtcgttaggtcggttattcggggagttattgagcgttaggcgtttggttatttttagttcgttttcgtcgtcgttcgagtcgttagggtcgtcggcgttcgcgtcgtcggcgttgttgtttagaggagcgtcgtcgaagttgtttagagttttttcggcgtcgcggtgttggcggtacgttatttagtagtagggttttacgtcggtttcgtcgatgttttagaaggttagttttttttcgtagagcggttcgtatacgtcggttgggtagtgtagtttgttcgtgcggtagtagtttaggatgtgcgcgaagacgtcggggtggcggtcgaagaagaattcgttagtacgcgggttatagtcgaagtggttgtgggcgtcgggtttcgttagttaggcgagtcgcgtgtcgggtagcgtgcgtagggtcgagcggtacgtttggtggcgcgtgtcgtttacgttgattacgatgcgttcgttttcgtttttttggtttatcgcggcgtttttttaggtatggcgcggtttagcgatatttatgggagcggtcgttagggggagttggcgtcggggaggggggcgcgcgttttttttttttttttttttagtcgtcggggggaatagaggtttgcggttttg

SEQ ID NO: 1690 - DNA, 833 bp, Artificial Sequence
  chemically treated genomic DNA (Homo sapiens) CpG-island No: 1690
caaaaccgcaaacctctattccccccgacgactaaaaaaaaaaaaaaaaaaaacgcgcgcccccctccccgacgccaactccccctaacgaccgctcccataaatatcgctaaaccgcgccatacctaaaaaaacgccgcgataaaccaaaaaaacgaaaacgaacgcatcgtaatcaacgtaaacgacacgcgccaccaaacgtaccgctcgaccctacgcacgctacccgacacgcgactcgcctaactaacgaaacccgacgcccacaaccacttcgactataacccgcgtactaacgaattcttcttcgaccgccaccccgacgtcttcgcgcacatcctaaactactaccgcacgaacaaactacactacccaaccgacgtatacgaaccgctctacgaaaaaaaactaaccttctaaaacatcgacgaaaccgacgtaaaaccctactactaaataacgtaccgccaacaccgcgacgccgaaaaaactctaaacaacttcgacgacgctcctctaaacaacaacgccgacgacgcgaacgccgacgaccctaacgactcgaacgacgacgaaaacgaactaaaaataaccaaacgcctaacgctcaataactccccgaataaccgacctaacgacttttaacgccgctaacaaccgcgcatctaaacgctcttcgaaaacccgtactcgtcccgctacgcgcgaataaataacaatttacccatcaaaaaaacgaaacgaaaaaacaacgtcctatacctccccgcgaacaaaaataaaccgaaaaactaacgcctaaaaaattcaaaatcgaaaaaaaatatata

SEQ ID NO: 1691 - DNA, 833 bp, Artificial Sequence
  chemically treated genomic DNA (Homo sapiens) CpG-island No: 1691
tagagtcgtaggtttttgtttttttcgacggttggggggaggggggaagagggcgcgcgttttttttttcggcgttaattttttttggcggtcgtttttatgggtgtcgttgggtcgcgttatgtttaagggggcgtcgcgatgggttaaggggacgagagcgagcgtatcgtgattaacgtgggcggtacgcgttattagacgtatcgttcgattttgcgtacgttgttcggtacgcggttcgtttggttggcggagttcgacgtttatagttatttcgattatgattcgcgtgttgacgagttttttttcgatcgttatttcggcgttttcgcgtatattttgaattattatcgtacgggtaagttgtattgtttagtcgacgtgtgcgggtcgttttacgaggaggagttggttttttggggtatcgacgagatcgacgtggagttttgttgttggatgacgtatcgttagtatcgcgacgtcgaggaggttttggatagtttcggcggcgtttttttggataatagcgtcgacgacgcggacgtcgacggttttggcgattcgggcgacggcgaggacgagttggagatgattaagcgtttggcgtttagtgatttttcggatggtcggtttggcggtttttggcgtcgttggtagtcgcgtatttgggcgtttttcgaggattcgtattcgtttcgttacgcgcgggtaagtgataatttatttattagaagagcggggcgggaaggtagcgttttgtgttttttcgcgggtaggggtggatcggagaattggcgtttagggagtttagaatcgaaagggggtgtgtg

SEQ ID NO: 1692 - DNA, 833 bp, Artificial Sequence
  chemically treated genomic DNA (Homo sapiens) CpG-island No: 1692
cacacaccccctttcgattctaaactccctaaacgccaattctccgatccacccctacccgcgaaaaaacacaaaacgctaccttcccgccccgctcttctaataaataaattatcacttacccgcgcgtaacgaaacgaatacgaatcctcgaaaaacgcccaaatacgcgactaccaacgacgccaaaaaccgccaaaccgaccatccgaaaaatcactaaacgccaaacgcttaatcatctccaactcgtcctcgccgtcgcccgaatcgccaaaaccgtcgacgtccgcgtcgtcgacgctattatccaaaaaaacgccgccgaaactatccaaaacctcctcgacgtcgcgatactaacgatacgtcatccaacaacaaaactccacgtcgatctcgtcgataccccaaaaaaccaactcctcctcgtaaaacgacccgcacacgtcgactaaacaatacaacttacccgtacgataataattcaaaatatacgcgaaaacgccgaaataacgatcgaaaaaaaactcgtcaacacgcgaatcataatcgaaataactataaacgtcgaactccgccaaccaaacgaaccgcgtaccgaacaacgtacgcaaaatcgaacgatacgtctaataacgcgtaccgcccacgttaatcacgatacgctcgctctcgtccccttaacccatcgcgacgcccccttaaacataacgcgacccaacgacacccataaaaacgaccgccaaaaaaaattaacgccgaaaaaaaaaacgcgcgccctcttcccccctccccccaaccgtcgaaaaaaacaaaaacctacgactcta

SEQ ID NO: 1693 - DNA, 768 bp, Artificial Sequence
  chemically treated genomic DNA (Homo sapiens) CpG-island No: 1693
tattcggggtgttgttcgtgcggttaacgtcgagcgttgtttttcgtgagttcgggttcgagttggggtttcgttgggttgcgttcggatttgggttttcgcggcggtgttgaagggatagttttcggcggtcgcggagttgtacggggttaggcgggggtttttttggttgggtttgatttgcggggtcggcgggtattggtttcggtgtttttgcgtttcgtatttcgtttttcgtttcgggtaggcggtgggcgttgtcggtcgagacgggggttgcggaggtcgggcggggaggcgggggtggcgggttcgggcgcggcgaggtgaggttagcgaggtcggtgaggcgaggcgcggagcggtcgttgtcgtcgtcgtcgcgacgttgttgtcgttcgggttgttgtttcgtttgttgttcgttcgtcgtttgttcgttcgcgcggttcgcgtttagttcgtcgtttttcggatacgggtatacggcgcgcgtagtcgtattcgttttcggaggaaggcgtcgcgttgggttttaaaaagttttgatttcgcgttttttttttagtttcgtatcgagttcggttttttttaatttcggcgttgggggcgttcgtttcgcgcggtttttgttgttttcgggggattcgtttacggttcgttttcggggaacgttattttaggggcgggggtttcgagagacgtttgggttcgcgttttcgggttagattgaggtgagaagggcgttggtattttttttttgttttt

SEQ ID NO: 1694 - DNA, 768 bp, Artificial Sequence
  chemically treated genomic DNA (Homo sapiens) CpG-island No: 1694
aaaaacaaaaaaaaaataccaacgcccttctcacctcaatctaacccgaaaacgcgaacccaaacgtctctcgaaacccccgcccctaaaataacgttccccgaaaacgaaccgtaaacgaatcccccgaaaacaacaaaaaccgcgcgaaacgaacgcccccaacgccgaaattaaaaaaaaccgaactcgatacgaaactaaaaaaaaaacgcgaaatcaaaactttttaaaacccaacgcgacgccttcctccgaaaacgaatacgactacgcgcgccgtatacccgtatccgaaaaacgacgaactaaacgcgaaccgcgcgaacgaacaaacgacgaacgaacaacaaacgaaacaacaacccgaacgacaacaacgtcgcgacgacgacgacaacgaccgctccgcgcctcgcctcaccgacctcgctaacctcacctcgccgcgcccgaacccgccacccccgcctccccgcccgacctccgcaacccccgtctcgaccgacaacgcccaccgcctacccgaaacgaaaaacgaaatacgaaacgcaaaaacaccgaaaccaatacccgccgaccccgcaaatcaaacccaaccaaaaaaacccccgcctaaccccgtacaactccgcgaccgccgaaaactatcccttcaacaccgccgcgaaaacccaaatccgaacgcaacccaacgaaaccccaactcgaacccgaactcacgaaaaacaacgctcgacgttaaccgcacgaacaacaccccgaata

SEQ ID NO: 1695 - DNA, 768 bp, Artificial Sequence
  chemically treated genomic DNA (Homo sapiens) CpG-island No: 1695
gaaggtaaggggagggtgttaacgttttttttattttagtttgattcgggggcgcgggtttagacgtttttcggagttttcgtttttggagtggcgtttttcgagggcggatcgtgggcgggtttttcgggagtagtaggagtcgcgcggggcgggcgtttttagcgtcgaggttgagggaggtcgggttcggtgcggggttgggaggggggcgcggaattagggttttttaggatttagcgcggcgttttttttcgggggcgagtgcggttgcgcgcgtcgtgtgttcgtgttcggagagcggcgggttggacgcggatcgcgcgaacgagtaggcgacgggcgagtagtaagcggagtagtagttcgggcggtagtagcgtcgcggcggcggcggtagcggtcgtttcgcgtttcgttttatcggtttcgttggttttatttcgtcgcgttcggattcgttattttcgttttttcgttcgattttcgtagttttcgtttcggtcggtagcgtttatcgtttgttcgaagcgaggagcggagtgcggggcgtagaggtatcggagttagtgttcgtcggtttcgtaaattaaatttagttaggagaattttcgtttggtttcgtgtagtttcgcgatcgtcgggagttgtttttttagtatcgtcgcgggagtttaagttcgagcgtagtttagcggaattttagttcgagttcgggtttacggagagtagcgttcggcgttagtcgtacgagtaatatttcgggtg

SEQ ID NO: 1696 - DNA, 768 bp, Artificial Sequence
  chemically treated genomic DNA (Homo sapiens) CpG-island No: 1696
cacccgaaatattactcgtacgactaacgccgaacgctactctccgtaaacccgaactcgaactaaaattccgctaaactacgctcgaacttaaactcccgcgacgatactaaaaaaacaactcccgacgatcgcgaaactacacgaaaccaaacgaaaattctcctaactaaatttaatttacgaaaccgacgaacactaactccgatacctctacgccccgcactccgctcctcgcttcgaacaaacgataaacgctaccgaccgaaacgaaaactacgaaaatcgaacgaaaaaacgaaaataacgaatccgaacgcgacgaaataaaaccaacgaaaccgataaaacgaaacgcgaaacgaccgctaccgccgccgccgcgacgctactaccgcccgaactactactccgcttactactcgcccgtcgcctactcgttcgcgcgatccgcgtccaacccgccgctctccgaacacgaacacacgacgcgcgcaaccgcactcgcccccgaaaaaaaacgccgcgctaaatcctaaaaaaccctaattccgcgcccccctcccaaccccgcaccgaacccgacctccctcaacctcgacgctaaaaacgcccgccccgcgcgactcctactactcccgaaaaacccgcccacgatccgccctcgaaaaacgccactccaaaaacgaaaactccgaaaaacgtctaaacccgcgcccccgaatcaaactaaaataaaaaaaacgttaacaccctccccttaccttc

SEQ ID NO: 1697 - DNA, 804 bp, Artificial Sequence
  chemically treated genomic DNA (Homo sapiens) CpG-island No: 1697
tatttcgagcgtcgttttaatttttttattttttggggtttcggttttattatgtcgtcggagtagttggagcgcgggttggacgcgtcggagtcgtcgttgtagtgttcgtcgtcgcggttcgggggtagcgggttcggcgtatagaaggcggttgcggcgttagggggcgcggcgttttggtcgcgtagtagagtttgtaggttttcgatatagcggatggcgttgcgtaggatttttattttgggtaatcgttggtttggattgttcgacgtgtagcgtttgagtgttttaaaggttttatttattttgtttaggcggcgtcgttcgcgtatggtggcggttttgcggcggtcggcgttggtggttttgcgtttgtacgttttgtaggtttatagtaggtagcggttcgtttggtggtgttcgttgggcgcgcgtatatgttcgtttttacgtgcgttcggggtcgggtgtatcgtcgcggggaagtgcgagtgtttttcgggttttaggagcgcgtttacgtgtattaggcgcgggtttaggttttcgaagaagcgtaggttcggggagtcgaaatacgggtcgttatagaagtcgttcgttgtggtaaaggagtagagagagtcgtcgggggtcgttaggtttacgtcgcggagcggtggcgatagtagttttatattttggcggtggcgcggtacggttttggtttcgtttaatttaagcggtagagagtggtcggaattttttgtcgttcgggagtttcggttgtagatagtaaagtgttggtagtttgaatgttta

SEQ ID NO: 1698 - DNA, 804 bp, Artificial Sequence
  chemically treated genomic DNA (Homo sapiens) CpG-island No: 1698
taaacattcaaactaccaacactttactatctacaaccgaaactcccgaacgacaaaaaattccgaccactctctaccgcttaaattaaacgaaaccaaaaccgtaccgcgccaccgccaaaatataaaactactatcgccaccgctccgcgacgtaaacctaacgacccccgacgactctctctactcctttaccacaacgaacgacttctataacgacccgtatttcgactccccgaacctacgcttcttcgaaaacctaaacccgcgcctaatacacgtaaacgcgctcctaaaacccgaaaaacactcgcacttccccgcgacgatacacccgaccccgaacgcacgtaaaaacgaacatatacgcgcgcccaacgaacaccaccaaacgaaccgctacctactataaacctacaaaacgtacaaacgcaaaaccaccaacgccgaccgccgcaaaaccgccaccatacgcgaacgacgccgcctaaacaaaataaataaaacctttaaaacactcaaacgctacacgtcgaacaatccaaaccaacgattacccaaaataaaaatcctacgcaacgccatccgctatatcgaaaacctacaaactctactacgcgaccaaaacgccgcgccccctaacgccgcaaccgccttctatacgccgaacccgctacccccgaaccgcgacgacgaacactacaacgacgactccgacgcgtccaacccgcgctccaactactccgacgacataataaaaccgaaaccccaaaaaataaaaaaattaaaacgacgctcgaaata

SEQ ID NO: 1699 - DNA, 804 bp, Artificial Sequence
  chemically treated genomic DNA (Homo sapiens) CpG-island No: 1699
tgggtatttagattgttagtattttgttatttatagtcggggttttcgagcggtagaaagtttcggttattttttgtcgtttgggttgggcgaagttaggatcgtgtcgcgttatcgttaggatatggagttattgtcgttatcgtttcgcgacgtagatttgacggttttcgacggttttttttgtttttttgttataacggacgatttttatgacgattcgtgtttcgatttttcggatttgcgttttttcgaagatttggattcgcgtttgatgtacgtgggcgcgtttttgaaattcgaagagtattcgtattttttcgcggcggtgtattcggtttcgggcgtacgtgaggacgagtatgtgcgcgcgtttagcgggtattattaggcgggtcgttgtttattgtgggtttgtaaggcgtgtaagcgtaagattattaacgtcgatcgtcgtaaggtcgttattatgcgcgagcggcgtcgtttgagtaaagtaaatgaggtttttgagatatttaagcgttgtacgtcgagtaatttaaattagcggttgtttaaggtggagattttgcgtaacgttattcgttatatcgagggtttgtaggttttgttgcgcgattaggacgtcgcgttttttggcgtcgtagtcgttttttatgcgtcgggttcgttgttttcgggtcgcggcggcgagtattatagcggcgatttcgacgcgtttagttcgcgttttaattgtttcgacggtatggtaaggtcgggattttaggaagtgaggaagttagggcggcgttcgggata

SEQ ID NO: 1700 - DNA, 804 bp, Artificial Sequence
  chemically treated genomic DNA (Homo sapiens) CpG-island No: 1700
tatcccgaacgccgccctaacttcctcacttcctaaaatcccgaccttaccataccgtcgaaacaattaaaacgcgaactaaacgcgtcgaaatcgccgctataatactcgccgccgcgacccgaaaacaacgaacccgacgcataaaaaacgactacgacgccaaaaaacgcgacgtcctaatcgcgcaacaaaacctacaaaccctcgatataacgaataacgttacgcaaaatctccaccttaaacaaccgctaatttaaattactcgacgtacaacgcttaaatatctcaaaaacctcatttactttactcaaacgacgccgctcgcgcataataacgaccttacgacgatcgacgttaataatcttacgcttacacgccttacaaacccacaataaacaacgacccgcctaataatacccgctaaacgcgcgcacatactcgtcctcacgtacgcccgaaaccgaatacaccgccgcgaaaaaatacgaatactcttcgaatttcaaaaacgcgcccacgtacatcaaacgcgaatccaaatcttcgaaaaaacgcaaatccgaaaaatcgaaacacgaatcgtcataaaaatcgtccgttataacaaaaaaacaaaaaaaaccgtcgaaaaccgtcaaatctacgtcgcgaaacgataacgacaataactccatatcctaacgataacgcgacacgatcctaacttcgcccaacccaaacgacaaaaaataaccgaaactttctaccgctcgaaaaccccgactataaataacaaaatactaacaatctaaataccca

SEQ ID NO: 1701 - DNA, 831 bp, Artificial Sequence
  chemically treated genomic DNA (Homo sapiens) CpG-island No: 1701
tcggtggagggatagtgatggtggaggtggtggagtcggtggagggatagtgcgggtggaggtggtggagtcggtggagggatagtgcgggtggaggtggtggagtcggtggagggatagtgcgggtggaggtggtggagtcggtggagggatagtgatggtggaggtggtggagtcggtggagggatagtgatggtggaggtggtggagtcggtggagggatagtgatggtggaggtggtggagtcggtggagggatagtgatggtggaggtggtggagtcggtggagggatagtgatggtggaggtggtggagtcggtggagggatagtgatggtggaggtggtggagtcggtggagggatagtgatggtggaggtggtggagtcggtggatggatagtgcgggtggaggtggtggagtcggtggagggatagtgatggtggaggtggtggagtcggtggagggatagtgcgggtggaggtggtggagtcggtggagggatagtgcgggtggaggtggtggagtcggtggatggatagtgcgggtggaggtggtggagtcggtggagggatagtgatggtggaggtggtggagtcggtggagggatagtgatggtggaggtggtggagtcggtggaggaatagtgatggtggaggtggtggagtcggtggagggatagtgatggtggaggtggtggagtcggtggagggatagtgagggtggaggtggtggagtcggtggagggatagtgttggtggaggtggtggagtcggtggagggatagtgagggtggaggtggtggagttggtggagggatagtgatggtggag

SEQ ID NO: 1702 - DNA, 831 bp, Artificial Sequence
  chemically treated genomic DNA (Homo sapiens) CpG-island No: 1702
ctccaccatcactatccctccaccaactccaccacctccaccctcactatccctccaccgactccaccacctccaccaacactatccctccaccgactccaccacctccaccctcactatccctccaccgactccaccacctccaccatcactatccctccaccgactccaccacctccaccatcactattcctccaccgactccaccacctccaccatcactatccctccaccgactccaccacctccaccatcactatccctccaccgactccaccacctccacccgcactatccatccaccgactccaccacctccacccgcactatccctccaccgactccaccacctccacccgcactatccctccaccgactccaccacctccaccatcactatccctccaccgactccaccacctccacccgcactatccatccaccgactccaccacctccaccatcactatccctccaccgactccaccacctccaccatcactatccctccaccgactccaccacctccaccatcactatccctccaccgactccaccacctccaccatcactatccctccaccgactccaccacctccaccatcactatccctccaccgactccaccacctccaccatcactatccctccaccgactccaccacctccaccatcactatccctccaccgactccaccacctccacccgcactatccctccaccgactccaccacctccacccgcactatccctccaccgactccaccacctccacccgcactatccctccaccgactccaccacctccaccatcactatccctccaccga

SEQ ID NO: 1703 - DNA, 831 bp, Artificial Sequence
  chemically treated genomic DNA (Homo sapiens) CpG-island No: 1703
ttttattattattgtttttttattaattttattatttttatttttattgtttttttatcgattttattatttttattaatattgtttttttatcgattttattatttttatttttattgtttttttatcgattttattatttttattattattgtttttttatcgattttattatttttattattattgtttttttatcgattttattatttttattattattgtttttttatcgattttattatttttattattattgtttttttatcgattttattatttttattcgtattgtttatttatcgattttattatttttattcgtattgtttttttatcgattttattatttttattcgtattgtttttttatcgattttattatttttattattattgtttttttatcgattttattatttttattcgtattgtttatttatcgattttattatttttattattattgtttttttatcgattttattatttttattattattgtttttttatcgattttattatttttattattattgtttttttatcgattttattatttttattattattgtttttttatcgattttattatttttattattattgtttttttatcgattttattatttttattattattgtttttttatcgattttattatttttattattattgtttttttatcgattttattatttttattcgtattgtttttttatcgattttattatttttattcgtattgtttttttatcgattttattatttttattcgtattgtttttttatcgattttattatttttattattattgtttttttatcga

SEQ ID NO: 1704 - DNA, 831 bp, Artificial Sequence
  chemically treated genomic DNA (Homo sapiens) CpG-island No: 1704
tcgataaaaaaacaataataataaaaataataaaatcgataaaaaaacaatacgaataaaaataataaaatcgataaaaaaacaatacgaataaaaataataaaatcgataaaaaaacaatacgaataaaaataataaaatcgataaaaaaacaataataataaaaataataaaatcgataaaaaaacaataataataaaaataataaaatcgataaaaaaacaataataataaaaataataaaatcgataaaaaaacaataataataaaaataataaaatcgataaaaaaacaataataataaaaataataaaatcgataaaaaaacaataataataaaaataataaaatcgataaaaaaacaataataataaaaataataaaatcgataaataaacaatacgaataaaaataataaaatcgataaaaaaacaataataataaaaataataaaatcgataaaaaaacaatacgaataaaaataataaaatcgataaaaaaacaatacgaataaaaataataaaatcgataaataaacaatacgaataaaaataataaaatcgataaaaaaacaataataataaaaataataaaatcgataaaaaaacaataataataaaaataataaaatcgataaaaaaacaataataataaaaataataaaatcgataaaaaaacaataataataaaaataataaaatcgataaaaaaacaataaaaataaaaataataaaatcgataaaaaaacaatattaataaaaataataaaatcgataaaaaaacaataaaaataaaaataataaaattaataaaaaaacaataataataaaa

SEQ ID NO: 1705 - DNA, 952 bp, Artificial Sequence
  chemically treated genomic DNA (Homo sapiens) CpG-island No: 1705
tagagtcgcgggatttcggttcggaaatcgcgttatcggcgttcgtatacgttaggtcggggagtttagaggtttagtcggttatgtttcggcgatttttcggagcgagggatagggaaggagtcggtttttattagtgtttcgtatacgggattttgggtttggtttcgtacggagtttgttcgtttttaatatggcggtagcgtttgttttagggggcggggttacgtgggggcggcggttaatgggttttcgggttgcgttgtcggtagggagcgggaggcggaagtgtcgcgggttgtcgttttcgtttcggttgcggtttttgtcggttatataattcgttgcgggtttcgcgcggttttatttttcggtttttttcgtttttaggatgcgttgagttttataatatttttagcggtcgtcggtttttttacgaggtgaggtggcggggggcggtcgtcggggttcggatttgcggcggggcgtcgagggggcggggtaggcggggaggtcgcgtcggggttaggggggttagcgtttatcgggtacgagcgcgttggtgaggtaggttcggtcgcgttcgcgttttcggcgtacggttttttcgggagtcggtttcggggacggcggcggggagtgggcgttggttagggacgagggttgaggaggtcgcggtttttatgttgggtgggagtcgggttttttgtttgggggttgcgttagtgttcgatttcgcgatgagtggtcgggataatttgtaattagagggtggtttttatgggtattttgtggggtgtcgcgcgaggtgaagggttaggttattttcgtcgggttagcgattttcgttttcgtttcgttttcgtttggtttgattagggtttgttttggtatttgttgcgtcgattggagttatttgcgatttgtttgtttttttttgaatttttgaaag

SEQ ID NO: 1706 - DNA, 952 bp, Artificial Sequence
  chemically treated genomic DNA (Homo sapiens) CpG-island No: 1706
ctttcaaaaattcaaaaaaaaacaaacaaatcgcaaataactccaatcgacgcaacaaataccaaaacaaaccctaatcaaaccaaacgaaaacgaaacgaaaacgaaaatcgctaacccgacgaaaataacctaacccttcacctcgcgcgacaccccacaaaatacccataaaaaccaccctctaattacaaattatcccgaccactcatcgcgaaatcgaacactaacgcaacccccaaacaaaaaacccgactcccacccaacataaaaaccgcgacctcctcaaccctcgtccctaaccaacgcccactccccgccgccgtccccgaaaccgactcccgaaaaaaccgtacgccgaaaacgcgaacgcgaccgaacctacctcaccaacgcgctcgtacccgataaacgctaacccccctaaccccgacgcgacctccccgcctaccccgccccctcgacgccccgccgcaaatccgaaccccgacgaccgccccccgccacctcacctcgtaaaaaaaccgacgaccgctaaaaatattataaaactcaacgcatcctaaaaacgaaaaaaaccgaaaaataaaaccgcgcgaaacccgcaacgaattatataaccgacaaaaaccgcaaccgaaacgaaaacgacaacccgcgacacttccgcctcccgctccctaccgacaacgcaacccgaaaacccattaaccgccgcccccacgtaaccccgccccctaaaacaaacgctaccgccatattaaaaacgaacaaactccgtacgaaaccaaacccaaaatcccgtatacgaaacactaataaaaaccgactccttccctatccctcgctccgaaaaatcgccgaaacataaccgactaaacctctaaactccccgacctaacgtatacgaacgccgataacgcgatttccgaaccgaaatcccgcgactcta

SEQ ID NO: 1707 - DNA, 952 bp, Artificial Sequence
  chemically treated genomic DNA (Homo sapiens) CpG-island No: 1707
tttttaggagtttagaggagggtaaataagtcgtagatgattttaatcggcgtaataagtattaaaataggttttgattaggttaggcgagagcggggcgaaggcggaaatcgttgattcgacggaaatggtttggttttttatttcgcgcgatattttatagggtatttatgaggattattttttagttgtaaattgtttcgattatttatcgcggggtcggatattgacgtaatttttaggtagaaggttcgatttttatttagtatgagagtcgcgatttttttaattttcgtttttggttagcgtttatttttcgtcgtcgttttcgaaatcggttttcgggaggatcgtgcgtcgggggcgcgggcgcggtcgggtttgttttattagcgcgttcgtattcggtgggcgttggtttttttgatttcggcgcggttttttcgtttatttcgttttttcggcgtttcgtcgtaggttcgagtttcggcggtcgtttttcgttattttatttcgtgggggagtcggcggtcgttgggggtgttgtagggtttagcgtattttggaggcgaagggagtcgggaagtgggatcgcgcggagttcgtaacgagttatgtaatcggtaggggtcgtagtcgggacggaggcggtagttcgcggtattttcgtttttcgttttttgtcggtagcgtagttcggaagtttattggtcgtcgtttttacgtggtttcgttttttgaggtaggcgttgtcgttatgttgggagcgggtaggtttcgtgcgaagttaggtttaggatttcgtatgcggggtattggtgagggtcggttttttttttgtttttcgtttcgggaggtcgtcgagatatggtcggttagatttttgggtttttcggtttagcgtgtgcggacgtcggtggcgcggttttcgggtcgaggtttcgcggtttta

SEQ ID NO: 1708 - DNA, 952 bp, Artificial Sequence
  chemically treated genomic DNA (Homo sapiens) CpG-island No: 1708
taaaaccgcgaaacctcgacccgaaaaccgcgccaccgacgtccgcacacgctaaaccgaaaaacccaaaaatctaaccgaccatatctcgacgacctcccgaaacgaaaaacaaaaaaaaaaccgaccctcaccaataccccgcatacgaaatcctaaacctaacttcgcacgaaacctacccgctcccaacataacgacaacgcctacctcaaaaaacgaaaccacgtaaaaacgacgaccaataaacttccgaactacgctaccgacaaaaaacgaaaaacgaaaataccgcgaactaccgcctccgtcccgactacgacccctaccgattacataactcgttacgaactccgcgcgatcccacttcccgactcccttcgcctccaaaatacgctaaaccctacaacacccccaacgaccgccgactcccccacgaaataaaataacgaaaaacgaccgccgaaactcgaacctacgacgaaacgccgaaaaaacgaaataaacgaaaaaaccgcgccgaaatcaaaaaaaccaacgcccaccgaatacgaacgcgctaataaaacaaacccgaccgcgcccgcgcccccgacgcacgatcctcccgaaaaccgatttcgaaaacgacgacgaaaaataaacgctaaccaaaaacgaaaattaaaaaaatcgcgactctcatactaaataaaaatcgaaccttctacctaaaaattacgtcaatatccgaccccgcgataaataatcgaaacaatttacaactaaaaaataatcctcataaataccctataaaatatcgcgcgaaataaaaaaccaaaccatttccgtcgaatcaacgatttccgccttcgccccgctctcgcctaacctaatcaaaacctattttaatacttattacgccgattaaaatcatctacgacttatttaccctcctctaaactcctaaaaa

SEQ ID NO: 1709 - DNA, 511 bp, Artificial Sequence
  chemically treated genomic DNA (Homo sapiens) CpG-island No: 1709
tcggaagcgggggcgaggacgtagatcgggggtcgacgttaagaaagaaggcgggaagaggataaggtcgggagaggaggaggaggggagcgaggacgtagagaaggaggggaaagaggacggagaggagcgaggacggaggggggacgggaacgaagaggggcgaggacgtttagtatttattgcgatagcgataaataggatatcgttaggttttcggcggaggtagcgtttaagattttcgttgtcgagtaatcgaagtatggcggtggggcggggtcggagtttgcgtattttcgttttcgttcgttcggttggtcggaagtgacgttagggggcggggttagcggcgcggtcgggtgagaggtcgcggcggtaggtgagtgagcgcggtttcgtattcgcgcgtgtacgtcgtaggggcgtcgtaggtcgttttttcgttttgggatttcggtttttaggttttttagtttttcggtttttggaggatttcgtcgtgttgtttttt

SEQ ID NO: 1710 - DNA, 511 bp, Artificial Sequence
  chemically treated genomic DNA (Homo sapiens) CpG-island No: 1710
aaaaaacaacacgacgaaatcctccaaaaaccgaaaaactaaaaaacctaaaaaccgaaatcccaaaacgaaaaaacgacctacgacgcccctacgacgtacacgcgcgaatacgaaaccgcgctcactcacctaccgccgcgacctctcacccgaccgcgccgctaaccccgccccctaacgtcacttccgaccaaccgaacgaacgaaaacgaaaatacgcaaactccgaccccgccccaccgccatacttcgattactcgacaacgaaaatcttaaacgctacctccgccgaaaacctaacgatatcctatttatcgctatcgcaataaatactaaacgtcctcgcccctcttcgttcccgtcccccctccgtcctcgctcctctccgtcctctttcccctccttctctacgtcctcgctcccctcctcctcctctcccgaccttatcctcttcccgccttctttcttaacgtcgacccccgatctacgtcctcgcccccgcttccga

SEQ ID NO: 1711 - DNA, 511 bp, Artificial Sequence
  chemically treated genomic DNA (Homo sapiens) CpG-island No: 1711
agggggtagtacggcggggttttttaggggtcgagggattggggaatttgggggtcggggttttagagcgaaggggcggtttgcggcgtttttgcggcgtgtacgcgcgagtacgaggtcgcgtttatttatttgtcgtcgcggttttttattcgatcgcgtcgttggtttcgttttttggcgttattttcgattagtcgggcgggcgggggcggaaatgcgtaggtttcgatttcgttttatcgttatgtttcggttgttcggtaacggggattttgggcgttgttttcgtcgggaatttggcggtgttttgtttgtcgttgtcgtaatggatgttgaacgttttcgttttttttcgttttcgtttttttttcgttttcgttttttttcgtttttttttttttttttttttgcgttttcgttttttttttttttttttttcgattttgtttttttttcgtttttttttttgacgtcgattttcgatttgcgttttcgttttcgttttcgg

SEQ ID NO: 1712 - DNA, 511 bp, Artificial Sequence
  chemically treated genomic DNA (Homo sapiens) CpG-island No: 1712
ccgaaaacgaaaacgaaaacgcaaatcgaaaatcgacgtcaaaaaaaaaaacgaaaaaaaaacaaaatcgaaaaaaaaaaaaaaaaaaaacgaaaacgcaaaaaaaaaaaaaaaaaaaaacgaaaaaaaacgaaaacgaaaaaaaaacgaaaacgaaaaaaaacgaaaacgttcaacatccattacgacaacgacaaacaaaacaccgccaaattcccgacgaaaacaacgcccaaaatccccgttaccgaacaaccgaaacataacgataaaacgaaatcgaaacctacgcatttccgcccccgcccgcccgactaatcgaaaataacgccaaaaaacgaaaccaacgacgcgatcgaataaaaaaccgcgacgacaaataaataaacgcgacctcgtactcgcgcgtacacgccgcaaaaacgccgcaaaccgccccttcgctctaaaaccccgacccccaaattccccaatccctcgacccctaaaaaaccccgccgtactaccccct

SEQ ID NO: 1713 - DNA, 726 bp, Artificial Sequence
  chemically treated genomic DNA (Homo sapiens) CpG-island No: 1713
taaaggtcgtagatacgggaattgttttttttttagcgtcgtttttatattttcgcgtggatattgatattcgttttattttaggaatgcgtatagttaggcgtagtcggttagcgtgggtcgggggcggcggggttattttttttattttcgcgcgtaaggttcgtcgtttttgataacgcgatttaaggttacggaggttttatttttaggttcgatcgtttacgagacgggtagtatttcgttacgcgttcgagtaggtagttgttcggatagttcggcgttcgtcgtgacgttatcgtttcgcgttcgaggaagtttcgtttcgcgtagtttcgtttcgtttttttttatcgtgtacggtttcgcgtggttgcgcgcggcgttttgggagtacgatatggcgcgcgagttgcgggcgttgttgttgtggggtcgtcgtttgcggtttttgttgcgggcgtcggcgttggcggtcgtgtcgggaggtgagggcgttttggttggacgggtagcgggcgggtcgggttacggagacggtagggacgtttttgtgtttcggggagcgaggcgtcggtatttgttttataggcgtgggaggttcggcgaggttaagcgcggtagacgcgtttattttcgtttcgtttttcgttagttttagtttggttgtttttttttcggttggatttttttcgttattcgtttatgggagttttgaaggaggtt

SEQ ID NO: 1714 - DNA, 726 bp, Artificial Sequence
  chemically treated genomic DNA (Homo sapiens) CpG-island No: 1714
aacctccttcaaaactcccataaacgaataacgaaaaaaatccaaccgaaaaaaaaacaaccaaactaaaactaacgaaaaacgaaacgaaaataaacgcgtctaccgcgcttaacctcgccgaacctcccacgcctataaaacaaataccgacgcctcgctccccgaaacacaaaaacgtccctaccgtctccgtaacccgacccgcccgctacccgtccaaccaaaacgccctcacctcccgacacgaccgccaacgccgacgcccgcaacaaaaaccgcaaacgacgaccccacaacaacaacgcccgcaactcgcgcgccatatcgtactcccaaaacgccgcgcgcaaccacgcgaaaccgtacacgataaaaaaaaacgaaacgaaactacgcgaaacgaaacttcctcgaacgcgaaacgataacgtcacgacgaacgccgaactatccgaacaactacctactcgaacgcgtaacgaaatactacccgtctcgtaaacgatcgaacctaaaaataaaacctccgtaaccttaaatcgcgttatcaaaaacgacgaaccttacgcgcgaaaataaaaaaaataaccccgccgcccccgacccacgctaaccgactacgcctaactatacgcattcctaaaataaaacgaatatcaatatccacgcgaaaatataaaaacgacgctaaaaaaaaaacaattcccgtatctacgaccttta

SEQ ID NO: 1715 - DNA, 726 bp, Artificial Sequence
  chemically treated genomic DNA (Homo sapiens) CpG-island No: 1715
agttttttttagggtttttatgggcgggtggcgaggggagtttagtcgaggaaaaggtagttaagttggagttggcgaggagcggagcgaaagtaaacgcgtttgtcgcgtttggtttcgtcggattttttacgtttgtgaagtaggtgtcggcgtttcgtttttcggagtatagggacgtttttgtcgttttcgtggttcggttcgttcgttgttcgtttagttaggacgtttttatttttcggtacggtcgttagcgtcggcgttcgtagtaaaggtcgtaggcggcggttttatagtagtagcgttcgtagttcgcgcgttatgtcgtatttttagagcgtcgcgcgtagttacgcgggatcgtatacgatgggaaggggcgggacggggttgcgcggggcggggttttttcgggcgcggggcggtgacgttacggcgggcgtcgggttgttcgggtagttgtttgttcgggcgcgtggcggggtattattcgtttcgtggacggtcgggtttgggggtgggattttcgtgattttggatcgcgttgttaagggcgacgggttttgcgcgcggaggtgggggaggtggtttcgtcgttttcggtttacgttggtcggttgcgtttagttgtgcgtatttttggaatggggcggatgttagtatttacgcgagggtgtggaggcgacgttggggaagaagtagttttcgtgtttgcgatttttg

SEQ ID NO: 1716 - DNA, 726 bp, Artificial Sequence
  chemically treated genomic DNA (Homo sapiens) CpG-island No: 1716
caaaaatcgcaaacacgaaaactacttcttccccaacgtcgcctccacaccctcgcgtaaatactaacatccgccccattccaaaaatacgcacaactaaacgcaaccgaccaacgtaaaccgaaaacgacgaaaccacctcccccacctccgcgcgcaaaacccgtcgcccttaacaacgcgatccaaaatcacgaaaatcccacccccaaacccgaccgtccacgaaacgaataataccccgccacgcgcccgaacaaacaactacccgaacaacccgacgcccgccgtaacgtcaccgccccgcgcccgaaaaaaccccgccccgcgcaaccccgtcccgccccttcccatcgtatacgatcccgcgtaactacgcgcgacgctctaaaaatacgacataacgcgcgaactacgaacgctactactataaaaccgccgcctacgacctttactacgaacgccgacgctaacgaccgtaccgaaaaataaaaacgtcctaactaaacgaacaacgaacgaaccgaaccacgaaaacgacaaaaacgtccctatactccgaaaaacgaaacgccgacacctacttcacaaacgtaaaaaatccgacgaaaccaaacgcgacaaacgcgtttactttcgctccgctcctcgccaactccaacttaactaccttttcctcgactaaactcccctcgccacccgcccataaaaaccctaaaaaaaact

SEQ ID NO: 1717 - DNA, 882 bp, Artificial Sequence
  chemically treated genomic DNA (Homo sapiens) CpG-island No: 1717
gtcgttttttttttcgttagttttcggtatcggttcgggaggagacgggtttgttaggtttggggcgggcggggaggtttcggggaagggggggttcgttttttaggcgtcgaggtttcgaggtttcggtttttcgtttttgggcgatgggcgatttgtgaggtcggtttttatcgttgggggcgcgtgtgggaggaggcggtcgttcgagtgatcgggagtcgggtcgcggttttttttcgttcgtttcggttttttttatttttttgtttcggggtcgttatcgttcgggcgtcggatttggtttcgtgttcgcggtgtcgtcgttttttgggtttagttcgtttagttcggcgagcggcggtagtgggagtcgcgttcgtcgtattcgtttcgattcggtgtcggtttttggttttttttttatgattgcggcgtttttgttgttatcgttcgttcggtcgtcgttcgtcgtaggatggatgcggatcgtgcggcgttaattttcgtggtttagttttcgaatcgttcgttttcgagtttttttcgtgagtcgtagtagtttcggtgttagttttcgtcgtagttgggtttagcggttcgtttgtttttcgttgcggtttgtcggtgttgagtgaggcgtcgttcgggtcggcgcgaattcgttcggtcgcggttttttgtagatttttgcgcgggcggttcggttttttacgtttttttcgtttacgaattcgagttcgttcgtttttttttagcgaatcgattatgtttggcggcgtcgtagagaagtagagtagtattttcggttttttgtttttttcgtcgtcggtttttgtttttaagaatggttttagtttcgattttttcgtgggggagaaa

SEQ ID NO: 1718 - DNA, 882 bp, Artificial Sequence
  chemically treated genomic DNA (Homo sapiens) CpG-island No: 1718
tttctcccccacgaaaaaatcgaaactaaaaccattcttaaaaacaaaaaccgacgacgaaaaaaacaaaaaaccgaaaatactactctacttctctacgacgccgccaaacataatcgattcgctaaaaaaaaacgaacgaactcgaattcgtaaacgaaaaaaacgtaaaaaaccgaaccgcccgcgcaaaaatctacaaaaaaccgcgaccgaacgaattcgcgccgacccgaacgacgcctcactcaacaccgacaaaccgcaacgaaaaacaaacgaaccgctaaacccaactacgacgaaaactaacaccgaaactactacgactcacgaaaaaaactcgaaaacgaacgattcgaaaactaaaccacgaaaattaacgccgcacgatccgcatccatcctacgacgaacgacgaccgaacgaacgataacaacaaaaacgccgcaatcataaaaaaaaaaccaaaaaccgacaccgaatcgaaacgaatacgacgaacgcgactcccactaccgccgctcgccgaactaaacgaactaaacccaaaaaacgacgacaccgcgaacacgaaaccaaatccgacgcccgaacgataacgaccccgaaacaaaaaaataaaaaaaaccgaaacgaacgaaaaaaaaccgcgacccgactcccgatcactcgaacgaccgcctcctcccacacgcgcccccaacgataaaaaccgacctcacaaatcgcccatcgcccaaaaacgaaaaaccgaaacctcgaaacctcgacgcctaaaaaacgaacccccccttccccgaaacctccccgcccgccccaaacctaacaaacccgtctcctcccgaaccgataccgaaaactaacgaaaaaaaaaacgac

SEQ ID NO: 1719 - DNA, 882 bp, Artificial Sequence
  chemically treated genomic DNA (Homo sapiens) CpG-island No: 1719
ttttttttttacggaggaatcggagttggagttatttttgggggtaggagtcggcggcgagaggaatagggaatcgggagtgttgttttgtttttttgcggcgtcgttagatatggtcggttcgttggagagaggcgagcgggttcggattcgtgaacgaaaagggcgtgaagggtcgagtcgttcgcgtagaggtttgtagggaatcgcggtcgggcgggttcgcgtcgattcggacgacgttttatttagtatcgataagtcgtaacgagggataggcggatcgttgggtttagttgcggcgggggttggtatcgaggttgttgcggtttacgaggagggttcgaaggcgggcgattcgggagttgagttacgggggttagcgtcgtacggttcgtatttattttgcggcgagcggcggtcgggcgggcggtggtagtagaggcgtcgtagttatgaggggagggttaggggtcggtatcgagtcgaggcggatgcggcggacgcggtttttattgtcgtcgttcgtcgagttgggcgggttaggtttagagggcggcggtatcgcgagtacgggattaggttcgacgttcgggcggtggcggtttcggggtagaggagtgggaggggtcgaggcgggcgagggaaggtcgcggttcggttttcggttattcgggcggtcgtttttttttatacgcgtttttagcgatggggatcggttttataggtcgtttatcgtttagaggcgaagggtcggagtttcggagtttcggcgtttgaggagcgggttttttttttttcgaggttttttcgttcgttttaggtttggtaaattcgttttttttcgggtcggtgtcgggggttgacggaggagggaacggt

SEQ ID NO: 1720 - DNA, 882 bp, Artificial Sequence
  chemically treated genomic DNA (Homo sapiens) CpG-island No: 1720
accgttccctcctccgtcaacccccgacaccgacccgaaaaaaaacgaatttaccaaacctaaaacgaacgaaaaaacctcgaaaaaaaaaaaacccgctcctcaaacgccgaaactccgaaactccgacccttcgcctctaaacgataaacgacctataaaaccgatccccatcgctaaaaacgcgtataaaaaaaaacgaccgcccgaataaccgaaaaccgaaccgcgaccttccctcgcccgcctcgacccctcccactcctctaccccgaaaccgccaccgcccgaacgtcgaacctaatcccgtactcgcgataccgccgccctctaaacctaacccgcccaactcgacgaacgacgacaataaaaaccgcgtccgccgcatccgcctcgactcgataccgacccctaaccctcccctcataactacgacgcctctactaccaccgcccgcccgaccgccgctcgccgcaaaataaatacgaaccgtacgacgctaacccccgtaactcaactcccgaatcgcccgccttcgaaccctcctcgtaaaccgcaacaacctcgataccaacccccgccgcaactaaacccaacgatccgcctatccctcgttacgacttatcgatactaaataaaacgtcgtccgaatcgacgcgaacccgcccgaccgcgattccctacaaacctctacgcgaacgactcgacccttcacgcccttttcgttcacgaatccgaacccgctcgcctctctccaacgaaccgaccatatctaacgacgccgcaaaaaaacaaaacaacactcccgattccctattcctctcgccgccgactcctacccccaaaaataactccaactccgattcctccgtaaaaaaaaaa

SEQ ID NO: 1721 - DNA, 665 bp, Artificial Sequence
  chemically treated genomic DNA (Homo sapiens) CpG-island No: 1721
gtcgtcgtatcgggcgtcgcgttttttttcgttttgtgtttcggatgtaacgtttcgtcgcggaaagcggggtagcgggcgggatgggcgtcgtcgtttggggtataggatttacgggtaattgagggatttatttacgtgtagtcgttattcgcgtcgtttttagggtaagtatttagttagggtttttcgttgcgcgttttagatcgcgttcgtttttatttaagttttttttttagggtttaaatcggagtagtgtttcggatcgcgtaggtttcgtagtatcgtgatgttgacgaacgttttttcggggacggcggtttagacggagggcgagtttttgtagtttacgatggtcgcgttttgataggtttcgttcgttatgaggttgtcgatgtaggcgttttattcggttatggcgttgttattggggttgttttcggcgttgttgttggggtcgcggattgggttcgagttgtttcggttggcgggcggggggaggcggagagttcggggtacgcgttgtcgttcggatcgcggtttcgttcgttgtgtagtagttttcgtatcgttattttttgttttttttttttttcgtttcgttagatttttatttgtaaaggacggtaggggcggggtttattttttattttttttttttttta

SEQ ID NO: 1722 - DNA, 665 bp, Artificial Sequence
  chemically treated genomic DNA (Homo sapiens) CpG-island No: 1722
taaaaaaaaaaaaaaataaaaaataaaccccgcccctaccgtcctttacaaataaaaatctaacgaaacgaaaaaaaaaaaaaacaaaaaataacgatacgaaaactactacacaacgaacgaaaccgcgatccgaacgacaacgcgtaccccgaactctccgcctccccccgcccgccaaccgaaacaactcgaacccaatccgcgaccccaacaacaacgccgaaaacaaccccaataacaacgccataaccgaataaaacgcctacatcgacaacctcataacgaacgaaacctatcaaaacgcgaccatcgtaaactacaaaaactcgccctccgtctaaaccgccgtccccgaaaaaacgttcgtcaacatcacgatactacgaaacctacgcgatccgaaacactactccgatttaaaccctaaaaaaaaaacttaaataaaaacgaacgcgatctaaaacgcgcaacgaaaaaccctaactaaatacttaccctaaaaacgacgcgaataacgactacacgtaaataaatccctcaattacccgtaaatcctataccccaaacgacgacgcccatcccgcccgctaccccgctttccgcgacgaaacgttacatccgaaacacaaaacgaaaaaaaacgcgacgcccgatacgacgac

SEQ ID NO: 1723 - DNA, 665 bp, Artificial Sequence
  chemically treated genomic DNA (Homo sapiens) CpG-island No: 1723
tgggggagggagggaatggggagtaggtttcgtttttatcgttttttgtaaataaaaatttagcggggcggggggggggaggagtaggaagtggcggtgcgagggttgttgtatagcgagcggagtcgcggttcggacggtagcgcgtgtttcgagtttttcgttttttttcgttcgttagtcgaggtagttcgagtttagttcgcggttttagtagtagcgtcgagagtagttttagtagtagcgttatggtcgggtggaacgtttatatcgataattttatggcggacgggatttgttaggacgcggttatcgtgggttataaggattcgtttttcgtttgggtcgtcgttttcgggaaaacgttcgttaatattacggtattgcgaggtttgcgcggttcggggtattgtttcggtttggattttgagggagggatttgggtgggggcgggcgcggtttagggcgcgtagcgagaggttttgattgggtgtttgttttggaagcggcgcgaatggcggttgtacgtgagtgggttttttagttgttcgtaggttttatgttttaggcggcggcgtttatttcgttcgttatttcgtttttcgcgacggggcgttatattcggggtatagggcggggaggggcgcggcgttcggtgcggcggt

SEQ ID NO: 1724 - DNA, 665 bp, Artificial Sequence
  chemically treated genomic DNA (Homo sapiens) CpG-island No: 1724
accgccgcaccgaacgccgcgcccctccccgccctataccccgaatataacgccccgtcgcgaaaaacgaaataacgaacgaaataaacgccgccgcctaaaacataaaacctacgaacaactaaaaaacccactcacgtacaaccgccattcgcgccgcttccaaaacaaacacccaatcaaaacctctcgctacgcgccctaaaccgcgcccgcccccacccaaatccctccctcaaaatccaaaccgaaacaataccccgaaccgcgcaaacctcgcaataccgtaatattaacgaacgttttcccgaaaacgacgacccaaacgaaaaacgaatccttataacccacgataaccgcgtcctaacaaatcccgtccgccataaaattatcgatataaacgttccacccgaccataacgctactactaaaactactctcgacgctactactaaaaccgcgaactaaactcgaactacctcgactaacgaacgaaaaaaaacgaaaaactcgaaacacgcgctaccgtccgaaccgcgactccgctcgctatacaacaaccctcgcaccgccacttcctactcctccccccccccgccccgctaaatttttatttacaaaaaacgataaaaacgaaacctactccccattccctccctccccca

SEQ ID NO: 1725 - DNA, 999 bp, Artificial Sequence
  chemically treated genomic DNA (Homo sapiens) CpG-island No: 1725
ggcggtcgaatttgagggttaggcggggatagagcgttcgagtagtcgcgttacggtcggtcgtatttggttttagtatttgaagtagttgcgcggcgaattttagaattcggcggggcggggaggagagagacggcgattcgagtcgcgggaggagtcggcgggcggtgttcgtttgagggcggggtttgagcggagttattttttgggcgggtttcggtaggaggtttcgttttttggacgcgtttttaacggcggcgacgggaattgggtcggggtttgggtgttttcgcgggttagttttcgacgtttttttgttttttaggcgtttgtaatttttttgggttgcggcgtttgttcgtttttttgcgttcgtagttcggtttttacgttttcgttcgttgggttttataggttaggagcgttgtttttttaataagagtagttcgggtcgttttcggttttttttcgggatcgcgcgtattcgttttttcgcgcgcgttcgcgcgtttttcgtttttcgttttcgttttagttcgcgttgttcgggcgggcgtcggtcgttggcgtcgttattgttgtcgttttcggggcgcgagttcgtcgttcgtcgttcgggtattcggcgaggggcgggggtagtttcgaatcggttttagatttttttcgttttcgttttacgtttttcggaaagtttgttttttttcgtcgagttgtttcgggagtttcgtcgcgtcgaggtgagggttggggaagggggagggaagggacgttcgcggaggaatgtgtcgggttggggggcggggagtcggggttcggcggcgcgatttaggtttaagagtcgggattatgtgttgtttgtttcgcggaggcgtagagaggtgttaggttcgggcggtcgtcggttggttggataggaggacgggttcgtatggtcgttttgagaggtcgggcggggatttgtgtgagaatcgtcgggtgggtaaggtgtaggtggtt

SEQ ID NO: 1726 - DNA, 999 bp, Artificial Sequence
  chemically treated genomic DNA (Homo sapiens) CpG-island No: 1726
aaccacctacaccttacccacccgacgattctcacacaaatccccgcccgacctctcaaaacgaccatacgaacccgtcctcctatccaaccaaccgacgaccgcccgaacctaacacctctctacgcctccgcgaaacaaacaacacataatcccgactcttaaacctaaatcgcgccgccgaaccccgactccccgccccccaacccgacacattcctccgcgaacgtcccttccctcccccttccccaaccctcacctcgacgcgacgaaactcccgaaacaactcgacgaaaaaaaacaaactttccgaaaaacgtaaaacgaaaacgaaaaaaatctaaaaccgattcgaaactacccccgcccctcgccgaatacccgaacgacgaacgacgaactcgcgccccgaaaacgacaacaataacgacgccaacgaccgacgcccgcccgaacaacgcgaactaaaacgaaaacgaaaaacgaaaaacgcgcgaacgcgcgcgaaaaaacgaatacgcgcgatcccgaaaaaaaaccgaaaacgacccgaactactcttattaaaaaaacaacgctcctaacctataaaacccaacgaacgaaaacgtaaaaaccgaactacgaacgcaaaaaaacgaacaaacgccgcaacccaaaaaaattacaaacgcctaaaaaacaaaaaaacgtcgaaaactaacccgcgaaaacacccaaaccccgacccaattcccgtcgccgccgttaaaaacgcgtccaaaaaacgaaacctcctaccgaaacccgcccaaaaaataactccgctcaaaccccgccctcaaacgaacaccgcccgccgactcctcccgcgactcgaatcgccgtctctctcctccccgccccgccgaattctaaaattcgccgcgcaactacttcaaatactaaaaccaaatacgaccgaccgtaacgcgactactcgaacgctctatccccgcctaaccctcaaattcgaccgcc

SEQ ID NO: 1727 - DNA, 999 bp, Artificial Sequence
  chemically treated genomic DNA (Homo sapiens) CpG-island No: 1727
ggttatttgtattttgtttattcggcggtttttatataggttttcgttcggttttttagggcggttatgcggattcgtttttttgtttagttagtcggcggtcgttcgggtttggtatttttttgcgttttcgcggaataaatagtatatgatttcgatttttgagtttagatcgcgtcgtcggatttcggtttttcgttttttaattcggtatattttttcgcgggcgtttttttttttttttttttttagtttttatttcggcgcggcggggttttcggagtagttcggcggagagggataagtttttcgggaagcgtgaggcggaagcgggaaggatttggggtcggttcggagttgttttcgtttttcgtcgggtgttcgggcggcgggcggcggattcgcgtttcgggggcggtagtagtagcggcgttagcggtcggcgttcgttcgggtagcgcgagttggggcgggagcgaggggcgggggacgcgcgagcgcgcgcggaggggcgggtacgcgcggtttcgggaaggagtcgggagcgattcgggttatttttgttaaaggggtaacgtttttggtttgtggggtttagcgagcgggaacgtggggatcgagttgcggacgtagaagggcgagtagacgtcgtaatttaggagggttgtagacgtttgaagaatagggaaacgtcgggggttgattcgcgggggtatttaggtttcggtttagttttcgtcgtcgtcgttggaggcgcgtttagggggcggagttttttgtcgaggttcgtttagaaggtggtttcgtttaggtttcgtttttagacgagtatcgttcgtcggtttttttcgcggttcgaatcgtcgtttttttttttttcgtttcgtcgagttttagaattcgtcgcgtagttgttttaggtgttggggttaaatgcggtcggtcgtggcgcggttattcgggcgttttgttttcgtttggtttttaagttcggtcgtt

SEQ ID NO: 1728 - DNA, 999 bp, Artificial Sequence
  chemically treated genomic DNA (Homo sapiens) CpG-island No: 1728
aacgaccgaacttaaaaaccaaacgaaaacaaaacgcccgaataaccgcgccacgaccgaccgcatttaaccccaacacctaaaacaactacgcgacgaattctaaaactcgacgaaacgaaaaaaaaaaaaacgacgattcgaaccgcgaaaaaaaccgacgaacgatactcgtctaaaaacgaaacctaaacgaaaccaccttctaaacgaacctcgacaaaaaactccgccccctaaacgcgcctccaacgacgacgacgaaaactaaaccgaaacctaaatacccccgcgaatcaacccccgacgtttccctattcttcaaacgtctacaaccctcctaaattacgacgtctactcgcccttctacgtccgcaactcgatccccacgttcccgctcgctaaaccccacaaaccaaaaacgttacccctttaacaaaaataacccgaatcgctcccgactccttcccgaaaccgcgcgtacccgcccctccgcgcgcgctcgcgcgtcccccgcccctcgctcccgccccaactcgcgctacccgaacgaacgccgaccgctaacgccgctactactaccgcccccgaaacgcgaatccgccgcccgccgcccgaacacccgacgaaaaacgaaaacaactccgaaccgaccccaaatccttcccgcttccgcctcacgcttcccgaaaaacttatccctctccgccgaactactccgaaaaccccgccgcgccgaaataaaaactaaaaaaaaaaaaaaaaaaaaacgcccgcgaaaaaatataccgaattaaaaaacgaaaaaccgaaatccgacgacgcgatctaaactcaaaaatcgaaatcatatactatttattccgcgaaaacgcaaaaaaataccaaacccgaacgaccgccgactaactaaacaaaaaaacgaatccgcataaccgccctaaaaaaccgaacgaaaacctatataaaaaccgccgaataaacaaaatacaaataacc

SEQ ID NO: 1729 - DNA, 659 bp, Artificial Sequence
  chemically treated genomic DNA (Homo sapiens) CpG-island No: 1729
gtcgtcgtcgtcgtcgtcgtcgtagtcgtattcgtagtagagtttttcggttatggtaggcgcgtattattttttgtattgtttgtattcggcggcggcggcggtagcggtcggttcgtattattattattattattagtattattattacggttcgttttacgcgtcgggcggagggaatttttataattatcgttcgttcgtcgtttatttttatatgagttattcgtagtatagtttttatttttagttttattataatagtagcgtagtcgtttagacgcgaggggacgatataggtgagaggtcgttggggtagttcgtttttttcgtttttcgattgttttttatttcgttcgttcgtttattttttcgacgttcgggttttcgtcggtttttttttttaggcggtttcgcgcgtttttggtcgggtttcgtgcgcgttcgttcgtttggcgtttgtttgtcggttttttttagtcgggttttttttcgtcgtcgcggatttttagttttcgacgcgtagttcgggttgagtttcgggttcggcgtaggtttcgttcgacgagttagtttatattgcgttttttagttttttgggtttgtgcgtttttttttttgttttttttttttaggttgtaatttacgtttgattcggt

SEQ ID NO: 1730 - DNA, 659 bp, Artificial Sequence
  chemically treated genomic DNA (Homo sapiens) CpG-island No: 1730
accgaatcaaacgtaaattacaacctaaaaaaaaaaaacaaaaaaaaaaacgcacaaacccaaaaaactaaaaaacgcaatataaactaactcgtcgaacgaaacctacgccgaacccgaaactcaacccgaactacgcgtcgaaaactaaaaatccgcgacgacgaaaaaaaacccgactaaaaaaaaccgacaaacaaacgccaaacgaacgaacgcgcacgaaacccgaccaaaaacgcgcgaaaccgcctaaaaaaaaaaaccgacgaaaacccgaacgtcgaaaaaataaacgaacgaacgaaataaaaaacaatcgaaaaacgaaaaaaacgaactaccccaacgacctctcacctatatcgtcccctcgcgtctaaacgactacgctactattataataaaactaaaaataaaaactatactacgaataactcatataaaaataaacgacgaacgaacgataattataaaaattccctccgcccgacgcgtaaaacgaaccgtaataataatactaataataataataataatacgaaccgaccgctaccgccgccgccgccgaatacaaacaatacaaaaaataatacgcgcctaccataaccgaaaaactctactacgaatacgactacgacgacgacgacgacgacgac

SEQ ID NO: 1731 - DNA, 659 bp, Artificial Sequence
  chemically treated genomic DNA (Homo sapiens) CpG-island No: 1731
gtcgggttaaacgtgggttatagtttggagggaaggagtaaggaaaagggcgtatagatttaggaggttggagagcgtagtgtggattaattcgtcgaacgaagtttgcgtcgggttcgggatttagttcgaattgcgcgtcggaagttgagggttcgcggcggcgggaaggggttcggttgggagaggtcggtaggtaggcgttaggcgagcgggcgcgtacggggttcggttaagggcgcgcggggtcgtttgggggagggggtcggcggaggttcgggcgtcgaggaagtgagcgggcgggcggggtagggggtagtcgggaggcgggagaagcgagttgttttagcggttttttatttgtgtcgttttttcgcgtttgggcggttgcgttgttgttgtggtaggattggaggtaagggttgtgttgcgagtggtttatgtaggggtaggcggcgagcgagcggtggttgtaggagtttttttcgttcgacgcgtagggcgagtcgtggtggtggtgttggtggtggtggtggtggtgcgagtcggtcgttgtcgtcgtcgtcgtcgagtgtaggtagtgtagagggtagtgcgcgtttgttatggtcggggagttttgttgcgagtgcggttgcggcggcggcggcggcggcggt

SEQ ID NO: 1732 - DNA, 659 bp, Artificial Sequence
  chemically treated genomic DNA (Homo sapiens) CpG-island No: 1732
accgccgccgccgccgccgccgcaaccgcactcgcaacaaaactccccgaccataacaaacgcgcactaccctctacactacctacactcgacgacgacgacgacaacgaccgactcgcaccaccaccaccaccaccaacaccaccaccacgactcgccctacgcgtcgaacgaaaaaaactcctacaaccaccgctcgctcgccgcctacccctacataaaccactcgcaacacaacccttacctccaatcctaccacaacaacaacgcaaccgcccaaacgcgaaaaaacgacacaaataaaaaaccgctaaaacaactcgcttctcccgcctcccgactaccccctaccccgcccgcccgctcacttcctcgacgcccgaacctccgccgaccccctcccccaaacgaccccgcgcgcccttaaccgaaccccgtacgcgcccgctcgcctaacgcctacctaccgacctctcccaaccgaaccccttcccgccgccgcgaaccctcaacttccgacgcgcaattcgaactaaatcccgaacccgacgcaaacttcgttcgacgaattaatccacactacgctctccaacctcctaaatctatacgcccttttccttactccttccctccaaactataacccacgtttaacccgac

SEQ ID NO: 1733 - DNA, 672 bp, Artificial Sequence
  chemically treated genomic DNA (Homo sapiens) CpG-island No: 1733
tgcgcgcggattcggtttatagtttttttttcgtagttttcggcggtttcgagtcgcgtacgtagtcgtcggggatagatttttttttttatttagattgggattacgtgcgtgtggtttggggcggttcgggtttcgtttcgttcgacgttgttttttgtatattttcgcggtttcggttcgcggttgtagttcgtagtgggtcgtagttaatagaggtttcggggatttcgggattattgaataggtaggttatttcgttgttgtacgcgttggcggtcgaggcggaggtcgcggcgtaggttgtcgagtcgtttagttcgtcggtttcgagggtcgtttatcgttagcggttttagggcgcgtagcggcgagtgtttcgggagacgtcgttttagcgtaaggagtttcgtatgagtttgttcgttcgtttgcggtttattgttttagcgcggttttcggcgatttattcgcgtttcgtttcgtttagttattcgggcggggagggggagtcggcgcgttttcgggttttcgcgttaggaattgtcggtcggggttttttcgttaattagtagcggaagtggtgttttttagagttaggaaagttggatcgtgtgggtcggggcggtgggtcggcgcgggaatgtttgggtgaggtttgttttagttttg

SEQ ID NO: 1734 - DNA, 672 bp, Artificial Sequence
  chemically treated genomic DNA (Homo sapiens) CpG-island No: 1734
caaaactaaaacaaacctcacccaaacattcccgcgccgacccaccgccccgacccacacgatccaactttcctaactctaaaaaacaccacttccgctactaattaacgaaaaaaccccgaccgacaattcctaacgcgaaaacccgaaaacgcgccgactccccctccccgcccgaataactaaacgaaacgaaacgcgaataaatcgccgaaaaccgcgctaaaacaataaaccgcaaacgaacgaacaaactcatacgaaactccttacgctaaaacgacgtctcccgaaacactcgccgctacgcgccctaaaaccgctaacgataaacgaccctcgaaaccgacgaactaaacgactcgacaacctacgccgcgacctccgcctcgaccgccaacgcgtacaacaacgaaataacctacctattcaataatcccgaaatccccgaaacctctattaactacgacccactacgaactacaaccgcgaaccgaaaccgcgaaaatatacaaaaaacaacgtcgaacgaaacgaaacccgaaccgccccaaaccacacgcacgtaatcccaatctaaataaaaaaaaaaatctatccccgacgactacgtacgcgactcgaaaccgccgaaaactacgaaaaaaaaactataaaccgaatccgcgcgca

SEQ ID NO: 1735 - DNA, 672 bp, Artificial Sequence
  chemically treated genomic DNA (Homo sapiens) CpG-island No: 1735
tagagttggagtaggttttatttaggtattttcgcgtcggtttatcgtttcgatttatacgatttagtttttttggttttgagaagtattattttcgttgttggttggcgaggggatttcggtcggtagtttttggcgcgggagttcgggagcgcgtcggtttttttttttcgttcgggtggttgagcgaggcggagcgcgggtgagtcgtcgggggtcgcgttgggatagtgggtcgtagacgggcgggtaggtttatgcggagttttttgcgttggaacgacgtttttcggagtattcgtcgttgcgcgttttgaagtcgttggcggtaggcggttttcgaggtcggcgggttgggcggttcggtagtttgcgtcgcggttttcgtttcggtcgttagcgcgtatagtagcggggtggtttgtttgtttagtggtttcggggttttcgggatttttgttggttgcggtttattgcgggttgtaatcgcgggtcggggtcgcggggatgtgtaaagggtagcgtcgggcggggcggggttcgggtcgttttaaattatacgtacgtagttttagtttaggtaaggaaggaggtttgttttcggcgattgcgtgcgcggttcggggtcgtcggaggttgcggagaaagagttgtaggtcgagttcgcgcgta

SEQ ID NO: 1736 - DNA, 672 bp, Artificial Sequence
  chemically treated genomic DNA (Homo sapiens) CpG-island No: 1736
tacgcgcgaactcgacctacaactctttctccgcaacctccgacgaccccgaaccgcgcacgcaatcgccgaaaacaaacctccttccttacctaaactaaaactacgtacgtataatttaaaacgacccgaaccccgccccgcccgacgctaccctttacacatccccgcgaccccgacccgcgattacaacccgcaataaaccgcaaccaacaaaaatcccgaaaaccccgaaaccactaaacaaacaaaccaccccgctactatacgcgctaacgaccgaaacgaaaaccgcgacgcaaactaccgaaccgcccaacccgccgacctcgaaaaccgcctaccgccaacgacttcaaaacgcgcaacgacgaatactccgaaaaacgtcgttccaacgcaaaaaactccgcataaacctacccgcccgtctacgacccactatcccaacgcgacccccgacgactcacccgcgctccgcctcgctcaaccacccgaacgaaaaaaaaaaaccgacgcgctcccgaactcccgcgccaaaaactaccgaccgaaatcccctcgccaaccaacaacgaaaataatacttctcaaaaccaaaaaaactaaatcgtataaatcgaaacgataaaccgacgcgaaaatacctaaataaaacctactccaactcta

SEQ ID NO: 1737 - DNA, 948 bp, Artificial Sequence
  chemically treated genomic DNA (Homo sapiens) CpG-island No: 1737
tcgtaggtttggatcgttaagaaggcggcgtagcgcgtacgaggagtcgggtcgtaggtattggtaggcgcgacgttcgttgtgattacgtacgtgtatttgggtatttagacgtattattagtagtacggtagcgttttcgtggtcgtgtagtgtagttaggtgtagcggcgtgtagtcgtcgtgggagcgtgcgtttacgtcgattggtgcgttattgcgtcgcgcgatttttattagttgtagcgttatttcgtcgtcgtcgtttttggcggtttaatgtagggtcgtgaagttagatatgaagtcgcgtttggtcgttaagtcgcggtcgcgtagtagtagttcgtgtagttggtgggtttagcggttttcggtagttcgtacgagttattcgtgttcggacggttttaggggtatcgcggacggcggcggcgcggcgggtaatttttcggcgttagggtttagtagacgcgggtcggcgcgcgataggcgttttaggtgcggggagcggttcgggtttaggtcgaggtttagatcggatttttttatcgagagtcgttttagtagtagaggggagtttcgcgggttcggttttttcgatagttgtcggcgtaggtcgggttttttcgttcggaggcggagcgtggcgggggtcgggacgtagcgtatcggtagtatatagggtttttgttgcggcggttttttcgttgtttcgggttcgggtttcgcgtttggcggattagagtagggcgatgtcgttttagaaggggttttaggcggtggggtcgcgtttgcggagggtttttcggtggtttgggttagtttaagggttggaagcggtgggtcggcggatcgtttttcgggcggttgagcgggttcggaggtcggttttttcggggtgttttgtggttttgttggtagatttaggttttttggcggttttat

SEQ ID NO: 1738 - DNA, 948 bp, Artificial Sequence
  chemically treated genomic DNA (Homo sapiens) CpG-island No: 1738
ataaaaccgccaaaaaacctaaatctaccaacaaaaccacaaaacaccccgaaaaaaccgacctccgaacccgctcaaccgcccgaaaaacgatccgccgacccaccgcttccaacccttaaactaacccaaaccaccgaaaaaccctccgcaaacgcgaccccaccgcctaaaaccccttctaaaacgacatcgccctactctaatccgccaaacgcgaaacccgaacccgaaacaacgaaaaaaccgccgcaacaaaaaccctatatactaccgatacgctacgtcccgacccccgccacgctccgcctccgaacgaaaaaacccgacctacgccgacaactatcgaaaaaaccgaacccgcgaaactcccctctactactaaaacgactctcgataaaaaaatccgatctaaacctcgacctaaacccgaaccgctccccgcacctaaaacgcctatcgcgcgccgacccgcgtctactaaaccctaacgccgaaaaattacccgccgcgccgccgccgtccgcgatacccctaaaaccgtccgaacacgaataactcgtacgaactaccgaaaaccgctaaacccaccaactacacgaactactactacgcgaccgcgacttaacgaccaaacgcgacttcatatctaacttcacgaccctacattaaaccgccaaaaacgacgacgacgaaataacgctacaactaataaaaatcgcgcgacgcaataacgcaccaatcgacgtaaacgcacgctcccacgacgactacacgccgctacacctaactacactacacgaccacgaaaacgctaccgtactactaataatacgtctaaatacccaaatacacgtacgtaatcacaacgaacgtcgcgcctaccaatacctacgacccgactcctcgtacgcgctacgccgccttcttaacgatccaaacctacga

SEQ ID NO: 1739 - DNA, 948 bp, Artificial Sequence
  chemically treated genomic DNA (Homo sapiens) CpG-island No: 1739
gtggagtcgttaggggatttgggtttgttaatagagttataggatatttcgggggggtcggttttcgagttcgtttagtcgttcggggagcggttcgtcgatttatcgtttttagtttttgagttagtttaggttatcgagagatttttcgtagacgcggttttatcgtttagggttttttttgaggcggtatcgttttgttttgattcgttagacgcggagttcgggttcggggtagcgaaagggtcgtcgtagtagaagttttgtatgttgtcggtgcgttgcgtttcggttttcgttacgtttcgttttcgggcggaggagttcggtttgcgtcggtagttgtcggaggagtcgagttcgcggagtttttttttgttgttgaggcggttttcggtggaagagttcggtttgggtttcggtttgggttcgggtcgtttttcgtatttgaggcgtttgtcgcgcgtcggttcgcgtttgttgagttttgacgtcgaggagttgttcgtcgcgtcgtcgtcgttcgcggtgtttttggagtcgttcgagtacgagtggttcgtgcggattgtcgggggtcgttggatttattagttgtacgggttgttgttgcgcgatcgcggtttggcggttaagcgcgattttatgtttggttttacggttttgtattgggtcgttaagagcggcgacggcgagatggcgttgtagttggtggaggtcgcgcggcgtagtggcgtattagtcgacgtgaacgtacgtttttacggcggttatacgtcgttgtatttggttgtattgtacggttacgaggacgttgtcgtgttgttggtggtgcgtttgggtgtttaggtgtacgtgcgtgattatagcgggcgtcgcgtttattagtatttgcggttcggtttttcgtacgcgttgcgtcgtttttttggcgatttaggtttgcga

SEQ ID NO: 1740 - DNA, 948 bp, Artificial Sequence
  chemically treated genomic DNA (Homo sapiens) CpG-island No: 1740
tcgcaaacctaaatcgccaaaaaaacgacgcaacgcgtacgaaaaaccgaaccgcaaatactaataaacgcgacgcccgctataatcacgcacgtacacctaaacacccaaacgcaccaccaacaacacgacaacgtcctcgtaaccgtacaatacaaccaaatacaacgacgtataaccgccgtaaaaacgtacgttcacgtcgactaatacgccactacgccgcgcgacctccaccaactacaacgccatctcgccgtcgccgctcttaacgacccaatacaaaaccgtaaaaccaaacataaaatcgcgcttaaccgccaaaccgcgatcgcgcaacaacaacccgtacaactaataaatccaacgacccccgacaatccgcacgaaccactcgtactcgaacgactccaaaaacaccgcgaacgacgacgacgcgacgaacaactcctcgacgtcaaaactcaacaaacgcgaaccgacgcgcgacaaacgcctcaaatacgaaaaacgacccgaacccaaaccgaaacccaaaccgaactcttccaccgaaaaccgcctcaacaacaaaaaaaaactccgcgaactcgactcctccgacaactaccgacgcaaaccgaactcctccgcccgaaaacgaaacgtaacgaaaaccgaaacgcaacgcaccgacaacatacaaaacttctactacgacgaccctttcgctaccccgaacccgaactccgcgtctaacgaatcaaaacaaaacgataccgcctcaaaaaaaaccctaaacgataaaaccgcgtctacgaaaaatctctcgataacctaaactaactcaaaaactaaaaacgataaatcgacgaaccgctccccgaacgactaaacgaactcgaaaaccgacccccccgaaatatcctataactctattaacaaacccaaatcccctaacgactccac

SEQ ID NO: 1741 - DNA, 839 bp, Artificial Sequence
  chemically treated genomic DNA (Homo sapiens) CpG-island No: 1741
ttcgcggtaagatcgtcgaagtgggtttcgacggttgggtcgttgttttcggggggtcgaagggtgcgggttcgggtttcgggggtcggggttttttttttagtattacgaatttgacgtcgtcgagtttttttattatcgttacgttgttgacgaattgtttgaagcggtttttgcgggcggcgcggtttcgcgggtcgtcggtatcgagtagcggtttgaagcggtttagtagttcggagttgcgtattttttcgtcgtgtttttgtaggaagtttagtatcgtcgtttggtttatttcggtagtcgtagcggcggcggcggcggttagcgttatggtggggttttgggtttttggttttcggggcgggtgggcgtcgcgtcgtcgcgggacgcgcgggagcggggtttcgggaggcgcggtcgcgtttatttggtgtttttttcgcggttagtcgggcgtgttttcgaagttggatttcggtcgcgttagtgtcgttgggtcggggcgtttcggggcgaagggcgtcgggggtcgcggggagcgtttatttttagcgtttcgtcgggtttcggttttcggggtaggtttttgtttttgtattttgtttaatgggcgtttgtttttatttttcgcgtcgcgttcgttttataggtgatagttgttttcgcgatgtagagggaatcggagtagaaattttcgtcgtttttcgttcgttttagaattaaaggcgtagcgttttagttttggtttcggttgttaggtgggtgtgttttttagggacgtcgcggttcgttaaggaggaatggatttttatttttttaataaatatttaatt

SEQ ID NO: 1742 - DNA, 839 bp, Artificial Sequence
  chemically treated genomic DNA (Homo sapiens) CpG-island No: 1742
aattaaatatttattaaaaaaataaaaatccattcctccttaacgaaccgcgacgtccctaaaaaacacacccacctaacaaccgaaaccaaaactaaaacgctacgcctttaattctaaaacgaacgaaaaacgacgaaaatttctactccgattccctctacatcgcgaaaacaactatcacctataaaacgaacgcgacgcgaaaaataaaaacaaacgcccattaaacaaaatacaaaaacaaaaacctaccccgaaaaccgaaacccgacgaaacgctaaaaataaacgctccccgcgacccccgacgcccttcgccccgaaacgccccgacccaacgacactaacgcgaccgaaatccaacttcgaaaacacgcccgactaaccgcgaaaaaaacaccaaataaacgcgaccgcgcctcccgaaaccccgctcccgcgcgtcccgcgacgacgcgacgcccacccgccccgaaaaccaaaaacccaaaaccccaccataacgctaaccgccgccgccgccgctacgactaccgaaataaaccaaacgacgatactaaacttcctacaaaaacacgacgaaaaaatacgcaactccgaactactaaaccgcttcaaaccgctactcgataccgacgacccgcgaaaccgcgccgcccgcaaaaaccgcttcaaacaattcgtcaacaacgtaacgataataaaaaaactcgacgacgtcaaattcgtaatactaaaaaaaaaaccccgacccccgaaacccgaacccgcacccttcgaccccccgaaaacaacgacccaaccgtcgaaacccacttcgacgatcttaccgcgaa

SEQ ID NO: 1743 - DNA, 839 bp, Artificial Sequence
  chemically treated genomic DNA (Homo sapiens) CpG-island No: 1743
ggttaaatgtttattaaaggaataaaaatttatttttttttggcggatcgcggcgtttttagggaatatatttatttagtaatcgagattagagttggagcgttgcgtttttaattttggggcgggcggggggcggcgggaatttttgtttcggttttttttgtatcgcgggggtagttgttatttgtaaggcgagcgcggcgcgggggatggaagtaggcgtttattggatagaatataaaggtagaaatttatttcgaaggtcggggttcggcggggcgttgggggtgggcgtttttcgcggttttcggcgtttttcgtttcgagacgtttcggtttagcggtattggcgcgatcgaggtttagtttcggggatacgttcggttggtcgcggggaaggtattaggtgagcgcggtcgcgtttttcggaatttcgttttcgcgcgtttcgcggcgacgcggcgtttattcgtttcgggagttaggaatttagggttttattatggcgttggtcgtcgtcgtcgtcgttgcggttgtcggggtgagttaggcggcggtgttgggttttttgtaggagtacggcgggaaggtgcgtaatttcgagttgttgagtcgttttaagtcgttgttcgatgtcggcgattcgcggggtcgcgtcgttcgtagggatcgttttaagtagttcgttaataacgtggcggtggtgaaggagttcgacggcgttaagttcgtggtgttgaggaagaagtttcggttttcggagttcgagttcgtatttttcggtttttcgggggtagcggtttagtcgtcgaaatttatttcgacggttttgtcgcgga

SEQ ID NO: 1744 - DNA, 839 bp, Artificial Sequence
  chemically treated genomic DNA (Homo sapiens) CpG-island No: 1744
tccgcgacaaaaccgtcgaaataaatttcgacgactaaaccgctacccccgaaaaaccgaaaaatacgaactcgaactccgaaaaccgaaacttcttcctcaacaccacgaacttaacgccgtcgaactccttcaccaccgccacgttattaacgaactacttaaaacgatccctacgaacgacgcgaccccgcgaatcgccgacatcgaacaacgacttaaaacgactcaacaactcgaaattacgcaccttcccgccgtactcctacaaaaaacccaacaccgccgcctaactcaccccgacaaccgcaacgacgacgacgacgaccaacgccataataaaaccctaaattcctaactcccgaaacgaataaacgccgcgtcgccgcgaaacgcgcgaaaacgaaattccgaaaaacgcgaccgcgctcacctaataccttccccgcgaccaaccgaacgtatccccgaaactaaacctcgatcgcgccaataccgctaaaccgaaacgtctcgaaacgaaaaacgccgaaaaccgcgaaaaacgcccacccccaacgccccgccgaaccccgaccttcgaaataaatttctacctttatattctatccaataaacgcctacttccatcccccgcgccgcgctcgccttacaaataacaactacccccgcgatacaaaaaaaaccgaaacaaaaattcccgccgccccccgcccgccccaaaattaaaaacgcaacgctccaactctaatctcgattactaaataaatatattccctaaaaacgccgcgatccgccaaaaaaaaataaatttttattcctttaataaacatttaacc

SEQ ID NO: 1745 - DNA, 759 bp, Artificial Sequence
  chemically treated genomic DNA (Homo sapiens) CpG-island No: 1745
ttttttaacgcgcggattataagttttagtagttttcgtagttggtatttttcgtttcgtcgcggagattttcggtcgtttaagcggcggggtttcggttgcgttcgtggtcgggtcgggcggggaggtcggtttcgcgggcgggggtaggggcggtttcgcggtttttttcgtcgtcgtcgttaaggggagtttttaggaagtggttatattggatttatttagtcgtagtcgttcgggcggagcgcgtttcgtagtcggttggtttttgtcgttgtttttgcgttcgttttagtttattcgttcggtgcggagttcgttatggcggttatcgatttggagcgtttttcggtgagggtttcgttgggttacggcgcgcgcgggaggcgcggggcgtaggaggggtcgttttgtagttggcggggggcgcgaagcgggttgttagcgttttacggtcgggtttcgatatcgggttagttcgaggatttcggcgcgggttttcggtcgcgttatcggggggtttcggagcgtcgggcggtttgttttgtcgggcggttggtcggggtcgttttttggggcgtaggtaaggttaatttttttcgcgggaaggagtaaagattcgtttggtttcgggtaggtgcgaagatagagtggcgttcgcggggtcgtaggtgagggttcgggatatttcggattttatcgtttagggtgtttttttttgtatatttggggaagagttttagtcgtataggtgttgcg

SEQ ID NO: 1746 - DNA, 759 bp, Artificial Sequence
  chemically treated genomic DNA (Homo sapiens) CpG-island No: 1746
cgcaacacctatacgactaaaactcttccccaaatatacaaaaaaaaacaccctaaacgataaaatccgaaatatcccgaaccctcacctacgaccccgcgaacgccactctatcttcgcacctacccgaaaccaaacgaatctttactccttcccgcgaaaaaaattaaccttacctacgccccaaaaaacgaccccgaccaaccgcccgacaaaacaaaccgcccgacgctccgaaaccccccgataacgcgaccgaaaacccgcgccgaaatcctcgaactaacccgatatcgaaacccgaccgtaaaacgctaacaacccgcttcgcgccccccgccaactacaaaacgacccctcctacgccccgcgcctcccgcgcgcgccgtaacccaacgaaaccctcaccgaaaaacgctccaaatcgataaccgccataacgaactccgcaccgaacgaataaactaaaacgaacgcaaaaacaacgacaaaaaccaaccgactacgaaacgcgctccgcccgaacgactacgactaaataaatccaatataaccacttcctaaaaactccccttaacgacgacgacgaaaaaaaccgcgaaaccgcccctacccccgcccgcgaaaccgacctccccgcccgacccgaccacgaacgcaaccgaaaccccgccgcttaaacgaccgaaaatctccgcgacgaaacgaaaaataccaactacgaaaactactaaaacttataatccgcgcgttaaaaaa

SEQ ID NO: 1747 - DNA, 759 bp, Artificial Sequence
  chemically treated genomic DNA (Homo sapiens) CpG-island No: 1747
cgtagtatttgtgcggttaggatttttttttaagtgtgtagaaagaaatattttgggcgatagggttcggagtgtttcggatttttatttgcggtttcgcgggcgttattttattttcgtatttgttcggagttaggcgggtttttgttttttttcgcgaaaggggttagttttgtttgcgttttaggaagcgatttcgattagtcgttcggtaaggtaggtcgttcgacgtttcgggatttttcgatagcgcggtcgagagttcgcgtcggggttttcgagttggttcggtgtcgaggttcggtcgtgaggcgttgatagttcgtttcgcgtttttcgttagttgtagggcggttttttttgcgtttcgcgtttttcgcgcgcgtcgtggtttagcggggtttttatcgagaagcgttttaggtcggtggtcgttatggcgagtttcgtatcgggcgggtgggttgggacgagcgtaggggtagcgatagggattagtcggttgcgggacgcgtttcgttcgggcggttgcggttgaatggatttaatatggttattttttggaaattttttttggcggcggcggcgggagaagtcgcggagtcgtttttgttttcgttcgcgggatcggttttttcgttcggttcggttacgagcgtagtcggagtttcgtcgtttggacggtcgggggttttcgcggcgaggcgggaggtgttagttgcggggattgttgggatttgtagttcgcgcgttggggga

SEQ ID NO: 1748 - DNA, 759 bp, Artificial Sequence
  chemically treated genomic DNA (Homo sapiens) CpG-island No: 1748
tcccccaacgcgcgaactacaaatcccaacaatccccgcaactaacacctcccgcctcgccgcgaaaacccccgaccgtccaaacgacgaaactccgactacgctcgtaaccgaaccgaacgaaaaaaccgatcccgcgaacgaaaacaaaaacgactccgcgacttctcccgccgccgccgccaaaaaaaatttccaaaaaataaccatattaaatccattcaaccgcaaccgcccgaacgaaacgcgtcccgcaaccgactaatccctatcgctacccctacgctcgtcccaacccacccgcccgatacgaaactcgccataacgaccaccgacctaaaacgcttctcgataaaaaccccgctaaaccacgacgcgcgcgaaaaacgcgaaacgcaaaaaaaaccgccctacaactaacgaaaaacgcgaaacgaactatcaacgcctcacgaccgaacctcgacaccgaaccaactcgaaaaccccgacgcgaactctcgaccgcgctatcgaaaaatcccgaaacgtcgaacgacctaccttaccgaacgactaatcgaaatcgcttcctaaaacgcaaacaaaactaacccctttcgcgaaaaaaaacaaaaacccgcctaactccgaacaaatacgaaaataaaataacgcccgcgaaaccgcaaataaaaatccgaaacactccgaaccctatcgcccaaaatatttctttctacacacttaaaaaaaaatcctaaccgcacaaatactacg

SEQ ID NO: 1749 - DNA, 1189 bp, Artificial Sequence
  chemically treated genomic DNA (Homo sapiens) CpG-island No: 1749
aatataggcgcgttgttatttgtgtttattataatgatggtgatttgtgcgttttttgagcgggtaggtagttcgtcgtttcgagttgtaagtattagtaggtgggtggcgcgttgttcgcgatttagtgttttttttaatattaatttcgggtattcgttgtcgttaattcgcgattttatgtttaggcgaaagtgttgattggggtttaggttgtagtttagtattttattgtttttttcgtcgttattttgggtattcgggagagtaaagcgggtttcgggcgttaggaattcggggatgtgtagttgtacgtcgtcggtaggaaagagaggtgagttgttattggtgtttaggacgtgaattcgaattttgtgtagttttagcgggttttcgagtattaggtcgtaggttaagacgtaggtagttttggttttgtatagttgttcgcggttcgtcggttttttgattattaaattgtcgttgggtagatttatttcgaagtagagttcgcggtggttggaaaggaagcgaaagtttcgcgaggatatagcggtcgttggtagttttaagttcgcggagagattgtttacggttacgtttcgtttcgtttttttcggtattgagtattcgagttgtttcgttgtagcgtcgtaggaaatttataaatataaaattgttattttatagtttattattttttttttaggcgtttacgttttattaatacgttatattaacggtgatttaggattatgtttcggatttttggagagtacgagtcgcggggaagagtacgtttttgtcggtcgttattgttgcgggttggatatttagcgatcgtcgacgttgcgtttttcgaacgtcggtattgtcggggttggttagttgggagtcgggtttgttaggttggaggttgggtagtcgtttgggaaagcggagtcggtcgggtgttgaggagcgtagcgtcgtttaggggtgtagagacgaggtcgttcgttcgggcgcgagaggtgttgtttttagtagtagcgggttggggtttcgattataacgttggttgcgggcgtagggcggagtttgggagacgtttcgagatattaatatttttttttttaaacggtgttttttaggataacgttttgaggttgtttagattttaatttttatattttttgttcgtagattg

SEQ ID NO: 1750 - DNA, 1189 bp, Artificial Sequence
  chemically treated genomic DNA (Homo sapiens) CpG-island No: 1750
caatctacgaacaaaaaatataaaaattaaaatctaaacaacctcaaaacgttatcctaaaaaacaccgtttaaaaaaaaaaatattaatatctcgaaacgtctcccaaactccgccctacgcccgcaaccaacgttataatcgaaaccccaacccgctactactaaaaacaacacctctcgcgcccgaacgaacgacctcgtctctacacccctaaacgacgctacgctcctcaacacccgaccgactccgctttcccaaacgactacccaacctccaacctaacaaacccgactcccaactaaccaaccccgacaataccgacgttcgaaaaacgcaacgtcgacgatcgctaaatatccaacccgcaacaataacgaccgacaaaaacgtactcttccccgcgactcgtactctccaaaaatccgaaacataatcctaaatcaccgttaatataacgtattaataaaacgtaaacgcctaaaaaaaaaataataaactataaaataacaattttatatttataaatttcctacgacgctacaacgaaacaactcgaatactcaataccgaaaaaaacgaaacgaaacgtaaccgtaaacaatctctccgcgaacttaaaactaccaacgaccgctatatcctcgcgaaactttcgcttcctttccaaccaccgcgaactctacttcgaaataaatctacccaacgacaatttaataatcaaaaaaccgacgaaccgcgaacaactatacaaaaccaaaactacctacgtcttaacctacgacctaatactcgaaaacccgctaaaactacacaaaattcgaattcacgtcctaaacaccaataacaactcacctctctttcctaccgacgacgtacaactacacatccccgaattcctaacgcccgaaacccgctttactctcccgaatacccaaaataacgacgaaaaaaacaataaaatactaaactacaacctaaaccccaatcaacactttcgcctaaacataaaatcgcgaattaacgacaacgaatacccgaaattaatattaaaaaaaacactaaatcgcgaacaacgcgccacccacctactaatacttacaactcgaaacgacgaactacctacccgctcaaaaaacgcacaaatcaccatcattataataaacacaaataacaacgcgcctatatt

SEQ ID NO: 1751 - DNA, 1189 bp, Artificial Sequence
  chemically treated genomic DNA (Homo sapiens) CpG-island No: 1751
taatttgcgggtagaggatgtggaggttaagatttgggtagttttagggcgttgttttagaaaatatcgtttaaggagagaagtgttagtgtttcggggcgttttttaggtttcgttttgcgttcgtagttagcgttgtggtcgagattttagttcgttgttattggagatagtatttttcgcgttcgggcgggcggtttcgtttttgtatttttaggcggcgttgcgttttttaatattcggtcggtttcgtttttttagacggttgtttagtttttagtttagtaagttcggtttttagttggttagtttcggtaatgtcggcgttcgggaggcgtaacgtcggcggtcgttgagtatttagttcgtagtagtgacggtcggtaggagcgtgttttttttcgcggttcgtgttttttaggagttcggagtatggttttgggttatcgttggtgtagcgtgttggtggaacgtggacgtttagagggaggatggtgggttgtggggtggtagttttatgtttgtgggttttttgcggcgttgtagcgggatagttcgagtatttagtgtcggaggagacggagcggggcgtagtcgtaggtaattttttcgcggatttgaggttgttagcggtcgttatgttttcgcggaattttcgttttttttttagttatcgcgagttttatttcggggtggatttatttagcggtaatttggtggttagagagtcggcggatcgcgaatagttgtgtagggttaaagttgtttgcgttttgatttacgatttggtgttcgaggattcgttggagttgtataagattcggatttacgttttggatattaatgataatttattttttttttttgtcggcgacgtgtagttgtatattttcgagtttttgacgttcggagttcgttttattttttcgaatgtttaagatgacgacgagggaagtaatgggatattaagttatagtttaagttttagttagtattttcgtttggatatgggatcgcgggttgacggtagcgaatattcggagttggtgttggagaaagtattggatcgcgaatagcgcgttatttatttgttggtgtttatagttcgggacggcgggttatttgttcgtttaggagacgtataagttattattattgtggtggatataaatgataacgcgtttgtatt

SEQ ID NO: 1752 - DNA, 1189 bp, Artificial Sequence
  chemically treated genomic DNA (Homo sapiens) CpG-island No: 1752
aatacaaacgcgttatcatttatatccaccacaataataataacttatacgtctcctaaacgaacaaataacccgccgtcccgaactataaacaccaacaaataaataacgcgctattcgcgatccaatactttctccaacaccaactccgaatattcgctaccgtcaacccgcgatcccatatccaaacgaaaatactaactaaaacttaaactataacttaatatcccattacttccctcgtcgtcatcttaaacattcgaaaaaataaaacgaactccgaacgtcaaaaactcgaaaatatacaactacacgtcgccgacaaaaaaaaaaaataaattatcattaatatccaaaacgtaaatccgaatcttatacaactccaacgaatcctcgaacaccaaatcgtaaatcaaaacgcaaacaactttaaccctacacaactattcgcgatccgccgactctctaaccaccaaattaccgctaaataaatccaccccgaaataaaactcgcgataactaaaaaaaaaacgaaaattccgcgaaaacataacgaccgctaacaacctcaaatccgcgaaaaaattacctacgactacgccccgctccgtctcctccgacactaaatactcgaactatcccgctacaacgccgcaaaaaacccacaaacataaaactaccaccccacaacccaccatcctccctctaaacgtccacgttccaccaacacgctacaccaacgataacccaaaaccatactccgaactcctaaaaaacacgaaccgcgaaaaaaaacacgctcctaccgaccgtcactactacgaactaaatactcaacgaccgccgacgttacgcctcccgaacgccgacattaccgaaactaaccaactaaaaaccgaacttactaaactaaaaactaaacaaccgtctaaaaaaacgaaaccgaccgaatattaaaaaacgcaacgccgcctaaaaatacaaaaacgaaaccgcccgcccgaacgcgaaaaatactatctccaataacaacgaactaaaatctcgaccacaacgctaactacgaacgcaaaacgaaacctaaaaaacgccccgaaacactaacacttctctccttaaacgatattttctaaaacaacgccctaaaactacccaaatcttaacctccacatcctctacccgcaaatta

SEQ ID NO: 1753 - DNA, 738 bp, Artificial Sequence
  chemically treated genomic DNA (Homo sapiens) CpG-island No: 1753
tatcgttttataacgtgcgtagacgtcgttttttcgtacggatgttcgcggttcgggtcggggtgggaaggggtttttttacgttttcgtttaggtttggtcgttatttttcggagcgttttttttcgcgagtgttgtagtttcggattttaggcgttcgttagttatagaggttaatttttaattcgcgcggttcgaatttcgggggttttatcgtttgtcggtcgattcgtttatgtcggaggtacggcgggggcggggtttggcggggggcggggttagtattgcggtcgttgtagttgcgtaacggcgttcgttttttcggtcgttttaggggcgcgcgtcgtttttcgtttcgtttaattcgcgcgcgagtttgggcggggagggggagttaggaagttgcgagcgcgttggggagcgtagttgtaggcgttggggcggtaggagtcgcggagtcggcgttgagaggggttgcggtcggagcgggcggttgagataaaggcgacggtgagtgtaatgttagttttagtcgcgcgtcggtcgttacgtttcgttttttcggttttttgggcggggtttcgaagtttcgaattttcgtttttgagggttttggggtgagcgcggttcggttttgttagtcgcgcgttgcgggttgtgggttgagtttgcgttttttattttaggtttgggcgaggtttttatgttttaggattttgtttttggttttttttttgt

SEQ ID NO: 1754 - DNA, 738 bp, Artificial Sequence
  chemically treated genomic DNA (Homo sapiens) CpG-island No: 1754
acaaaaaaaaaaccaaaaacaaaatcctaaaacataaaaacctcgcccaaacctaaaataaaaaacgcaaactcaacccacaacccgcaacgcgcgactaacaaaaccgaaccgcgctcaccccaaaaccctcaaaaacgaaaattcgaaacttcgaaaccccgcccaaaaaaccgaaaaaacgaaacgtaacgaccgacgcgcgactaaaactaacattacactcaccgtcgcctttatctcaaccgcccgctccgaccgcaacccctctcaacgccgactccgcgactcctaccgccccaacgcctacaactacgctccccaacgcgctcgcaacttcctaactccccctccccgcccaaactcgcgcgcgaattaaacgaaacgaaaaacgacgcgcgcccctaaaacgaccgaaaaaacgaacgccgttacgcaactacaacgaccgcaatactaaccccgccccccgccaaaccccgcccccgccgtacctccgacataaacgaatcgaccgacaaacgataaaacccccgaaattcgaaccgcgcgaattaaaaattaacctctataactaacgaacgcctaaaatccgaaactacaacactcgcgaaaaaaaacgctccgaaaaataacgaccaaacctaaacgaaaacgtaaaaaaaccccttcccaccccgacccgaaccgcgaacatccgtacgaaaaaacgacgtctacgcacgttataaaacgata

SEQ ID NO: 1755 - DNA, 738 bp, Artificial Sequence
  chemically treated genomic DNA (Homo sapiens) CpG-island No: 1755
atagaagaaaaattaaaggtagggttttagggtatgaggatttcgtttaaatttgaaatggaagacgtaggtttagtttatagttcgtagcgcgcggttggtaaggtcgggtcgcgtttattttagagtttttagggacgagggttcggggtttcgggatttcgtttaagggatcgagagggcgaggcgtggcggtcgacgcgcgattggggttggtattgtatttatcgtcgtttttgttttagtcgttcgtttcggtcgtagttttttttagcgtcggtttcgcggtttttgtcgttttaacgtttgtagttgcgttttttagcgcgttcgtagttttttggtttttttttttcgtttaggttcgcgcgcgggttgggcggagcgagaggcggcgcgcgtttttagagcggtcggaggggcgggcgtcgttgcgtagttgtagcgatcgtagtgttggtttcgtttttcgttaggtttcgttttcgtcgtattttcggtatgggcgaatcggtcggtaggcgatgggattttcgggattcgagtcgcgcgggttaggaattggtttttgtagttaacggacgtttgagattcgggattgtagtattcgcgggaaaggacgtttcgaaagatggcgattaaatttgggcgggagcgtgggggagtttttttttatttcggttcgggtcgcggatattcgtgcggaggagcgacgtttgcgtacgttgtggggcggtg

SEQ ID NO: 1756 - DNA, 738 bp, Artificial Sequence
  chemically treated genomic DNA (Homo sapiens) CpG-island No: 1756
caccgccccacaacgtacgcaaacgtcgctcctccgcacgaatatccgcgacccgaaccgaaataaaaaaaaactcccccacgctcccgcccaaatttaatcgccatctttcgaaacgtcctttcccgcgaatactacaatcccgaatctcaaacgtccgttaactacaaaaaccaattcctaacccgcgcgactcgaatcccgaaaatcccatcgcctaccgaccgattcgcccataccgaaaatacgacgaaaacgaaacctaacgaaaaacgaaaccaacactacgatcgctacaactacgcaacgacgcccgcccctccgaccgctctaaaaacgcgcgccgcctctcgctccgcccaacccgcgcgcgaacctaaacgaaaaaaaaaaaccaaaaaactacgaacgcgctaaaaaacgcaactacaaacgttaaaacgacaaaaaccgcgaaaccgacgctaaaaaaaactacgaccgaaacgaacgactaaaacaaaaacgacgataaatacaataccaaccccaatcgcgcgtcgaccgccacgcctcgccctctcgatcccttaaacgaaatcccgaaaccccgaaccctcgtccctaaaaactctaaaataaacgcgacccgaccttaccaaccgcgcgctacgaactataaactaaacctacgtcttccatttcaaatttaaacgaaatcctcataccctaaaaccctacctttaatttttcttctat

SEQ ID NO: 1757 - DNA, 535 bp, Artificial Sequence
  chemically treated genomic DNA (Homo sapiens) CpG-island No: 1757
gcgaaggttagtggcgcggtttgggttggggtcgtttcgatcgttttcgatcgacgttatttaggagggtttggggaaggggacgcgaggagttgggaatacgtagcgtcgttttagcgggacgggcgggttcgggttggcgtcgaattcgcgttcgagagtttagttcgcggttaggtcgtcgttttcggagttcgttggggttcggagtttcggttttttacgtttggtcgttattagaataaaagttgtggtttagttcggagtttaggcgtttcgtaggtttggttcgcgtcgggtcgttagtttttttacgtttggcggtcgcgtttttagtttttcggttcgagtacgttcggtttttttcgttacggtcggcgtaggtggagggggcggggcgggggtcgtgcgtggtgacgtcgcgggggggtgacgtatcggcgtgtttcgtttttatttttttttcgtttaggttttggaaagagaagaaaaaaaatttttttttttttttaattgaggaattaatagtcgttat

SEQ ID NO: 1758 - DNA, 535 bp, Artificial Sequence
  chemically treated genomic DNA (Homo sapiens) CpG-island No: 1758
ataacgactattaattcctcaattaaaaaaaaaaaaaaattttttttcttctctttccaaaacctaaacgaaaaaaaaataaaaacgaaacacgccgatacgtcacccccccgcgacgtcaccacgcacgacccccgccccgccccctccacctacgccgaccgtaacgaaaaaaaccgaacgtactcgaaccgaaaaactaaaaacgcgaccgccaaacgtaaaaaaactaacgacccgacgcgaaccaaacctacgaaacgcctaaactccgaactaaaccacaacttttattctaataacgaccaaacgtaaaaaaccgaaactccgaaccccaacgaactccgaaaacgacgacctaaccgcgaactaaactctcgaacgcgaattcgacgccaacccgaacccgcccgtcccgctaaaacgacgctacgtattcccaactcctcgcgtccccttccccaaaccctcctaaataacgtcgatcgaaaacgatcgaaacgaccccaacccaaaccgcgccactaaccttcgc

SEQ ID NO: 1759 - DNA, 535 bp, Artificial Sequence
  chemically treated genomic DNA (Homo sapiens) CpG-island No: 1759
atggcggttgttgattttttaattaaaaaaaaaagaaagtttttttttttttttttttagagtttgaacggggagggggtgggggcggggtacgtcggtgcgttattttttcgcggcgttattacgtacggttttcgtttcgttttttttatttgcgtcggtcgtggcggaaagagtcgagcgtgttcgggtcgaagggttgaaggcgcggtcgttaagcgtagggaagttggcggttcggcgcgggttaggtttgcggggcgtttgggtttcgggttgagttatagtttttgttttgatggcgattaggcgtagagggtcggggtttcgggttttagcgggtttcgggagcggcggtttggtcgcgggttgggttttcgggcgcggattcgacgttagttcgggttcgttcgtttcgttggggcggcgttgcgtgtttttagtttttcgcgtttttttttttagatttttttaggtggcgtcggtcgggaacggtcggggcgattttagtttaggtcgcgttattagttttcgt

SEQ ID NO: 1760 - DNA, 535 bp, Artificial Sequence
  chemically treated genomic DNA (Homo sapiens) CpG-island No: 1760
acgaaaactaataacgcgacctaaactaaaatcgccccgaccgttcccgaccgacgccacctaaaaaaatctaaaaaaaaaaacgcgaaaaactaaaaacacgcaacgccgccccaacgaaacgaacgaacccgaactaacgtcgaatccgcgcccgaaaacccaacccgcgaccaaaccgccgctcccgaaacccgctaaaacccgaaaccccgaccctctacgcctaatcgccatcaaaacaaaaactataactcaacccgaaacccaaacgccccgcaaacctaacccgcgccgaaccgccaacttccctacgcttaacgaccgcgccttcaacccttcgacccgaacacgctcgactctttccgccacgaccgacgcaaataaaaaaaacgaaacgaaaaccgtacgtaataacgccgcgaaaaaataacgcaccgacgtaccccgcccccaccccctccccgttcaaactctaaaaaaaaaaaaaaaaaaactttcttttttttttaattaaaaaatcaacaaccgccat

SEQ ID NO: 1761 - DNA, 1273 bp, Artificial Sequence
  chemically treated genomic DNA (Homo sapiens) CpG-island No: 1761
ttcgtcggtttcgggttttataatcgttcgcgtatttcgtttcgttcggtcggttcgtttcgttcggttttcggcgttcgtttcggcggtttcgttcgtttttcggttcggtttttcggagttcggcggcggcggcggcggtagcggcggcggcggcggcggaacggggggtgggggggtcgcggcggcggcggcgatttcgttcggcgtattgtttttttttacggcggcggcggcggcgggtcgcgggtcgggagcggagttcggagttttttcgtcgtcgggtcgcgagcgaatttattaagtggggcgcggggggggagcgaggcggcggcggcggcggtattatgttttcggggattgtttgagtcgttcggtcgggcgtcgtcgttgttagtcgggttcgggggggcggtcgggtcgtcggggcgtttttatcgcggagtgtcgcgttcgggaggcgggtaggggatgagggggtcgcggtcggcggcggcggcggcggtcgggggcgggcggtgagcgttgcggggcgttgttgttgtggttgagatttggtcgtcgttttttttattcggtttgcgttttttttttttttcggcgttcgttcgttcgttcgcggttcgcgttcgtttttttttttcgtagtcggtagggttttcgattttcgttcgggttttcgtcggttcggtcgttcgtgttcggggttgttttcgcgagtaggtgaaaatggttgagaatttgttggacggatcgtttaattttaaaagagttaaatttagttcgttcggtttttcggcgaatgatagtataggtgaggagggggttcggggcggcgggggttcggggcgcgttgttatttttatttgaaagagagcgttcgggggtcgtggtcgcggatatcgatcgagtcgggagttcggagtaggtttcgtagttcgtttttttcgtttcgcgcgggagggtggaagttcgtcgtaggattgttattgggttcgagttggttagtatacgttcggtgtattcggttttttcgtattcgattagtttttttcgcggggattttagtggtattttaggagggaagaagtaaagtgtagcgtgtgggtttgtttggtaatgttttacgtatttattcgcggtcgtgtttatacgcgtggtcgtttagaggaatgatagcggagggtatttttgatgtttagagaaagtaagatcgcggttaaaggtagggtagtgtgttttttggattggcgatatattgattaggttgtat

SEQ ID NO: 1762 - DNA, 1273 bp, Artificial Sequence
  chemically treated genomic DNA (Homo sapiens) CpG-island No: 1762
atacaacctaatcaatatatcgccaatccaaaaaacacactaccctacctttaaccgcgatcttactttctctaaacatcaaaaataccctccgctatcattcctctaaacgaccacgcgtataaacacgaccgcgaataaatacgtaaaacattaccaaacaaacccacacgctacactttacttcttccctcctaaaataccactaaaatccccgcgaaaaaaactaatcgaatacgaaaaaaccgaatacaccgaacgtatactaaccaactcgaacccaataacaatcctacgacgaacttccaccctcccgcgcgaaacgaaaaaaacgaactacgaaacctactccgaactcccgactcgatcgatatccgcgaccacgacccccgaacgctctctttcaaataaaaataacaacgcgccccgaacccccgccgccccgaaccccctcctcacctatactatcattcgccgaaaaaccgaacgaactaaatttaactcttttaaaattaaacgatccgtccaacaaattctcaaccattttcacctactcgcgaaaacaaccccgaacacgaacgaccgaaccgacgaaaacccgaacgaaaatcgaaaaccctaccgactacgaaaaaaaaaaacgaacgcgaaccgcgaacgaacgaacgaacgccgaaaaaaaaaaaaaacgcaaaccgaataaaaaaaacgacgaccaaatctcaaccacaacaacaacgccccgcaacgctcaccgcccgcccccgaccgccgccgccgccgccgaccgcgaccccctcatcccctacccgcctcccgaacgcgacactccgcgataaaaacgccccgacgacccgaccgcccccccgaacccgactaacaacgacgacgcccgaccgaacgactcaaacaatccccgaaaacataataccgccgccgccgccgcctcgctccccccccgcgccccacttaataaattcgctcgcgacccgacgacgaaaaaactccgaactccgctcccgacccgcgacccgccgccgccgccgccgtaaaaaaaaacaatacgccgaacgaaatcgccgccgccgccgcgacccccccaccccccgttccgccgccgccgccgccgctaccgccgccgccgccgccgaactccgaaaaaccgaaccgaaaaacgaacgaaaccgccgaaacgaacgccgaaaaccgaacgaaacgaaccgaccgaacgaaacgaaatacgcgaacgattataaaacccgaaaccgacgaa

SEQ ID NO: 1763 - DNA, 1273 bp, Artificial Sequence
  chemically treated genomic DNA (Homo sapiens) CpG-island No: 1763
atgtagtttggttaatgtgtcgttaatttagaaaatatattgttttatttttggtcgcgattttgttttttttaagtattaaaggtatttttcgttgttatttttttggacggttacgcgtgtggatacggtcgcggatggatgcgtaggatattattaaataaatttatacgttgtattttatttttttttttttggagtgttattagggttttcgcgaggagggttgatcgggtgcggggaggtcgagtgtatcgggcgtgtgttgattaattcgggtttagtgatagttttgcgacgaatttttattttttcgcgcggggcgaggggaacgggttgcggggtttgtttcgagttttcggttcgatcggtattcgcgattacgattttcggacgtttttttttaggtgggggtgatagcgcgtttcgggttttcgtcgtttcggattttttttttatttgtgttgttattcgtcgagaaatcgggcgagttgagtttggtttttttggggttgggcggttcgtttagtaagtttttagttatttttatttgttcgcgaaaatagtttcgggtacgggcggtcgggtcggcgagggttcggacgggggtcgggggttttgtcggttgcgagggagaggagcgagcgcgggtcgcgagcgggcgggcgggcgtcgagggagagggagggcgtaggtcgggtgggggaggcggcggttaaattttagttatagtaatagcgtttcgtagcgtttatcgttcgttttcggtcgtcgtcgtcgtcgtcggtcgcggtttttttattttttgttcgtttttcgagcgcgatatttcgcggtgggggcgtttcggcggttcggtcgttttttcgggttcggttggtagcgacggcgttcggtcgggcggtttaggtagttttcgagaatatggtgtcgtcgtcgtcgtcgtttcgtttttttttcgcgttttatttaatgaattcgttcgcggttcgacgacgagggggtttcgggtttcgttttcggttcgcggttcgtcgtcgtcgtcgtcgtgaggaaaaataatgcgtcgagcggggtcgtcgtcgtcgtcgcggtttttttatttttcgtttcgtcgtcgtcgtcgtcgttgtcgtcgtcgtcgtcgtcgggtttcgggaggtcgagtcgagaggcgagcggggtcgtcggggcgggcgtcgagggtcgggcggagcgggtcggtcgggcggagcggggtgcgcgggcggttgtggggttcgggatcggcggg

SEQ ID NO: 1764 - DNA, 1273 bp, Artificial Sequence
  chemically treated genomic DNA (Homo sapiens) CpG-island No: 1764
cccgccgatcccgaaccccacaaccgcccgcgcaccccgctccgcccgaccgacccgctccgcccgaccctcgacgcccgccccgacgaccccgctcgcctctcgactcgacctcccgaaacccgacgacgacgacgacgacaacgacgacgacgacgacgaaacgaaaaataaaaaaaccgcgacgacgacgacgaccccgctcgacgcattatttttcctcacgacgacgacgacgacgaaccgcgaaccgaaaacgaaacccgaaaccccctcgtcgtcgaaccgcgaacgaattcattaaataaaacgcgaaaaaaaaacgaaacgacgacgacgacgacaccatattctcgaaaactacctaaaccgcccgaccgaacgccgtcgctaccaaccgaacccgaaaaaacgaccgaaccgccgaaacgcccccaccgcgaaatatcgcgctcgaaaaacgaacaaaaaataaaaaaaccgcgaccgacgacgacgacgacgaccgaaaacgaacgataaacgctacgaaacgctattactataactaaaatttaaccgccgcctcccccacccgacctacgccctccctctccctcgacgcccgcccgcccgctcgcgacccgcgctcgctcctctccctcgcaaccgacaaaacccccgacccccgtccgaaccctcgccgacccgaccgcccgtacccgaaactattttcgcgaacaaataaaaataactaaaaacttactaaacgaaccgcccaaccccaaaaaaaccaaactcaactcgcccgatttctcgacgaataacaacacaaataaaaaaaaaatccgaaacgacgaaaacccgaaacgcgctatcacccccacctaaaaaaaaacgtccgaaaatcgtaatcgcgaataccgatcgaaccgaaaactcgaaacaaaccccgcaacccgttcccctcgccccgcgcgaaaaaataaaaattcgtcgcaaaactatcactaaacccgaattaatcaacacacgcccgatacactcgacctccccgcacccgatcaaccctcctcgcgaaaaccctaataacactccaaaaaaaaaaaaataaaatacaacgtataaatttatttaataatatcctacgcatccatccgcgaccgtatccacacgcgtaaccgtccaaaaaaataacaacgaaaaatacctttaatacttaaaaaaaacaaaatcgcgaccaaaaataaaacaatatattttctaaattaacgacacattaaccaaactacat

SEQ ID NO: 1765 - DNA, 543 bp, Artificial Sequence
  chemically treated genomic DNA (Homo sapiens) CpG-island No: 1765
tgacgcgtaggtcgatttttaagggaatttatttattagttttcgtatagttcgttttttttatttttcgagaagggattttttttttttttttgagcggagtcgattgcggttggagaaattcgtttcgacgtttttaatttattgtggttagagtatttacggtcggtaacgtagaatacgggtaatttgtttatatagcgcgcgaaaggttgattttttaatttgcgcgggttttttgcggtttcgtttagaggatgtgacgttaacgcgtatttcgtaattcggtttcgttttttgcggtttttaattcgtagggttgcgttttgagtttttcgtttcgttgggtagatagcggtttattgttatacgattttagtcgttgttgtcggttcgaatttcgtgcggttttttgagggcgcgagtggtattggcgttgatggtcgatggtgagtatcgtttcggaagttgggagcgtttatattcgtcggggttgttgggcgttgtagtttttttttggttgtagttttagttttggaggtt

SEQ ID NO: 1766 - DNA, 543 bp, Artificial Sequence
  chemically treated genomic DNA (Homo sapiens) CpG-island No: 1766
aacctccaaaactaaaactacaaccaaaaaaaaactacaacgcccaacaaccccgacgaatataaacgctcccaacttccgaaacgatactcaccatcgaccatcaacgccaataccactcgcgccctcaaaaaaccgcacgaaattcgaaccgacaacaacgactaaaatcgtataacaataaaccgctatctacccaacgaaacgaaaaactcaaaacgcaaccctacgaattaaaaaccgcaaaaaacgaaaccgaattacgaaatacgcgttaacgtcacatcctctaaacgaaaccgcaaaaaacccgcgcaaattaaaaaatcaacctttcgcgcgctatataaacaaattacccgtattctacgttaccgaccgtaaatactctaaccacaataaattaaaaacgtcgaaacgaatttctccaaccgcaatcgactccgctcaaaaaaaaaaaaaaaatcccttctcgaaaaataaaaaaaacgaactatacgaaaactaataaataaattcccttaaaaatcgacctacgcgtca

SEQ ID NO: 1767 - DNA, 543 bp, Artificial Sequence
  chemically treated genomic DNA (Homo sapiens) CpG-island No: 1767
agtttttagaattggggttgtagttaggagggaattataacgtttagtagtttcggcgggtgtaaacgtttttaattttcgaggcggtgtttattatcggttattagcgttagtgttattcgcgtttttaagaagtcgtacggagttcgggtcggtagtagcggttggagtcgtatggtagtgagtcgttgtttatttagcgagacggagagtttaggacgtaattttacgagttggaagtcgtaggaggcggaatcgggttgcgggatacgcgttgacgttatattttttgggcggggtcgtaaggaattcgcgtaaattgaaaggttagtttttcgcgcgttgtgtaggtaagttgttcgtgttttgcgttgtcggtcgtgggtgttttggttatagtgagttaggggcgtcggagcgggtttttttaatcgtaatcggtttcgtttaaggggaggaggagagttttttttcggaaggtgagaggagcgggttgtgcggaggttaatgggtgggtttttttgggggtcgatttgcgcgtta

SEQ ID NO: 1768 - DNA, 543 bp, Artificial Sequence
  chemically treated genomic DNA (Homo sapiens) CpG-island No: 1768
taacgcgcaaatcgacccccaaaaaaacccacccattaacctccgcacaacccgctcctctcaccttccgaaaaaaaactctcctcctccccttaaacgaaaccgattacgattaaaaaaacccgctccgacgcccctaactcactataaccaaaacacccacgaccgacaacgcaaaacacgaacaacttacctacacaacgcgcgaaaaactaacctttcaatttacgcgaattccttacgaccccgcccaaaaaatataacgtcaacgcgtatcccgcaacccgattccgcctcctacgacttccaactcgtaaaattacgtcctaaactctccgtctcgctaaataaacaacgactcactaccatacgactccaaccgctactaccgacccgaactccgtacgacttcttaaaaacgcgaataacactaacgctaataaccgataataaacaccgcctcgaaaattaaaaacgtttacacccgccgaaactactaaacgttataattccctcctaactacaaccccaattctaaaaact

SEQ ID NO: 1769 - DNA, 640 bp, Artificial Sequence
  chemically treated genomic DNA (Homo sapiens) CpG-island No: 1769
gtacgcgggtaattgagattttcggtaacgttttttgtttttttaagttcgtttttagttatttagagttcgacgtaggtttagttaaatttcgttttcgatttcgtttcgagtcgttaagacgttttcggtggttcgtttttagattgaggtaatgcgtatgtttagcgtcgtatcgcgtacgcgttttttgcggttttttttgatttttgattcgtcgattacgtttgattttcggtcgcggggttaggaagtcggagtttgagtttcggaggtagagcggttgttatggtgagtttcgagtcgggcgttatcggggaggggaagtcgagtcgggtcgggggtcgggggtcgggcggcgagtttcgggttgggcggcgggcgtcgtgcgttttttgcgtgttcggcgggaagtatggtttgggggcgttgtattcgggggaatcgaggtcggtagcggcggtatcggcggttttagggttagggaaaatcgtttgtttggaagaggtcgggtaaacgtggtcgcgttgtgtttagttcgcgtgtgagcgagtagtcgtgggtagcggtggagtatgagtttggttggtgagcgttttttttgttttggaattttatagcgttgtagagtcgatgttgt

SEQ ID NO: 1770 - DNA, 640 bp, Artificial Sequence
  chemically treated genomic DNA (Homo sapiens) CpG-island No: 1770
acaacatcgactctacaacgctataaaattccaaaacaaaaaaaacgctcaccaaccaaactcatactccaccgctacccacgactactcgctcacacgcgaactaaacacaacgcgaccacgtttacccgacctcttccaaacaaacgattttccctaaccctaaaaccgccgataccgccgctaccgacctcgattcccccgaatacaacgcccccaaaccatacttcccgccgaacacgcaaaaaacgcacgacgcccgccgcccaacccgaaactcgccgcccgacccccgacccccgacccgactcgacttcccctccccgataacgcccgactcgaaactcaccataacaaccgctctacctccgaaactcaaactccgacttcctaaccccgcgaccgaaaatcaaacgtaatcgacgaatcaaaaatcaaaaaaaaccgcaaaaaacgcgtacgcgatacgacgctaaacatacgcattacctcaatctaaaaacgaaccaccgaaaacgtcttaacgactcgaaacgaaatcgaaaacgaaatttaactaaacctacgtcgaactctaaataactaaaaacgaacttaaaaaaacaaaaaacgttaccgaaaatctcaattacccgcgtac

SEQ ID NO: 1771 - DNA, 640 bp, Artificial Sequence
  chemically treated genomic DNA (Homo sapiens) CpG-island No: 1771
gtaatatcgattttgtagcgttgtaaggttttagggtaggggaggcgtttattagttagatttatgttttatcgttgtttacggttgttcgtttatacgcgggttaggtatagcgcgattacgtttgttcggttttttttaggtagacggttttttttggttttgaggtcgtcggtgtcgtcgttgtcggtttcgattttttcgggtgtaacgtttttagattatgtttttcgtcgggtacgtagggggcgtacggcgttcgtcgtttagttcggagttcgtcgttcggttttcggttttcggttcgattcggtttttttttttcggtagcgttcgattcggggtttattatggtagtcgttttgttttcggggtttaaatttcgattttttggtttcgcggtcggggattaagcgtggtcggcgggttagaggttaaggaaagtcgtagagagcgcgtgcgcgatacggcgttgggtatgcgtattgttttagtttaagggcgggttatcgggagcgttttagcggttcggggcggggtcggaggcggggtttgattgagtttgcgtcgggttttggataattgggggcgggtttgggagggtaaggggcgttatcgggagttttaattgttcgcgtgt

SEQ ID NO: 1772 - DNA, 640 bp, Artificial Sequence
  chemically treated genomic DNA (Homo sapiens) CpG-island No: 1772
acacgcgaacaattaaaactcccgataacgccccttaccctcccaaacccgcccccaattatccaaaacccgacgcaaactcaatcaaaccccgcctccgaccccgccccgaaccgctaaaacgctcccgataacccgcccttaaactaaaacaatacgcatacccaacgccgtatcgcgcacgcgctctctacgactttccttaacctctaacccgccgaccacgcttaatccccgaccgcgaaaccaaaaaatcgaaatttaaaccccgaaaacaaaacgactaccataataaaccccgaatcgaacgctaccgaaaaaaaaaaaccgaatcgaaccgaaaaccgaaaaccgaacgacgaactccgaactaaacgacgaacgccgtacgccccctacgtacccgacgaaaaacataatctaaaaacgttacacccgaaaaaatcgaaaccgacaacgacgacaccgacgacctcaaaaccaaaaaaaaccgtctacctaaaaaaaaccgaacaaacgtaatcgcgctatacctaacccgcgtataaacgaacaaccgtaaacaacgataaaacataaatctaactaataaacgcctcccctaccctaaaaccttacaacgctacaaaatcgatattac

SEQ ID NO: 1773 - DNA, 766 bp, Artificial Sequence
  chemically treated genomic DNA (Homo sapiens) CpG-island No: 1773
cgcgtagggcgcgtcgcgtttttttttgattttcgatttcgacgagattatcgtggacgaaaatagcgacgattcgatcgtgcgcgtcgcgtcgggttagcggttttcggagagtttgcgagttatttatcgcgagggtttttataacgagtatatgtagcgcgtttttaagtatttgggcgagtagggcgtgcggtcgcgggatttgagcgttatttacgaagttatttttttgtcgttaggtatgagcgatttgttgtagtttgtggtaaaatagggcgtttgtttcgaggtgatttttattttcgatgttaatatttttggcgtggagagttcgttgcgcgtcgtcggttattatagtttgtttcgtcgtatttttagtaattcgtcggggtcggatgcgcggggattgttggttttgcggtcgttttatatatatagttgcgcgcgttgtttcgttaatatgtgtaagtataaggtgtttagcgattatttgcgcgagcgggtttacgacggcgtgtatttcgagcgttttttttacgtgggcgacggcgttaacgatttttgttttatggggttgttggcgggcggcgacgtggttttttcgcgtcgcggttattttatgtatcgttttatttaggaggtttagaaggtcgagtttagttcgtttcgcgttagcgtggtgttttgggaaacggttgtagatgtgcgtttttatttgtaataggtgttgaagtcgtgttgagtttggtcgtttgtagggggg

SEQ ID NO: 1774 - DNA, 766 bp, Artificial Sequence
  chemically treated genomic DNA (Homo sapiens) CpG-island No: 1774
cccccctacaaacgaccaaactcaacacgacttcaacacctattacaaataaaaacgcacatctacaaccgtttcccaaaacaccacgctaacgcgaaacgaactaaactcgaccttctaaacctcctaaataaaacgatacataaaataaccgcgacgcgaaaaaaccacgtcgccgcccgccaacaaccccataaaacaaaaatcgttaacgccgtcgcccacgtaaaaaaaacgctcgaaatacacgccgtcgtaaacccgctcgcgcaaataatcgctaaacaccttatacttacacatattaacgaaacaacgcgcgcaactatatatataaaacgaccgcaaaaccaacaatccccgcgcatccgaccccgacgaattactaaaaatacgacgaaacaaactataataaccgacgacgcgcaacgaactctccacgccaaaaatattaacatcgaaaataaaaatcacctcgaaacaaacgccctattttaccacaaactacaacaaatcgctcatacctaacgacaaaaaaataacttcgtaaataacgctcaaatcccgcgaccgcacgccctactcgcccaaatacttaaaaacgcgctacatatactcgttataaaaaccctcgcgataaataactcgcaaactctccgaaaaccgctaacccgacgcgacgcgcacgatcgaatcgtcgctattttcgtccacgataatctcgtcgaaatcgaaaatcaaaaaaaaacgcgacgcgccctacgcg

SEQ ID NO: 1775 - DNA, 766 bp, Artificial Sequence
  chemically treated genomic DNA (Homo sapiens) CpG-island No: 1775
tttttttgtaggcggttagatttagtacgattttagtatttgttgtaggtggaggcgtatatttgtagtcgttttttagggtattacgttggcgcggaacgagttgggttcggttttttgggttttttgaatgaggcggtgtatggggtagtcgcggcgcgggaaggttacgtcgtcgttcgttagtagttttatggggtagaagtcgttggcgtcgtcgtttacgtagaagaggcgttcgaagtgtacgtcgtcgtgggttcgttcgcgtaggtagtcgttgagtattttgtgtttgtatatgttggcggggtagcgcgcgtagttgtgtgtgtggaacggtcgtagagttagtagttttcgcgtattcggtttcgacgggttgttgaggatgcggcggaataggttgtggtggtcggcggcgcgtagcgagttttttacgttaaaggtgttggtatcggagatgagaattatttcgaagtaggcgttttgttttgttataaattgtagtaggtcgtttatgtttggcgataaagggatggtttcgtagatggcgtttaggtttcgcggtcgtacgttttgttcgtttaggtatttgaagacgcgttgtatgtattcgttgtagaagttttcgcggtaggtggttcgtaggtttttcgggagtcgttggttcggcgcggcgcgtacgatcgaatcgtcgttgttttcgtttacgatagtttcgtcgaagtcgaaggttaggaggaagcgcggcgcgttttgcgcg

SEQ ID NO: 1776 - DNA, 766 bp, Artificial Sequence
  chemically treated genomic DNA (Homo sapiens) CpG-island No: 1776
cgcgcaaaacgcgccgcgcttcctcctaaccttcgacttcgacgaaactatcgtaaacgaaaacaacgacgattcgatcgtacgcgccgcgccgaaccaacgactcccgaaaaacctacgaaccacctaccgcgaaaacttctacaacgaatacatacaacgcgtcttcaaatacctaaacgaacaaaacgtacgaccgcgaaacctaaacgccatctacgaaaccatccctttatcgccaaacataaacgacctactacaatttataacaaaacaaaacgcctacttcgaaataattctcatctccgataccaacacctttaacgtaaaaaactcgctacgcgccgccgaccaccacaacctattccgccgcatcctcaacaacccgtcgaaaccgaatacgcgaaaactactaactctacgaccgttccacacacacaactacgcgcgctaccccgccaacatatacaaacacaaaatactcaacgactacctacgcgaacgaacccacgacgacgtacacttcgaacgcctcttctacgtaaacgacgacgccaacgacttctaccccataaaactactaacgaacgacgacgtaaccttcccgcgccgcgactaccccatacaccgcctcattcaaaaaacccaaaaaaccgaacccaactcgttccgcgccaacgtaataccctaaaaaacgactacaaatatacgcctccacctacaacaaatactaaaatcgtactaaatctaaccgcctacaaaaaaa

SEQ ID NO: 1777 - DNA, 598 bp, Artificial Sequence
  chemically treated genomic DNA (Homo sapiens) CpG-island No: 1777
ttggcgcggtcggcgtttagtataaagcgcgtttttttcgtggggcggggtcgggagtcgggaaggggagggggacgggggaggggagggttcggttcggagattttcgcgcgcgtttagacgtcgtagtttagacgtcgtagttaggggcgggggttttttgtttgggcgcgtttttcgtaggtttcgcgtatcgttttcgtttttttggcgtcgttttttatcgtcgggggtttcgggggttttaggtttgcgcgagcggttggcggggttcgggggtcgcgttttttttttttcgggtttgcggcggtgacggtttcgtttttttttttcgggtggttgcggtcggttcggggggcgttatcgagacgggggcggaggcgggggcgggggttggggtttcggggtttttgattgttttcgtgttttttacggtttttcgtcggtttcgattgttttcgtttcgcgttttcgttcgttttttcgcggagttcgtcgttcgttggtgcgcgtttttatggcgaggtttttagggcgttcggagtatcggagataaaagagttgggggagggggattggggggtttttcggtgttttt

SEQ ID NO: 1778 - DNA, 598 bp, Artificial Sequence
  chemically treated genomic DNA (Homo sapiens) CpG-island No: 1778
aaaaacaccgaaaaaccccccaatccccctcccccaactcttttatctccgatactccgaacgccctaaaaacctcgccataaaaacgcgcaccaacgaacgacgaactccgcgaaaaaacgaacgaaaacgcgaaacgaaaacaatcgaaaccgacgaaaaaccgtaaaaaacacgaaaacaatcaaaaaccccgaaaccccaacccccgcccccgcctccgcccccgtctcgataacgccccccgaaccgaccgcaaccacccgaaaaaaaaaaacgaaaccgtcaccgccgcaaacccgaaaaaaaaaaaacgcgacccccgaaccccgccaaccgctcgcgcaaacctaaaacccccgaaacccccgacgataaaaaacgacgccaaaaaaacgaaaacgatacgcgaaacctacgaaaaacgcgcccaaacaaaaaacccccgcccctaactacgacgtctaaactacgacgtctaaacgcgcgcgaaaatctccgaaccgaaccctcccctcccccgtccccctccccttcccgactcccgaccccgccccacgaaaaaaacgcgctttatactaaacgccgaccgcgccaa

SEQ ID NO: 1779 - DNA, 598 bp, Artificial Sequence
  chemically treated genomic DNA (Homo sapiens) CpG-island No: 1779
ggaggtatcgggagattttttagttttttttttttagtttttttgttttcgatgtttcgggcgttttgggagtttcgttatggaaacgcgtattagcgagcggcgggtttcgcggaggggcgggcggaggcgcggggcgggggtagtcggagtcggcgagagatcgtgagagatacggagatagttagagatttcgaaattttaattttcgttttcgttttcgttttcgtttcgatggcgtttttcgggtcgatcgtagttattcgggaggggaggacgggatcgttatcgtcgtaggttcgaagggaggaggacgcgattttcgagtttcgttagtcgttcgcgtagatttgagattttcgagattttcggcggtgggaggcggcgttagggaggcggggacggtgcgcggggtttgcggaggacgcgtttagataaagagttttcgtttttggttgcggcgtttgggttgcggcgtttgggcgcgcgcgggggttttcgggtcggatttttttttttttcgtttttttttttttttcggttttcggtttcgttttacggaggagacgcgttttgtgttgggcgtcggtcgcgttag

SEQ ID NO: 1780 - DNA, 598 bp, Artificial Sequence
  chemically treated genomic DNA (Homo sapiens) CpG-island No: 1780
ctaacgcgaccgacgcccaacacaaaacgcgtctcctccgtaaaacgaaaccgaaaaccgaaaaaaaaaaaaaaacgaaaaaaaaaaaaatccgacccgaaaacccccgcgcgcgcccaaacgccgcaacccaaacgccgcaaccaaaaacgaaaactctttatctaaacgcgtcctccgcaaaccccgcgcaccgtccccgcctccctaacgccgcctcccaccgccgaaaatctcgaaaatctcaaatctacgcgaacgactaacgaaactcgaaaatcgcgtcctcctcccttcgaacctacgacgataacgatcccgtcctcccctcccgaataactacgatcgacccgaaaaacgccatcgaaacgaaaacgaaaacgaaaacgaaaattaaaatttcgaaatctctaactatctccgtatctctcacgatctctcgccgactccgactacccccgccccgcgcctccgcccgcccctccgcgaaacccgccgctcgctaatacgcgtttccataacgaaactcccaaaacgcccgaaacatcgaaaacaaaaaaactaaaaaaaaaaaactaaaaaatctcccgatacctcc

SEQ ID NO: 1781 - DNA, 1018 bp, Artificial Sequence
  chemically treated genomic DNA (Homo sapiens) CpG-island No: 1781
cgttcgtcgattcgtttagttgtcggaggttaaataaatagttttcgaagtagcgtttggtatagcgtagggtcggaacgtggatattaattttcgtttacgtttttcgcgttttggcgggattattatagatacgacgtttattgttggggttttcggcgatgttcgtgtgcgtagtttcgcgagttttaggttagaagattattaatttcgcggtcgcgttttacgaagttaaggggtaaaaaattagtttttttgggataaagcgtttttttagtagttagggtcgatttcggcgttgttttcgcggcgtttggttgtttcgggcgtaacgggttacgagaagtagggggtggggcgtcgtttaggtttgggaagatacgaagcggtttttcgggtttttagcgtttattttttacggtaagtaggaggagataagcgttattttgcgttcgcggagtcgatttcggtttttttttttcgtggtcgtaggggtcgtgtgtgtgtgtgtgtgagtgtgtgtgtgtgtgtagggacgtttcgcgtttattattttgtttcggtgttaatcgatcgtcgtggcgtcgatttttttcgttttttagttttttattcgcgtgtttcggaaggcgttcggaggttttcgggtcgtcgcgttacgttttcgggaggttgagggaaagggaggtagtcgagtcgggagttcggggaggcgcgttgcgtttcgcggcggggttgggggcggggttaggtgtttcgcgtagggggcggggcgcggtgacgtcgcgggcgtttgggtcgtgttgtggcggcggcggcggcggtagtggcggcggcggcggtgtttgggcggtagtagtagtagtagcggtagttttgaggacggtgagacggtcgcggcggcggcgatagcgcggaagtcgcgcgggatttagagttttttttttgtcgttagtgttgaggttttcgttttttttatttagttttttgtttacggttcgggttgggttgggtaggg

SEQ ID NO: 1782 - DNA, 1018 bp, Artificial Sequence
  chemically treated genomic DNA (Homo sapiens) CpG-island No: 1782
ccctacccaacccaacccgaaccgtaaacaaaaaactaaataaaaaaaacgaaaacctcaacactaacgacaaaaaaaaaactctaaatcccgcgcgacttccgcgctatcgccgccgccgcgaccgtctcaccgtcctcaaaactaccgctactactactactaccgcccaaacaccgccgccgccgccactaccgccgccgccgccgccacaacacgacccaaacgcccgcgacgtcaccgcgccccgccccctacgcgaaacacctaaccccgcccccaaccccgccgcgaaacgcaacgcgcctccccgaactcccgactcgactacctccctttccctcaacctcccgaaaacgtaacgcgacgacccgaaaacctccgaacgccttccgaaacacgcgaataaaaaactaaaaaacgaaaaaaatcgacgccacgacgatcgattaacaccgaaacaaaataataaacgcgaaacgtccctacacacacacacacactcacacacacacacacacgacccctacgaccacgaaaaaaaaaaaccgaaatcgactccgcgaacgcaaaataacgcttatctcctcctacttaccgtaaaaaataaacgctaaaaacccgaaaaaccgcttcgtatcttcccaaacctaaacgacgccccaccccctacttctcgtaacccgttacgcccgaaacaaccaaacgccgcgaaaacaacgccgaaatcgaccctaactactaaaaaaacgctttatcccaaaaaaactaattttttaccccttaacttcgtaaaacgcgaccgcgaaattaataatcttctaacctaaaactcgcgaaactacgcacacgaacatcgccgaaaaccccaacaataaacgtcgtatctataataatcccgccaaaacgcgaaaaacgtaaacgaaaattaatatccacgttccgaccctacgctataccaaacgctacttcgaaaactatttatttaacctccgacaactaaacgaatcgacgaacg

SEQ ID NO: 1783 - DNA, 1018 bp, Artificial Sequence
  chemically treated genomic DNA (Homo sapiens) CpG-island No: 1783
ttttgtttagtttagttcgggtcgtgagtaagaagttgggtaggaaaggcgaaagttttagtattagcgataggggggaagttttgggtttcgcgcgattttcgcgttgtcgtcgtcgtcgcggtcgttttatcgtttttagggttgtcgttattgttgttgttgtcgtttaggtatcgtcgtcgtcgttattatcgtcgtcgtcgtcgttatagtacggtttaggcgttcgcgacgttatcgcgtttcgttttttgcgcgagatatttagtttcgtttttagtttcgtcgcggggcgtagcgcgttttttcgggttttcggttcggttgttttttttttttttagtttttcgggagcgtgacgcggcggttcgggggttttcgggcgtttttcggggtacgcgggtgaggaattgggaagcgggggaaatcggcgttacggcggtcgattagtatcgaaatagagtgatgggcgcggagcgtttttgtatatatatatatatttatatatatatatatacgatttttgcggttacgggaggggagagtcggggtcggtttcgcgagcgtagggtggcgtttgtttttttttgtttgtcgtaggaagtggacgttggaagttcgaggagtcgtttcgtgtttttttaaatttaagcggcgttttattttttatttttcgtggttcgttacgttcggggtagttaagcgtcgcgggagtagcgtcgggatcgattttggttgttggggggacgttttgttttaagaaagttggttttttgttttttagtttcgtggaacgcggtcgcgaaattagtggttttttgatttgagattcgcggggttgcgtatacgggtatcgtcgaggattttagtaatggacgtcgtgtttgtggtgatttcgttaggacgcggggagcgtgggcggaaattagtgtttacgtttcgattttgcgttgtgttaaacgttgtttcgggagttgtttatttagttttcgatagttaagcgaatcggcgggcg

SEQ ID NO: 1784 - DNA, 1018 bp, Artificial Sequence
  chemically treated genomic DNA (Homo sapiens) CpG-island No: 1784
cgcccgccgattcgcttaactatcgaaaactaaataaacaactcccgaaacaacgtttaacacaacgcaaaatcgaaacgtaaacactaatttccgcccacgctccccgcgtcctaacgaaatcaccacaaacacgacgtccattactaaaatcctcgacgatacccgtatacgcaaccccgcgaatctcaaatcaaaaaaccactaatttcgcgaccgcgttccacgaaactaaaaaacaaaaaaccaactttcttaaaacaaaacgtccccccaacaaccaaaatcgatcccgacgctactcccgcgacgcttaactaccccgaacgtaacgaaccacgaaaaataaaaaataaaacgccgcttaaatttaaaaaaacacgaaacgactcctcgaacttccaacgtccacttcctacgacaaacaaaaaaaaacaaacgccaccctacgctcgcgaaaccgaccccgactctcccctcccgtaaccgcaaaaatcgtatatatatatatataaatatatatatatatacaaaaacgctccgcgcccatcactctatttcgatactaatcgaccgccgtaacgccgatttcccccgcttcccaattcctcacccgcgtaccccgaaaaacgcccgaaaacccccgaaccgccgcgtcacgctcccgaaaaactaaaaaaaaaaaaaacaaccgaaccgaaaacccgaaaaaacgcgctacgccccgcgacgaaactaaaaacgaaactaaatatctcgcgcaaaaaacgaaacgcgataacgtcgcgaacgcctaaaccgtactataacgacgacgacgacgataataacgacgacgacgatacctaaacgacaacaacaacaataacgacaaccctaaaaacgataaaacgaccgcgacgacgacgacaacgcgaaaatcgcgcgaaacccaaaacttcccccctatcgctaatactaaaactttcgcctttcctacccaacttcttactcacgacccgaactaaactaaacaaaa

SEQ ID NO: 1785 - DNA, 641 bp, Artificial Sequence
  chemically treated genomic DNA (Homo sapiens) CpG-island No: 1785
gggtgtacgttgaattcgattagagtttcgagtcgcggggttgggcggcgcggtttacggagaagtggggttgtcgttagtatcgcgttattcgggcggtgggaggtggagcggtttcgttatttggaagacgaaggtcgtcgaagttaggtttttatgtttttcgagttttttcggttcggtttttcggtttaaatgtaattgaacgtttttagagttttggcgggtatatttcgaggtcggaatttcgggatacgttagtagcgtttcgagttcgggcggggggtcggttttcggcgtcgtcgtttgtagaggcgttcgtagaaaaagtatagaaagtaatagtttagtttagaaatggcgacgcgcggagtttttgttttttcgtaaaaggggtcggggcggttacgggcgaggggttcgggtcgggaggagggacgcgagggatacgggggtttcggatttgggtcggttttgcgcgtagattgagttttcgttagcgttgtgggttttttagcgcggattcgcggtagggaggggaaaaggggagggggaagagaagtaggaggagaggatggggcggaggagaggcggggggcgggggagggtaagcggggggcgtcgttatttttttattttat

SEQ ID NO: 1786 - DNA, 641 bp, Artificial Sequence
  chemically treated genomic DNA (Homo sapiens) CpG-island No: 1786
ataaaataaaaaaataacgacgccccccgcttaccctcccccgccccccgcctctcctccgccccatcctctcctcctacttctcttccccctccccttttcccctccctaccgcgaatccgcgctaaaaaacccacaacgctaacgaaaactcaatctacgcgcaaaaccgacccaaatccgaaacccccgtatccctcgcgtccctcctcccgacccgaacccctcgcccgtaaccgccccgaccccttttacgaaaaaacaaaaactccgcgcgtcgccatttctaaactaaactattactttctatactttttctacgaacgcctctacaaacgacgacgccgaaaaccgaccccccgcccgaactcgaaacgctactaacgtatcccgaaattccgacctcgaaatatacccgccaaaactctaaaaacgttcaattacatttaaaccgaaaaaccgaaccgaaaaaactcgaaaaacataaaaacctaacttcgacgaccttcgtcttccaaataacgaaaccgctccacctcccaccgcccgaataacgcgatactaacgacaaccccacttctccgtaaaccgcgccgcccaaccccgcgactcgaaactctaatcgaattcaacgtacaccc

SEQ ID NO: 1787 - DNA, 641 bp, Artificial Sequence
  chemically treated genomic DNA (Homo sapiens) CpG-island No: 1787
gtgggatgaaagggtagcggcgtttttcgtttgttttttttcgtttttcgtttttttttcgttttattttttttttttatttttttttttttttttttttttttttttttgtcgcgggttcgcgttaaggggtttatagcgttggcggaggtttagtttgcgcgtaggatcggtttaagttcggggttttcgtgtttttcgcgttttttttttcggttcgggtttttcgttcgtggtcgtttcggttttttttgcggagaggtagagatttcgcgcgtcgttatttttggattaggttgttgttttttgtgttttttttgcgggcgtttttgtaaacggcggcgtcggggatcgatttttcgttcgggttcggggcgttgttggcgtgtttcggggtttcggtttcgaggtgtgttcgttagggttttggaggcgtttagttgtatttgggtcgggggatcgggtcggaggggttcggaggatatgagagtttggtttcggcggttttcgttttttaggtaacggggtcgttttattttttatcgttcgggtagcgcggtgttaacggtagttttattttttcgtgggtcgcgtcgtttagtttcgcggttcgaggttttggtcgggtttagcgtgtattt

SEQ ID NO: 1788 - DNA, 641 bp, Artificial Sequence
  chemically treated genomic DNA (Homo sapiens) CpG-island No: 1788
aaatacacgctaaacccgaccaaaacctcgaaccgcgaaactaaacgacgcgacccacgaaaaaataaaactaccgttaacaccgcgctacccgaacgataaaaaataaaacgaccccgttacctaaaaaacgaaaaccgccgaaaccaaactctcatatcctccgaacccctccgacccgatcccccgacccaaatacaactaaacgcctccaaaaccctaacgaacacacctcgaaaccgaaaccccgaaacacgccaacaacgccccgaacccgaacgaaaaatcgatccccgacgccgccgtttacaaaaacgcccgcaaaaaaaacacaaaaaacaacaacctaatccaaaaataacgacgcgcgaaatctctacctctccgcaaaaaaaaccgaaacgaccacgaacgaaaaacccgaaccgaaaaaaaaaacgcgaaaaacacgaaaaccccgaacttaaaccgatcctacgcgcaaactaaacctccgccaacgctataaaccccttaacgcgaacccgcgacaaaaaaaaaaaaaaaaaaaaaaaaaaaaaaataaaaaaaaaaaataaaacgaaaaaaaaacgaaaaacgaaaaaaaacaaacgaaaaacgccgctaccctttcatcccac

SEQ ID NO: 1789 - DNA, 1428 bp, Artificial Sequence
  chemically treated genomic DNA (Homo sapiens) CpG-island No: 1789
ttttcgcgcgtatttatacgtcgatttatatttataatcgcgatagcgacgcgattttcggggggtatttgtttttttttcgttttcgttattgtcgttattcggataagttttttttttgggtttttcgttaattcggttatcgcgttggggagggggtttcggcgtagggcgcgtaaggttgttcggttaagtttttcggaacgttgggcgtcgggttcgtcgttttttttcgcgtcggtttttagcgcgtttcgaaatagtcggtttgttaattttaaagggtcgtttcgtatattaaagcgcgcggttcgttcggtcgtttcggtttcggtatttattattgattttcgcgcgcgttcggcggcgagatttcgtaggcgtttttggtaggggttcggtttcggttttcggttcggttcgcggcggtagtttcgggttttttcgggtcggtcgcggcgtcggggaatatggggagtcgtgcggcgggggagggggtgcgggaaataataatttcgggtttagagcgaaagttatcggtcggggagggggaacggcgcgtttcgtcgttttttttatgtaaaagattcgagcgggttttcgttttcgttcggttcggtttttaacgtaggttttgtttttagtagttattcggcgtattaaatgtttttcgggcgtttttaataaaaattgcgttgtggatttaattgtgtattttaaaggcgcgagtcgagcgtacggttttgaaagggaggtacgcgtcggtcgcgtttcgggtcgtttttcgtagtttcgttatcgtttcgtagggtcgtttcgttcgcgtttttttttaggttcggttttcgtttggtcgggttttttttcgtttttcgcgtttacgtcgcggttcggcgcgatttcgttttttgtaagaggggggttttttttgaagcggtttcgttggggtcgagtttttatttttattttttatagtagggttttcggcgggcgtttcggtcgtcgggcggtttcgaaatttatcgttttgaggggttatttttatttttcggttttcgggttgttattgagttgttaggattttattaaagcgtagtcggttttagtcgattttttcgggttaggttcgcggagttagtgatttcgtcgcgttaattatagtcgcgttcggtcggttcgcgtcgttcgttttaaagggatagcgtttcgcgttcgtttcgtttcgtttcggttcgttttcgtcgtacgtttcgttttcgcgttaattttttttcggtttttttttcgttttttgttagtttttcgcggtttcgagggcgtttttagttcgagttttgatttttttttttaagtttttcggtttttttgttttcgttttttttttttgtttgttttcgtttttttcggttttggaatgtaatagttttt

SEQ ID NO: 1790 - DNA, 1428 bp, Artificial Sequence
  chemically treated genomic DNA (Homo sapiens) CpG-island No: 1790
aaaaactattacattccaaaaccgaaaaaaacgaaaacaaacaaaaaaaaaaaacgaaaacaaaaaaaccgaaaaacttaaaaaaaaaaatcaaaactcgaactaaaaacgccctcgaaaccgcgaaaaactaacaaaaaacgaaaaaaaaaccgaaaaaaaattaacgcgaaaacgaaacgtacgacgaaaacgaaccgaaacgaaacgaaacgaacgcgaaacgctatccctttaaaacgaacgacgcgaaccgaccgaacgcgactataattaacgcgacgaaatcactaactccgcgaacctaacccgaaaaaatcgactaaaaccgactacgctttaataaaatcctaacaactcaataacaacccgaaaaccgaaaaataaaaataacccctcaaaacgataaatttcgaaaccgcccgacgaccgaaacgcccgccgaaaaccctactataaaaaataaaaataaaaactcgaccccaacgaaaccgcttcaaaaaaaacccccctcttacaaaaaacgaaatcgcgccgaaccgcgacgtaaacgcgaaaaacgaaaaaaaacccgaccaaacgaaaaccgaacctaaaaaaaaacgcgaacgaaacgaccctacgaaacgataacgaaactacgaaaaacgacccgaaacgcgaccgacgcgtacctccctttcaaaaccgtacgctcgactcgcgcctttaaaatacacaattaaatccacaacgcaatttttattaaaaacgcccgaaaaacatttaatacgccgaataactactaaaaacaaaacctacgttaaaaaccgaaccgaacgaaaacgaaaacccgctcgaatcttttacataaaaaaaacgacgaaacgcgccgttccccctccccgaccgataactttcgctctaaacccgaaattattatttcccgcaccccctcccccgccgcacgactccccatattccccgacgccgcgaccgacccgaaaaaacccgaaactaccgccgcgaaccgaaccgaaaaccgaaaccgaacccctaccaaaaacgcctacgaaatctcgccgccgaacgcgcgcgaaaatcaataataaataccgaaaccgaaacgaccgaacgaaccgcgcgctttaatatacgaaacgaccctttaaaattaacaaaccgactatttcgaaacgcgctaaaaaccgacgcgaaaaaaaacgacgaacccgacgcccaacgttccgaaaaacttaaccgaacaaccttacgcgccctacgccgaaaccccctccccaacgcgataaccgaattaacgaaaaacccaaaaaaaaaacttatccgaataacgacaataacgaaaacgaaaaaaaaacaaataccccccgaaaatcgcgtcgctatcgcgattataaatataaatcgacgtataaatacgcgcgaaaa

SEQ ID NO: 1791 - DNA, 1428 bp, Artificial Sequence
  chemically treated genomic DNA (Homo sapiens) CpG-island No: 1791
agaaattgttgtattttagagtcggggagagcgagggtaggtagggggaggaggcgggagtaaagaggtcggagaatttaaaagaagaaattagaattcgggttgagaacgttttcggggtcgcggggggttggtagggggcggaggagaggtcggggaagggttaacgcgggagcggagcgtgcggcgggggcgggtcggggcggggcggggcgggcgcggggcgttgtttttttaaggcgggcggcgcgggtcggtcgagcgcggttgtgattggcgcggcgggattattggtttcgcgagtttggttcgggggagtcggttggagtcggttgcgttttgataaggttttggtaatttagtaatagttcgagagtcgggaaataaaaataattttttagagcgatggatttcggggtcgttcggcggtcgaggcgttcgtcgaaggttttgttgtaaaaggtgggggtggaagttcggttttagcggagtcgttttaaagaaagttttttttttatagggggcgaggtcgcgtcgagtcgcggcgtgggcgcggggggcgggagggggttcggttaggcggaggtcgggtttggaggggggcgcgggcggggcggttttgcggagcggtggcggggttgcggggggcggttcggggcgcggtcggcgcgtattttttttttaggatcgtgcgttcggttcgcgtttttgaagtgtatagttaaatttatagcgtagtttttgttggaagcgttcggaggatatttggtgcgtcgagtgattgttggaaataggatttgcgttgaaagtcgggtcgggcgggggcggaggttcgttcggattttttgtataaaaggggcggcggggcgcgtcgtttttttttttcggtcggtggttttcgttttgaattcgggattgttgtttttcgtattttttttttcgtcgtacgattttttatgtttttcgacgtcgcggtcggttcgggggggttcggggttgtcgtcgcgagtcgagtcgggggtcggggtcgggtttttgttaggggcgtttgcgaggtttcgtcgtcgagcgcgcgcggggattaatggtgagtgtcgaggtcgaggcggtcgggcggatcgcgcgttttgatgtgcggggcggttttttgaagttggtaggtcggttatttcggggcgcgttaggggtcggcgcggaggggagcggcggattcggcgtttagcgtttcggggggtttggtcgggtagttttgcgcgttttgcgtcggagttttttttttagcgcggtgatcgggttggcggggggtttagagaggagatttattcgagtggcggtagtggcgggggcggagagggggtagatatttttcgggggtcgcgtcgttgtcgcggttatggatgtgagtcggcgtgtgagtgcgcgcgggag

SEQ ID NO: 1792 - DNA, 1428 bp, Artificial Sequence
  chemically treated genomic DNA (Homo sapiens) CpG-island No: 1792
ctcccgcgcgcactcacacgccgactcacatccataaccgcgacaacgacgcgacccccgaaaaatatctaccccctctccgcccccgccactaccgccactcgaataaatctcctctctaaaccccccgccaacccgatcaccgcgctaaaaaaaaaactccgacgcaaaacgcgcaaaactacccgaccaaaccccccgaaacgctaaacgccgaatccgccgctcccctccgcgccgacccctaacgcgccccgaaataaccgacctaccaacttcaaaaaaccgccccgcacatcaaaacgcgcgatccgcccgaccgcctcgacctcgacactcaccattaatccccgcgcgcgctcgacgacgaaacctcgcaaacgcccctaacaaaaacccgaccccgacccccgactcgactcgcgacgacaaccccgaacccccccgaaccgaccgcgacgtcgaaaaacataaaaaatcgtacgacgaaaaaaaaaatacgaaaaacaacaatcccgaattcaaaacgaaaaccaccgaccgaaaaaaaaaaacgacgcgccccgccgccccttttatacaaaaaatccgaacgaacctccgcccccgcccgacccgactttcaacgcaaatcctatttccaacaatcactcgacgcaccaaatatcctccgaacgcttccaacaaaaactacgctataaatttaactatacacttcaaaaacgcgaaccgaacgcacgatcctaaaaaaaaaatacgcgccgaccgcgccccgaaccgccccccgcaaccccgccaccgctccgcaaaaccgccccgcccgcgcccccctccaaacccgacctccgcctaaccgaaccccctcccgccccccgcgcccacgccgcgactcgacgcgacctcgccccctataaaaaaaaaactttctttaaaacgactccgctaaaaccgaacttccacccccaccttttacaacaaaaccttcgacgaacgcctcgaccgccgaacgaccccgaaatccatcgctctaaaaaattatttttatttcccgactctcgaactattactaaattaccaaaaccttatcaaaacgcaaccgactccaaccgactcccccgaaccaaactcgcgaaaccaataatcccgccgcgccaatcacaaccgcgctcgaccgacccgcgccgcccgccttaaaaaaacaacgccccgcgcccgccccgccccgccccgacccgcccccgccgcacgctccgctcccgcgttaacccttccccgacctctcctccgccccctaccaaccccccgcgaccccgaaaacgttctcaacccgaattctaatttcttcttttaaattctccgacctctttactcccgcctcctccccctacctaccctcgctctccccgactctaaaatacaacaatttct

SEQ ID NO: 1793 - DNA, 1036 bp, Artificial Sequence
  chemically treated genomic DNA (Homo sapiens) CpG-island No: 1793
gcgttttaattttttttcggcgcggttcggagtttttcggcgtatttttggggtttagatcgtcgggttgtttcgttcgttcgtttcgtacgggtcggtattttttcgttcgtttgtcgtttcgaggttttcgcgggtcgcgttcggtagggttcgcgtcgttttcggtcgttgcggtttttatcgttgtcgtcgatgatgagtagtttgaagaggtggtcgtagtttcgggttatggcgggcgggggcggtgcgcgcgggcgggcggggtcggtattggtttcgcgattcgtagtttttttcgggttgtttcggtagcggcggatttatttttcgaataaatagtcggaattgatagaaatattttttttcgttttttttttttttttttagtagtcgtcgtcgttattatcgtttttttttttttcgtttcgttttattattgcgtaggcgtagcgtttggtatcgttttgcgtagtcgtagtttgagtcggtcgcgttcgggtcgcgtacgcgttttgacggagttttagtaagcgcgggttcgtttttttcgcgttttttcggggagcgtcgtcgtcgttattttgggcgttgagagtttgcggagtcgagtcgttgtcgagttttagcggaaagaagtttaaggtgtcggagaagttcggtcgtggacgttgttgtttttttattttcgagattcgtacgttttgcggagaggaaatgataggtacgtcgcgatcgtggggcggggttcgtacgagtttcgggtttttagaggtaggggtcggggtcgtagaaggtagagtcgcgcggggaaggttcggtatttcgtttttttcgtatcgatttttttttcgcggagttggtttcggtttcgggtttgtggagtggacgtcgagggcggcgggcggttttcgagttggatagaacgggagttgtcggcgggagtagagttgcgaggaggtggtttttgagggtagcgcggggtcgaaattttattttagcgttgtgattttttggagtttatattgttttt

SEQ ID NO: 1794 - DNA, 1036 bp, Artificial Sequence
  chemically treated genomic DNA (Homo sapiens) CpG-island No: 1794
aaaaacaatataaactccaaaaaatcacaacgctaaaataaaatttcgaccccgcgctaccctcaaaaaccacctcctcgcaactctactcccgccgacaactcccgttctatccaactcgaaaaccgcccgccgccctcgacgtccactccacaaacccgaaaccgaaaccaactccgcgaaaaaaaaatcgatacgaaaaaaacgaaataccgaaccttccccgcgcgactctaccttctacgaccccgacccctacctctaaaaacccgaaactcgtacgaaccccgccccacgatcgcgacgtacctatcatttcctctccgcaaaacgtacgaatctcgaaaataaaaaaacaacaacgtccacgaccgaacttctccgacaccttaaacttctttccgctaaaactcgacaacgactcgactccgcaaactctcaacgcccaaaataacgacgacgacgctccccgaaaaaacgcgaaaaaaacgaacccgcgcttactaaaactccgtcaaaacgcgtacgcgacccgaacgcgaccgactcaaactacgactacgcaaaacgataccaaacgctacgcctacgcaataataaaacgaaacgaaaaaaaaaaaaacgataataacgacgacgactactaaaaaaaaaaaaaaaaaacgaaaaaaaatatttctatcaattccgactatttattcgaaaaataaatccgccgctaccgaaacaacccgaaaaaaactacgaatcgcgaaaccaataccgaccccgcccgcccgcgcgcaccgcccccgcccgccataacccgaaactacgaccacctcttcaaactactcatcatcgacgacaacgataaaaaccgcaacgaccgaaaacgacgcgaaccctaccgaacgcgacccgcgaaaacctcgaaacgacaaacgaacgaaaaaataccgacccgtacgaaacgaacgaacgaaacaacccgacgatctaaaccccaaaaatacgccgaaaaactccgaaccgcgccgaaaaaaaattaaaacgc

SEQ ID NO: 1795 - DNA, 1036 bp, Artificial Sequence
  chemically treated genomic DNA (Homo sapiens) CpG-island No: 1795
agaggtaatgtgggttttaagaggttatagcgttgggatgggatttcgatttcgcgttgtttttaaaggttattttttcgtagttttgttttcgtcggtagttttcgttttgtttaattcggaagtcgttcgtcgttttcggcgtttattttataggttcggggtcggggttagtttcgcgggggaggggtcggtgcggaaggggcggggtatcgggtttttttcgcgcgattttgttttttacggtttcggtttttgtttttggaaattcggagttcgtgcgagtttcgttttacggtcgcggcgtgtttgttatttttttttcgtagggcgtgcgggtttcgaagatgagggagtaataacgtttacgatcgggttttttcggtattttgggttttttttcgttgggattcgatagcggttcggtttcgtaagtttttagcgtttagggtggcggcgacgacgtttttcgaggagacgcgaggaagacgggttcgcgtttgttgggatttcgttagggcgcgtgcgcgattcgggcgcggtcggtttaggttgcggttgcgtaaggcggtgttagacgttgcgtttgcgtagtggtggggcggggcgggaaggagggaggcggtggtagcggcggcggttgttgaggaggaggagggggagcggagggaggtgtttttgttagtttcggttgtttgttcgggaagtggattcgtcgttgtcggagtagttcgaagggagttgcggatcgcgaggttagtatcgatttcgttcgttcgcgcgtatcgttttcgttcgttatggttcgggattacgattatttttttaagttgtttattatcggcgatagcggtgagggtcgtagcggtcggaggcggcgcgggttttgtcgggcgcggttcgcgggggtttcggggcggtaggcgggcggggaggtgtcggttcgtgcggggcgggcgggcggggtagttcggcggtttgggttttaggggtgcgtcgaggggtttcggatcgcgtcgaggggaggttggggcgt

SEQ ID NO: 1796 - DNA, 1036 bp, Artificial Sequence
  chemically treated genomic DNA (Homo sapiens) CpG-island No: 1796
acgccccaacctcccctcgacgcgatccgaaacccctcgacgcacccctaaaacccaaaccgccgaactaccccgcccgcccgccccgcacgaaccgacacctccccgcccgcctaccgccccgaaacccccgcgaaccgcgcccgacaaaacccgcgccgcctccgaccgctacgaccctcaccgctatcgccgataataaacaacttaaaaaaataatcgtaatcccgaaccataacgaacgaaaacgatacgcgcgaacgaacgaaatcgatactaacctcgcgatccgcaactcccttcgaactactccgacaacgacgaatccacttcccgaacaaacaaccgaaactaacaaaaacacctccctccgctccccctcctcctcctcaacaaccgccgccgctaccaccgcctccctccttcccgccccgccccaccactacgcaaacgcaacgtctaacaccgccttacgcaaccgcaacctaaaccgaccgcgcccgaatcgcgcacgcgccctaacgaaatcccaacaaacgcgaacccgtcttcctcgcgtctcctcgaaaaacgtcgtcgccgccaccctaaacgctaaaaacttacgaaaccgaaccgctatcgaatcccaacgaaaaaaaacccaaaataccgaaaaaacccgatcgtaaacgttattactccctcatcttcgaaacccgcacgccctacgaaaaaaaaataacaaacacgccgcgaccgtaaaacgaaactcgcacgaactccgaatttccaaaaacaaaaaccgaaaccgtaaaaaacaaaatcgcgcgaaaaaaacccgataccccgccccttccgcaccgacccctcccccgcgaaactaaccccgaccccgaacctataaaataaacgccgaaaacgacgaacgacttccgaattaaacaaaacgaaaactaccgacgaaaacaaaactacgaaaaaataacctttaaaaacaacgcgaaatcgaaatcccatcccaacgctataacctcttaaaacccacattacctct

SEQ ID NO: 1797 - DNA, 1007 bp, Artificial Sequence
  chemically treated genomic DNA (Homo sapiens) CpG-island No: 1797
tcgcggcgttatttttattttttttcgggatcgcgtttatttttaaagttatacgtcgacgaattaatttatgttttaaatttttttttttagtttcgtgagttcgcggcgatattgggtcgtggggtggttgggaacggttttttttttcggaaaaattagagaacggtttggagagttgaaacgagcgttcgcgagtaggttcgtgtagaatcgggttttaggatcgttgagtttcgtagggcgtttttgggggacgttaggtcgtcggtttttttgttttcgttgagatggataacgtttcgttttcggagttttggttcgttaacgtatcgggttcggattcggcgttgagttgttttaacgcgtcgattttggcgtcgttgtcggcgtcgttggcggtggttgtattagttgtttacgcggtgatttgcgtcgtgggtttggcgggtaatttcgtcgtgttgtacgtgttgttgcgggcgtttcgtatgaagatcgttattaatttgtttatttttaatttggttatcgtcgacgagttttttacgttggtgttgtttattaatatcgtcgattttttgttgcggtagtggtttttcggggagtttatgtgtaagtttatcgtggttatcgattagtataatattttttttagtttttatttttttatcgttatgagcgtcgatcgttatttggtggtgttggttattgcggagtcgcgtcgggtggtcggtcgtatttatagcgtcgcgcgcgcggtgagtttggtcgtgtgggggatcgttatattcgtcgtgttgtttttcgtagttttcgttcggttagacgacgagtagggtcggcgttagtgcgtgttagttttttcgtagttcgaggttttttggtggcgcgcgagtcgtttttatacgttcgtgttgggtttcgttattttcgtgtttattatttgtgttttttatattattttgttgtgtcggttgtatgttatgcggttggatagttacgtt

SEQ ID NO: 1798 - DNA, 1007 bp, Artificial Sequence
  chemically treated genomic DNA (Homo sapiens) CpG-island No: 1798
aacgtaactatccaaccgcataacatacaaccgacacaacaaaataatataaaaaacacaaataataaacacgaaaataacgaaacccaacacgaacgtataaaaacgactcgcgcgccaccaaaaaacctcgaactacgaaaaaactaacacgcactaacgccgaccctactcgtcgtctaaccgaacgaaaactacgaaaaacaacacgacgaatataacgatcccccacacgaccaaactcaccgcgcgcgcgacgctataaatacgaccgaccacccgacgcgactccgcaataaccaacaccaccaaataacgatcgacgctcataacgataaaaaaataaaaactaaaaaaaatattatactaatcgataaccacgataaacttacacataaactccccgaaaaaccactaccgcaacaaaaaatcgacgatattaataaacaacaccaacgtaaaaaactcgtcgacgataaccaaattaaaaataaacaaattaataacgatcttcatacgaaacgcccgcaacaacacgtacaacacgacgaaattacccgccaaacccacgacgcaaatcaccgcgtaaacaactaatacaaccaccgccaacgacgccgacaacgacgccaaaatcgacgcgttaaaacaactcaacgccgaatccgaacccgatacgttaacgaaccaaaactccgaaaacgaaacgttatccatctcaacgaaaacaaaaaaaccgacgacctaacgtcccccaaaaacgccctacgaaactcaacgatcctaaaacccgattctacacgaacctactcgcgaacgctcgtttcaactctccaaaccgttctctaatttttccgaaaaaaaaaaccgttcccaaccaccccacgacccaatatcgccgcgaactcacgaaactaaaaaaaaaaatttaaaacataaattaattcgtcgacgtataactttaaaaataaacgcgatcccgaaaaaaaataaaaataacgccgcga

SEQ ID NO: 1799 - DNA, 1007 bp, Artificial Sequence
  chemically treated genomic DNA (Homo sapiens) CpG-island No: 1799
ggcgtggttgtttagtcgtatggtatgtagtcggtatagtagggtggtatagaggatatagatggtggatacggggatggcgaagtttagtacgagcgtgtagaggcggttcgcgcgttattagaaggtttcgggttgcggaaagattagtacgtattggcgtcggttttgttcgtcgtttagtcgggcgaagattgcgaagggtagtacgacgagtgtgacgattttttatacggttaggtttatcgcgcgcgcggcgttgtaggtgcggtcggttattcggcgcgatttcgtagtggttaatattattaggtagcggtcggcgtttatgacggtgaggaagtagaggttggagaaggtgttgtattggtcgatagttacgatgagtttgtatatgagtttttcgaagggttattgtcgtagtaggaagtcggcgatgttgatgggtagtattagcgtgaagagttcgtcggcgatggttaggttgaggatgaataggttggtgacggtttttatgcggggcgttcgtagtaatacgtatagtacggcggagttgttcgttagatttacggcgtagattatcgcgtagataattggtatagttatcgttagcggcgtcggtagcggcgttagagtcgacgcgttggagtagtttagcgtcgggttcgggttcgatgcgttggcgggttagggtttcgagaacgaggcgttgtttattttaacgagggtagaggagtcggcgatttggcgttttttaaggacgttttacggagtttagcggttttgaagttcggttttgtacggatttgttcgcggacgttcgttttagttttttaagtcgttttttggttttttcggaggaggggatcgtttttagttattttacggtttaatgtcgtcgcggatttacggggttggaaagaggaatttaaagtataggttagttcgtcgacgtgtaattttagaaataggcgcggtttcgaggaggggtgggggtggcgtcgcgg

SEQ ID NO: 1800 - DNA, 1007 bp, Artificial Sequence
  chemically treated genomic DNA (Homo sapiens) CpG-island No: 1800
ccgcgacgccacccccacccctcctcgaaaccgcgcctatttctaaaattacacgtcgacgaactaacctatactttaaattcctctttccaaccccgtaaatccgcgacgacattaaaccgtaaaataactaaaaacgatcccctcctccgaaaaaaccaaaaaacgacttaaaaaactaaaacgaacgtccgcgaacaaatccgtacaaaaccgaacttcaaaaccgctaaactccgtaaaacgtccttaaaaaacgccaaatcgccgactcctctaccctcgttaaaataaacaacgcctcgttctcgaaaccctaacccgccaacgcatcgaacccgaacccgacgctaaactactccaacgcgtcgactctaacgccgctaccgacgccgctaacgataactataccaattatctacgcgataatctacgccgtaaatctaacgaacaactccgccgtactatacgtattactacgaacgccccgcataaaaaccgtcaccaacctattcatcctcaacctaaccatcgccgacgaactcttcacgctaatactacccatcaacatcgccgacttcctactacgacaataacccttcgaaaaactcatatacaaactcatcgtaactatcgaccaatacaacaccttctccaacctctacttcctcaccgtcataaacgccgaccgctacctaataatattaaccactacgaaatcgcgccgaataaccgaccgcacctacaacgccgcgcgcgcgataaacctaaccgtataaaaaatcgtcacactcgtcgtactacccttcgcaatcttcgcccgactaaacgacgaacaaaaccgacgccaatacgtactaatctttccgcaacccgaaaccttctaataacgcgcgaaccgcctctacacgctcgtactaaacttcgccatccccgtatccaccatctatatcctctataccaccctactataccgactacataccatacgactaaacaaccacgcc

SEQ ID NO: 1801 - DNA, 788 bp, Artificial Sequence
  chemically treated genomic DNA (Homo sapiens) CpG-island No: 1801
ttgtcgttgtcgttgttgttgttgttgtcgtcgtcgggcgggtagcgttttacggggcgggttgcgtttcgttgtcgtcgcgacgttttttgttgttgttgttgttgtcggcggtcgttttttgtagtcgtattttatgattttcggtttcgcggtagttttagtagtagcggcggcgacggcggttgttgttgttgtaggggtcgaggcggcggttttatatcgcgcgtcgcgtaattcggcgagtttttttttgtttttttcggtttttttcggtttatcgggtcggtagcgtttcgtttcgggttttcggtcgcgttttttcgtttcgttttttgtcggcgtttgacgcgcgcgggtatttgttcgtttcgttcgcgcgggattcgtcggttcgcgggtttttttagcgacgtttaggtggcgtcggcggttttaatttttgttttgttttacgttttgcgggcggttgcgcgcgtcgtttgcggaggcggttggcgtattttttacggttttggttgttttatcgcgcggttacgtttttagttttgtatttatttcggggtgcggtttcgtttttagtttcgtttagagttggggtgtggttacgtttttagttttcgtatttcggggtgtggtttcgtattcggtttcgtttttatttcggacggagcgcggtttcgtttatcgtttgttgtttatttttaggcgcggtttcgtttttagttatttggaagtcggggcgcgttttagagttttgttgtcgtatttttggtggtgtttggggt

SEQ ID NO: 1802 - DNA, 788 bp, Artificial Sequence
  chemically treated genomic DNA (Homo sapiens) CpG-island No: 1802
accccaaacaccaccaaaaatacgacaacaaaactctaaaacgcgccccgacttccaaataactaaaaacgaaaccgcgcctaaaaataaacaacaaacgataaacgaaaccgcgctccgtccgaaataaaaacgaaaccgaatacgaaaccacaccccgaaatacgaaaactaaaaacgtaaccacaccccaactctaaacgaaactaaaaacgaaaccgcaccccgaaataaatacaaaactaaaaacgtaaccgcgcgataaaacaaccaaaaccgtaaaaaatacgccaaccgcctccgcaaacgacgcgcgcaaccgcccgcaaaacgtaaaacaaaacaaaaattaaaaccgccgacgccacctaaacgtcgctaaaaaaacccgcgaaccgacgaatcccgcgcgaacgaaacgaacaaatacccgcgcgcgtcaaacgccgacaaaaaacgaaacgaaaaaacgcgaccgaaaacccgaaacgaaacgctaccgacccgataaaccgaaaaaaaccgaaaaaaacaaaaaaaaactcgccgaattacgcgacgcgcgatataaaaccgccgcctcgacccctacaacaacaacaaccgccgtcgccgccgctactactaaaactaccgcgaaaccgaaaatcataaaatacgactacaaaaaacgaccgccgacaacaacaacaacaacaaaaaacgtcgcgacgacaacgaaacgcaacccgccccgtaaaacgctacccgcccgacgacgacaacaacaacaacaacgacaacgacaa

SEQ ID NO: 1803 - DNA, 788 bp, Artificial Sequence
  chemically treated genomic DNA (Homo sapiens) CpG-island No: 1803
gttttagatattattagagatgcggtaatagaattttgaggcgcgtttcggtttttaagtagttgggggcggggtcgcgtttggaggtgagtagtaggcggtgggcggggtcgcgtttcgttcgaggtgagagcgaggtcgggtgcgaggttatatttcgaggtacgagagttgagggcgtggttatattttagttttgagcgaggttgagggcggaatcgtatttcgaagtgggtgtaaggttgggggcgtggtcgcgcggtgaggtagttaggatcgtgagggatgcgttagtcgttttcgtaggcggcgcgcgtagtcgttcgtagggcgtgaggtagagtaggggttaaggtcgtcggcgttatttgggcgtcgttgaggagattcgcgagtcggcgaatttcgcgcgggcggggcgaataggtgttcgcgcgcgttaggcgtcggtaaggggcggggcgaggggacgcggtcggaagttcggggcggggcgttgtcggttcggtgagtcgggaggagtcggggaaggtaggaaggagttcgtcgggttgcgcggcgcgcgatgtggagtcgtcgtttcggtttttgtagtagtagtagtcgtcgtcgtcgtcgttgttgttggggttgtcgcggagtcgggggttatggagtgcggttgtagagagcggtcgtcggtaatagtagtagtagtaggaagcgtcgcggcgatagcggagcgtagttcgtttcgtgaggcgttgttcgttcggcggcggtagtagtagtagtagcggtagcggtaa

SEQ ID NO: 1804 - DNA, 788 bp, Artificial Sequence
  chemically treated genomic DNA (Homo sapiens) CpG-island No: 1804
ttaccgctaccgctactactactactaccgccgccgaacgaacaacgcctcacgaaacgaactacgctccgctatcgccgcgacgcttcctactactactactattaccgacgaccgctctctacaaccgcactccataacccccgactccgcgacaaccccaacaacaacgacgacgacgacgactactactactacaaaaaccgaaacgacgactccacatcgcgcgccgcgcaacccgacgaactccttcctaccttccccgactcctcccgactcaccgaaccgacaacgccccgccccgaacttccgaccgcgtcccctcgccccgccccttaccgacgcctaacgcgcgcgaacacctattcgccccgcccgcgcgaaattcgccgactcgcgaatctcctcaacgacgcccaaataacgccgacgaccttaacccctactctacctcacgccctacgaacgactacgcgcgccgcctacgaaaacgactaacgcatccctcacgatcctaactacctcaccgcgcgaccacgcccccaaccttacacccacttcgaaatacgattccgccctcaacctcgctcaaaactaaaatataaccacgccctcaactctcgtacctcgaaatataacctcgcacccgacctcgctctcacctcgaacgaaacgcgaccccgcccaccgcctactactcacctccaaacgcgaccccgcccccaactacttaaaaaccgaaacgcgcctcaaaattctattaccgcatctctaataatatctaaaac

SEQ ID NO: 1805 - DNA, 562 bp, Artificial Sequence
  chemically treated genomic DNA (Homo sapiens) CpG-island No: 1805
tcgggtagttttcgggtattagttaagttcggacgcggtaaacggaagggttttatattttttgaagtatgcgtatcggggtcgggtcgtacgtttgcgggttttcgagcgcgggttatgttcgttttttgtttgggtttggtggcgacgttttagaattagcgaagtcggatagcgtttgttgtatgggatttgttcgcgcgggtcggggacgttagtcgggagttttcgtcgtcgtcgtcgtttttattttttttcgggggtttcggggagttagaattggcgttagaggaggagttggcgttgttggcggtcggggagcggtcgttcgatttcggggaatattttttaggtcgagtttgggtttttggtcgagggggtcggatcgtagtcgtcgtttttttaggatttcgagttgttgtcggtgattcgatagaaggagaaggatttggtgttggcggttcggttgggtaaggcgttgttcgagaggaattaggatatgagtcggtagtacgagtagatgtataaggagttgatagataagttcgaggtgaggattttt

SEQ ID NO: 1806 - DNA, 562 bp, Artificial Sequence
  chemically treated genomic DNA (Homo sapiens) CpG-island No: 1806
aaaaatcctcacctcgaacttatctatcaactccttatacatctactcgtactaccgactcatatcctaattcctctcgaacaacgccttacccaaccgaaccgccaacaccaaatccttctccttctatcgaatcaccgacaacaactcgaaatcctaaaaaaacgacgactacgatccgaccccctcgaccaaaaacccaaactcgacctaaaaaatattccccgaaatcgaacgaccgctccccgaccgccaacaacgccaactcctcctctaacgccaattctaactccccgaaacccccgaaaaaaaataaaaacgacgacgacgacgaaaactcccgactaacgtccccgacccgcgcgaacaaatcccatacaacaaacgctatccgacttcgctaattctaaaacgtcgccaccaaacccaaacaaaaaacgaacataacccgcgctcgaaaacccgcaaacgtacgacccgaccccgatacgcatacttcaaaaaatataaaacccttccgtttaccgcgtccgaacttaactaatacccgaaaactacccga

SEQ ID NO: 1807 - DNA, 562 bp, Artificial Sequence
  chemically treated genomic DNA (Homo sapiens) CpG-island No: 1807
ggaggtttttatttcgagtttgtttgttagttttttatgtatttgttcgtattgtcggtttatgttttggtttttttcgagtagcgttttatttagtcgggtcgttaatattagatttttttttttttgtcggattatcgatagtagttcggggttttgggagggcggcggttgcggttcggttttttcggttagagatttaggttcggtttggagggtgtttttcggggtcggacggtcgtttttcggtcgttagtagcgttagttttttttttaacgttagttttagtttttcggagttttcgggggaagatgaaggcggcggcggcggcgaggattttcgattggcgttttcggttcgcgcgggtaagttttatgtagtaggcgttgttcggtttcgttggttttgaagcgtcgttattaagtttaggtagaaagcggatatggttcgcgttcgggaattcgtagacgtgcggttcggtttcggtgcgtatgttttagggggtatggggttttttcgtttgtcgcgttcgggtttggttggtgttcgaaggttgttcgg

SEQ ID NO: 1808 - DNA, 562 bp, Artificial Sequence
  chemically treated genomic DNA (Homo sapiens) CpG-island No: 1808
ccgaacaaccttcgaacaccaaccaaacccgaacgcgacaaacgaaaaaaccccataccccctaaaacatacgcaccgaaaccgaaccgcacgtctacgaattcccgaacgcgaaccatatccgctttctacctaaacttaataacgacgcttcaaaaccaacgaaaccgaacaacgcctactacataaaacttacccgcgcgaaccgaaaacgccaatcgaaaatcctcgccgccgccgccgccttcatcttcccccgaaaactccgaaaaactaaaactaacgttaaaaaaaaaactaacgctactaacgaccgaaaaacgaccgtccgaccccgaaaaacaccctccaaaccgaacctaaatctctaaccgaaaaaaccgaaccgcaaccgccgccctcccaaaaccccgaactactatcgataatccgacaaaaaaaaaaaaatctaatattaacgacccgactaaataaaacgctactcgaaaaaaaccaaaacataaaccgacaatacgaacaaatacataaaaaactaacaaacaaactcgaaataaaaacctcc

SEQ ID NO: 1809 - DNA, 730 bp, Artificial Sequence
  chemically treated genomic DNA (Homo sapiens) CpG-island No: 1809
gtgaagggaaggaggaaaggaggcggggagggagagacggaggaagagagggtgggaagaaggaaggagagagagagggcgaagaggggagagaggggcgaacgagagagatgtggggagaggggagaggagagggacggggtaggggaggggagagcgagggaagagagaaaaagagagaacgtaagggggtcggggagaagagagaggagagcgagagagagcgggaggagagggggagggagagagacgggggagagcgagatagagcgtggggagacggggagaggggagagcgagagagttaggggagacgaggagcgagcgagaggagaggggaagagagagagaagggggaaagtaagagagtggggggaaagcgagagagagagaggggagagatagagggcgggggagagcgagcgcgagcgaggggaggggagagagagaggcgcgcgttggttgttttcgcgaaattttaagtttcgttagcgttattgtttttttcgttgttagtttcgcgtttacgtggggaaattgttttttttgtgtcgggaagaaacgatttatcgttttgtagaggcgcggaagttgtgcgcgggacgttacggtttcgaagtcgcgagtgatcgtagtttcgatttttcggcgggaggtttgttcgagcgtgggagtcgagtttagggtttttttttcgtattggttgcggatttaattttttttgggtttt

SEQ ID NO: 1810 - DNA, 730 bp, Artificial Sequence
  chemically treated genomic DNA (Homo sapiens) CpG-island No: 1810
aaaacccaaaaaaaattaaatccgcaaccaatacgaaaaaaaaaccctaaactcgactcccacgctcgaacaaacctcccgccgaaaaatcgaaactacgatcactcgcgacttcgaaaccgtaacgtcccgcgcacaacttccgcgcctctacaaaacgataaatcgtttcttcccgacacaaaaaaaacaatttccccacgtaaacgcgaaactaacaacgaaaaaaacaataacgctaacgaaacttaaaatttcgcgaaaacaaccaacgcgcgcctctctctctcccctcccctcgctcgcgctcgctctcccccgccctctatctctcccctctctctctctcgctttccccccactctcttactttcccccttctctctctcttcccctctcctctcgctcgctcctcgtctcccctaactctctcgctctcccctctccccgtctccccacgctctatctcgctctcccccgtctctctccctccccctctcctcccgctctctctcgctctcctctctcttctccccgacccccttacgttctctctttttctctcttccctcgctctcccctcccctaccccgtccctctcctctcccctctccccacatctctctcgttcgcccctctctcccctcttcgccctctctctctccttccttcttcccaccctctcttcctccgtctctccctccccgcctcctttcctccttcccttcac

SEQ ID NO: 1811 - DNA, 730 bp, Artificial Sequence
  chemically treated genomic DNA (Homo sapiens) CpG-island No: 1811
ggggtttaggaagggttaggttcgtagttagtgcggagaaagggttttgggttcggtttttacgttcgggtaggtttttcgtcgggggatcggagttgcggttattcgcggtttcggggtcgtggcgtttcgcgtatagttttcgcgtttttgtaaggcggtgagtcgttttttttcggtataggagggatagtttttttacgtggacgcggggttggtagcgggaggggtaatagcgttggcggagtttagggtttcgcgggagtaattagcgcgcgtttttttttttttttttttttcgttcgcgttcgttttttttcgttttttgttttttttttttttttttttcgttttttttttatttttttgttttttttttttttttttttttttttttttttttcgttcgtttttcgttttttttggttttttcgttttttttttttttcgtttttttacgttttgtttcgttttttttcgttttttttttttttttttttttttcgttttttttcgtttttttttttttttttttcgatttttttgcgtttttttttttttttttttttttcgttttttttttttttgtttcgtttttttttttttttttttttttatatttttttcgttcgtttttttttttttttttcgttttttttttttttttttttttttttatttttttttttttcgttttttttttttcgtttttttttttttttttttttat

SEQ ID NO: 1812 - DNA, 730 bp, Artificial Sequence
  chemically treated genomic DNA (Homo sapiens) CpG-island No: 1812
ataaaaaaaaaaaaaaaaaaaaacgaaaaaaaaaaaacgaaaaaaaaaaaaataaaaaaaaaaaaaaaaaaaaaaaaaacgaaaaaaaaaaaaaaaaacgaacgaaaaaaatataaaaaaaaaaaaaaaaaaaaaaacgaaacaaaaaaaaaaaaaacgaaaaaaaaaaaaaaaaaaaaaaacgcaaaaaaatcgaaaaaaaaaaaaaaaaaaacgaaaaaaaacgaaaaaaaaaaaaaaaaaaaaaaaacgaaaaaaaacgaaacaaaacgtaaaaaaacgaaaaaaaaaaaaaacgaaaaaaccaaaaaaaacgaaaaacgaacgaaaaaaaaaaaaaaaaaaaaaaaaaaaaaaaaaacaaaaaaataaaaaaaaaacgaaaaaaaaaaaaaaaaaaaacaaaaaacgaaaaaaaacgaacgcgaacgaaaaaaaaaaaaaaaaaaaaacgcgcgctaattactcccgcgaaaccctaaactccgccaacgctattacccctcccgctaccaaccccgcgtccacgtaaaaaaactatccctcctataccgaaaaaaaacgactcaccgccttacaaaaacgcgaaaactatacgcgaaacgccacgaccccgaaaccgcgaataaccgcaactccgatcccccgacgaaaaacctacccgaacgtaaaaaccgaacccaaaaccctttctccgcactaactacgaacctaacccttcctaaacccc

SEQ ID NO: 1813 - DNA, 1298 bp, Artificial Sequence
  chemically treated genomic DNA (Homo sapiens) CpG-island No: 1813
gagttgcggcgggttagtgggcgggaagagtgggtcgatttgggtttgagaatgatagagttcgtaatgggggagggtacggtgcgacggcggcgtagggggtgagagggatttgcgagacggttagttaggttgttttaattacggcggaggaatcggggattgggcggtcgtagttaatgggaaggtagcgggcgcggggcggggcgggcgtggggcggagttttttggggttcgtagggttggggcggagttaggttcgcgttaggtggtttcggcgagttggcggtgcggggggcggggtacggtacggcgcggagaggagagcggcggtcggttggtagcggcgggtatcggttgcgcgagtaggtatcggcggtagaggtgacgaggtcgttttcgggggggcgagcgggtaggcggggattcggttcgttgcgtttttaggttgcgcgaagagttcgcgttcggcgtttttttcgtatcgcggtaatagcgtcggcgagtcggtttttttagttttgttagttcgggttttatttgcggtcgtcgtcgttgggggggggtttttttagttttgcggaggcgtatgaataataggcggcggcggtttttgcgggcggcggcggtttcgtattttatggatcggtcgttttatggagttttttagagcgtttttcggttgtttagcgagcgtcgtcgttgtcgtttcgtcgggggaggatggagtaggggtcggggtcgaggaggaggaggaggaggaggaggaggcggcggcggcggtgggtttcggggagttgggttgcgacgcgtcgttgttttattggacggtcgtgttcgagtacgaggcggcgggcgaggacgagttgattttgcggttgggcgacgtggtggaggtgttgtttaaggattcgtaggtgttcggcgacgagggttggtggatcgggtagttgaattagcgggtgggtattttttttagtaattacgtgatttcgcgtagcgttttttttagtcgttgttagttcggcggcgaggattttagttgttattcgtttatttagtgtaaggcgaaggcggggtcgggcggggagggggaatgacggaggtttggggggcggtcggggaaggggggagtattgcgcgagggttgggatgagggcggggggtggggaggacgattgatttgggtgtgggtggcgcgcgtttaggttgttcgggttttgtttgttggataagttcgagacgttttaggttttgttcgtattttagacgtttgggtttttttatttttagttggt

SEQ ID NO: 1814 - DNA, 1298 bp, Artificial Sequence
  chemically treated genomic DNA (Homo sapiens) CpG-island No: 1814
accaactaaaaataaaaaaacccaaacgtctaaaatacgaacaaaacctaaaacgtctcgaacttatccaacaaacaaaacccgaacaacctaaacgcgcgccacccacacccaaatcaatcgtcctccccaccccccgccctcatcccaaccctcgcgcaatactccccccttccccgaccgccccccaaacctccgtcattccccctccccgcccgaccccgccttcgccttacactaaataaacgaataacaactaaaatcctcgccgccgaactaacaacgactaaaaaaaacgctacgcgaaatcacgtaattactaaaaaaaatacccacccgctaattcaactacccgatccaccaaccctcgtcgccgaacacctacgaatccttaaacaacacctccaccacgtcgcccaaccgcaaaatcaactcgtcctcgcccgccgcctcgtactcgaacacgaccgtccaataaaacaacgacgcgtcgcaacccaactccccgaaacccaccgccgccgccgcctcctcctcctcctcctcctcctcctcgaccccgacccctactccatcctcccccgacgaaacgacaacgacgacgctcgctaaacaaccgaaaaacgctctaaaaaactccataaaacgaccgatccataaaatacgaaaccgccgccgcccgcaaaaaccgccgccgcctattattcatacgcctccgcaaaactaaaaaaacccccccccaacgacgacgaccgcaaataaaacccgaactaacaaaactaaaaaaaccgactcgccgacgctattaccgcgatacgaaaaaaacgccgaacgcgaactcttcgcgcaacctaaaaacgcaacgaaccgaatccccgcctacccgctcgcccccccgaaaacgacctcgtcacctctaccgccgatacctactcgcgcaaccgatacccgccgctaccaaccgaccgccgctctcctctccgcgccgtaccgtaccccgccccccgcaccgccaactcgccgaaaccacctaacgcgaacctaactccgccccaaccctacgaaccccaaaaaactccgccccacgcccgccccgccccgcgcccgctaccttcccattaactacgaccgcccaatccccgattcctccgccgtaattaaaacaacctaactaaccgtctcgcaaatccctctcaccccctacgccgccgtcgcaccgtaccctcccccattacgaactctatcattctcaaacccaaatcgacccactcttcccgcccactaacccgccgcaactc

SEQ ID NO: 1815 - DNA, 1298 bp, Artificial Sequence
  chemically treated genomic DNA (Homo sapiens) CpG-island No: 1815
gttaattgaaggtgaagaagtttaagcgtttgaagtgcgggtagggtttgaggcgtttcgagtttatttagtaagtaaagttcgggtagtttaagcgcgcgttatttatatttaggttaatcgttttttttatttttcgtttttattttagttttcgcgtagtgtttttttttttttcgatcgttttttaggttttcgttatttttttttttcgttcggtttcgttttcgttttatattgaatgggcgggtagtaattggggttttcgtcgtcgggttggtagcggttggagaaggcgttgcgcggggttacgtagttgttggggaagatgtttattcgttggtttagttgttcggtttattagttttcgtcgtcggatatttgcgagtttttggatagtatttttattacgtcgtttagtcgtagggttagttcgttttcgttcgtcgtttcgtattcgaatacggtcgtttagtagggtagcggcgcgtcgtagtttagtttttcggggtttatcgtcgtcgtcgtttttttttttttttttttttttttttcggtttcggtttttgttttattttttttcggcggggcggtagcggcggcgttcgttaggtagtcgagaagcgttttggagggttttatggagcggtcgatttatagggtgcggggtcgtcgtcgttcgtaggagtcgtcgtcgtttattgtttatgcgttttcgtagagttgggaggatttttttttaacgacggcggtcgtaggtagggttcgggttggtagggttgggagagtcggttcgtcggcgttgttatcgcggtacgagaagagcgtcgagcgcgagtttttcgcgtagtttaggggcgtagcgggtcgagttttcgtttgttcgttcgttttttcgggggcggtttcgttatttttgtcgtcggtatttgttcgcgtagtcggtgttcgtcgttgttagtcggtcgtcgttttttttttcgcgtcgtgtcgtgtttcgtttttcgtatcgttagttcgtcgggattatttgacgcgggtttggtttcgttttagttttgcggattttagggggtttcgttttacgttcgtttcgtttcgcgttcgttgtttttttattggttgcggtcgtttagttttcggttttttcgtcgtggttggggtagtttagttggtcgtttcgtaggttttttttattttttgcgtcgtcgtcgtatcgtgtttttttttattgcgggttttgttatttttaaatttaggtcgatttatttttttcgtttattggttcgtcgtagttt

SEQ ID NO: 1816 - DNA, 1298 bp, Artificial Sequence
  chemically treated genomic DNA (Homo sapiens) CpG-island No: 1816
aaactacgacgaaccaataaacgaaaaaaataaatcgacctaaatttaaaaataacaaaacccgcaataaaaaaaaacacgatacgacgacgacgcaaaaaataaaaaaaacctacgaaacgaccaactaaactaccccaaccacgacgaaaaaaccgaaaactaaacgaccgcaaccaataaaaaaacaacgaacgcgaaacgaaacgaacgtaaaacgaaaccccctaaaatccgcaaaactaaaacgaaaccaaacccgcgtcaaataatcccgacgaactaacgatacgaaaaacgaaacacgacacgacgcgaaaaaaaaaacgacgaccgactaacaacgacgaacaccgactacgcgaacaaataccgacgacaaaaataacgaaaccgcccccgaaaaaacgaacgaacaaacgaaaactcgacccgctacgcccctaaactacgcgaaaaactcgcgctcgacgctcttctcgtaccgcgataacaacgccgacgaaccgactctcccaaccctaccaacccgaaccctacctacgaccgccgtcgttaaaaaaaaatcctcccaactctacgaaaacgcataaacaataaacgacgacgactcctacgaacgacgacgaccccgcaccctataaatcgaccgctccataaaaccctccaaaacgcttctcgactacctaacgaacgccgccgctaccgccccgccgaaaaaaaataaaacaaaaaccgaaaccgaaaaaaaaaaaaaaaaaaaaaaaaaaacgacgacgacgataaaccccgaaaaactaaactacgacgcgccgctaccctactaaacgaccgtattcgaatacgaaacgacgaacgaaaacgaactaaccctacgactaaacgacgtaataaaaatactatccaaaaactcgcaaatatccgacgacgaaaactaataaaccgaacaactaaaccaacgaataaacatcttccccaacaactacgtaaccccgcgcaacgccttctccaaccgctaccaacccgacgacgaaaaccccaattactacccgcccattcaatataaaacgaaaacgaaaccgaacgaaaaaaaaaaataacgaaaacctaaaaaacgatcgaaaaaaaaaaaaacactacgcgaaaactaaaataaaaacgaaaaataaaaaaaacgattaacctaaatataaataacgcgcgcttaaactacccgaactttacttactaaataaactcgaaacgcctcaaaccctacccgcacttcaaacgcttaaacttcttcaccttcaattaac

SEQ ID NO: 1817 - DNA, 530 bp, Artificial Sequence
  chemically treated genomic DNA (Homo sapiens) CpG-island No: 1817
cgaggaagcgggttcgcgtagcgttcgcgcggttgggagagacgggtaggtgaatgcggtgagcgcgggcggaggcgtggagcgcggagaggtgaggagtatagtaggagtgcgtggtgggagagatgaggggagacgattagaagtagatgagtgcgcgttgatcgtgggatggacggtgcgagagaggtcgcggcgttgagcgtgtttcggcggagcgggtagggaggcgtgtatcgaggggtgtgggtgggcgcgcgggaggatgaggtggagtggtggtggaggtgggagagggtgacgtggtgcgagtggggcggaggtggtatgcggatggtgagggtgacgggagggggacggcggcgtagtagtgtggggaggcgggggggaggcgagcgttcgggcgggcgcgttgaggcgtcgggttgaggtggaggggcgtgggtaagcggttgggcggtgttagagcggggttggaaggtcgggtgggggtagtggaggaggtagggcggaatatatgaatcggggcg

SEQ ID NO: 1818 - DNA, 530 bp, Artificial Sequence
  chemically treated genomic DNA (Homo sapiens) CpG-island No: 1818
cgccccgattcatatattccgccctacctcctccactacccccacccgaccttccaaccccgctctaacaccgcccaaccgcttacccacgcccctccacctcaacccgacgcctcaacgcgcccgcccgaacgctcgcctcccccccgcctccccacactactacgccgccgtccccctcccgtcaccctcaccatccgcataccacctccgccccactcgcaccacgtcaccctctcccacctccaccaccactccacctcatcctcccgcgcgcccacccacacccctcgatacacgcctccctacccgctccgccgaaacacgctcaacgccgcgacctctctcgcaccgtccatcccacgatcaacgcgcactcatctacttctaatcgtctcccctcatctctcccaccacgcactcctactatactcctcacctctccgcgctccacgcctccgcccgcgctcaccgcattcacctacccgtctctcccaaccgcgcgaacgctacgcgaacccgcttcctcg

SEQ ID NO: 1819 - DNA, 530 bp, Artificial Sequence
  chemically treated genomic DNA (Homo sapiens) CpG-island No: 1819
cgtttcggtttatatgtttcgttttgttttttttattgtttttattcggttttttagtttcgttttagtatcgtttagtcgtttgtttacgtttttttattttagttcgacgttttagcgcgttcgttcgagcgttcgtttttttttcgtttttttatattgttacgtcgtcgtttttttttcgttatttttattattcgtatgttattttcgttttattcgtattacgttatttttttttatttttattattattttattttattttttcgcgcgtttatttatatttttcggtatacgtttttttattcgtttcgtcgagatacgtttagcgtcgcgatttttttcgtatcgtttattttacgattaacgcgtatttatttgtttttgatcgtttttttttattttttttattacgtatttttgttatattttttattttttcgcgttttacgttttcgttcgcgtttatcgtatttatttgttcgttttttttagtcgcgcgagcgttgcgcggattcgttttttcg

SEQ ID NO: 1820 - DNA, 530 bp, Artificial Sequence
  chemically treated genomic DNA (Homo sapiens) CpG-island No: 1820
cgaaaaaacgaatccgcgcaacgctcgcgcgactaaaaaaaacgaacaaataaatacgataaacgcgaacgaaaacgtaaaacgcgaaaaaataaaaaatataacaaaaatacgtaataaaaaaaataaaaaaaaacgatcaaaaacaaataaatacgcgttaatcgtaaaataaacgatacgaaaaaaatcgcgacgctaaacgtatctcgacgaaacgaataaaaaaacgtataccgaaaaatataaataaacgcgcgaaaaaataaaataaaataataataaaaataaaaaaaaataacgtaatacgaataaaacgaaaataacatacgaataataaaaataacgaaaaaaaaacgacgacgtaacaatataaaaaaacgaaaaaaaaacgaacgctcgaacgaacgcgctaaaacgtcgaactaaaataaaaaaacgtaaacaaacgactaaacgatactaaaacgaaactaaaaaaccgaataaaaacaataaaaaaaacaaaacgaaacatataaaccgaaacg

SEQ ID NO: 1821 - DNA, 624 bp, Artificial Sequence
  chemically treated genomic DNA (Homo sapiens) CpG-island No: 1821
gcggggcgcggggaatattgagaagcgtgtaggcggcgatttcgattcgttttgggcgcgggcgggcgtggacgcgtcgcggttgcggaggttggggtaggggtcggttttgcggcggcggaagttggttgcggcggcggatggcggcggcggttttttaagttttgcgcgttgggatttttcgcgatttttcggattcgtttttatttgaagggtttggaacggtacgggttcgttttcgtcgtgacgtatatggttatatatgggaagtaggaagttttaatatggtaggatcggtcgggaggattcggagtgacgtgaagttttttattcgatagcgttcggtatttttattttgtattttagggttcgcgttcgcgttcgtattttaggcgtttaggtttcggggaagtttagagttttagtcgtcgtcggggttttcgggattcgcgtagtttcggagttttcgcgttgttttttttttcgtttttttttttttttttagagtcggaagcggtcgggttatatcgggttattttaaataaggtgttgtttaaataagggttgtttcggcgggggattttttttgttttttatatggtattttcgggtcgtagttggttg

SEQ ID NO: 1822 - DNA, 624 bp, Artificial Sequence
  chemically treated genomic DNA (Homo sapiens) CpG-island No: 1822
caaccaactacgacccgaaaataccatataaaaaacaaaaaaaatcccccgccgaaacaacccttatttaaacaacaccttatttaaaataacccgatataacccgaccgcttccgactctaaaaaaaaaaaaaaaaacgaaaaaaaaaacaacgcgaaaactccgaaactacgcgaatcccgaaaaccccgacgacgactaaaactctaaacttccccgaaacctaaacgcctaaaatacgaacgcgaacgcgaaccctaaaatacaaaataaaaataccgaacgctatcgaataaaaaacttcacgtcactccgaatcctcccgaccgatcctaccatattaaaacttcctacttcccatatataaccatatacgtcacgacgaaaacgaacccgtaccgttccaaacccttcaaataaaaacgaatccgaaaaatcgcgaaaaatcccaacgcgcaaaacttaaaaaaccgccgccgccatccgccgccgcaaccaacttccgccgccgcaaaaccgacccctaccccaacctccgcaaccgcgacgcgtccacgcccgcccgcgcccaaaacgaatcgaaatcgccgcctacacgcttctcaatattccccgcgccccgc

SEQ ID NO: 1823 - DNA, 624 bp, Artificial Sequence
  chemically treated genomic DNA (Homo sapiens) CpG-island No: 1823
taattagttgcgattcggaaatgttatataaggagtaggaaggatttttcgtcggaataatttttatttgggtagtattttatttggagtggttcgatatggttcggtcgttttcggttttgggaggagggaagaaggcggagggaggggtaacgcgggaatttcggagttgcgcgggtttcggaggtttcggcggcggttagagttttaggttttttcgaagtttgggcgtttgggatgcgggcgcgggcgcgggttttagggtgtaggatggaggtgtcgggcgttgtcggatggggggttttacgttatttcgggttttttcggtcggttttgttatattagggttttttgttttttatatatggttatgtacgttacgacggaggcggattcgtgtcgttttagattttttaaatagaggcggattcggggagtcgcgagagattttagcgcgtagaatttggggagtcgtcgtcgttattcgtcgtcgtagttagttttcgtcgtcgtaggatcggtttttgttttagttttcgtagtcgcggcgcgtttacgttcgttcgcgtttagggcgagtcggggtcgtcgtttgtacgttttttagtgtttttcgcgtttcgt

SEQ ID NO: 1824 - DNA, 624 bp, Artificial Sequence
  chemically treated genomic DNA (Homo sapiens) CpG-island No: 1824
acgaaacgcgaaaaacactaaaaaacgtacaaacgacgaccccgactcgccctaaacgcgaacgaacgtaaacgcgccgcgactacgaaaactaaaacaaaaaccgatcctacgacgacgaaaactaactacgacgacgaataacgacgacgactccccaaattctacgcgctaaaatctctcgcgactccccgaatccgcctctatttaaaaaatctaaaacgacacgaatccgcctccgtcgtaacgtacataaccatatataaaaaacaaaaaaccctaatataacaaaaccgaccgaaaaaacccgaaataacgtaaaaccccccatccgacaacgcccgacacctccatcctacaccctaaaacccgcgcccgcgcccgcatcccaaacgcccaaacttcgaaaaaacctaaaactctaaccgccgccgaaacctccgaaacccgcgcaactccgaaattcccgcgttacccctccctccgccttcttccctcctcccaaaaccgaaaacgaccgaaccatatcgaaccactccaaataaaatactacccaaataaaaattattccgacgaaaaatccttcctactccttatataacatttccgaatcgcaactaatta

SEQ ID NO: 1825 - DNA, 535 bp, Artificial Sequence
  chemically treated genomic DNA (Homo sapiens) CpG-island No: 1825
tcggtttcgagtgttcgattcggtcgttatttatcgttaggttttggggtatcgtttcgtttatggttcgtatcgtgtcggttcgttaggttcgagtgcgtagcgtaggtttcggattttcgttcgtcgttgtcgtcgcgggagtcgaggtcgaggttgaggtcgtagtgttcgcgaatagtagtagtagtcgtttgtttatcggggaggtcgtcgcgttcgttatcgtcggggtcggtttgattcgcgttttcgttcgtcgttttttattattttcgtcgttaagcgttcgattcgttcgtaaggttttttttcgtattattcgcggtcgtcgtttttttttattttttttaatagttattattaattatcggcgtagcgtagcgtttttcgtggtcgggagcggagtcgtagtttgggtttcgtatagcgtttttcgcgttttggagcggggcgatagtttttggtttttcgtagcgtttcgttttaattttttcggggtttgtagtgttttttgcggtttggaggggaattg

SEQ ID NO: 1826 - DNA, 535 bp, Artificial Sequence
  chemically treated genomic DNA (Homo sapiens) CpG-island No: 1826
caattcccctccaaaccgcaaaaaacactacaaaccccgaaaaaattaaaacgaaacgctacgaaaaaccaaaaactatcgccccgctccaaaacgcgaaaaacgctatacgaaacccaaactacgactccgctcccgaccacgaaaaacgctacgctacgccgataattaataataactattaaaaaaaataaaaaaaaacgacgaccgcgaataatacgaaaaaaaaccttacgaacgaatcgaacgcttaacgacgaaaataataaaaaacgacgaacgaaaacgcgaatcaaaccgaccccgacgataacgaacgcgacgacctccccgataaacaaacgactactactactattcgcgaacactacgacctcaacctcgacctcgactcccgcgacgacaacgacgaacgaaaatccgaaacctacgctacgcactcgaacctaacgaaccgacacgatacgaaccataaacgaaacgataccccaaaacctaacgataaataacgaccgaatcgaacactcgaaaccga

SEQ ID NO: 1827 - DNA, 535 bp, Artificial Sequence
  chemically treated genomic DNA (Homo sapiens) CpG-island No: 1827
taatttttttttagatcgtagggggtattgtaggtttcggggagattggggcggagcgttgcgaggggttaggagttgtcgtttcgttttagagcgcggggggcgttgtgcggggtttaggttgcggtttcgttttcggttacggggggcgttgcgttgcgtcggtggttggtggtggttgttggggggggtgggggggaacggcggtcgcgggtggtgcggagggaggttttgcgggcggatcgggcgtttggcggcggaggtggtgggaggcggcgggcgggagcgcgggttaggtcggtttcggcgatggcggacgcggcggttttttcggtgggtaagcggttgttgttgttgttcgcggatattgcggttttagtttcggtttcggttttcgcggcggtagcggcgagcggagattcggggtttgcgttgcgtattcgagtttggcgggtcggtacggtgcgggttatgagcggggcggtgttttaggatttagcggtgagtggcggtcgagtcgggtattcgaggtcgg

SEQ ID NO: 1828 - DNA, 535 bp, Artificial Sequence
  chemically treated genomic DNA (Homo sapiens) CpG-island No: 1828
ccgacctcgaatacccgactcgaccgccactcaccgctaaatcctaaaacaccgccccgctcataacccgcaccgtaccgacccgccaaactcgaatacgcaacgcaaaccccgaatctccgctcgccgctaccgccgcgaaaaccgaaaccgaaactaaaaccgcaatatccgcgaacaacaacaacaaccgcttacccaccgaaaaaaccgccgcgtccgccatcgccgaaaccgacctaacccgcgctcccgcccgccgcctcccaccacctccgccgccaaacgcccgatccgcccgcaaaacctccctccgcaccacccgcgaccgccgttcccccccaccccccccaacaaccaccaccaaccaccgacgcaacgcaacgccccccgtaaccgaaaacgaaaccgcaacctaaaccccgcacaacgccccccgcgctctaaaacgaaacgacaactcctaacccctcgcaacgctccgccccaatctccccgaaacctacaataccccctacgatctaaaaaaaaatta

SEQ ID NO: 1829 - DNA, 729 bp, Artificial Sequence
  chemically treated genomic DNA (Homo sapiens) CpG-island No: 1829
cgtgcgggtttcggtcgtttttttttcgtcgcgggttcgggcgcgcgttttaatcgttaatcgttcgcgcggtgttcggggtcgggtaggtcgcgggtcgcgcgtttcgtatcgagtttttttgttgcgcggaggcggaggtaatgatttagttcgcggtttgcgtcggttcggtcgtcgggagggagcgtgacgcgaggcggttttcggttggaacgcgcgtcgtgtcgcgtcgttgagttcgtcggtttcggttttgcgtttattcgtttattttgatttttatttacgacgcgttttttggtgtgttcgggttcggtgatgattacggtcgcgtcgttcgttttgtttgttgtcgtcggtcgcgtcgcgcgtttgttttcgtcgggggtttcgtcgagttttaggtcgttttcgtcgtcgttgttgtcgtcgtcgttgttgttattgtagcgttcgggtcgttcgcgttttttgttcgtcgggtcgtcgcgttttttgggttcggcgcgggtagtgtcgttgttcgagttcggttttttttaggtcgtcgtcgtcgttttttttttgggtatggtcgcggttggagggagatacggggtagcggcgtataatggacgggttataaattgcgcggggggaggggagcggagacgagttattcggtttttatttttttttttgttttttttaaagtggcggtcgtagggtgggcggagagggggcgag

SEQ ID NO: 1830 - DNA, 729 bp, Artificial Sequence
  chemically treated genomic DNA (Homo sapiens) CpG-island No: 1830
ctcgccccctctccgcccaccctacgaccgccactttaaaaaaaacaaaaaaaaaaataaaaaccgaataactcgtctccgctcccctccccccgcgcaatttataacccgtccattatacgccgctaccccgtatctccctccaaccgcgaccatacccaaaaaaaaaacgacgacgacgacctaaaaaaaaccgaactcgaacaacgacactacccgcgccgaacccaaaaaacgcgacgacccgacgaacaaaaaacgcgaacgacccgaacgctacaataacaacaacgacgacgacaacaacgacgacgaaaacgacctaaaactcgacgaaacccccgacgaaaacaaacgcgcgacgcgaccgacgacaacaaacaaaacgaacgacgcgaccgtaatcatcaccgaacccgaacacaccaaaaaacgcgtcgtaaataaaaatcaaaataaacgaataaacgcaaaaccgaaaccgacgaactcaacgacgcgacacgacgcgcgttccaaccgaaaaccgcctcgcgtcacgctccctcccgacgaccgaaccgacgcaaaccgcgaactaaatcattacctccgcctccgcgcaacaaaaaaactcgatacgaaacgcgcgacccgcgacctacccgaccccgaacaccgcgcgaacgattaacgattaaaacgcgcgcccgaacccgcgacgaaaaaaaaacgaccgaaacccgcacg

SEQ ID NO: 1831 - DNA, 729 bp, Artificial Sequence
  chemically treated genomic DNA (Homo sapiens) CpG-island No: 1831
ttcgtttttttttcgtttattttgcggtcgttattttggggagggtagaggaggaagtggaggtcgggtggttcgttttcgttttttttttttcgcgtagtttataattcgtttattgtgcgtcgttgtttcgtgtttttttttagtcgcgattatgtttaggaagaaggcggcggcggcggtttgggaggagtcgagttcgggtaacggtattgttcgcgtcgggtttaggaaacgcggcggttcggcgggtaggaagcgcgagcggttcgagcgttgtagtagtagtagcggcggcggtagtagcggcgacgaggacggtttggagttcgacggggttttcggcgggggtaagcgcgcggcgcggtcggcgatagtaggtaaggcgggcggcgcggtcgtggttattatcgaattcgagtatattaaggagcgcgtcgtgagtgagggttagggtagacgggtgggcgtagggtcggggtcggcgggtttagcgacgcggtacggcgcgcgttttagtcgggggtcgtttcgcgttacgttttttttcggcggtcgggtcggcgtaggtcgcgggttgaattattgttttcgttttcgcgtaataaaagggttcggtacggggcgcgcggttcgcggtttattcgatttcgggtatcgcgcgggcggttggcggttggggcgcgcgttcgggttcgcggcgggggaggggcggtcgaagttcgtacg

SEQ ID NO: 1832 - DNA, 729 bp, Artificial Sequence
  chemically treated genomic DNA (Homo sapiens) CpG-island No: 1832
cgtacgaacttcgaccgcccctcccccgccgcgaacccgaacgcgcgccccaaccgccaaccgcccgcgcgatacccgaaatcgaataaaccgcgaaccgcgcgccccgtaccgaacccttttattacgcgaaaacgaaaacaataattcaacccgcgacctacgccgacccgaccgccgaaaaaaaacgtaacgcgaaacgacccccgactaaaacgcgcgccgtaccgcgtcgctaaacccgccgaccccgaccctacgcccacccgtctaccctaaccctcactcacgacgcgctccttaatatactcgaattcgataataaccacgaccgcgccgcccgccttacctactatcgccgaccgcgccgcgcgcttacccccgccgaaaaccccgtcgaactccaaaccgtcctcgtcgccgctactaccgccgccgctactactactacaacgctcgaaccgctcgcgcttcctacccgccgaaccgccgcgtttcctaaacccgacgcgaacaataccgttacccgaactcgactcctcccaaaccgccgccgccgccttcttcctaaacataatcgcgactaaaaaaaaacacgaaacaacgacgcacaataaacgaattataaactacgcgaaaaaaaaaaaacgaaaacgaaccacccgacctccacttcctcctctaccctccccaaaataacgaccgcaaaataaacgaaaaaaaaacgaa

SEQ ID NO: 1833 - DNA, 666 bp, Artificial Sequence
  chemically treated genomic DNA (Homo sapiens) CpG-island No: 1833
gaatcgttgcgaagtataataacggttttttagaggtaggagggtttcgagtcgggtttttagttattatttaggatttttggaggacgagttcggacgatttttatatatattcggagtagagtcgtacggtttttcgcgttttcggggtttcgtacgcggattagcggcgaggcggcgggcggtttttttcgggagtttcggacgagggtcgcggcgggggcgggtagtgtcggatgtcgggcgttcgaggaatttagcgtgttaaggatggatgcggcgttttttaaagtcgtagagcgttcggcgtttgttatatagttttacgggcggggggtttcggcggggacggtttagtcgagtggtcgtaggagggaatttcgagaaggggtttaggacgttgtcgttttttagtgagcgggcgggggcggtcggcgcgggttgtcgtgggttcgttgttcgtgttattttcgaaattaggaaagtttcgaagagaggagtgggagtacgtagtgggggcggggagttttatatcgagagggtggcggttttcgggggacgagatttcgtggaagaggaagagggcgcgattttagtatttttttatcggttcgcggggaaggagttattcgtttttcgtttttatatttattatgtagagggtga

SEQ ID NO: 1834 - DNA, 666 bp, Artificial Sequence
  chemically treated genomic DNA (Homo sapiens) CpG-island No: 1834
tcaccctctacataataaatataaaaacgaaaaacgaataactccttccccgcgaaccgataaaaaaatactaaaatcgcgccctcttcctcttccacgaaatctcgtcccccgaaaaccgccaccctctcgatataaaactccccgcccccactacgtactcccactcctctcttcgaaactttcctaatttcgaaaataacacgaacaacgaacccacgacaacccgcgccgaccgcccccgcccgctcactaaaaaacgacaacgtcctaaaccccttctcgaaattccctcctacgaccactcgactaaaccgtccccgccgaaaccccccgcccgtaaaactatataacaaacgccgaacgctctacgactttaaaaaacgccgcatccatccttaacacgctaaattcctcgaacgcccgacatccgacactacccgcccccgccgcgaccctcgtccgaaactcccgaaaaaaaccgcccgccgcctcgccgctaatccgcgtacgaaaccccgaaaacgcgaaaaaccgtacgactctactccgaatatatataaaaatcgtccgaactcgtcctccaaaaatcctaaataataactaaaaacccgactcgaaaccctcctacctctaaaaaaccgttattatacttcgcaacgattc

SEQ ID NO: 1835 - DNA, 666 bp, Artificial Sequence
  chemically treated genomic DNA (Homo sapiens) CpG-island No: 1835
ttattttttatatggtgagtgtgggggcggggagcgggtggtttttttttcgcgagtcggtggggagatgttggggtcgcgtttttttttttttttacggggtttcgtttttcgggggtcgttattttttcggtgtgaggtttttcgtttttattgcgtgtttttattttttttttcggggtttttttggtttcggaggtgatacgagtaacgagtttacggtaattcgcgtcggtcgttttcgttcgtttattgggaagcggtagcgttttaggttttttttcggggtttttttttgcggttattcggttaggtcgttttcgtcggggtttttcgttcgtggggttgtgtggtaggcgtcgagcgttttgcggttttaggggacgtcgtatttatttttggtacgttgggtttttcgggcgttcggtattcggtattgttcgttttcgtcgcggttttcgttcggggttttcgggagaggtcgttcgtcgtttcgtcgttaattcgcgtgcggagtttcgggagcgcgggggatcgtgcggttttgtttcgagtgtgtgtgggggtcgttcgggttcgttttttaggggttttgggtggtggttgaaaattcggttcggaatttttttgtttttaaaaaatcgttgttgtgtttcgtagcggttt

SEQ ID NO: 1836 - DNA, 666 bp, Artificial Sequence
  chemically treated genomic DNA (Homo sapiens) CpG-island No: 1836
aaaccgctacgaaacacaacaacgattttttaaaaacaaaaaaattccgaaccgaattttcaaccaccacccaaaacccctaaaaaacgaacccgaacgacccccacacacactcgaaacaaaaccgcacgatcccccgcgctcccgaaactccgcacgcgaattaacgacgaaacgacgaacgacctctcccgaaaaccccgaacgaaaaccgcgacgaaaacgaacaataccgaataccgaacgcccgaaaaacccaacgtaccaaaaataaatacgacgtcccctaaaaccgcaaaacgctcgacgcctaccacacaaccccacgaacgaaaaaccccgacgaaaacgacctaaccgaataaccgcaaaaaaaaaccccgaaaaaaaacctaaaacgctaccgcttcccaataaacgaacgaaaacgaccgacgcgaattaccgtaaactcgttactcgtatcacctccgaaaccaaaaaaaccccgaaaaaaaaaataaaaacacgcaataaaaacgaaaaacctcacaccgaaaaaataacgacccccgaaaaacgaaaccccgtaaaaaaaaaaaaaaacgcgaccccaacatctccccaccgactcgcgaaaaaaaaaccacccgctccccgcccccacactcaccatataaaaaataa

SEQ ID NO: 1837 - DNA, 688 bp, Artificial Sequence
  chemically treated genomic DNA (Homo sapiens) CpG-island No: 1837
cgttgagcgcggtttatattttttgtcggaggatttgtagcgtttgcgattttatttttattcggcgtcgtcgtcgtcgtcgtcgtcgtcgtcgtcgttttcgtttcggttttagttcggtttcggtcgtcggagtttgtagttgtttcgtttatttattttcggagtttcgggtgagcgagtcggcgtttcggcggtcgttggtgttgttgtaggaggaggaggaggtagtaaacgaggaggaggagattcgagaggaggaggcggcgagcggcggggcggaggacggcggagaggaggagatcggttttttgagagtcgtcgttattttgttttttaatattcggagtcgcggttcggttttcgttattcgcggttcgttagcgtttttattgtcgtcgtcgcgattttcgtcggtcgttagttttgggttaggtagagaaagaggttcggcgttagggagcgatcgagaggaagtcgcgttttttttagtttttttttttcgtttttttcgttttttgggtcggttacggtgcgcgtcgcgtttggttcgtcgcgggcgttttttgtcgacgttcgggagaagcgcgcgttaacgcggtcggggtttagggtttcgggggttgcggaggtggttgagacgcggttggttggttcggaggattttattttgtttttggtaggtttt

SEQ ID NO: 1838 - DNA, 688 bp, Artificial Sequence
  chemically treated genomic DNA (Homo sapiens) CpG-island No: 1838
aaaacctaccaaaaacaaaataaaatcctccgaaccaaccaaccgcgtctcaaccacctccgcaacccccgaaaccctaaaccccgaccgcgttaacgcgcgcttctcccgaacgtcgacaaaaaacgcccgcgacgaaccaaacgcgacgcgcaccgtaaccgacccaaaaaacgaaaaaaacgaaaaaaaaaaactaaaaaaaacgcgacttcctctcgatcgctccctaacgccgaacctctttctctacctaacccaaaactaacgaccgacgaaaatcgcgacgacgacaataaaaacgctaacgaaccgcgaataacgaaaaccgaaccgcgactccgaatattaaaaaacaaaataacgacgactctcaaaaaaccgatctcctcctctccgccgtcctccgccccgccgctcgccgcctcctcctctcgaatctcctcctcctcgtttactacctcctcctcctcctacaacaacaccaacgaccgccgaaacgccgactcgctcacccgaaactccgaaaataaataaacgaaacaactacaaactccgacgaccgaaaccgaactaaaaccgaaacgaaaacgacgacgacgacgacgacgacgacgacgacgccgaataaaaataaaatcgcaaacgctacaaatcctccgacaaaaaatataaaccgcgctcaacg

SEQ ID NO: 1839 - DNA, 688 bp, Artificial Sequence
  chemically treated genomic DNA (Homo sapiens) CpG-island No: 1839
ggggtttattaggggtagaatggggtttttcggattagttagtcgcgttttagttattttcgtagttttcggggttttgaatttcggtcgcgttgacgcgcgtttttttcggacgtcggtaggaggcgttcgcggcggattaggcgcggcgcgtatcgtagtcggtttagggggcggagggagcggagaggaggagttggagggggcgcggttttttttcggtcgttttttggcgtcgggtttttttttttgtttggtttagggttggcggtcggcgggggtcgcggcggcggtagtgggggcgttggcgggtcgcgggtggcgggggtcgggtcgcggtttcgggtgttaggagataagatggcggcggtttttagaaggtcggttttttttttttcgtcgtttttcgtttcgtcgttcgtcgtttttttttttcgggttttttttttttcgtttgttgtttttttttttttttgtagtagtattagcgatcgtcgaagcgtcggttcgtttattcggagtttcggaggtggatagacggggtagttgtaggtttcggcgatcgaggtcgagttggggtcggggcggggacggcggcggcggcggcggcgacggcggcggcgtcgggtggggatggggtcgtagacgttgtagatttttcgatagggggtgtgggtcgcgtttagcg

SEQ ID NO: 1840 - DNA, 688 bp, Artificial Sequence
  chemically treated genomic DNA (Homo sapiens) CpG-island No: 1840
cgctaaacgcgacccacaccccctatcgaaaaatctacaacgtctacgaccccatccccacccgacgccgccgccgtcgccgccgccgccgccgccgtccccgccccgaccccaactcgacctcgatcgccgaaacctacaactaccccgtctatccacctccgaaactccgaataaacgaaccgacgcttcgacgatcgctaatactactacaaaaaaaaaaaaaaacaacaaacgaaaaaaaaaaaacccgaaaaaaaaaaacgacgaacgacgaaacgaaaaacgacgaaaaaaaaaaaaccgaccttctaaaaaccgccgccatcttatctcctaacacccgaaaccgcgacccgacccccgccacccgcgacccgccaacgcccccactaccgccgccgcgacccccgccgaccgccaaccctaaaccaaacaaaaaaaaaaacccgacgccaaaaaacgaccgaaaaaaaaccgcgccccctccaactcctcctctccgctccctccgccccctaaaccgactacgatacgcgccgcgcctaatccgccgcgaacgcctcctaccgacgtccgaaaaaaacgcgcgtcaacgcgaccgaaattcaaaaccccgaaaactacgaaaataactaaaacgcgactaactaatccgaaaaaccccattctacccctaataaacccc

SEQ ID NO: 1841 - DNA, 517 bp, Artificial Sequence
  chemically treated genomic DNA (Homo sapiens) CpG-island No: 1841
tggcgtgggtaggtggcgggggaggcgatgggggtggtgcgttggtgaggggagcgagtgggggtatgggcggggagtggcgtagagagagggcggtgggtgtgtgtgaggggggtggggggcgagagagggttgggggcggggggtgtgtggtgcgtgatgagagggtggtgcgtgggtgcgtggagggaggggggagttgggagagatggatcgcgggaggaggagggtggggtggatggcgagggtgggcggagagagggagttgagtgtatacggggtagggaggggcggtgtggggcgggtggtttcgacgcggggtggtggtggtgtgcgggagaagggagcgacggtgacgggtggtgtgtgtggggtgtaggggggagtggcgggggggcgggggttgaggtgaggatggtggggtgtttaggtgagggttggcggaggatgtggatcggtggggggtagatgggatgtgatgagagggggagatgggtcggggttagttgggaggttg

SEQ ID NO: 1842 - DNA, 517 bp, Artificial Sequence
  chemically treated genomic DNA (Homo sapiens) CpG-island No: 1842
caacctcccaactaaccccgacccatctccccctctcatcacatcccatctaccccccaccgatccacatcctccgccaaccctcacctaaacaccccaccatcctcacctcaacccccgcccccccgccactcccccctacaccccacacacaccacccgtcaccgtcgctcccttctcccgcacaccaccaccaccccgcgtcgaaaccacccgccccacaccgcccctccctaccccgtatacactcaactccctctctccgcccaccctcgccatccaccccaccctcctcctcccgcgatccatctctcccaactcccccctccctccacgcacccacgcaccaccctctcatcacgcaccacacaccccccgcccccaaccctctctcgccccccacccccctcacacacacccaccgccctctctctacgccactccccgcccatacccccactcgctcccctcaccaacgcaccacccccatcgcctcccccgccacctacccacgcca

SEQ ID NO: 1843 - DNA, 517 bp, Artificial Sequence
  chemically treated genomic DNA (Homo sapiens) CpG-island No: 1843
taattttttaattagtttcgatttattttttttttttattatattttatttattttttatcgatttatatttttcgttaatttttatttagatattttattatttttattttaattttcgttttttcgttatttttttttatattttatatatattattcgttatcgtcgtttttttttttcgtatattattattatttcgcgtcgaagttattcgttttatatcgtttttttttgtttcgtatgtatttaatttttttttttcgtttattttcgttatttattttattttttttttttcgcgatttattttttttagtttttttttttttttacgtatttacgtattatttttttattacgtattatatatttttcgtttttaattttttttcgttttttattttttttatatatatttatcgttttttttttacgttatttttcgtttatatttttattcgttttttttattaacgtattatttttatcgtttttttcgttatttatttacgtta

SEQ ID NO: 1844 - DNA, 517 bp, Artificial Sequence
  chemically treated genomic DNA (Homo sapiens) CpG-island No: 1844
taacgtaaataaataacgaaaaaaacgataaaaataatacgttaataaaaaaaacgaataaaaatataaacgaaaaataacgtaaaaaaaaaacgataaatatatataaaaaaaataaaaaacgaaaaaaaattaaaaacgaaaaatatataatacgtaataaaaaaataatacgtaaatacgtaaaaaaaaaaaaaaactaaaaaaaataaatcgcgaaaaaaaaaaaataaaataaataacgaaaataaacgaaaaaaaaaaattaaatacatacgaaacaaaaaaaaacgatataaaacgaataacttcgacgcgaaataataataatatacgaaaaaaaaaaacgacgataacgaataatatatataaaatataaaaaaaaataacgaaaaaacgaaaattaaaataaaaataataaaatatctaaataaaaattaacgaaaaatataaatcgataaaaaataaataaaatataataaaaaaaaaaaataaatcgaaactaattaaaaaatta

SEQ ID NO: 1845 - DNA, 509 bp, Artificial Sequence
  chemically treated genomic DNA (Homo sapiens) CpG-island No: 1845
cgtagtagcgattcgggttttgtaggaattcggttagtttgtcgtcggtcgagagtttttacgtgaggggtattatcggttcgaagtagtggaaggaggattcgaataagcgggcggggtcgcggagtatcgtgatgaagatggcgttggtcggtattaggtcgcgtatttcgtcgtagtggaagcgtatgtggttgtagatgatgttgaagtaggtttcgggtcgatagttttgtattaggttgcgggcgaagaaggtcgggtagtcgaagttattgcggtcgttagggaaggcgaatttgagtcggtgtttttggtcgaagcggaataggatgttgagtagggtgttgttggtcgttttgtgcgtttttaagaatacgatgttgcgtcgcggttggtattttttcgtcgagtcgttggttcggattattcgttttggttcgagtgtaggtggagagtaggacgttgcggttttcggggttttgttggggatagagaggtggggagag

SEQ ID NO: 1846 - DNA, 509 bp, Artificial Sequence
  chemically treated genomic DNA (Homo sapiens) CpG-island No: 1846
ctctccccacctctctatccccaacaaaaccccgaaaaccgcaacgtcctactctccacctacactcgaaccaaaacgaataatccgaaccaacgactcgacgaaaaaataccaaccgcgacgcaacatcgtattcttaaaaacgcacaaaacgaccaacaacaccctactcaacatcctattccgcttcgaccaaaaacaccgactcaaattcgccttccctaacgaccgcaataacttcgactacccgaccttcttcgcccgcaacctaatacaaaactatcgacccgaaacctacttcaacatcatctacaaccacatacgcttccactacgacgaaatacgcgacctaataccgaccaacgccatcttcatcacgatactccgcgaccccgcccgcttattcgaatcctccttccactacttcgaaccgataatacccctcacgtaaaaactctcgaccgacgacaaactaaccgaattcctacaaaacccgaatcgctactacg

SEQ ID NO: 1847 - DNA, 509 bp, Artificial Sequence
  chemically treated genomic DNA (Homo sapiens) CpG-island No: 1847
ttttttttatttttttgtttttagtaggatttcggaggtcgtagcgttttgttttttatttgtattcgagttagagcgagtgattcgggttaacggttcggcgggggagtgttagtcgcggcgtaatatcgtgtttttgaagacgtataagacggttagtagtattttgtttaatattttgtttcgtttcggttagaagtatcggtttaagttcgttttttttaacggtcgtaatgatttcgattattcgatttttttcgttcgtagtttggtgtaggattatcggttcggggtttgttttaatattatttgtaattatatgcgtttttattacgacgaggtgcgcggtttggtgtcgattaacgttatttttattacggtgtttcgcgatttcgttcgtttgttcgagttttttttttattatttcgggtcggtggtgttttttacgtggaagttttcggtcggcgataagttgatcgagtttttgtaagattcggatcgttattacg

SEQ ID NO: 1848 - DNA, 509 bp, Artificial Sequence
  chemically treated genomic DNA (Homo sapiens) CpG-island No: 1848
cgtaataacgatccgaatcttacaaaaactcgatcaacttatcgccgaccgaaaacttccacgtaaaaaacaccaccgacccgaaataataaaaaaaaaactcgaacaaacgaacgaaatcgcgaaacaccgtaataaaaataacgttaatcgacaccaaaccgcgcacctcgtcgtaataaaaacgcatataattacaaataatattaaaacaaaccccgaaccgataatcctacaccaaactacgaacgaaaaaaatcgaataatcgaaatcattacgaccgttaaaaaaaacgaacttaaaccgatacttctaaccgaaacgaaacaaaatattaaacaaaatactactaaccgtcttatacgtcttcaaaaacacgatattacgccgcgactaacactcccccgccgaaccgttaacccgaatcactcgctctaactcgaatacaaataaaaaacaaaacgctacgacctccgaaatcctactaaaaacaaaaaaataaaaaaaa

SEQ ID NO: 1849 - DNA, 565 bp, Artificial Sequence
  chemically treated genomic DNA (Homo sapiens) CpG-island No: 1849
ttcgcggtttgagttttcgttttattgttttcgcggtaagttcggcgttaggtttggataagagaggtcgatagggtgagacgttcgtttttgttggtcgttatttgggatcgggggagttcggacgggttcggagcggaggattcgcggattttgggtagtcgacgcgaataggtttcgtcgggcgcgggcggaggacggaagtttagagggagcggttgatagatttcggaagtggatacggcgtttgcgcgttgcgatcgcgcggacggttcgcgtatgcgtatagttcgggcgcgtagttcggggttaggtaggttgtagtggaggagggtacgtcgttttattggcgtggtattgtcggcggttttttagaggagatgttgttttacggaacgtttggtaagtgttggcgaagcggtatgggcgttttatttcgttttttaattaatttttttataatcgcgagtcgaagtgtggcgttttggtagtttcgtaaggttttttgttaggagatgagttattgaggattgggggtttttggagtttttggatttgaagaacg

SEQ ID NO: 1850 - DNA, 565 bp, Artificial Sequence
  chemically treated genomic DNA (Homo sapiens) CpG-island No: 1850
cgttcttcaaatccaaaaactccaaaaacccccaatcctcaataactcatctcctaacaaaaaaccttacgaaactaccaaaacgccacacttcgactcgcgattataaaaaaattaattaaaaaacgaaataaaacgcccataccgcttcgccaacacttaccaaacgttccgtaaaacaacatctcctctaaaaaaccgccgacaataccacgccaataaaacgacgtaccctcctccactacaacctacctaaccccgaactacgcgcccgaactatacgcatacgcgaaccgtccgcgcgatcgcaacgcgcaaacgccgtatccacttccgaaatctatcaaccgctccctctaaacttccgtcctccgcccgcgcccgacgaaacctattcgcgtcgactacccaaaatccgcgaatcctccgctccgaacccgtccgaactcccccgatcccaaataacgaccaacaaaaacgaacgtctcaccctatcgacctctcttatccaaacctaacgccgaacttaccgcgaaaacaataaaacgaaaactcaaaccgcgaa

SEQ ID NO: 1851 - DNA, 565 bp, Artificial Sequence
  chemically treated genomic DNA (Homo sapiens) CpG-island No: 1851
cgttttttaggtttaagagttttaaagatttttaatttttagtaatttattttttgataaaagattttgcgaaattgttaaagcgttatatttcggttcgcgattgtgaggaaattggttgaggaacggagtgggacgtttatgtcgtttcgttagtatttgttaggcgtttcgtggggtagtattttttttgaagggtcgtcgatagtattacgttaatggaacggcgtatttttttttattgtagtttgtttaatttcggattgcgcgttcgagttgtgcgtatgcgcggatcgttcgcgcggtcgtaacgcgtaggcgtcgtgtttattttcgggatttgttagtcgttttttttgggttttcgtttttcgttcgcgttcgacggagtttgttcgcgtcgattgtttagagttcgcgaatttttcgtttcgagttcgttcggattttttcgattttaggtaacggttagtaggggcgagcgttttattttgtcggttttttttgtttaggtttggcgtcggatttgtcgcgggggtagtgagacgggggtttaggtcgcggg

SEQ ID NO: 1852 - DNA, 565 bp, Artificial Sequence
  chemically treated genomic DNA (Homo sapiens) CpG-island No: 1852
cccgcgacctaaacccccgtctcactacccccgcgacaaatccgacgccaaacctaaacaaaaaaaaccgacaaaataaaacgctcgcccctactaaccgttacctaaaatcgaaaaaatccgaacgaactcgaaacgaaaaattcgcgaactctaaacaatcgacgcgaacaaactccgtcgaacgcgaacgaaaaacgaaaacccaaaaaaaacgactaacaaatcccgaaaataaacacgacgcctacgcgttacgaccgcgcgaacgatccgcgcatacgcacaactcgaacgcgcaatccgaaattaaacaaactacaataaaaaaaaatacgccgttccattaacgtaatactatcgacgacccttcaaaaaaaatactaccccacgaaacgcctaacaaatactaacgaaacgacataaacgtcccactccgttcctcaaccaatttcctcacaatcgcgaaccgaaatataacgctttaacaatttcgcaaaatcttttatcaaaaaataaattactaaaaattaaaaatctttaaaactcttaaacctaaaaaacg

SEQ ID NO: 1853 - DNA, 825 bp, Artificial Sequence
  chemically treated genomic DNA (Homo sapiens) CpG-island No: 1853
ttttcggttagtttttggtcgtcgtcgaatttcgcgcgttattcgttcgtttagagggaggagaaagtggcgagtttcggatttttgtttagcgcggtttaatttttattttagagattatggttgtcgaggatgtggtggcgattggcgtcgatttaagcgatttggagagcggcgggttgttgtatgagatttttacgtcgtcgtttaatttgttgttgtttggtttttgtatttttttgttttataagatcgtgcgcggggattagtcggcggttagcggcgatagcgacgacgacgagtcgttttttttgtttcgttttaagcggcgcgattttattttcgtcgagttgcggcgtttcgacggcgtttaggattcgcgtatatttatggttattaacggtaaggtgttcgatgtgattaaaggtcgtaaattttacgggttcggtacgcggtcggcgaggggggtttggagataaaagaagggggtttcggtacggggttgggcgggagagaggcgaggcgggagcggggcgtttttgagtggagggaggaatggcggcgagttagggtaggcgggtaggcgggtaggcggagagtcgggaggttttcggggcgggtagggaataagaggcgttttagaggggttgcgggttagttagggacgcggattttcggttcgcgttgatagcgttgggagggggttagagaaagaaggttgaggcgtttaagtcgggggtgggtgggattacgaagttcgaaggcgttgaggggggatatattaaagtttaggttgttggggtagttttcgaaggttttgggttt

SEQ ID NO: 1854 - DNA, 825 bp, Artificial Sequence
  chemically treated genomic DNA (Homo sapiens) CpG-island No: 1854
aaacccaaaaccttcgaaaactaccccaacaacctaaactttaatatatcccccctcaacgccttcgaacttcgtaatcccacccacccccgacttaaacgcctcaaccttctttctctaaccccctcccaacgctatcaacgcgaaccgaaaatccgcgtccctaactaacccgcaacccctctaaaacgcctcttattccctacccgccccgaaaacctcccgactctccgcctacccgcctacccgcctaccctaactcgccgccattcctccctccactcaaaaacgccccgctcccgcctcgcctctctcccgcccaaccccgtaccgaaacccccttcttttatctccaaacccccctcgccgaccgcgtaccgaacccgtaaaatttacgacctttaatcacatcgaacaccttaccgttaataaccataaatatacgcgaatcctaaacgccgtcgaaacgccgcaactcgacgaaaataaaatcgcgccgcttaaaacgaaacaaaaaaaacgactcgtcgtcgtcgctatcgccgctaaccgccgactaatccccgcgcacgatcttataaaacaaaaaaatacaaaaaccaaacaacaacaaattaaacgacgacgtaaaaatctcatacaacaacccgccgctctccaaatcgcttaaatcgacgccaatcgccaccacatcctcgacaaccataatctctaaaataaaaattaaaccgcgctaaacaaaaatccgaaactcgccactttctcctccctctaaacgaacgaataacgcgcgaaattcgacgacgaccaaaaactaaccgaaaa

SEQ ID NO: 1855 - DNA, 825 bp, Artificial Sequence
  chemically treated genomic DNA (Homo sapiens) CpG-island No: 1855
aagtttaggattttcgaaaattattttaatagtttgggttttgatgtgtttttttttaacgttttcgagtttcgtggttttatttattttcggtttaagcgttttagttttttttttttaatttttttttagcgttgttagcgcgggtcggggattcgcgtttttgattggttcgtagtttttttagagcgttttttgttttttgttcgtttcgggagtttttcggtttttcgtttgttcgtttattcgtttattttagttcgtcgttatttttttttttatttaggggcgtttcgttttcgtttcgtttttttttcgtttagtttcgtgtcggggttttttttttttgtttttaagtttttttcgtcggtcgcgtatcgggttcgtagaatttgcggtttttggttatatcgaatattttgtcgttgatggttatgagtatgcgcgggttttggacgtcgtcgaagcgtcgtagttcggcgggggtgaagtcgcgtcgtttgaggcggggtagagggggcggttcgtcgtcgtcgttgtcgtcgttggtcgtcggttggttttcgcgtacgattttgtagagtaggaagatgtagaggttaagtagtagtaggttgagcggcgacgtgaaaattttatgtagtagttcgtcgttttttagatcgtttgggtcggcgttagtcgttattatattttcggtagttatgatttttggagtaaaggttgggtcgcgttaggtagggattcggaattcgttatttttttttttttttgagcgagcgagtggcgcgcggggttcggcggcggttaaagattagtcgggga

SEQ ID NO: 1856 - DNA, 825 bp, Artificial Sequence
  chemically treated genomic DNA (Homo sapiens) CpG-island No: 1856
tccccgactaatctttaaccgccgccgaaccccgcgcgccactcgctcgctcaaaaaaaaaaaaaaataacgaattccgaatccctacctaacgcgacccaacctttactccaaaaatcataactaccgaaaatataataacgactaacgccgacccaaacgatctaaaaaacgacgaactactacataaaattttcacgtcgccgctcaacctactactacttaacctctacatcttcctactctacaaaatcgtacgcgaaaaccaaccgacgaccaacgacgacaacgacgacgacgaaccgccccctctaccccgcctcaaacgacgcgacttcacccccgccgaactacgacgcttcgacgacgtccaaaacccgcgcatactcataaccatcaacgacaaaatattcgatataaccaaaaaccgcaaattctacgaacccgatacgcgaccgacgaaaaaaacttaaaaacaaaaaaaaaaaaccccgacacgaaactaaacgaaaaaaaaacgaaacgaaaacgaaacgcccctaaataaaaaaaaaaataacgacgaactaaaataaacgaataaacgaacaaacgaaaaaccgaaaaactcccgaaacgaacaaaaaacaaaaaacgctctaaaaaaactacgaaccaatcaaaaacgcgaatccccgacccgcgctaacaacgctaaaaaaaaattaaaaaaaaaaaactaaaacgcttaaaccgaaaataaataaaaccacgaaactcgaaaacgttaaaaaaaaacacatcaaaacccaaactattaaaataattttcgaaaatcctaaactt

SEQ ID NO: 1857 - DNA, 584 bp, Artificial Sequence
  chemically treated genomic DNA (Homo sapiens) CpG-island No: 1857
gcggggattgcggcggtagcgggttgttttaggtcgcgggtatcgttcgggcgggaatttgggcgtcgtggacgaaaggtgcggggtgattttcggacgaggttaattgagatcggttgtcgggcgtaggggattttttcgtagtcgtttattttcgggggtttattcgttttatagcggcgaacgcggtgtttcggattttagtcgggtttatttcgtagttcgttttcgggtagaacgtgggatgtgtaatttcggtagttcgaattcgcgttagggtttcggttcgtcgtcgttcggatatattttcgtcgtcgttcgggtggttttagttttttttcgggcggttcgagcgggtatcgtttatttgtatcgcgagttagttcgtcgtttcgagggtttcggaagtcgcggttgcgtggtttcggtcggagggtattcggtttttgtcgtttggaaggtttcgcgtcgggagcggtcgaaggaggagtttgacgggtggcgggggagtttgggcggttggaggaggaggaggaggaggaggagaaggaggaggaggatttcgacgttttgttttggggaga

SEQ ID NO: 1858 - DNA, 584 bp, Artificial Sequence
  chemically treated genomic DNA (Homo sapiens) CpG-island No: 1858
tctccccaaaacaaaacgtcgaaatcctcctcctccttctcctcctcctcctcctcctcctccaaccgcccaaactcccccgccacccgtcaaactcctccttcgaccgctcccgacgcgaaaccttccaaacgacaaaaaccgaataccctccgaccgaaaccacgcaaccgcgacttccgaaaccctcgaaacgacgaactaactcgcgatacaaataaacgatacccgctcgaaccgcccgaaaaaaaactaaaaccacccgaacgacgacgaaaatatatccgaacgacgacgaaccgaaaccctaacgcgaattcgaactaccgaaattacacatcccacgttctacccgaaaacgaactacgaaataaacccgactaaaatccgaaacaccgcgttcgccgctataaaacgaataaacccccgaaaataaacgactacgaaaaaatcccctacgcccgacaaccgatctcaattaacctcgtccgaaaatcaccccgcacctttcgtccacgacgcccaaattcccgcccgaacgatacccgcgacctaaaacaacccgctaccgccgcaatccccgc

SEQ ID NO: 1859 - DNA, 584 bp, Artificial Sequence
  chemically treated genomic DNA (Homo sapiens) CpG-island No: 1859
tttttttagagtaaagcgtcggagtttttttttttttttttttttttttttttttttttttttagtcgtttaggttttttcgttattcgttagatttttttttcgatcgttttcggcgcggggttttttaggcgataaggatcgagtatttttcggtcggagttacgtagtcgcggttttcggagttttcggggcggcggattggttcgcggtgtaggtgagcgatgttcgttcgggtcgttcggggagggattggggttattcgggcggcggcgggggtgtgttcgggcggcggcgggtcgaggttttgacgcgggttcgggttgtcgagattgtatattttacgttttgttcggggacgagttgcgagatgagttcggttggaattcggggtatcgcgttcgtcgttgtggggcgagtgagttttcgagagtgagcggttgcggagaggttttttgcgttcggtagtcggttttagttggtttcgttcgaaggttatttcgtatttttcgtttacggcgtttaagttttcgttcgggcggtgttcgcgatttggggtaattcgttgtcgtcgtagttttcgt

SEQ ID NO: 1860 - DNA, 584 bp, Artificial Sequence
  chemically treated genomic DNA (Homo sapiens) CpG-island No: 1860
acgaaaactacgacgacaacgaattaccccaaatcgcgaacaccgcccgaacgaaaacttaaacgccgtaaacgaaaaatacgaaataaccttcgaacgaaaccaactaaaaccgactaccgaacgcaaaaaacctctccgcaaccgctcactctcgaaaactcactcgccccacaacgacgaacgcgataccccgaattccaaccgaactcatctcgcaactcgtccccgaacaaaacgtaaaatatacaatctcgacaacccgaacccgcgtcaaaacctcgacccgccgccgcccgaacacacccccgccgccgcccgaataaccccaatccctccccgaacgacccgaacgaacatcgctcacctacaccgcgaaccaatccgccgccccgaaaactccgaaaaccgcgactacgtaactccgaccgaaaaatactcgatccttatcgcctaaaaaaccccgcgccgaaaacgatcgaaaaaaaaatctaacgaataacgaaaaaacctaaacgactaaaaaaaaaaaaaaaaaaaaaaaaaaaaaaaaaaaaaaactccgacgctttactctaaaaaaa

SEQ ID NO: 1861 - DNA, 916 bp, Artificial Sequence
  chemically treated genomic DNA (Homo sapiens) CpG-island No: 1861
atcgcgttcggtcgtttttcgtttttgtaaattgtgtgttagggttttaggcgggttcgggtagtagcggcggcgcgcgtacgcgtatttcgcggtttcgcgcggttttttaatatttaattttacgtgttgtttgttgtaggcgttataggttttttatttgcgttcgggcgttcgggcggtttcgttattgtcggcgggttttggggaatcgttgggtcggcgcgttcggggttggcggagtaatttttgaggcgtttaagtttatttttaacgttaatttcgtttatttagtttcggcggttttttttttttttttttttaattttttttcgtttttgttcgtttttttcgttttggtggtaggaaatatttttgaatttaattcgacgtgttcggaaagttttggttagtttttttttcgttttgcggtcgttgtagttagtttcgcggtttttttagattcgcgggcgtagtcgtcgggggtgaggcgtttggggatcgcgggtcgagcggcggggattttcgagtattatgttggattcgttttttagcgaagaggagtcggacgaggggttggaagaggaaagtcgcgatgtgttggtggtagtcggtagttcgtagcgagtttttttagtttcgattcgggaagggcggcgggacgtcggggcgcgcgggcggcggcggcgcggttagatttgtgagttcgagtttttttgtgtttagcgaggggcgagacgagtttagcggtagttggacgatgagtaggagcggaggatgcgtttgtagttttacgttttcgtcgtgaggtgtatcgcgtatttttttaacgttaagtagtttatcgatatggttcggaggtagtagaaggtgagttgcgggagtcgggcgttttttattattatttttttttggg

SEQ ID NO: 1862 - DNA, 916 bp, Artificial Sequence
  chemically treated genomic DNA (Homo sapiens) CpG-island No: 1862
cccaaaaaaaaataataataaaaaacgcccgactcccgcaactcaccttctactacctccgaaccatatcgataaactacttaacgttaaaaaaatacgcgatacacctcacgacgaaaacgtaaaactacaaacgcatcctccgctcctactcatcgtccaactaccgctaaactcgtctcgcccctcgctaaacacaaaaaaactcgaactcacaaatctaaccgcgccgccgccgcccgcgcgccccgacgtcccgccgcccttcccgaatcgaaactaaaaaaactcgctacgaactaccgactaccaccaacacatcgcgactttcctcttccaacccctcgtccgactcctcttcgctaaaaaacgaatccaacataatactcgaaaatccccgccgctcgacccgcgatccccaaacgcctcacccccgacgactacgcccgcgaatctaaaaaaaccgcgaaactaactacaacgaccgcaaaacgaaaaaaaaactaaccaaaactttccgaacacgtcgaattaaattcaaaaatatttcctaccaccaaaacgaaaaaaacgaacaaaaacgaaaaaaaattaaaaaaaaaaaaaaaaaaaaccgccgaaactaaataaacgaaattaacgttaaaaataaacttaaacgcctcaaaaattactccgccaaccccgaacgcgccgacccaacgattccccaaaacccgccgacaataacgaaaccgcccgaacgcccgaacgcaaataaaaaacctataacgcctacaacaaacaacacgtaaaattaaatattaaaaaaccgcgcgaaaccgcgaaatacgcgtacgcgcgccgccgctactacccgaacccgcctaaaaccctaacacacaatttacaaaaacgaaaaacgaccgaacgcgat

SEQ ID NO: 1863 - DNA, 916 bp, Artificial Sequence
  chemically treated genomic DNA (Homo sapiens) CpG-island No: 1863
tttagggagaagtggtggtaggaggcgttcggttttcgtaatttattttttgttgttttcgggttatgtcggtgggttgtttggcgttgaaggggtacgcgatgtattttacgacgaagacgtagagttgtaggcgtatttttcgtttttgtttatcgtttagttgtcgttgggttcgtttcgtttttcgttgagtatagaggggttcgggtttatagatttggtcgcgtcgtcgtcgttcgcgcgtttcggcgtttcgtcgtttttttcgagtcggggttggaggagttcgttgcgagttgtcggttgttattagtatatcgcggttttttttttttagtttttcgttcgattttttttcgttggaagacgggtttagtatggtgttcggggattttcgtcgttcggttcgcggtttttaagcgttttattttcggcggttgcgttcgcgggtttgagggagtcgcggggttggttgtagcggtcgtagaacgaaaggaaaattggttagggtttttcggatacgtcgagttagatttaggagtgttttttattattagggcgaaaggggcgggtaggagcgggagaggattgggaggggggagagggggagtcgtcgggattgaataggcggagttagcgttgggggtgagtttgggcgttttaggaattgtttcgttagtttcgggcgcgtcgatttagcggttttttagagttcgtcggtagtagcggagtcgttcgagcgttcggacgtaggtggggaatttgtggcgtttataataagtaatacgtggaattgaatgttgaagagtcgcgcggggtcgcggagtgcgcgtgcgcgcgtcgtcgttgttgttcgggttcgtttggagttttagtatatagtttgtaaaggcggggagcggtcgagcgcgat

SEQ ID NO: 1864 - DNA, 916 bp, Artificial Sequence
  chemically treated genomic DNA (Homo sapiens) CpG-island No: 1864
atcgcgctcgaccgctccccgcctttacaaactatatactaaaactccaaacgaacccgaacaacaacgacgacgcgcgcacgcgcactccgcgaccccgcgcgactcttcaacattcaattccacgtattacttattataaacgccacaaattccccacctacgtccgaacgctcgaacgactccgctactaccgacgaactctaaaaaaccgctaaatcgacgcgcccgaaactaacgaaacaattcctaaaacgcccaaactcacccccaacgctaactccgcctattcaatcccgacgactccccctctcccccctcccaatcctctcccgctcctacccgcccctttcgccctaataataaaaaacactcctaaatctaactcgacgtatccgaaaaaccctaaccaattttcctttcgttctacgaccgctacaaccaaccccgcgactccctcaaacccgcgaacgcaaccgccgaaaataaaacgcttaaaaaccgcgaaccgaacgacgaaaatccccgaacaccatactaaacccgtcttccaacgaaaaaaaatcgaacgaaaaactaaaaaaaaaaaaccgcgatatactaataacaaccgacaactcgcaacgaactcctccaaccccgactcgaaaaaaacgacgaaacgccgaaacgcgcgaacgacgacgacgcgaccaaatctataaacccgaacccctctatactcaacgaaaaacgaaacgaacccaacgacaactaaacgataaacaaaaacgaaaaatacgcctacaactctacgtcttcgtcgtaaaatacatcgcgtaccccttcaacgccaaacaacccaccgacataacccgaaaacaacaaaaaataaattacgaaaaccgaacgcctcctaccaccacttctccctaaa

SEQ ID NO: 1865 - DNA, 507 bp, Artificial Sequence
  chemically treated genomic DNA (Homo sapiens) CpG-island No: 1865
cgtcgtttgtgattttagtcgggacggattcgcgggcgggagtttgcggggcgtgaggcggggtggggttttggtttttttttttcgtttagtcgcggcgtttgacgtttcgcgcgtcggcggtcgcggagtagcgtagggagttaggcgggttgtcggcgggtaagggtttttgcgattcggggattcgtggggcgtaggtcgcggagggagagcgtcgttgtttggtttggagaatttcgcggagttggtttggttcgattcggttcggttcggttcgcggcgcggtggtcgagggttcgcggcgttttttgggagcgggagggtcgggaagtcgggcgttggtggagggaggcgttgggtttttgtcgtcgcgaagttggcggaaaaggtagtggttagcgagtcgtttcgttagtttttacgatttttagggaggtggcgatattcgtttttcgggttattttttttttttttttgatcggggttcgtgtttgtttttttagg

SEQ ID NO: 1866 - DNA, 507 bp, Artificial Sequence
  chemically treated genomic DNA (Homo sapiens) CpG-island No: 1866
cctaaaaaaacaaacacgaaccccgatcaaaaaaaaaaaaaaaataacccgaaaaacgaatatcgccacctccctaaaaatcgtaaaaactaacgaaacgactcgctaaccactaccttttccgccaacttcgcgacgacaaaaacccaacgcctccctccaccaacgcccgacttcccgaccctcccgctcccaaaaaacgccgcgaaccctcgaccaccgcgccgcgaaccgaaccgaaccgaatcgaaccaaaccaactccgcgaaattctccaaaccaaacaacgacgctctccctccgcgacctacgccccacgaatccccgaatcgcaaaaacccttacccgccgacaacccgcctaactccctacgctactccgcgaccgccgacgcgcgaaacgtcaaacgccgcgactaaacgaaaaaaaaaaaccaaaaccccaccccgcctcacgccccgcaaactcccgcccgcgaatccgtcccgactaaaatcacaaacgacg

SEQ ID NO: 1867 - DNA, 507 bp, Artificial Sequence
  chemically treated genomic DNA (Homo sapiens) CpG-island No: 1867
tttgggaaggtaagtacggatttcggttaggaaggggaaaagggtggttcgggaagcgggtgtcgttatttttttgggagtcgtgggaattggcgaggcggttcgttggttattgtttttttcgttagtttcgcggcgatagaagtttaacgtttttttttattaacgttcggtttttcggttttttcgtttttagaaggcgtcgcgggttttcgattatcgcgtcgcggatcgggtcgggtcgggtcgggttaggttagtttcgcggggttttttagattaggtagcggcgtttttttttcgcggtttacgttttacgggttttcgggtcgtagaagtttttattcgtcggtagttcgtttggttttttgcgttgtttcgcggtcgtcgacgcgcgggacgttagacgtcgcggttgggcgggggaggggagttagggttttatttcgttttacgtttcgtaggttttcgttcgcgggttcgtttcggttgaggttataggcggcg

SEQ ID NO: 1868 - DNA, 507 bp, Artificial Sequence
  chemically treated genomic DNA (Homo sapiens) CpG-island No: 1868
cgccgcctataacctcaaccgaaacgaacccgcgaacgaaaacctacgaaacgtaaaacgaaataaaaccctaactcccctcccccgcccaaccgcgacgtctaacgtcccgcgcgtcgacgaccgcgaaacaacgcaaaaaaccaaacgaactaccgacgaataaaaacttctacgacccgaaaacccgtaaaacgtaaaccgcgaaaaaaaaacgccgctacctaatctaaaaaaccccgcgaaactaacctaacccgacccgacccgacccgatccgcgacgcgataatcgaaaacccgcgacgccttctaaaaacgaaaaaaccgaaaaaccgaacgttaataaaaaaaaacgttaaacttctatcgccgcgaaactaacgaaaaaaacaataaccaacgaaccgcctcgccaattcccacgactcccaaaaaaataacgacacccgcttcccgaaccacccttttccccttcctaaccgaaatccgtacttaccttcccaaa

SEQ ID NO: 1869 - DNA, 1065 bp, Artificial Sequence
  chemically treated genomic DNA (Homo sapiens) CpG-island No: 1869
gatagcgtaggcgtcgcgtatttttatttgtatacgtttttttttaggtcgtatacggggtcgtcgttgtttacgttcgggtcggatagggatagggagtttacggtcgatttcgatgtcgacgagtttttggataagttttttagtgttggcgtgaagtagagcgatttttttagaaaggagacggagtagtcgtttgcgtcggggagtatggaggagagcgtgagaggttacgattggttttcgcgcgacgttcgcgtagtttagattagggtcggtagtaggcggagcggaggagcgtgttgcggggtttttgcgttaattttagtttggttttttttattaaggagcgcgtattcgacgatatttttaattcggagttgagttatttgatcgtggacgatcggtacggggttatttattgttacgtgtttaaggtggtttgtattaattggaagcgcgtgatgatcgtgttgagcggaagtttgttgtatcgcggtgcgttttatcgcgattcgttgcgtatttcgcgcgagtacgtgtataacgttagcgcgtatttgatttttaataagttttggcgtcgttacgggaagttttttcgttattttatgaaggttaagtttaagaagtatattaagttttttttcgtgcgcgattttttcgtgcgtttgattttcgtttttcgtagtaagttcgagttggagaacgaggagttttatcgtaagttcgtcgtgtttatgttgcggttgtacgttaattatattagtttgttcgtttcggcgcgcgaggtttttcgcgttggttttaaggtgtttttcgttaattttatttagtatttgttggattcgtatacggagaagttggcgttttttaacgagtattggcggtaggtgtatcgtttttgttattcgtgttagatcgattacgatttcgtggggaagttggagattttggacgaggacgtcgcgtagttgttgtagttattttaggtggatcggtagtttcgttttttttcgagttatcggaataggatcgttagtagttgggaggaggattggttcg

SEQ ID NO: 1870 - DNA, 1065 bp, Artificial Sequence
  chemically treated genomic DNA (Homo sapiens) CpG-island No: 1870
cgaaccaatcctcctcccaactactaacgatcctattccgataactcgaaaaaaaacgaaactaccgatccacctaaaataactacaacaactacgcgacgtcctcgtccaaaatctccaacttccccacgaaatcgtaatcgatctaacacgaataacaaaaacgatacacctaccgccaatactcgttaaaaaacgccaacttctccgtatacgaatccaacaaatactaaataaaattaacgaaaaacaccttaaaaccaacgcgaaaaacctcgcgcgccgaaacgaacaaactaatataattaacgtacaaccgcaacataaacacgacgaacttacgataaaactcctcgttctccaactcgaacttactacgaaaaacgaaaatcaaacgcacgaaaaaatcgcgcacgaaaaaaaacttaatatacttcttaaacttaaccttcataaaataacgaaaaaacttcccgtaacgacgccaaaacttattaaaaatcaaatacgcgctaacgttatacacgtactcgcgcgaaatacgcaacgaatcgcgataaaacgcaccgcgatacaacaaacttccgctcaacacgatcatcacgcgcttccaattaatacaaaccaccttaaacacgtaacaataaataaccccgtaccgatcgtccacgatcaaataactcaactccgaattaaaaatatcgtcgaatacgcgctccttaataaaaaaaaccaaactaaaattaacgcaaaaaccccgcaacacgctcctccgctccgcctactaccgaccctaatctaaactacgcgaacgtcgcgcgaaaaccaatcgtaacctctcacgctctcctccatactccccgacgcaaacgactactccgtctcctttctaaaaaaatcgctctacttcacgccaacactaaaaaacttatccaaaaactcgtcgacatcgaaatcgaccgtaaactccctatccctatccgacccgaacgtaaacaacgacgaccccgtatacgacctaaaaaaaaacgtatacaaataaaaatacgcgacgcctacgctatc

SEQ ID NO: 1871 - DNA, 1065 bp, Artificial Sequence
  chemically treated genomic DNA (Homo sapiens) CpG-island No: 1871
cgaattagttttttttttagttgttggcggttttgtttcggtagttcggggggaagcggagttgtcggtttatttggagtagttgtagtagttgcgcggcgttttcgtttagagtttttagtttttttacgaagtcgtagtcgatttggtacgggtggtagaggcggtatatttgtcgttagtgttcgttgaagggcgttagttttttcgtgtgcgggtttagtaggtattggatgaagttggcgaaggatattttgaggttagcgcggaaggtttcgcgcgtcgaggcgggtaggttggtgtggttggcgtatagtcgtagtatgggtacggcgaatttgcggtagaatttttcgttttttagttcgaatttgttgcggaaggcggagattaggcgtacgaaggggtcgcgtacgaagaggaatttggtgtattttttgagtttgatttttatgaggtggcgggagagtttttcgtagcggcgttagaatttgttgaaggttaggtgcgcgttggcgttgtgtacgtgttcgcgcgggatgcgtagcgggtcgcggtagggcgtatcgcggtgtagtaggttttcgtttagtacgattattacgcgtttttagttggtgtaggttattttgggtacgtagtagtagatggtttcgtgtcggtcgtttacgattaggtggtttagtttcgagttggggatgtcgtcgaatgcgcgttttttggtggggaaggttaggttggagttggcgtagaagtttcgtagtacgttttttcgtttcgtttgttgtcggttttggtttgggttgcgcgggcgtcgcgcggggattagtcgtagttttttacgtttttttttatgtttttcggcgtaggcggttgtttcgttttttttttgggaaggtcgttttgttttacgttagtattgagaaatttgtttagaaattcgtcgatatcggagtcggtcgtgagttttttgtttttgttcggttcgggcgtgggtagcggcggtttcgtgtgcggtttagagaaggacgtgtgtaagtagaagtgcgcggcgtttgcgttgtt

SEQ ID NO: 1872 - DNA, 1065 bp, Artificial Sequence
  chemically treated genomic DNA (Homo sapiens) CpG-island No: 1872
aacaacgcaaacgccgcgcacttctacttacacacgtccttctctaaaccgcacacgaaaccgccgctacccacgcccgaaccgaacaaaaacaaaaaactcacgaccgactccgatatcgacgaatttctaaacaaatttctcaatactaacgtaaaacaaaacgaccttcccaaaaaaaaaacgaaacaaccgcctacgccgaaaaacataaaaaaaaacgtaaaaaactacgactaatccccgcgcgacgcccgcgcaacccaaaccaaaaccgacaacaaacgaaacgaaaaaacgtactacgaaacttctacgccaactccaacctaaccttccccaccaaaaaacgcgcattcgacgacatccccaactcgaaactaaaccacctaatcgtaaacgaccgacacgaaaccatctactactacgtacccaaaataacctacaccaactaaaaacgcgtaataatcgtactaaacgaaaacctactacaccgcgatacgccctaccgcgacccgctacgcatcccgcgcgaacacgtacacaacgccaacgcgcacctaaccttcaacaaattctaacgccgctacgaaaaactctcccgccacctcataaaaatcaaactcaaaaaatacaccaaattcctcttcgtacgcgaccccttcgtacgcctaatctccgccttccgcaacaaattcgaactaaaaaacgaaaaattctaccgcaaattcgccgtacccatactacgactatacgccaaccacaccaacctacccgcctcgacgcgcgaaaccttccgcgctaacctcaaaatatccttcgccaacttcatccaatacctactaaacccgcacacgaaaaaactaacgcccttcaacgaacactaacgacaaatataccgcctctaccacccgtaccaaatcgactacgacttcgtaaaaaaactaaaaactctaaacgaaaacgccgcgcaactactacaactactccaaataaaccgacaactccgcttccccccgaactaccgaaacaaaaccgccaacaactaaaaaaaaaactaattcg

SEQ ID NO: 1873 - DNA, 814 bp, Artificial Sequence
  chemically treated genomic DNA (Homo sapiens) CpG-island No: 1873
aggttggttaacgggatcgtgtttggttgtaacgtggagttttcgggtcgaacggcgagatagttgcgcgttttcgagtcgtcgcgcgttcggttcgtcggggcggtgttaacgtcgcggattggttgttgagaaaggggcgtggttcgtggcggtcggtgggcggagtcgatttttggtcgtaaatacggcgttatatggtattggttcgcgagggcgggggcgggcgggttggtcgggcgtaggcgcgttgagggcgggcgttttcggttttcgtggttttttcggcggtcgcgacgtttcgcgagaagacgatcggtagaaggggtttttgcgtcgggggcgggtcggcgagggttgtttttggggggttcgttagtcgcggggcggcggcggcggttgcgggcgcgaggtgaggggcgcgaggtgagggtcgcgaggtgaggggcgcggcgggcggcgggttcggggcgcggtttttttttttttcggttagtgttgggtttttagggttcgggcgggggtttcgggtcgcgttgaggggcgcgggtcggttttttttaatttggtttggcgggcgcggtttgggtttgggttcgagttttcgcgtcggcgcgtagtgtgattttggttttgcgcgcgttttttttgagtttcgttcgtcgttttcggttagggggatttagttttggggttttgattagcgcgttttgcggtttttcggggtttggacgagaaatttgtggttttgatttagcgatagtagaggttgtagcggtttcgtcggtttttaggagtttttttgttcggtatt

SEQ ID NO: 1874 - DNA, 814 bp, Artificial Sequence
  chemically treated genomic DNA (Homo sapiens) CpG-island No: 1874
aataccgaacaaaaaaactcctaaaaaccgacgaaaccgctacaacctctactatcgctaaatcaaaaccacaaatttctcgtccaaaccccgaaaaaccgcaaaacgcgctaatcaaaaccccaaaactaaatccccctaaccgaaaacgacgaacgaaactcaaaaaaaacgcgcgcaaaaccaaaatcacactacgcgccgacgcgaaaactcgaacccaaacccaaaccgcgcccgccaaaccaaattaaaaaaaaccgacccgcgcccctcaacgcgacccgaaacccccgcccgaaccctaaaaacccaacactaaccgaaaaaaaaaaaaaccgcgccccgaacccgccgcccgccgcgcccctcacctcgcgaccctcacctcgcgcccctcacctcgcgcccgcaaccgccgccgccgccccgcgactaacgaaccccccaaaaacaaccctcgccgacccgcccccgacgcaaaaaccccttctaccgatcgtcttctcgcgaaacgtcgcgaccgccgaaaaaaccacgaaaaccgaaaacgcccgccctcaacgcgcctacgcccgaccaacccgcccgcccccgccctcgcgaaccaataccatataacgccgtatttacgaccaaaaatcgactccgcccaccgaccgccacgaaccacgcccctttctcaacaaccaatccgcgacgttaacaccgccccgacgaaccgaacgcgcgacgactcgaaaacgcgcaactatctcgccgttcgacccgaaaactccacgttacaaccaaacacgatcccgttaaccaacct

SEQ ID NO: 1875 - DNA, 814 bp, Artificial Sequence
  chemically treated genomic DNA (Homo sapiens) CpG-island No: 1875
gatgtcgggtagggggatttttgggggtcggcggggtcgttgtagtttttgttgtcgttgaattagaattatagatttttcgtttagatttcgaggagtcgtagaacgcgttgattagggttttagggttgggtttttttggtcgaggacgacgagcggggtttagagagggcgcgcgtagggttaaggttatattgcgcgtcggcgcgggaattcgaatttaggtttaagtcgcgttcgttaggttaggttaaggagagtcgattcgcgttttttagcgcggttcgggattttcgttcgggttttgggagtttagtattggtcgagagagagggagatcgcgtttcgagttcgtcgttcgtcgcgttttttatttcgcgatttttatttcgcgttttttatttcgcgttcgtagtcgtcgtcgtcgtttcgcgattagcggattttttagaggtagttttcgtcggttcgttttcggcgtaggagttttttttatcggtcgttttttcgcgagacgtcgcggtcgtcggaggggttacggaggtcgagggcgttcgtttttagcgcgtttgcgttcggttagttcgttcgttttcgttttcgcgagttagtgttatgtggcgtcgtatttacggttagagatcgatttcgtttatcggtcgttacgagttacgttttttttttagtagttaattcgcggcgttgatatcgtttcggcggatcgggcgcgcggcggttcggggacgcgtagttgtttcgtcgttcgattcgggagttttacgttgtagttaaatacgatttcgttaattaattt

SEQ ID NO: 1876 - DNA, 814 bp, Artificial Sequence
  chemically treated genomic DNA (Homo sapiens) CpG-island No: 1876
aaattaattaacgaaatcgtatttaactacaacgtaaaactcccgaatcgaacgacgaaacaactacgcgtccccgaaccgccgcgcgcccgatccgccgaaacgatatcaacgccgcgaattaactactaaaaaaaaaacgtaactcgtaacgaccgataaacgaaatcgatctctaaccgtaaatacgacgccacataacactaactcgcgaaaacgaaaacgaacgaactaaccgaacgcaaacgcgctaaaaacgaacgccctcgacctccgtaacccctccgacgaccgcgacgtctcgcgaaaaaacgaccgataaaaaaaactcctacgccgaaaacgaaccgacgaaaactacctctaaaaaatccgctaatcgcgaaacgacgacgacgactacgaacgcgaaataaaaaacgcgaaataaaaatcgcgaaataaaaaacgcgacgaacgacgaactcgaaacgcgatctccctctctctcgaccaatactaaactcccaaaacccgaacgaaaatcccgaaccgcgctaaaaaacgcgaatcgactctccttaacctaacctaacgaacgcgacttaaacctaaattcgaattcccgcgccgacgcgcaatataaccttaaccctacgcgcgccctctctaaaccccgctcgtcgtcctcgaccaaaaaaacccaaccctaaaaccctaatcaacgcgttctacgactcctcgaaatctaaacgaaaaatctataattctaattcaacgacaacaaaaactacaacgaccccgccgacccccaaaaatccccctacccgacatc

SEQ ID NO: 1877 - DNA, 769 bp, Artificial Sequence
  chemically treated genomic DNA (Homo sapiens) CpG-island No: 1877
cgtcgtatttagattatatcggttttttatatttacgtgtcgcgtattttatttttcgattgacgttattcgatacgattgttacgttatttttattttagtttttgcgtttttattttatttttttattatacgtattttatttttttcgtttttagttatatcgttattcgcgtttttattcgtatattttattatgttaattgcgttttatattgttagttatcgtaacgtttagttcgattatgtagttatttcgtagcgatatttatattttattcgtgttattattcgattttttttatatagacgacgatagatattagttatttgatttattttttgtatatatttgatttcgtatttttgcgtaagttttttttgatagtattatatattttacgtatatacgagaattgttttatttagattgtattttacgcggcgttgtcgtttatcgcgtttagtaataatatagagatttattataagcgtagcgttacggttttgtttttttgtttattttattattttattcgatattatagatatttgttatttttgagattgcgcgacgtttttatagttaatgaattcgcgcgatcgacgtttatatttttgtcgttttttatcgttgcgattattacgtatttattttttttcgtcgtatacgcgtcgacgtcgttcgatagtagtatacgatttattcgttatttatttttcgtcgttttattatagtagtcgcgtattttttattatttttacgcgt

SEQ ID NO: 1878 - DNA, 769 bp, Artificial Sequence
  chemically treated genomic DNA (Homo sapiens) CpG-island No: 1878
acgcgtaaaaataataaaaaatacgcgactactataataaaacgacgaaaaataaataacgaataaatcgtatactactatcgaacgacgtcgacgcgtatacgacgaaaaaaaataaatacgtaataatcgcaacgataaaaaacgacaaaaatataaacgtcgatcgcgcgaattcattaactataaaaacgtcgcgcaatctcaaaaataacaaatatctataatatcgaataaaataataaaataaacaaaaaaacaaaaccgtaacgctacgcttataataaatctctatattattactaaacgcgataaacgacaacgccgcgtaaaatacaatctaaataaaacaattctcgtatatacgtaaaatatataatactatcaaaaaaaacttacgcaaaaatacgaaatcaaatatatacaaaaaataaatcaaataactaatatctatcgtcgtctatataaaaaaaatcgaataataacacgaataaaatataaatatcgctacgaaataactacataatcgaactaaacgttacgataactaacaatataaaacgcaattaacataataaaatatacgaataaaaacgcgaataacgatataactaaaaacgaaaaaaataaaatacgtataataaaaaaataaaataaaaacgcaaaaactaaaataaaaataacgtaacaatcgtatcgaataacgtcaatcgaaaaataaaatacgcgacacgtaaatataaaaaaccgatataatctaaatacgacg

SEQ ID NO: 1879 - DNA, 769 bp, Artificial Sequence
  chemically treated genomic DNA (Homo sapiens) CpG-island No: 1879
gcgcgtgaggatagtggaagatgcgcggttgttgtgatgaggcggcgaggaatgagtagcgagtgagtcgtatgttgttgtcgagcggcgtcgacgcgtatgcggcgagagagagtgagtgcgtagtggtcgtagcggtaggagacgatagaggtgtggacgtcgatcgcgcgagtttattgattgtagaggcgtcgcgtagttttaggagtgataggtatttgtagtatcgagtagagtggtgagatagatagagaggtaggatcgtgacgttgcgtttgtgatgagtttttgtgttgttattgagcgcggtgagcgatagcgtcgcgtggagtgtagtttagatggagtagttttcgtgtgtgcgtgagatatatggtgttgttaggagaggtttgcgtaggagtgcgagattagatatgtgtagaggatgagttaggtggttagtgtttgtcgtcgtttgtgtagaggagatcggatgatgatacgagtgagatgtaggtgtcgttgcggaatgattgtatagtcgagttgggcgttgcggtagttggtagtgtgagacgtagttggtatggtagagtatgcggatagagacgcggatggcgatgtggttgaggacgaagaggatgagatgcgtgtagtgagaaggtggagtgaaagcgtaagagttaggatggaggtggcgtgatagtcgtatcgaatggcgttagtcgaggggtaggatgcgcgatacgtggatgtgaagaatcggtgtggtttgagtgcggcg

SEQ ID NO: 1880 - DNA, 769 bp, Artificial Sequence
  chemically treated genomic DNA (Homo sapiens) CpG-island No: 1880
cgccgcactcaaaccacaccgattcttcacatccacgtatcgcgcatcctacccctcgactaacgccattcgatacgactatcacgccacctccatcctaactcttacgctttcactccaccttctcactacacgcatctcatcctcttcgtcctcaaccacatcgccatccgcgtctctatccgcatactctaccataccaactacgtctcacactaccaactaccgcaacgcccaactcgactatacaatcattccgcaacgacacctacatctcactcgtatcatcatccgatctcctctacacaaacgacgacaaacactaaccacctaactcatcctctacacatatctaatctcgcactcctacgcaaacctctcctaacaacaccatatatctcacgcacacacgaaaactactccatctaaactacactccacgcgacgctatcgctcaccgcgctcaataacaacacaaaaactcatcacaaacgcaacgtcacgatcctacctctctatctatctcaccactctactcgatactacaaatacctatcactcctaaaactacgcgacgcctctacaatcaataaactcgcgcgatcgacgtccacacctctatcgtctcctaccgctacgaccactacgcactcactctctctcgccgcatacgcgtcgacgccgctcgacaacaacatacgactcactcgctactcattcctcgccgcctcatcacaacaaccgcgcatcttccactatcctcacgcgc

SEQ ID NO: 1881 - DNA, 520 bp, Artificial Sequence
  chemically treated genomic DNA (Homo sapiens) CpG-island No: 1881
tggtttcgtttacggcgagagtatcgtttataggttgaagattttgtttttttaggacggtcgagaacgcgtttgttttgtattatttttatttcgtttcgcgttttttaggagagtcggaaacgtttttatttttatttcgtttttgtacggtcgcgagaacgtatttgtttagttttttgttcgtttcgtttatttagcgcgcgcgggagcgcgcgcgggagtagttttaatttttttaatttgtcgttatttttacggcggtcgattttttagtttgtttcgcgtttagggaggcggacgttaggtttttgaaaaggggacggggggcgggggacgggggacgggggtcggcgggaggggacgcggtcggtagatggcgaaggaggggcgcgaggaggcggttattgttgaggggcggggcgtttcgtcgagagtttgggtgcggtgcggttttttttttttttgtgttttattttattttttgagttatagggaattcgttttttagtattttttt

SEQ ID NO: 1882 - DNA, 520 bp, Artificial Sequence
  chemically treated genomic DNA (Homo sapiens) CpG-island No: 1882
aaaaaaatactaaaaaacgaattccctataactcaaaaaataaaataaaacacaaaaaaaaaaaaaaccgcaccgcacccaaactctcgacgaaacgccccgcccctcaacaataaccgcctcctcgcgcccctccttcgccatctaccgaccgcgtcccctcccgccgacccccgtcccccgtcccccgccccccgtccccttttcaaaaacctaacgtccgcctccctaaacgcgaaacaaactaaaaaatcgaccgccgtaaaaataacgacaaattaaaaaaattaaaactactcccgcgcgcgctcccgcgcgcgctaaataaacgaaacgaacaaaaaactaaacaaatacgttctcgcgaccgtacaaaaacgaaataaaaataaaaacgtttccgactctcctaaaaaacgcgaaacgaaataaaaataatacaaaacaaacgcgttctcgaccgtcctaaaaaaacaaaatcttcaacctataaacgatactctcgccgtaaacgaaacca

SEQ ID NO: 1883 - DNA, 520 bp, Artificial Sequence
  chemically treated genomic DNA (Homo sapiens) CpG-island No: 1883
agagaagtattagaaaacggattttttgtggtttagggaataaagtgggatataagaaaaaagaaaatcgtatcgtatttagattttcggcgggacgtttcgttttttaatagtggtcgttttttcgcgtttttttttcgttatttgtcggtcgcgttttttttcgtcggttttcgtttttcgtttttcgtttttcgttttttttttagagatttgacgttcgtttttttggacgcgaggtaggttgggaagtcggtcgtcgtaaagatggcggtaaattgaaaaagttggagttgttttcgcgcgcgttttcgcgcgcgttgagtgggcggagcgaatagggggttggataggtgcgttttcgcggtcgtgtagaagcgaagtaggggtaggagcgttttcggtttttttgaaggacgcggggcggggtgggggtggtgtaaggtaggcgcgttttcggtcgttttgaaggggtaggatttttagtttgtgggcggtgttttcgtcgtgagcggggtta

SEQ ID NO: 1884 - DNA, 520 bp, Artificial Sequence
  chemically treated genomic DNA (Homo sapiens) CpG-island No: 1884
taaccccgctcacgacgaaaacaccgcccacaaactaaaaatcctaccccttcaaaacgaccgaaaacgcgcctaccttacaccacccccaccccgccccgcgtccttcaaaaaaaccgaaaacgctcctacccctacttcgcttctacacgaccgcgaaaacgcacctatccaaccccctattcgctccgcccactcaacgcgcgcgaaaacgcgcgcgaaaacaactccaactttttcaatttaccgccatctttacgacgaccgacttcccaacctacctcgcgtccaaaaaaacgaacgtcaaatctctaaaaaaaaaacgaaaaacgaaaaacgaaaaacgaaaaccgacgaaaaaaaacgcgaccgacaaataacgaaaaaaaaacgcgaaaaaacgaccactattaaaaaacgaaacgtcccgccgaaaatctaaatacgatacgattttcttttttcttatatcccactttattccctaaaccacaaaaaatccgttttctaatacttctct

SEQ ID NO: 1885 - DNA, 2092 bp, Artificial Sequence
  chemically treated genomic DNA (Homo sapiens) CpG-island No: 1885
tatcgacgttttggtttttttgttgttcgttgggaattcgggtgggacgttttttaaagtttggattttacggtatatttttttttcggaaaggtataatcggttcggcgtgttagtttagttggatttacgtcggtgcggggtcgtagtttcggttttcgttgggcggttgcggagggttgggcgatttttttagcgtcgcgaggcgattcgggtagtagtaaattttttcgtttttttttttcgggacgcggtattttttttgtttttgagtatttcgtaggaatttttttcggtttcggttttcgtttcgaaataatcgagttagtttttcgtacgttttcgtcgttttttttcggttgcggtcgcgcgttcgtcgttatcgttattatcgcgcgtgtttttacggggttttagtttttttcgttttcgtagtcgtttgcgtgttttttaatagtttttttcgttcggtcgtcgcggagaggagcggggagcgcgcgtcggcgttagagacgtgcgcgagacgtacggtttcgcgtcgagcgtcggaagtagtcgagtttgggtttcgcgcgtcgcgcgcgtttttttttttttcgttagtcgtcgcggtttcgcgcgcgcgtattgaggcgtcgtcgtcgtcgcggttgttgtaggaggcggcgttggttggcggttgcgttcgttttagtcggcgagcggagtagcgagcgagcgtgtgtgtgttttttaaagatggtcggagcggcggcggcggtggtcgcgggagtagtagttggagtcgtcgcggtagtcgtgtcggtggcggttttcggtcgggtttcggcgttttcgtcgttttcgttcgtgtattgtgtgtgtcggtagtcgtacgacgtgaatcgttttatgatcgagtgcgatatttgtaaggattggttttacggtaggtaaataaattttttttagtttcgtagtcgttatcgtcggttatcgattaatcgtcgtcgtcgtcggtcgttcgcgtttttttcgggtcgggtcgtcgcgtcgcgtttagtttttagggggtttcggtgtttagtttttcggtcgggtagtggggcgcgcggtgtttcgggttcgtcgggcgggttttagaggggagtcggtgggttcgtttggttcgggcgaagagtcgttataataaatacgaataaagagggtcggcggataagttggtagggggagtttggggcgaggggacgcggtcgggcgggcgcggcgggggcgtcgggcggagcgtcggtcgggttcgtagtttttcgttagttcgggtcgtcgtcgtttcgtttcgtttcgtcgcgttcggggtttcggtcggagtcgtcggtcgtttcgtcgttttgttcggtcggtcgacgcgtttgtttttttttcgggcggcgatggggtcgtttcggtttcgcgtttttttcgcgtcgcgggtttttgtcgcgttttttttttcgtttttattaaattttttgggttagtgggacgggggtagcggcgggtcggagaggcgatcgcgttagttagttcggcggggtttcgcggagtaaatagagtaatagatgaggtattcgttttcggggatttgaaaggtgtcggggaagttggggtcgggttttcggcgggcggtaggttgattcgggtcgcggttttgggttttcgtatatattcgggtcgtcgggattggggtagatggagtgggttgcggcggttcgaagggaacgttttttcggattttttgcgttgttttcgcgtcgcggtttaaattttataaagagtgtagttgttatcgttcgaagttggcgatatcgggatcgtttgcggttgtgttcgggcgtcggtgtcggcgaatttgagtcggtcgggcggacgttgcggggtcggttggcggcggcggcggacgttgttttttgatttagtcgtcgtcgcgtttcgggtttgacgtttgagagttcgggtcgttttcgtagttaggtcgtcgattcgtgtgttttgtaattaaagtgtgaggttaataaagggcggcgttatagttttttgatttcggcgtgggagggatttataggtatttaaataa

SEQ ID NO: 1886 - DNA, 2092 bp, Artificial Sequence
  chemically treated genomic DNA (Homo sapiens) CpG-island No: 1886
ttatttaaatacctataaatccctcccacgccgaaatcaaaaaactataacgccgccctttattaacctcacactttaattacaaaacacacgaatcgacgacctaactacgaaaacgacccgaactctcaaacgtcaaacccgaaacgcgacgacgactaaatcaaaaaacaacgtccgccgccgccgccaaccgaccccgcaacgtccgcccgaccgactcaaattcgccgacaccgacgcccgaacacaaccgcaaacgatcccgatatcgccaacttcgaacgataacaactacactctttataaaatttaaaccgcgacgcgaaaacaacgcaaaaaatccgaaaaaacgttcccttcgaaccgccgcaacccactccatctaccccaatcccgacgacccgaatatatacgaaaacccaaaaccgcgacccgaatcaacctaccgcccgccgaaaacccgaccccaacttccccgacacctttcaaatccccgaaaacgaatacctcatctattactctatttactccgcgaaaccccgccgaactaactaacgcgatcgcctctccgacccgccgctacccccgtcccactaacccaaaaaatttaataaaaacgaaaaaaaaaacgcgacaaaaacccgcgacgcgaaaaaaacgcgaaaccgaaacgaccccatcgccgcccgaaaaaaaaacaaacgcgtcgaccgaccgaacaaaacgacgaaacgaccgacgactccgaccgaaaccccgaacgcgacgaaacgaaacgaaacgacgacgacccgaactaacgaaaaactacgaacccgaccgacgctccgcccgacgcccccgccgcgcccgcccgaccgcgtcccctcgccccaaactccccctaccaacttatccgccgaccctctttattcgtatttattataacgactcttcgcccgaaccaaacgaacccaccgactcccctctaaaacccgcccgacgaacccgaaacaccgcgcgccccactacccgaccgaaaaactaaacaccgaaaccccctaaaaactaaacgcgacgcgacgacccgacccgaaaaaaacgcgaacgaccgacgacgacgacgattaatcgataaccgacgataacgactacgaaactaaaaaaaatttatttacctaccgtaaaaccaatccttacaaatatcgcactcgatcataaaacgattcacgtcgtacgactaccgacacacacaatacacgaacgaaaacgacgaaaacgccgaaacccgaccgaaaaccgccaccgacacgactaccgcgacgactccaactactactcccgcgaccaccgccgccgccgctccgaccatctttaaaaaacacacacacgctcgctcgctactccgctcgccgactaaaacgaacgcaaccgccaaccaacgccgcctcctacaacaaccgcgacgacgacgacgcctcaatacgcgcgcgcgaaaccgcgacgactaacgaaaaaaaaaaaaacgcgcgcgacgcgcgaaacccaaactcgactacttccgacgctcgacgcgaaaccgtacgtctcgcgcacgtctctaacgccgacgcgcgctccccgctcctctccgcgacgaccgaacgaaaaaaactattaaaaaacacgcaaacgactacgaaaacgaaaaaaactaaaaccccgtaaaaacacgcgcgataataacgataacgacgaacgcgcgaccgcaaccgaaaaaaaacgacgaaaacgtacgaaaaactaactcgattatttcgaaacgaaaaccgaaaccgaaaaaaattcctacgaaatactcaaaaacaaaaaaaataccgcgtcccgaaaaaaaaaaacgaaaaaatttactactacccgaatcgcctcgcgacgctaaaaaaatcgcccaaccctccgcaaccgcccaacgaaaaccgaaactacgaccccgcaccgacgtaaatccaactaaactaacacgccgaaccgattatacctttccgaaaaaaaaatataccgtaaaatccaaactttaaaaaacgtcccacccgaattcccaacgaacaacaaaaaaaccaaaacgtcgata

SEQ ID NO: 1887 - DNA, 2092 bp, Artificial Sequence
  chemically treated genomic DNA (Homo sapiens) CpG-island No: 1887
ttgtttaaatgtttgtgaattttttttacgtcggagttaagaggttgtggcgtcgttttttattagttttatattttgattataaaatatacgagtcggcggtttggttgcggaggcggttcgagtttttaaacgttaaattcggagcgcggcggcggttgaattagagggtagcgttcgtcgtcgtcgttagtcggtttcgtagcgttcgttcggtcgatttaagttcgtcggtatcggcgttcgggtatagtcgtaggcggtttcggtgtcgttagtttcgagcgatggtaattgtattttttgtaaagtttaagtcgcggcgcgagggtaacgtagggggttcggagaagcgtttttttcgggtcgtcgtaatttattttatttgttttagtttcggcgattcgggtgtgtgcgggggtttaggatcgcgattcgggttaatttgtcgttcgtcgggggttcggttttaattttttcggtattttttaagttttcgagagcgagtgttttatttgttgttttgtttatttcgcggagtttcgtcgagttggttggcgcggtcgttttttcggttcgtcgttgttttcgttttattggtttaggaagtttgataaagacggggaagggggcgcgatagggattcgcggcgcggaggagacgcggggtcggggcgattttatcgtcgttcggaaggaaggtaggcgcgtcggtcggtcgggtagagcggcggggcggtcggcgatttcggtcggagtttcgggcgcggcggggcggggcggggcggcggcggttcgggttggcgaggggttgcggattcggtcggcgtttcgttcgacgttttcgtcgcgttcgttcggtcgcgttttttcgttttaggttttttttgttaatttattcgtcggttttttttgttcgtgtttgttgtggcgatttttcgttcgggttaggcgagtttatcggtttttttttggagttcgttcggcgaattcggggtatcgcgcgttttattgttcggtcggggggttaggtatcggggttttttgaaagttgggcgcggcgcggcggttcggttcgagggaggcgcgggcggtcggcggcggcggcggttggtcggtggtcggcggtggcggttgcggggttggagggggtttatttatttgtcgtggaattagtttttgtagatatcgtattcgattatgaagcggtttacgtcgtacggttgtcggtatatatagtatacgggcgggggcggcggaggcgtcgaggttcggtcgggagtcgttatcgatacggttgtcgcggcggttttagttgttgttttcgcggttatcgtcgtcgtcgtttcggttatttttaaaaaatatatatacgttcgttcgttatttcgttcgtcgattggagcgagcgtagtcgttagttagcgtcgttttttgtagtagtcgcggcggcggcggcgttttagtgcgcgcgcgcgaggtcgcggcggttggcggagggggaggaggcgcgcgcgacgcgcgaggtttagattcggttgttttcggcgttcggcgcggggtcgtgcgtttcgcgtacgtttttggcgtcggcgcgcgtttttcgttttttttcgcgacggtcgggcggagggagttgttgaagggtacgtaggcggttgcgggggcggagggagttgaggtttcgtgaggatacgcgcggtggtggcggtggcggcgggcgcgcggtcgtagtcggaggaggacggcgggagcgtgcgaggagttggttcggttatttcggagcgagagtcgaggtcgggggaagtttttgcggagtgtttaagggtagaagaggtgtcgcgtttcgaagaggggaagcggagaagtttgttgttgttcgggtcgtttcgcgacgttgagagaatcgtttagtttttcgtagtcgtttagcgagaatcggagttgcggtttcgtatcggcgtgagtttagttgagttgatacgtcgagtcggttgtgttttttcgagggaggaatgtgtcgtggaatttaaattttggaaaacgttttattcgaatttttagcgagtagtaaggagattagagcgtcgatg

SEQ ID NO: 1888 - DNA, 2092 bp, Artificial Sequence
  chemically treated genomic DNA (Homo sapiens) CpG-island No: 1888
catcgacgctctaatctccttactactcgctaaaaattcgaataaaacgttttccaaaatttaaattccacgacacattcctccctcgaaaaaacacaaccgactcgacgtatcaactcaactaaactcacgccgatacgaaaccgcaactccgattctcgctaaacgactacgaaaaactaaacgattctctcaacgtcgcgaaacgacccgaacaacaacaaacttctccgcttcccctcttcgaaacgcgacacctcttctacccttaaacactccgcaaaaacttcccccgacctcgactctcgctccgaaataaccgaaccaactcctcgcacgctcccgccgtcctcctccgactacgaccgcgcgcccgccgccaccgccaccaccgcgcgtatcctcacgaaacctcaactccctccgcccccgcaaccgcctacgtacccttcaacaactccctccgcccgaccgtcgcgaaaaaaaacgaaaaacgcgcgccgacgccaaaaacgtacgcgaaacgcacgaccccgcgccgaacgccgaaaacaaccgaatctaaacctcgcgcgtcgcgcgcgcctcctccccctccgccaaccgccgcgacctcgcgcgcgcgcactaaaacgccgccgccgccgcgactactacaaaaaacgacgctaactaacgactacgctcgctccaatcgacgaacgaaataacgaacgaacgtatatatattttttaaaaataaccgaaacgacgacgacgataaccgcgaaaacaacaactaaaaccgccgcgacaaccgtatcgataacgactcccgaccgaacctcgacgcctccgccgcccccgcccgtatactatatataccgacaaccgtacgacgtaaaccgcttcataatcgaatacgatatctacaaaaactaattccacgacaaataaataaaccccctccaaccccgcaaccgccaccgccgaccaccgaccaaccgccgccgccgccgaccgcccgcgcctccctcgaaccgaaccgccgcgccgcgcccaactttcaaaaaaccccgatacctaaccccccgaccgaacaataaaacgcgcgataccccgaattcgccgaacgaactccaaaaaaaaaccgataaactcgcctaacccgaacgaaaaatcgccacaacaaacacgaacaaaaaaaaccgacgaataaattaacaaaaaaaacctaaaacgaaaaaacgcgaccgaacgaacgcgacgaaaacgtcgaacgaaacgccgaccgaatccgcaacccctcgccaacccgaaccgccgccgccccgccccgccccgccgcgcccgaaactccgaccgaaatcgccgaccgccccgccgctctacccgaccgaccgacgcgcctaccttccttccgaacgacgataaaatcgccccgaccccgcgtctcctccgcgccgcgaatccctatcgcgcccccttccccgtctttatcaaacttcctaaaccaataaaacgaaaacaacgacgaaccgaaaaaacgaccgcgccaaccaactcgacgaaactccgcgaaataaacaaaacaacaaataaaacactcgctctcgaaaacttaaaaaataccgaaaaaattaaaaccgaacccccgacgaacgacaaattaacccgaatcgcgatcctaaacccccgcacacacccgaatcgccgaaactaaaacaaataaaataaattacgacgacccgaaaaaaacgcttctccgaaccccctacgttaccctcgcgccgcgacttaaactttacaaaaaatacaattaccatcgctcgaaactaacgacaccgaaaccgcctacgactatacccgaacgccgataccgacgaacttaaatcgaccgaacgaacgctacgaaaccgactaacgacgacgacgaacgctaccctctaattcaaccgccgccgcgctccgaatttaacgtttaaaaactcgaaccgcctccgcaaccaaaccgccgactcgtatattttataatcaaaatataaaactaataaaaaacgacgccacaacctcttaactccgacgtaaaaaaaattcacaaacatttaaacaa

SEQ ID NO: 1889 - DNA, 766 bp, Artificial Sequence
  chemically treated genomic DNA (Homo sapiens) CpG-island No: 1889
tcgcgagtcgttatagttatagttcgcgtttcgggtcgaacgttcgagtttaagagttttcgagttttcgtcgggcggcggttttatagttgggggttttgaggcggaaggcgtagtcgtttagttgcggatcgggggcgtggcgagggcgtataggttttgtttttcgtcggttcggggtcgttttcggtttcgtttttcgtcggcgtttttattttgcgagagtcgttcgttagttagcgttcgtcgtcgttcgcgtcgcgttattcgcggttcgacgggagtaggtttagcggttatggtttaggtcggcgtcgtcggtgaggttatttaggtgttgtgcgcggtcgggggcgttttggagttgttcgagttgcggcgtcgtttgcggatgggtttgagcgtcgacgcgttggagcggttgttgcggtagcgtgggcgtttcgtggtggcggtgcgggcgggcggcgtagtcgcggtttcggagcgcgtggtgttggtcgtttcgtcgttgcgtttgtgtcgcgcgtattagggttttaagtcgggttgcgtggggttttgcgcgtagttttatttttgtaggtttatggtttacggcgtttgtaagtttttgagagtcgggtaaggcgtcgcgtcgggagcgacggcgggcggaggttttgcgcgtttttacgtatttttagttcgtttgggggttttatttgaagtttgagtagataattcggtggttttgttttgatttcgtatcgttatttattaaagt

SEQ ID NO: 1890 - DNA, 766 bp, Artificial Sequence
  chemically treated genomic DNA (Homo sapiens) CpG-island No: 1890
actttaataaataacgatacgaaatcaaaacaaaaccaccgaattatctactcaaacttcaaataaaacccccaaacgaactaaaaatacgtaaaaacgcgcaaaacctccgcccgccgtcgctcccgacgcgacgccttacccgactctcaaaaacttacaaacgccgtaaaccataaacctacaaaaataaaactacgcgcaaaaccccacgcaacccgacttaaaaccctaatacgcgcgacacaaacgcaacgacgaaacgaccaacaccacgcgctccgaaaccgcgactacgccgcccgcccgcaccgccaccacgaaacgcccacgctaccgcaacaaccgctccaacgcgtcgacgctcaaacccatccgcaaacgacgccgcaactcgaacaactccaaaacgcccccgaccgcgcacaacacctaaataacctcaccgacgacgccgacctaaaccataaccgctaaacctactcccgtcgaaccgcgaataacgcgacgcgaacgacgacgaacgctaactaacgaacgactctcgcaaaataaaaacgccgacgaaaaacgaaaccgaaaacgaccccgaaccgacgaaaaacaaaacctatacgccctcgccacgcccccgatccgcaactaaacgactacgccttccgcctcaaaacccccaactataaaaccgccgcccgacgaaaactcgaaaactcttaaactcgaacgttcgacccgaaacgcgaactataactataacgactcgcga

SEQ ID NO: 1891 - DNA, 766 bp, Artificial Sequence
  chemically treated genomic DNA (Homo sapiens) CpG-island No: 1891
gttttagtgaatgacggtgcgaggttagggtagagttatcgaattgtttgtttaaattttaagtaggatttttaagcgggttggaagtgcgtgagggcgcgtaggattttcgttcgtcgtcgttttcggcgcggcgttttattcggtttttaggaatttgtaggcgtcgtagattatgaatttgtagaggtggagttgcgcgtagagttttacgtagttcggtttggagttttggtgcgcgcgatataggcgtagcggcgaggcggttagtattacgcgtttcggggtcgcggttgcgtcgttcgttcgtatcgttattacgaagcgtttacgttgtcgtagtagtcgttttagcgcgtcggcgtttaagtttattcgtaagcggcgtcgtagttcgggtaattttagggcgttttcggtcgcgtatagtatttgggtgattttatcgacgacgtcggtttgggttatggtcgttgggtttgttttcgtcggatcgcgggtggcgcgacgcggacggcggcggacgttggttggcgggcggttttcgtagggtggagacgtcggcgggaaacgaaatcgaaagcggtttcgggtcggcgaaaaatagaatttgtgcgttttcgttacgttttcggttcgtagttgagcggttgcgtttttcgttttagggtttttagttgtgaggtcgtcgttcgacggaagttcgggagtttttgagttcgggcgttcggttcggagcgcgggttgtggttgtggcggttcgcgg

SEQ ID NO: 1892 - DNA, 766 bp, Artificial Sequence
  chemically treated genomic DNA (Homo sapiens) CpG-island No: 1892
ccgcgaaccgccacaaccacaacccgcgctccgaaccgaacgcccgaactcaaaaactcccgaacttccgtcgaacgacgacctcacaactaaaaaccctaaaacgaaaaacgcaaccgctcaactacgaaccgaaaacgtaacgaaaacgcacaaattctatttttcgccgacccgaaaccgctttcgatttcgtttcccgccgacgtctccaccctacgaaaaccgcccgccaaccaacgtccgccgccgtccgcgtcgcgccacccgcgatccgacgaaaacaaacccaacgaccataacccaaaccgacgtcgtcgataaaatcacccaaatactatacgcgaccgaaaacgccctaaaattacccgaactacgacgccgcttacgaataaacttaaacgccgacgcgctaaaacgactactacgacaacgtaaacgcttcgtaataacgatacgaacgaacgacgcaaccgcgaccccgaaacgcgtaatactaaccgcctcgccgctacgcctatatcgcgcgcaccaaaactccaaaccgaactacgtaaaactctacgcgcaactccacctctacaaattcataatctacgacgcctacaaattcctaaaaaccgaataaaacgccgcgccgaaaacgacgacgaacgaaaatcctacgcgccctcacgcacttccaacccgcttaaaaatcctacttaaaatttaaacaaacaattcgataactctaccctaacctcgcaccgtcattcactaaaac

SEQ ID NO: 1893 - DNA, 559 bp, Artificial Sequence
  chemically treated genomic DNA (Homo sapiens) CpG-island No: 1893
ggggttgcggtttcgtcgttcgtagcggtcgttttaggatttgtcgtttggttttttttggttgttgcgaggtaggtttcggcggttatagcgcgttatttgtattcgtagttcgcgttcgtttagtatcgtttagtttatggcggtttcggcgttttgcgcgtcgtttcggtagtgaaatcggacgaaggcgaagtttcggggcgttttggtgtggggttttcgcgggatgtatacgtcgtttacgcgttcgtatttttcgaatacgcgttttaagtagtcgggagaggtgcggtaggttaggttgtttattttgagggtgattatgttatttacgtcgggaggggggcggtcgtagtttatggtttcgagagtagtttcggttcggaaattggcgttgtattgggcgttggcggggcgatttgcgtttttttttcgcggttgcgtttcgcgtggggacgtcgggagagatttgggggagaggcgggcggtcgatttcgtagggagcgttttagagtagtaatttttaaatttttaattttaggttaaatattttagg

SEQ ID NO: 1894 - DNA, 559 bp, Artificial Sequence
  chemically treated genomic DNA (Homo sapiens) CpG-island No: 1894
cctaaaatatttaacctaaaattaaaaatttaaaaattactactctaaaacgctccctacgaaatcgaccgcccgcctctcccccaaatctctcccgacgtccccacgcgaaacgcaaccgcgaaaaaaaaacgcaaatcgccccgccaacgcccaatacaacgccaatttccgaaccgaaactactctcgaaaccataaactacgaccgcccccctcccgacgtaaataacataatcaccctcaaaataaacaacctaacctaccgcacctctcccgactacttaaaacgcgtattcgaaaaatacgaacgcgtaaacgacgtatacatcccgcgaaaaccccacaccaaaacgccccgaaacttcgccttcgtccgatttcactaccgaaacgacgcgcaaaacgccgaaaccgccataaactaaacgatactaaacgaacgcgaactacgaatacaaataacgcgctataaccgccgaaacctacctcgcaacaaccaaaaaaaaccaaacgacaaatcctaaaacgaccgctacgaacgacgaaaccgcaacccc

SEQ ID NO: 1895 - DNA, 559 bp, Artificial Sequence
  chemically treated genomic DNA (Homo sapiens) CpG-island No: 1895
tttggagtatttggtttgaaattgggaatttgggaattgttgttttagagcgttttttgcggagtcggtcgttcgttttttttttaggtttttttcgacgtttttacgcggggcgtaatcgcgagagaggaacgtaggtcgtttcgttagcgtttagtgtagcgttagttttcgggtcggggttgttttcggagttatgagttgcggtcgtttttttttcgacgtggatggtatgattatttttaaggtggataatttgatttatcgtatttttttcgattgtttgaggcgcgtgttcgagaagtacgggcgcgtgggcgacgtgtatatttcgcgggagttttatattaaggcgtttcggggtttcgttttcgttcggttttattatcggagcgacgcgtaagacgtcgaggtcgttatggattgggcggtgttggacggacgcgagttgcgggtgtagatggcgcgttatggtcgtcgggatttgtttcgtagtagttaggaagagttaagcggtaggttttggggcggtcgttacggacggcggagtcgtagtttt

SEQ ID NO: 1896 - DNA, 559 bp, Artificial Sequence
  chemically treated genomic DNA (Homo sapiens) CpG-island No: 1896
aaaactacgactccgccgtccgtaacgaccgccccaaaacctaccgcttaactcttcctaactactacgaaacaaatcccgacgaccataacgcgccatctacacccgcaactcgcgtccgtccaacaccgcccaatccataacgacctcgacgtcttacgcgtcgctccgataataaaaccgaacgaaaacgaaaccccgaaacgccttaatataaaactcccgcgaaatatacacgtcgcccacgcgcccgtacttctcgaacacgcgcctcaaacaatcgaaaaaaatacgataaatcaaattatccaccttaaaaataatcataccatccacgtcgaaaaaaaaacgaccgcaactcataactccgaaaacaaccccgacccgaaaactaacgctacactaaacgctaacgaaacgacctacgttcctctctcgcgattacgccccgcgtaaaaacgtcgaaaaaaacctaaaaaaaaaacgaacgaccgactccgcaaaaaacgctctaaaacaacaattcccaaattcccaatttcaaaccaaatactccaaa

SEQ ID NO: 1897 - DNA, 603 bp, Artificial Sequence
  chemically treated genomic DNA (Homo sapiens) CpG-island No: 1897
ggcgtagcgcgtttattacgtcgtttagttttattagttcgtttacgtttacggtatattcgtacggtagtttttcgttggtcgggtttaggtttattatcgttacgcgtcggtttagcgcgcgtaggaatttatttatgtttaggtagtacgtggttttttttgagttcggcgggtcgattatcgtttgttcgaaggtcgtggtcggagcggtttttgttattggcggttcgcggttcggagtaggttaatttatagggaaaacggggtaggtagtcgcgtcggagacgagattgagggcgagggttttagtacgtatatttcgttggcggttagcgttattcgttttaggcggaatagttgagatcgtgtcgcgtaaaaggagataataggtcgatattaattagattaattcgattttcggatagcgtcggaaacggcgagttaacgagaggaagtttcgtttttacggcggggacgaagttagacgtcgaggggcgggcggcgtagtcgtatttttttcgcgggtagtgggtcgaatgtggggtttttgcgggaaaatcgttttcggaatttttttaatttttagattcgaattagaaa

SEQ ID NO: 1898 - DNA, 603 bp, Artificial Sequence
  chemically treated genomic DNA (Homo sapiens) CpG-island No: 1898
tttctaattcgaatctaaaaattaaaaaaattccgaaaacgattttcccgcaaaaaccccacattcgacccactacccgcgaaaaaaatacgactacgccgcccgcccctcgacgtctaacttcgtccccgccgtaaaaacgaaacttcctctcgttaactcgccgtttccgacgctatccgaaaatcgaattaatctaattaatatcgacctattatctccttttacgcgacacgatctcaactattccgcctaaaacgaataacgctaaccgccaacgaaatatacgtactaaaaccctcgccctcaatctcgtctccgacgcgactacctaccccgttttccctataaattaacctactccgaaccgcgaaccgccaataacaaaaaccgctccgaccacgaccttcgaacaaacgataatcgacccgccgaactcaaaaaaaaccacgtactacctaaacataaataaattcctacgcgcgctaaaccgacgcgtaacgataataaacctaaacccgaccaacgaaaaactaccgtacgaatataccgtaaacgtaaacgaactaataaaactaaacgacgtaataaacgcgctacgcc

SEQ ID NO: 1899 - DNA, 603 bp, Artificial Sequence
  chemically treated genomic DNA (Homo sapiens) CpG-island No: 1899
tttttaattcgagtttgaaggttagagaaatttcgagagcgattttttcgtaaagattttatattcgatttattattcgcgagagaaatgcggttgcgtcgttcgtttttcggcgtttagtttcgttttcgtcgtgagggcgggattttttttcgttggttcgtcgttttcgacgttgttcggaagtcgagttagtttagttagtatcggtttgttatttttttttgcgcgatacggttttagttgtttcgtttgaggcgagtgacgttggtcgttaacgaggtatacgtattgggattttcgtttttagtttcgttttcggcgcggttatttgtttcgttttttttgtgagttgatttgtttcgggtcgcgggtcgttaatggtaggggtcgtttcgattacggttttcgggtaggcggtgatcggttcgtcgggtttagggaagattacgtattgtttgggtatgagtgagtttttgcgcgcgttgggtcggcgcgtggcggtggtgaatttggattcggttaacgaggggttgtcgtacgagtgtgtcgtggacgtgggcgagttggtggggttgggcgacgtgatggacgcgttgcgtt

SEQ ID NO: 1900 - DNA, 603 bp, Artificial Sequence
  chemically treated genomic DNA (Homo sapiens) CpG-island No: 1900
aacgcaacgcgtccatcacgtcgcccaaccccaccaactcgcccacgtccacgacacactcgtacgacaacccctcgttaaccgaatccaaattcaccaccgccacgcgccgacccaacgcgcgcaaaaactcactcatacccaaacaatacgtaatcttccctaaacccgacgaaccgatcaccgcctacccgaaaaccgtaatcgaaacgacccctaccattaacgacccgcgacccgaaacaaatcaactcacaaaaaaaacgaaacaaataaccgcgccgaaaacgaaactaaaaacgaaaatcccaatacgtatacctcgttaacgaccaacgtcactcgcctcaaacgaaacaactaaaaccgtatcgcgcaaaaaaaaataacaaaccgatactaactaaactaactcgacttccgaacaacgtcgaaaacgacgaaccaacgaaaaaaaatcccgccctcacgacgaaaacgaaactaaacgccgaaaaacgaacgacgcaaccgcatttctctcgcgaataataaatcgaatataaaatctttacgaaaaaatcgctctcgaaatttctctaaccttcaaactcgaattaaaaa

SEQ ID NO: 1901 - DNA, 510 bp, Artificial Sequence
  chemically treated genomic DNA (Homo sapiens) CpG-island No: 1901
agatagcgattcggtagttaagtttcgtgagaatttagttatcggcggttcgagtatatgcgaataagtttttgagtttgagttaatttttttatcgagatgacgtagtagtaggtgcgggtttggattggagtagagtttcgagtggagagaggtcggatatcggtggtcgaagtttgagagagaagttggtttttagcggttgggtcggtaggaattagggtagagttaggagcggtttgcggaggggttcgtttaggtcgatgtcggtagtggaaatagaggaagttatcgtcgcgtttttttcggaattggttaaaatagtttcgtaaatgggtcgagcgtaatacggaggggatatcgtttattattaggtaaattgtcgttttttttttcgtttcgtcgggtatcgttattttggattgttatatgattagttagaattaagtttcgcgagaatatcgcgagtaacgttttagtttttgcgttgcgagattgtgaaaattttaa

SEQ ID NO: 1902 - DNA, 510 bp, Artificial Sequence
  chemically treated genomic DNA (Homo sapiens) CpG-island No: 1902
ttaaaattttcacaatctcgcaacgcaaaaactaaaacgttactcgcgatattctcgcgaaacttaattctaactaatcatataacaatccaaaataacgatacccgacgaaacgaaaaaaaaaacgacaatttacctaataataaacgatatcccctccgtattacgctcgacccatttacgaaactattttaaccaattccgaaaaaaacgcgacgataacttcctctatttccactaccgacatcgacctaaacgaacccctccgcaaaccgctcctaactctaccctaattcctaccgacccaaccgctaaaaaccaacttctctctcaaacttcgaccaccgatatccgacctctctccactcgaaactctactccaatccaaacccgcacctactactacgtcatctcgataaaaaaattaactcaaactcaaaaacttattcgcatatactcgaaccgccgataactaaattctcacgaaacttaactaccgaatcgctatct

SEQ ID NO: 1903 - DNA, 510 bp, Artificial Sequence
  chemically treated genomic DNA (Homo sapiens) CpG-island No: 1903
ttagaatttttataatttcgtaacgtaggggttggaacgttgttcgcggtgttttcgcgagatttggttttagttgattatgtgataatttaagatggcggtgttcggcgaggcggaggaggaggcgatagtttatttggtagtgagcggtatttttttcgtgttgcgttcggtttatttacggagttattttagttagtttcgagaagagcgcggcggtggttttttttgtttttattatcggtatcggtttgagcgggttttttcgtaggtcgtttttaattttgttttaatttttatcgatttagtcgttgagggttagttttttttttagatttcggttatcgatgttcggtttttttttattcgagattttattttaatttagattcgtatttgttgttgcgttatttcggtaagggggttggtttaagtttagaggtttattcgtatgtattcgggtcgtcggtggttggatttttacgggatttggttatcgggtcgttgttt

SEQ ID NO: 1904 - DNA, 510 bp, Artificial Sequence
  chemically treated genomic DNA (Homo sapiens) CpG-island No: 1904
aaacaacgacccgataaccaaatcccgtaaaaatccaaccaccgacgacccgaatacatacgaataaacctctaaacttaaaccaacccccttaccgaaataacgcaacaacaaatacgaatctaaattaaaataaaatctcgaataaaaaaaaaccgaacatcgataaccgaaatctaaaaaaaaaactaaccctcaacgactaaatcgataaaaattaaaacaaaattaaaaacgacctacgaaaaaacccgctcaaaccgataccgataataaaaacaaaaaaaaccaccgccgcgctcttctcgaaactaactaaaataactccgtaaataaaccgaacgcaacacgaaaaaaataccgctcactaccaaataaactatcgcctcctcctccgcctcgccgaacaccgccatcttaaattatcacataatcaactaaaaccaaatctcgcgaaaacaccgcgaacaacgttccaacccctacgttacgaaattataaaaattctaa

SEQ ID NO: 1905 - DNA, 518 bp, Artificial Sequence
  chemically treated genomic DNA (Homo sapiens) CpG-island No: 1905
tcgtttatcgtttcgtggacgcgtttgttgattggtttcgaatgtcgattaatggtcggcgaagcgggttgtttgtcgtacggttaatggtcgtaaatcgggaggaaggcgggaagagaggaggtggaggcgggtttgggtagtcgcgcgcgtgcgtgttttcggtttcgttgcggaaggcggacgattagagtcgttgggttcggcgcgattcgtaggagcgtagagagcgcgggattagagtgtagagtttcgggacgtggatcggagtcggcgcgatgggcggagagtaggaggaggagcggttcgacggtatgttgttggttatggtttagtagtacgagggcggcgtgtaggaggtaacggttcgcgcggcgtcggtttattcggcggttttggttacgtttttttcgtttttttttgttttcgagggttgagatttattttagcggttcgcgggtttttgggatgtttttatatttttattgcgtttagttttcggtttggttattcgttag

SEQ ID NO: 1906 - DNA, 518 bp, Artificial Sequence
  chemically treated genomic DNA (Homo sapiens) CpG-island No: 1906
ctaacgaataaccaaaccgaaaactaaacgcaataaaaatataaaaacatcccaaaaacccgcgaaccgctaaaataaatctcaaccctcgaaaacaaaaaaaaacgaaaaaaacgtaaccaaaaccgccgaataaaccgacgccgcgcgaaccgttacctcctacacgccgccctcgtactactaaaccataaccaacaacataccgtcgaaccgctcctcctcctactctccgcccatcgcgccgactccgatccacgtcccgaaactctacactctaatcccgcgctctctacgctcctacgaatcgcgccgaacccaacgactctaatcgtccgccttccgcaacgaaaccgaaaacacgcacgcgcgcgactacccaaacccgcctccacctcctctcttcccgccttcctcccgatttacgaccattaaccgtacgacaaacaacccgcttcgccgaccattaatcgacattcgaaaccaatcaacaaacgcgtccacgaaacgataaacga

SEQ ID NO: 1907 - DNA, 518 bp, Artificial Sequence
  chemically treated genomic DNA (Homo sapiens) CpG-island No: 1907
ttggcgggtggttaggtcggaagttgggcgtagtgagaatgtaggggtattttagaagttcgcgagtcgttggggtgggttttagttttcgaaggtagagaagggcggaaggagcgtggttaaggtcgtcgggtgggtcgacgtcgcgcgggtcgttattttttgtacgtcgttttcgtgttgttgagttatggttagtaatatgtcgtcgaatcgtttttttttttgtttttcgtttatcgcgtcggtttcgatttacgtttcggagttttgtattttagtttcgcgttttttacgtttttgcgggtcgcgtcgggtttaacgattttagtcgttcgtttttcgtagcggagtcggaaatacgtacgcgcgcggttgtttaggttcgtttttatttttttttttttcgtttttttttcggtttgcggttattgatcgtgcggtaagtaattcgtttcgtcgattattggtcgatattcggagttaattaataagcgcgtttacgaagcggtaggcgg

SEQ ID NO: 1908 - DNA, 518 bp, Artificial Sequence
  chemically treated genomic DNA (Homo sapiens) CpG-island No: 1908
ccgcctaccgcttcgtaaacgcgcttattaattaactccgaatatcgaccaataatcgacgaaacgaattacttaccgcacgatcaataaccgcaaaccgaaaaaaaaacgaaaaaaaaaaaaataaaaacgaacctaaacaaccgcgcgcgtacgtatttccgactccgctacgaaaaacgaacgactaaaatcgttaaacccgacgcgacccgcaaaaacgtaaaaaacgcgaaactaaaatacaaaactccgaaacgtaaatcgaaaccgacgcgataaacgaaaaacaaaaaaaaaaacgattcgacgacatattactaaccataactcaacaacacgaaaacgacgtacaaaaaataacgacccgcgcgacgtcgacccacccgacgaccttaaccacgctccttccgcccttctctaccttcgaaaactaaaacccaccccaacgactcgcgaacttctaaaatacccctacattctcactacgcccaacttccgacctaaccacccgccaa

SEQ ID NO: 1909 - DNA, 1185 bp, Artificial Sequence
  chemically treated genomic DNA (Homo sapiens) CpG-island No: 1909
ggaggggggcgtcggcgcgcgcgcgcggcgggggcgcgcgggggcgggatcgggaagggtagttacgggcgtcggagtagtacgtgttcgatgtaattttttagttttttttgtttttgtagtcggcgttttttcgttttcgtttttttttgcgcgcgtcgcgtttgggtttttcggtcgggatagtggcgcgaaggcggtaaggcgtggtggtagtggcggcggcgtaaggtcgagggcggttgtagtgttcgcggtcggatgtagttggggaaagggtggtacggttttggcgggtatatttcgtttttttttcgattttagggcgggagtatttcgttttagttcggtagttcgtttcgtgcgggagcgggggcggggggcgggggttgcggggagcggacgtgggtgggggcgggggcggtacgggggggcggtacgggttcgggaggggcgtttttttttcgttttcgttttttttttattttttcgatgatgttgattacgtcgttcgttggtaggtggagtttggtggatagtttaatgaggttgtcgatcgtttgcggatttattttttcgtcgtttttttttttttcgtttttttttgttttttcggttttttttcgtcggtggttcggcgtttttttttgggagcgtttgttttcggcgtcggttttttcgtttttttttttcgcgaataggagcgcgttttgtcgcgtttttttcgtttttttcgtttttgttttcgtttcggtcgtttttttattttttttttttattttttttttttcgtcgcgttttttttgtttcgtttttttttttttttttgtattttttcgttttttcgtcgttttttgtagttttcgattttcgaggtcgcgttgtcgggtttcgttttgtagtaaatattggagtagtaggttcgaggcgaggtcggttagtcgttttttttgcgtcgcggtttgtcgcgtggttttcgtttgtcgtcgttcggtttttatttgcgttagtttttgttggagaaggcgttcgttcgtttcggagtcgtttaggagtgcgtttttcggtcggcgcgttttggggaacggggcggttacgttttggtacgttttggataggggtgttaatgtttcgtttaggtgtgttttgggggaggatatttttttttcgaatttgtgggtttcg

SEQ ID NO: 1910 - DNA, 1185 bp, Artificial Sequence
  chemically treated genomic DNA (Homo sapiens) CpG-island No: 1910
cgaaacccacaaattcgaaaaaaaaatatcctcccccaaaacacacctaaacgaaacattaacacccctatccaaaacgtaccaaaacgtaaccgccccgttccccaaaacgcgccgaccgaaaaacgcactcctaaacgactccgaaacgaacgaacgccttctccaacaaaaactaacgcaaataaaaaccgaacgacgacaaacgaaaaccacgcgacaaaccgcgacgcaaaaaaaacgactaaccgacctcgcctcgaacctactactccaatatttactacaaaacgaaacccgacaacgcgacctcgaaaatcgaaaactacaaaaaacgacgaaaaaacgaaaaaatacaaaaaaaaaaaaaaaaacgaaacaaaaaaaacgcgacgaaaaaaaaaaaataaaaaaaaaaaataaaaaaacgaccgaaacgaaaacaaaaacgaaaaaaacgaaaaaaacgcgacaaaacgcgctcctattcgcgaaaaaaaaaaacgaaaaaaccgacgccgaaaacaaacgctcccaaaaaaaaacgccgaaccaccgacgaaaaaaaaccgaaaaaacaaaaaaaaacgaaaaaaaaaaaaacgacgaaaaaataaatccgcaaacgatcgacaacctcattaaactatccaccaaactccacctaccaacgaacgacgtaatcaacatcatcgaaaaaataaaaaaaaaacgaaaacgaaaaaaaaacgcccctcccgaacccgtaccgcccccccgtaccgcccccgcccccacccacgtccgctccccgcaacccccgccccccgcccccgctcccgcacgaaacgaactaccgaactaaaacgaaatactcccgccctaaaatcgaaaaaaaaacgaaatatacccgccaaaaccgtaccaccctttccccaactacatccgaccgcgaacactacaaccgccctcgaccttacgccgccgccactaccaccacgccttaccgccttcgcgccactatcccgaccgaaaaacccaaacgcgacgcgcgcaaaaaaaaacgaaaacgaaaaaacgccgactacaaaaacaaaaaaaactaaaaaattacatcgaacacgtactactccgacgcccgtaactacccttcccgatcccgcccccgcgcgcccccgccgcgcgcgcgcgccgacgcccccctcc

SEQ ID NO: 1911 - DNA, 1185 bp, Artificial Sequence
  chemically treated genomic DNA (Homo sapiens) CpG-island No: 1911
cgaaatttataagttcggggaaggagtgtttttttttaaaatatatttaggcgaggtattggtatttttgtttaaggcgtattaaggcgtggtcgtttcgttttttaaggcgcgtcggtcggagagcgtatttttgggcggtttcgaggcgggcgagcgttttttttagtaagggttggcgtaggtggaggtcgggcggcggtaggcggaggttacgcggtaggtcgcggcgtaggaagagcggttggtcgatttcgtttcggatttgttgttttagtatttgttgtagggcggggttcggtagcgcggtttcgggggtcgggggttgtaggaggcggcggaggagcgagagagtgtaagggaggaggaggaggcggagtaggagagacgcggcggggaggagagggtgggggaagaggatgaggaggcggtcgaggcggaggtagaggcggaggaggcggagagggcgcggtagaacgcgtttttgttcgcggaggaggaggacggggaagtcggcgtcgaggataagcgtttttaggaggagacgtcgggttatcggcggaaggaggtcgaggggatagaggagggcggggaggaggaggacgacgaggagatggattcgtagacgatcgatagttttattgagttgtttattaaattttatttgttagcggacgacgtggttagtattatcgaggaggtggaggagaagcggaagcggaagaagaacgtttttttcgagttcgtgtcgttttttcgtgtcgttttcgtttttatttacgttcgtttttcgtagttttcgtttttcgttttcgttttcgtacgagacgagttgtcggattggaacgaggtgttttcgttttgggatcgggaggaggacgaggtgtattcgttagggtcgtattattttttttttaattatattcggtcgcggatattgtagtcgttttcggttttgcgtcgtcgttattattattacgttttgtcgttttcgcgttattatttcggtcgggaggtttaggcgcggcgcgcgtaggaggaggcggaggcggaggagcgtcggttgtaggagtaggaggagttggagaattatatcgagtacgtgttgtttcggcgttcgtgattgtttttttcggtttcgttttcgcgcgttttcgtcgcgcgcgcgcgtcggcgttttttttt

SEQ ID NO: 1912 - DNA, 1185 bp, Artificial Sequence
  chemically treated genomic DNA (Homo sapiens) CpG-island No: 1912
aaaaaaaaacgccgacgcgcgcgcgcgacgaaaacgcgcgaaaacgaaaccgaaaaaaacaatcacgaacgccgaaacaacacgtactcgatataattctccaactcctcctactcctacaaccgacgctcctccgcctccgcctcctcctacgcgcgccgcgcctaaacctcccgaccgaaataataacgcgaaaacgacaaaacgtaataataataacgacgacgcaaaaccgaaaacgactacaatatccgcgaccgaatataattaaaaaaaaaataatacgaccctaacgaatacacctcgtcctcctcccgatcccaaaacgaaaacacctcgttccaatccgacaactcgtctcgtacgaaaacgaaaacgaaaaacgaaaactacgaaaaacgaacgtaaataaaaacgaaaacgacacgaaaaaacgacacgaactcgaaaaaaacgttcttcttccgcttccgcttctcctccacctcctcgataatactaaccacgtcgtccgctaacaaataaaatttaataaacaactcaataaaactatcgatcgtctacgaatccatctcctcgtcgtcctcctcctccccgccctcctctatcccctcgacctccttccgccgataacccgacgtctcctcctaaaaacgcttatcctcgacgccgacttccccgtcctcctcctccgcgaacaaaaacgcgttctaccgcgccctctccgcctcctccgcctctacctccgcctcgaccgcctcctcatcctcttcccccaccctctcctccccgccgcgtctctcctactccgcctcctcctcctcccttacactctctcgctcctccgccgcctcctacaacccccgacccccgaaaccgcgctaccgaaccccgccctacaacaaatactaaaacaacaaatccgaaacgaaatcgaccaaccgctcttcctacgccgcgacctaccgcgtaacctccgcctaccgccgcccgacctccacctacgccaacccttactaaaaaaaacgctcgcccgcctcgaaaccgcccaaaaatacgctctccgaccgacgcgccttaaaaaacgaaacgaccacgccttaatacgccttaaacaaaaataccaatacctcgcctaaatatattttaaaaaaaaacactccttccccgaacttataaatttcg

SEQ ID NO: 1913 - DNA, 513 bp, Artificial Sequence
  chemically treated genomic DNA (Homo sapiens) CpG-island No: 1913
atagcggagtatttattagttggtgttacgacgcgagaggtggagaggagggtcggggtagggtggggataggggaagatcgggacgcgttcgtttcggtttcgagcggtggtcggggtaggagcgacggtcgaggtttggcgtttcgtgggttgggtttagttgggtcggcgcggtttcgggcggttagttcgtttcggttttagtacgttggatagcgttcgcgtttttatcgttttataaaggggagcgcgcggggttacgtgggcgcgtttcgttttattgacgttaatgtttatttatggggaagcgggcggtcgttcggaggaggaaggacgttcgacgattggagggtgtttgtttttttcggtttgcgtttgcgcgttggggttttcggttgaaggggtgtgcgttagcggagtttcgggaaatgaatgaatgaatgaatgaatgaaatgttgaagcgggtagggcggggggttatgaatgaatgaaggagggacgaggagaaaa

SEQ ID NO: 1914 - DNA, 513 bp, Artificial Sequence
  chemically treated genomic DNA (Homo sapiens) CpG-island No: 1914
ttttctcctcgtccctccttcattcattcataaccccccgccctacccgcttcaacatttcattcattcattcattcattcatttcccgaaactccgctaacgcacaccccttcaaccgaaaaccccaacgcgcaaacgcaaaccgaaaaaaacaaacaccctccaatcgtcgaacgtccttcctcctccgaacgaccgcccgcttccccataaataaacattaacgtcaataaaacgaaacgcgcccacgtaaccccgcgcgctcccctttataaaacgataaaaacgcgaacgctatccaacgtactaaaaccgaaacgaactaaccgcccgaaaccgcgccgacccaactaaacccaacccacgaaacgccaaacctcgaccgtcgctcctaccccgaccaccgctcgaaaccgaaacgaacgcgtcccgatcttcccctatccccaccctaccccgaccctcctctccacctctcgcgtcgtaacaccaactaataaatactccgctat

SEQ ID NO: 1915 - DNA, 513 bp, Artificial Sequence
  chemically treated genomic DNA (Homo sapiens) CpG-island No: 1915
tttttttttcgttttttttttatttatttatagtttttcgttttgttcgttttagtattttatttatttatttatttatttatttttcggagtttcgttagcgtatatttttttagtcgaaggttttagcgcgtaggcgtaggtcgggagaggtaggtattttttaatcgtcgggcgttttttttttttcgggcggtcgttcgtttttttatgaatgaatattgacgttaatggggcggggcgcgtttacgtgatttcgcgcgtttttttttataaggcggtggaggcgcgggcgttgtttagcgtgttgaagtcggagcgagttagtcgttcggagtcgcgtcgatttagttgagtttagtttacgggacgttagatttcgatcgtcgtttttatttcggttatcgttcggagtcgaggcggacgcgtttcgatttttttttgtttttattttgtttcgatttttttttttatttttcgcgtcgtgatattagttggtaaatatttcgttgt

SEQ ID NO: 1916 - DNA, 513 bp, Artificial Sequence
  chemically treated genomic DNA (Homo sapiens) CpG-island No: 1916
acaacgaaatatttaccaactaatatcacgacgcgaaaaataaaaaaaaaaatcgaaacaaaataaaaacaaaaaaaaatcgaaacgcgtccgcctcgactccgaacgataaccgaaataaaaacgacgatcgaaatctaacgtcccgtaaactaaactcaactaaatcgacgcgactccgaacgactaactcgctccgacttcaacacgctaaacaacgcccgcgcctccaccgccttataaaaaaaaacgcgcgaaatcacgtaaacgcgccccgccccattaacgtcaatattcattcataaaaaaacgaacgaccgcccgaaaaaaaaaaaacgcccgacgattaaaaaatacctacctctcccgacctacgcctacgcgctaaaaccttcgactaaaaaaatatacgctaacgaaactccgaaaaataaataaataaataaataaataaaatactaaaacgaacaaaacgaaaaactataaataaataaaaaaaaaacgaaaaaaaaa

SEQ ID NO: 1917 - DNA, 563 bp, Artificial Sequence
  chemically treated genomic DNA (Homo sapiens) CpG-island No: 1917
gcgtcgtcgttatcgaaggcgtcgatgttgagatagcgttaagtgtcgtttttttcgtgcgggatggggaaggggcgcgtgtatagcgtgagtacgcgcgggcgcgcgcggttgtttacgcgttattttaggtttttggtcgttagtaggcgtaggttgttttcgttaggtcggtagggttgttagttttggatgatggtttcgtttggaagtacgtcgcgttgtacggagggtgatagtaggaggcgtgttacgtcgtcgtttgtttcggatacggtttcggtgggtagcggcgagaaggtgttagaggttcgtagcgtcgttagtcgcgcgtttagttcggttagtagcgcggacgcgttgaatcggattaaaaggatgttttgcggggggtacgagtgagcgcggggagggggggcgtagtagggttggcgagttcggcgtttttcggtaggtatttttatttttacgtttacgtttacgggtttttatttgggtttttttggaggagcgatcgtgagggtttcgggtcgagtggggtatgggaaagtttgggttttaag

SEQ ID NO: 1918 - DNA, 563 bp, Artificial Sequence
  chemically treated genomic DNA (Homo sapiens) CpG-island No: 1918
cttaaaacccaaactttcccataccccactcgacccgaaaccctcacgatcgctcctccaaaaaaacccaaataaaaacccgtaaacgtaaacgtaaaaataaaaatacctaccgaaaaacgccgaactcgccaaccctactacgccccccctccccgcgctcactcgtaccccccgcaaaacatccttttaatccgattcaacgcgtccgcgctactaaccgaactaaacgcgcgactaacgacgctacgaacctctaacaccttctcgccgctacccaccgaaaccgtatccgaaacaaacgacgacgtaacacgcctcctactatcaccctccgtacaacgcgacgtacttccaaacgaaaccatcatccaaaactaacaaccctaccgacctaacgaaaacaacctacgcctactaacgaccaaaaacctaaaataacgcgtaaacaaccgcgcgcgcccgcgcgtactcacgctatacacgcgccccttccccatcccgcacgaaaaaaacgacacttaacgctatctcaacatcgacgccttcgataacgacgacgc

SEQ ID NO: 1919 - DNA, 563 bp, Artificial Sequence
  chemically treated genomic DNA (Homo sapiens) CpG-island No: 1919
tttgaaatttaggtttttttatattttattcggttcggagtttttacggtcgtttttttagagggatttaggtgggagttcgtgggcgtgaacgtgggagtgaagatgtttgtcgagaggcgtcgggttcgttagttttgttgcgtttttttttttcgcgtttattcgtgtttttcgtagggtatttttttggttcgatttaacgcgttcgcgttgttggtcgggttgggcgcgcggttggcggcgttgcggatttttggtattttttcgtcgttgtttatcgaggtcgtgttcgaggtaggcggcgacgtggtacgttttttgttgttatttttcgtgtagcgcgacgtgtttttaggcgggattattatttaggattggtagttttatcggtttagcgaaagtaatttgcgtttgttggcggttaagggtttggagtggcgcgtggatagtcgcgcgcgttcgcgcgtgtttacgttgtgtacgcgttttttttttatttcgtacggaggggacggtatttggcgttattttaatatcgacgttttcggtagcgacggcgt

SEQ ID NO: 1920 - DNA, 563 bp, Artificial Sequence
  chemically treated genomic DNA (Homo sapiens) CpG-island No: 1920
acgccgtcgctaccgaaaacgtcgatattaaaataacgccaaataccgtcccctccgtacgaaataaaaaaaaaacgcgtacacaacgtaaacacgcgcgaacgcgcgcgactatccacgcgccactccaaacccttaaccgccaacaaacgcaaattactttcgctaaaccgataaaactaccaatcctaaataataatcccgcctaaaaacacgtcgcgctacacgaaaaataacaacaaaaaacgtaccacgtcgccgcctacctcgaacacgacctcgataaacaacgacgaaaaaataccaaaaatccgcaacgccgccaaccgcgcgcccaacccgaccaacaacgcgaacgcgttaaatcgaaccaaaaaaataccctacgaaaaacacgaataaacgcgaaaaaaaaaaacgcaacaaaactaacgaacccgacgcctctcgacaaacatcttcactcccacgttcacgcccacgaactcccacctaaatccctctaaaaaaacgaccgtaaaaactccgaaccgaataaaatataaaaaaacctaaatttcaaa

SEQ ID NO: 1921 - DNA, 1397 bp, Artificial Sequence
  chemically treated genomic DNA (Homo sapiens) CpG-island No: 1921
gagcgggggcggcgttatttcggggggagcggattaggttggggtcgtaagggcggcgttcggggtcgcgtgggcggtttcgtcgtgaatgagttggtgtcgtattaggtgggttttgcggttgaagtttttttcgtattgcgggtaggagaaggggcgggagtttgtgtggatcgtttggtggcggattaggttggttttggagttgaagttgcgggcgtagacggcgtaggcgtgggggcggttgttagtgtgtatcgtttggtggcggtttaggtgcgatttgcggttgaagcggcggtcgtattgagcgtaggcgaaaggtttggcgtcgttgtgggttttggagtgggcgattagattaggtcgcgagtcgaagcggcggttatattgcgtgtaggcgaagggtcgttcgttcgtgtgtacgcgcgggtgtcgcgttaggtgttgtttatgggagaagtcgcgttcgtagttcgggtagaagaaggatcgttcgttcgagggggcgcgttggggtattacgggatcggattttgggtcgtagttcggttcgttaggcgcgttggttaggggtttggcggcgggggtatttacggtggcgtttagtgcgtatttatcgtatttaaaggggcgattttcgttgcggtgtagatattggtgcgtggcgaggttttttttttagtcgaagtttaagtcgtagtcggagtacgcgaaaggttttggttcgggaaaggatggggtcggggacggggtagtggaatgaggagaagcggacgagtcgggagagggtttggtcgggtcggtcgtttggtgtattttttggtgtcgtattaagtgttgtttgtgcgtgaagttgcgtgcgtattgtgcgtattggtagggtttttcgttcgtatggatgcgttggtgtcgaattaagtgcgtttttttgcgaaagcgtttttcgtatttcgtgtaggggaagggtcgttcgtcggtgtgggttttttggtgcgagtttaggtggattttttggttgaagcgtttgtcgtatttcgcgtacgggtagggtcgttcgttcgtgtgcgtgcgtaggtggcgggttagatgggtttttttgttgaagcgtttgtcgtattcggagtacgggaaaggtcgttcgtcgcggtggttgcgttgatgtagtagtatgtgggcgcgttgcgtgaagttgcggtcgtagttcgggtaggcgtaggggttttcgtttcggtgtagtcgttggtgtagtcgtaacgttagttggtttcggaagcgtcgtttatatttttcgtagtcgtagggttttttcggtatcggattttatttagatagcgcgagtttatttagtgttttcggggtttttggttttagtttgtacgcggtagttagatgtt

SEQ ID NO: 1922 - DNA, 1397 bp, Artificial Sequence
  chemically treated genomic DNA (Homo sapiens) CpG-island No: 1922
aacatctaactaccgcgtacaaactaaaaccaaaaaccccgaaaacactaaataaactcgcgctatctaaataaaatccgataccgaaaaaaccctacgactacgaaaaatataaacgacgcttccgaaaccaactaacgttacgactacaccaacgactacaccgaaacgaaaacccctacgcctacccgaactacgaccgcaacttcacgcaacgcgcccacatactactacatcaacgcaaccaccgcgacgaacgacctttcccgtactccgaatacgacaaacgcttcaacaaaaaaacccatctaacccgccacctacgcacgcacacgaacgaacgaccctacccgtacgcgaaatacgacaaacgcttcaaccaaaaaatccacctaaactcgcaccaaaaaacccacaccgacgaacgacccttcccctacacgaaatacgaaaaacgctttcgcaaaaaaacgcacttaattcgacaccaacgcatccatacgaacgaaaaaccctaccaatacgcacaatacgcacgcaacttcacgcacaaacaacacttaatacgacaccaaaaaatacaccaaacgaccgacccgaccaaaccctctcccgactcgtccgcttctcctcattccactaccccgtccccgaccccatcctttcccgaaccaaaacctttcgcgtactccgactacgacttaaacttcgactaaaaaaaaaacctcgccacgcaccaatatctacaccgcaacgaaaatcgcccctttaaatacgataaatacgcactaaacgccaccgtaaatacccccgccgccaaacccctaaccaacgcgcctaacgaaccgaactacgacccaaaatccgatcccgtaataccccaacgcgccccctcgaacgaacgatccttcttctacccgaactacgaacgcgacttctcccataaacaacacctaacgcgacacccgcgcgtacacacgaacgaacgacccttcgcctacacgcaatataaccgccgcttcgactcgcgacctaatctaatcgcccactccaaaacccacaacgacgccaaacctttcgcctacgctcaatacgaccgccgcttcaaccgcaaatcgcacctaaaccgccaccaaacgatacacactaacaaccgcccccacgcctacgccgtctacgcccgcaacttcaactccaaaaccaacctaatccgccaccaaacgatccacacaaactcccgccccttctcctacccgcaatacgaaaaaaacttcaaccgcaaaacccacctaatacgacaccaactcattcacgacgaaaccgcccacgcgaccccgaacgccgcccttacgaccccaacctaatccgctccccccgaaataacgccgcccccgctc

SEQ ID NO: 1923 - DNA, 1397 bp, Artificial Sequence
  chemically treated genomic DNA (Homo sapiens) CpG-island No: 1923
ggtatttggttgtcgcgtataaattggagttaggggtttcgggggtattgagtgggttcgcgttgtttgggtggggttcgatgtcggagaagttttacggttgcggggagtgtgagcggcgttttcgggattagttgacgttgcgattgtattagcggttgtatcggggcgagggtttttgcgtttgttcggattgcggtcgtagttttacgtagcgcgtttatatgttattgtattagcgtagttatcgcggcgagcggtttttttcgtgtttcgagtgcgataagcgttttagtaagaaggtttatttgattcgttatttgcgtacgtatacgggcgagcggttttattcgtgcgcggagtgcggtaagcgttttagttagaagatttatttgggttcgtattaaaagatttatatcggcgagcggttttttttttgtacggaatgcgagaagcgttttcgtaagaagacgtatttgattcggtattagcgtatttatacgggcgagaggttttattagtgcgtatagtgcgtacgtagttttacgtataagtagtatttggtgcggtattaaagggtgtattagacggtcggttcggttaggttttttttcgattcgttcgtttttttttattttattgtttcgttttcgattttattttttttcgggttaaagtttttcgcgtgtttcgattgcggtttgagtttcggttggaaaaagaatttcgttacgtattagtgtttgtatcgtagcgagggtcgtttttttgggtgcgatgagtgcgtattgggcgttatcgtggatgttttcgtcgttaagtttttggttagcgcgtttggcggatcgggttgcggtttaggattcgatttcgtggtgttttagcgcgttttttcgggcgagcggttttttttttgttcggattgcgggcgcggttttttttatgggtagtatttggcgcggtattcgcgcgtgtatacgggcgaacggtttttcgtttgtacgtagtgtgatcgtcgtttcggttcgcggtttaatttggtcgtttattttagggtttatagcggcgttaggtttttcgtttgcgtttagtgcggtcgtcgttttagtcgtaagtcgtatttgggtcgttattaggcggtgtatattggtagtcgtttttacgtttgcgtcgtttgcgttcgtagttttagttttaaaattaatttagttcgttattaggcgatttatataggttttcgtttttttttttgttcgtagtgcggaaagagttttagtcgtaagatttatttggtgcggtattagtttatttacggcgaagtcgtttacgcggtttcggacgtcgtttttgcggttttagtttggttcgtttttttcgaggtggcgtcgttttcgttt

SEQ ID NO: 1924 - DNA, 1397 bp, Artificial Sequence
  chemically treated genomic DNA (Homo sapiens) CpG-island No: 1924
aaacgaaaacgacgccacctcgaaaaaaacgaaccaaactaaaaccgcaaaaacgacgtccgaaaccgcgtaaacgacttcgccgtaaataaactaataccgcaccaaataaatcttacgactaaaactctttccgcactacgaacaaaaaaaaaaacgaaaacctatataaatcgcctaataacgaactaaattaattttaaaactaaaactacgaacgcaaacgacgcaaacgtaaaaacgactaccaatatacaccgcctaataacgacccaaatacgacttacgactaaaacgacgaccgcactaaacgcaaacgaaaaacctaacgccgctataaaccctaaaataaacgaccaaattaaaccgcgaaccgaaacgacgatcacactacgtacaaacgaaaaaccgttcgcccgtatacacgcgcgaataccgcgccaaatactacccataaaaaaaaccgcgcccgcaatccgaacaaaaaaaaaaccgctcgcccgaaaaaacgcgctaaaacaccacgaaatcgaatcctaaaccgcaacccgatccgccaaacgcgctaaccaaaaacttaacgacgaaaacatccacgataacgcccaatacgcactcatcgcacccaaaaaaacgaccctcgctacgatacaaacactaatacgtaacgaaattctttttccaaccgaaactcaaaccgcaatcgaaacacgcgaaaaactttaacccgaaaaaaaataaaatcgaaaacgaaacaataaaataaaaaaaaacgaacgaatcgaaaaaaaacctaaccgaaccgaccgtctaatacaccctttaataccgcaccaaatactacttatacgtaaaactacgtacgcactatacgcactaataaaacctctcgcccgtataaatacgctaataccgaatcaaatacgtcttcttacgaaaacgcttctcgcattccgtacaaaaaaaaaaccgctcgccgatataaatcttttaatacgaacccaaataaatcttctaactaaaacgcttaccgcactccgcgcacgaataaaaccgctcgcccgtatacgtacgcaaataacgaatcaaataaaccttcttactaaaacgcttatcgcactcgaaacacgaaaaaaaccgctcgccgcgataactacgctaatacaataacatataaacgcgctacgtaaaactacgaccgcaatccgaacaaacgcaaaaaccctcgccccgatacaaccgctaatacaatcgcaacgtcaactaatcccgaaaacgccgctcacactccccgcaaccgtaaaacttctccgacatcgaaccccacccaaacaacgcgaacccactcaatacccccgaaacccctaactccaatttatacgcgacaaccaaatacc

SEQ ID NO: 1925 - DNA, 890 bp, Artificial Sequence
  chemically treated genomic DNA (Homo sapiens) CpG-island No: 1925
cgaatattttttcgcgtttttttttttcgtcgcggcgttttttttttatttttgtttttttcggattttttattttttttaagtttttttttcgacgggatttttagttttatttttttgtttcgtcgtttttttaagtagtttcgatcgtcgattttattttaggtttcggttttttttttagtttcggggtttatttgttagcgtttttttttttcgtttttatcgagtggttcggtttttagcgttcgtttttttttttttttttttttcggtttttttttatattttttttttttttttttcggggttcgtcgtttttttttttatttgtttttcgttcgatttttttttagttttcgtttttttttttagttttttcggttttttttatttttatagtttttattttgttcgcgtcggttttgtttttttttttttttagttttcgattttttcggattcgcgttttttttttacgttcgtcgttcgcgtttttattttcggggttgttatttgcgcggagtcggtcgtgatttaatcgcggcgttgagggagacgcgggcggggtcgtttgtagaggagttttttcggtttttatttggttggtcggtcgtttcgttcgcgtcgcggggatttaggcgttcgggttttttgtttcgtcggttttgtttataatggcgttcgtcgtttgtagttcgggtgttgacggtttgaaagattgatagattgatagtttcgaaatttcgcggggaggagagggatagacgcgcggggagtcgaagtcgggaaacggcgtttgtaagggaggagggatcgagggagcgggcggagagtttcggcgtatcgggttgggggaggtaggggtagggggttttaggagtggggtt

SEQ ID NO: 1926 - DNA, 890 bp, Artificial Sequence
  chemically treated genomic DNA (Homo sapiens) CpG-island No: 1926
aaccccactcctaaaaccccctacccctacctcccccaacccgatacgccgaaactctccgcccgctccctcgatccctcctcccttacaaacgccgtttcccgacttcgactccccgcgcgtctatccctctcctccccgcgaaatttcgaaactatcaatctatcaatctttcaaaccgtcaacacccgaactacaaacgacgaacgccattataaacaaaaccgacgaaacaaaaaacccgaacgcctaaatccccgcgacgcgaacgaaacgaccgaccaaccaaataaaaaccgaaaaaactcctctacaaacgaccccgcccgcgtctccctcaacgccgcgattaaatcacgaccgactccgcgcaaataacaaccccgaaaataaaaacgcgaacgacgaacgtaaaaaaaaaacgcgaatccgaaaaaatcgaaaactaaaaaaaaaaaaaaacaaaaccgacgcgaacaaaataaaaactataaaaataaaaaaaaccgaaaaaactaaaaaaaaaaacgaaaactaaaaaaaaatcgaacgaaaaacaaataaaaaaaaaaacgacgaaccccgaaaaaaaaaaaaaaaaaatataaaaaaaaaccgaaaaaaaaaaaaaaaaaaaaacgaacgctaaaaaccgaaccactcgataaaaacgaaaaaaaaaaacgctaacaaataaaccccgaaactaaaaaaaaaaccgaaacctaaaataaaatcgacgatcgaaactacttaaaaaaacgacgaaacaaaaaaataaaactaaaaatcccgtcgaaaaaaaaacttaaaaaaaataaaaaatccgaaaaaaacaaaaataaaaaaaaaacgccgcgacgaaaaaaaaaaacgcgaaaaaatattcg

SEQ ID NO: 1927 - DNA, 890 bp, Artificial Sequence
  chemically treated genomic DNA (Homo sapiens) CpG-island No: 1927
gattttatttttgaaattttttgtttttgttttttttagttcggtgcgtcggggtttttcgttcgttttttcggtttttttttttttgtaggcgtcgtttttcggtttcgatttttcgcgcgtttatttttttttttttcgcgaagtttcggggttgttagtttgttagttttttaggtcgttagtattcgagttgtaggcggcgagcgttattgtgagtagagtcggcggggtaggaggttcgggcgtttgggttttcgcggcgcgggcggagcggtcggttagttaggtaagggtcggggaggtttttttgtaggcggtttcgttcgcgttttttttagcgtcgcggttgggttacggtcggtttcgcgtaggtgatagtttcgggggtaggggcgcggacggcgggcgtgggggaggggcgcgggttcggggaggtcgggggttggggggaagggagggtaaggtcggcgcgggtagggtgagggttgtgggggtagaggagatcgggggggttggagggaagggcgggggttgggagggggtcgggcgggaggtaggtgggaagggggacgacgggtttcgaggggaggagagagggagtgtgggagggggtcgagggggaaggggaggaagaagcgggcgttggggatcgggttattcggtaggggcgggagaggagggcgttgataggtgagtttcggagttggggagggggtcgggatttggaatgaagtcggcgatcggagttgtttgggagggcggcggggtagggaggtggagttgagggtttcgtcgggaggaaaatttgggaggggtgagaagttcgaggggagtagaaatagggagggggcgtcgcggcggagaagagaggcgcggaggggtgttcg

SEQ ID NO: 1928 - DNA, 890 bp, Artificial Sequence
  chemically treated genomic DNA (Homo sapiens) CpG-island No: 1928
cgaacacccctccgcgcctctcttctccgccgcgacgccccctccctatttctactcccctcgaacttctcacccctcccaaattttcctcccgacgaaaccctcaactccacctccctaccccgccgccctcccaaacaactccgatcgccgacttcattccaaatcccgaccccctccccaactccgaaactcacctatcaacgccctcctctcccgcccctaccgaataacccgatccccaacgcccgcttcttcctccccttccccctcgaccccctcccacactccctctctcctcccctcgaaacccgtcgtcccccttcccacctacctcccgcccgaccccctcccaacccccgcccttccctccaacccccccgatctcctctacccccacaaccctcaccctacccgcgccgaccttaccctcccttccccccaacccccgacctccccgaacccgcgcccctcccccacgcccgccgtccgcgcccctacccccgaaactatcacctacgcgaaaccgaccgtaacccaaccgcgacgctaaaaaaaacgcgaacgaaaccgcctacaaaaaaacctccccgacccttacctaactaaccgaccgctccgcccgcgccgcgaaaacccaaacgcccgaacctcctaccccgccgactctactcacaataacgctcgccgcctacaactcgaatactaacgacctaaaaaactaacaaactaacaaccccgaaacttcgcgaaaaaaaaaaaaataaacgcgcgaaaaatcgaaaccgaaaaacgacgcctacaaaaaaaaaaaaaccgaaaaaacgaacgaaaaaccccgacgcaccgaactaaaaaaaacaaaaacaaaaaatttcaaaaataaaatc

SEQ ID NO: 1929 - DNA, 607 bp, Artificial Sequence
  chemically treated genomic DNA (Homo sapiens) CpG-island No: 1929
tggttttcgaggtgggttcgcgggtattggtaggtgtcggggaaatttgtcggtacgtcgttcgtcgtttttggacgttcgggtagtttcgtattggagttggaacgagttttggtagtcggtttcgcgggagttttcgggcggcgattagacgcgagcgatttattcgcggttcgcggatgtttcggtttaggagttgcgcgtcgttcgttttagtttcgtttcggttcgcggagcgtttcggttcgtttcgttttttatgatcgttttttaattagtttagaagattgtaattcgtcggttagtaaagatatttacggtggggaaatttgataatttattttcgggttcgggggaggttatttgtagtgtattagcggattggttgttgcgcgggttgcggcggtaaagcgcgtaggtaaagcgcgtaggtagagcgcgcgtagtttttgattcgttttgttatttcggtaaggtacggggcggggagggtcgtttcgaagtagttcgcggtttagtatcgtgtgaaagggacggtgtcggtgtcggaattataaaattgttttatttttttagattgggtggtttggaagagatgttttttgtt

SEQ ID NO: 1930 - DNA, 607 bp, Artificial Sequence
  chemically treated genomic DNA (Homo sapiens) CpG-island No: 1930
aacaaaaaacatctcttccaaaccacccaatctaaaaaaataaaacaattttataattccgacaccgacaccgtccctttcacacgatactaaaccgcgaactacttcgaaacgaccctccccgccccgtaccttaccgaaataacaaaacgaatcaaaaactacgcgcgctctacctacgcgctttacctacgcgctttaccgccgcaacccgcgcaacaaccaatccgctaatacactacaaataacctcccccgaacccgaaaataaattatcaaatttccccaccgtaaatatctttactaaccgacgaattacaatcttctaaactaattaaaaaacgatcataaaaaacgaaacgaaccgaaacgctccgcgaaccgaaacgaaactaaaacgaacgacgcgcaactcctaaaccgaaacatccgcgaaccgcgaataaatcgctcgcgtctaatcgccgcccgaaaactcccgcgaaaccgactaccaaaactcgttccaactccaatacgaaactacccgaacgtccaaaaacgacgaacgacgtaccgacaaatttccccgacacctaccaatacccgcgaacccacctcgaaaacca

SEQ ID NO: 1931 - DNA, 607 bp, Artificial Sequence
  chemically treated genomic DNA (Homo sapiens) CpG-island No: 1931
agtaaagagtattttttttaaattatttaatttggagaggtggggtagttttgtggtttcggtatcgatatcgttttttttatacggtattgagtcgcgggttgtttcggggcggtttttttcgtttcgtgttttgtcgggatggtagagcggattagaagttgcgcgcgttttgtttgcgcgttttgtttgcgcgttttgtcgtcgtaattcgcgtagtagttaattcgttggtgtattgtaggtgatttttttcgggttcgggaataaattgttaagtttttttatcgtgggtgtttttgttagtcggcgagttgtagttttttgagttaattaggagacggttatgaggagcgaggcgggtcggggcgtttcgcgggtcggggcggggttggggcgggcggcgcgtagtttttgggtcgaggtattcgcgagtcgcgggtagatcgttcgcgtttgatcgtcgttcgggagttttcgcggagtcggttgttaggattcgttttagttttagtgcggggttgttcgggcgtttagaggcggcggacggcgtgtcggtaagttttttcggtatttgttagtgttcgcgaatttatttcggaagtta

SEQ ID NO: 1932 - DNA, 607 bp, Artificial Sequence
  chemically treated genomic DNA (Homo sapiens) CpG-island No: 1932
taacttccgaaataaattcgcgaacactaacaaataccgaaaaaacttaccgacacgccgtccgccgcctctaaacgcccgaacaaccccgcactaaaactaaaacgaatcctaacaaccgactccgcgaaaactcccgaacgacgatcaaacgcgaacgatctacccgcgactcgcgaatacctcgacccaaaaactacgcgccgcccgccccaaccccgccccgacccgcgaaacgccccgacccgcctcgctcctcataaccgtctcctaattaactcaaaaaactacaactcgccgactaacaaaaacacccacgataaaaaaacttaacaatttattcccgaacccgaaaaaaatcacctacaatacaccaacgaattaactactacgcgaattacgacgacaaaacgcgcaaacaaaacgcgcaaacaaaacgcgcgcaacttctaatccgctctaccatcccgacaaaacacgaaacgaaaaaaaccgccccgaaacaacccgcgactcaataccgtataaaaaaaacgatatcgataccgaaaccacaaaactaccccacctctccaaattaaataatttaaaaaaaatactctttact

SEQ ID NO: 1933 - DNA, 537 bp, Artificial Sequence
  chemically treated genomic DNA (Homo sapiens) CpG-island No: 1933
tgtgtacgtggtgtgtgtgagtgggatgtgtgatcgacgttgatgtgatgtgtgtatgtgtggggtgtgtgtgtgtgtttgattgtgtacgtggtgtgtgtgagtgggatgtgtgatcgacgttgatgtgacgtgtgtatgtgtggggtgtgcgtgtgtgtgattgtgtacgtggtgtgtgtgaggggtgtgtgatcgacgttgatgtgacgtgtgtatgtgtgtggggtgtgtgtgtgtgtgattgtgtacgtggagtgtgtgatcgatgttgatgtgacgtgtgtatgtgtggggtgtgtgtgtgtgtttgattgtgtacgtggtgtgagtggggtgtgtgatcgacgttgatgtgacgtgtgtatgtgtggggtgtgtgcgtgtgtgattgtgtacgtggtgtgagtggggtgtgtgatcgatgttgatgtgacgtgtgtatgtgtggggtgtgtgtgtgtgtttgtgtacgtggtgtgagtggggtgtgtgattgatgttgatgtgacgtgtgtatgtgtggggtgtgtgtgt

SEQ ID NO: 1934 - DNA, 537 bp, Artificial Sequence
  chemically treated genomic DNA (Homo sapiens) CpG-island No: 1934
acacacacaccccacacatacacacgtcacatcaacatcaatcacacaccccactcacaccacgtacacaaacacacacacacaccccacacatacacacgtcacatcaacatcgatcacacaccccactcacaccacgtacacaatcacacacgcacacaccccacacatacacacgtcacatcaacgtcgatcacacaccccactcacaccacgtacacaatcaaacacacacacacaccccacacatacacacgtcacatcaacatcgatcacacactccacgtacacaatcacacacacacacaccccacacacatacacacgtcacatcaacgtcgatcacacacccctcacacacaccacgtacacaatcacacacacgcacaccccacacatacacacgtcacatcaacgtcgatcacacatcccactcacacacaccacgtacacaatcaaacacacacacacaccccacacatacacacatcacatcaacgtcgatcacacatcccactcacacacaccacgtacaca

SEQ ID NO: 1935 - DNA, 537 bp, Artificial Sequence
  chemically treated genomic DNA (Homo sapiens) CpG-island No: 1935
atatatatattttatatatgtatacgttatattagtattaattatatattttatttatattacgtatataggtatatatatatattttatatatgtatacgttatattagtatcgattatatattttatttatattacgtatatagttatatacgtatatattttatatatgtatacgttatattagcgtcgattatatattttatttatattacgtatatagttagatatatatatatattttatatatgtatacgttatattagtatcgattatatattttacgtatatagttatatatatatatattttatatatatgtatacgttatattagcgtcgattatatattttttatatatattacgtatatagttatatatacgtatattttatatatgtatacgttatattagcgtcgattatatattttatttatatatattacgtatatagttagatatatatatatattttatatatgtatatattatattagcgtcgattatatattttatttatatatattacgtatata

SEQ ID NO: 1936 - DNA, 537 bp, Artificial Sequence
  chemically treated genomic DNA (Homo sapiens) CpG-island No: 1936
tatatacgtaatatatataaataaaatatataatcgacgctaatataatatatacatatataaaatatatatatatatctaactatatacgtaatatatataaataaaatatataatcgacgctaatataacgtatacatatataaaatatacgtatatataactatatacgtaatatatataaaaaatatataatcgacgctaatataacgtatacatatatataaaatatatatatatataactatatacgtaaaatatataatcgatactaatataacgtatacatatataaaatatatatatatatctaactatatacgtaatataaataaaatatataatcgacgctaatataacgtatacatatataaaatatatacgtatataactatatacgtaatataaataaaatatataatcgatactaatataacgtatacatatataaaatatatatatatacctatatacgtaatataaataaaatatataattaatactaatataacgtatacatatataaaatatatatat

SEQ ID NO: 1937 - DNA, 1163 bp, Artificial Sequence
  chemically treated genomic DNA (Homo sapiens) CpG-island No: 1937
tcggcggcgggaaggggcgggttgggggtggggagcgcggagggggcgggcgggcggttggcgggggaggcggggagcgtagttagcgcggtatagaacgagcgagcgagcgagcggagaggcggttatagtttgagcgtcgggtcggtagcggtcgcgtcggcgagcggattagcgggcggcgagtagcgcggagcgcgcggggtatcgaggagcgggcgcggcgggtatcgcgcgaggtagtcggagttttcggaaaggttagagcggcgtcgttttcgttgtttttgcggggtttcggttgggagttcgacgagggagcgggcggtatggttcggcggttcggggcgcgggggcgttaggttttcggaggggcgtttttagtttcgtcgttgtcgtcgtcgtttttcgtagtcgcgcgtttcgttcgttttagtcgttttcggggtcgttatcggtttatgagtttcggttttaaagtttgcggcgggcgggcgggcgcggagtttttaagatgtcgttttattcggtgacggcggcgttgatgtatcggggtatttatatcgtgtttaatttgttgtcggagtagcgttcggtggatatttcggaggacgagttggagggtgagtgttcgtcgggattttcgtttcggcggtttttttatttgtgcgtttaggtgaagcgcgggttaggggcgcgggggcggggggcggggggcggttcgtaggtgtcggttgttaggtgggcgttttagttagtagttgtgtttcgcggtaagatttgttcgtatttcggggcgtcgcggtgggggtcgtttaggcggagagcggtttagtttttgttcgcgtggtttttagcgttgcggaaatttgtcgggtttcgtagcggggttacggggtcgcgtagtcggcggtgacggtgcggtaacgcggcggattggggcgggggttcgcgttgagtttttagcgtcggttcggtcggagtattcgtattttgatttttttcgcggcgttcgttcgcggttttttgttcgtattgatatttcgttcgtgtcgttttaaaaatttaatttgttcgggtagtagtagaaggggagagggcgattgttttgtttttgttcgttgcggggtcgttttcgtttttatttgcggtcgtagtttttt

SEQ ID NO: 1938 - DNA, 1163 bp, Artificial Sequence
  chemically treated genomic DNA (Homo sapiens) CpG-island No: 1938
aaaaaactacgaccgcaaataaaaacgaaaacgaccccgcaacgaacaaaaacaaaacaatcgccctctccccttctactactacccgaacaaattaaatttttaaaacgacacgaacgaaatatcaatacgaacaaaaaaccgcgaacgaacgccgcgaaaaaaatcaaaatacgaatactccgaccgaaccgacgctaaaaactcaacgcgaacccccgccccaatccgccgcgttaccgcaccgtcaccgccgactacgcgaccccgtaaccccgctacgaaacccgacaaatttccgcaacgctaaaaaccacgcgaacaaaaactaaaccgctctccgcctaaacgacccccaccgcgacgccccgaaatacgaacaaatcttaccgcgaaacacaactactaactaaaacgcccacctaacaaccgacacctacgaaccgccccccgccccccgcccccgcgcccctaacccgcgcttcacctaaacgcacaaataaaaaaaccgccgaaacgaaaatcccgacgaacactcaccctccaactcgtcctccgaaatatccaccgaacgctactccgacaacaaattaaacacgatataaataccccgatacatcaacgccgccgtcaccgaataaaacgacatcttaaaaactccgcgcccgcccgcccgccgcaaactttaaaaccgaaactcataaaccgataacgaccccgaaaacgactaaaacgaacgaaacgcgcgactacgaaaaacgacgacgacaacgacgaaactaaaaacgcccctccgaaaacctaacgcccccgcgccccgaaccgccgaaccataccgcccgctccctcgtcgaactcccaaccgaaaccccgcaaaaacaacgaaaacgacgccgctctaacctttccgaaaactccgactacctcgcgcgatacccgccgcgcccgctcctcgataccccgcgcgctccgcgctactcgccgcccgctaatccgctcgccgacgcgaccgctaccgacccgacgctcaaactataaccgcctctccgctcgctcgctcgctcgttctataccgcgctaactacgctccccgcctcccccgccaaccgcccgcccgccccctccgcgctccccacccccaacccgccccttcccgccgccga

SEQ ID NO: 1939 - DNA, 1163 bp, Artificial Sequence
  chemically treated genomic DNA (Homo sapiens) CpG-island No: 1939
aaggggttacggtcgtaggtggggacgggggcggtttcgtagcgggtaagagtagggtagtcgttttttttttttttgttgttgttcgagtagattgaatttttaaagcgatacgagcggaatgttaatgcgagtagagagtcgcgggcgggcgtcgcggaggggattaggatgcgggtgtttcggtcgggtcggcgttgggggtttagcgcggattttcgttttagttcgtcgcgttgtcgtatcgttatcgtcgattgcgcggtttcgtgatttcgttgcggggttcggtaagttttcgtagcgttggggattacgcgggtaggggttgggtcgtttttcgtttgagcgatttttatcgcggcgtttcggggtgcggataggttttgtcgcggggtatagttgttagttggggcgtttatttggtaatcggtatttgcggatcgtttttcgtttttcgttttcgcgtttttggttcgcgttttatttgggcgtataggtaggagggtcgtcggggcggggatttcggcggatatttattttttagttcgtttttcgggatgtttatcgggcgttgtttcgatagtaggttgggtacggtgtagatgtttcggtatattaacgtcgtcgttatcgggtggaacggtattttggaggtttcgcgttcgttcgttcgtcgtaaattttgaggtcggggtttatgggtcggtggcggtttcgggggcggttggagcgggcggggcgcgcggttgcggagggcggcggcggtagcggcgaggttggggacgttttttcgggggtttagcgttttcgcgtttcgggtcgtcgggttatgtcgttcgttttttcgtcgggtttttagtcggggtttcgtaggggtagcgggggcggcgtcgttttggttttttcgagagtttcggttgtttcgcgcggtgttcgtcgcgttcgtttttcggtgtttcgcgcgtttcgcgttgttcgtcgttcgttagttcgttcgtcggcgcggtcgttatcggttcggcgtttaggttgtagtcgttttttcgttcgttcgttcgttcgttttgtgtcgcgttggttgcgtttttcgtttttttcgttagtcgttcgttcgtttttttcgcgttttttatttttagttcgttttttttcgtcgtcgg

SEQ ID NO: 1940 - DNA, 1163 bp, Artificial Sequence
  chemically treated genomic DNA (Homo sapiens) CpG-island No: 1940
ccgacgacgaaaaaaaacgaactaaaaataaaaaacgcgaaaaaaacgaacgaacgactaacgaaaaaaacgaaaaacgcaaccaacgcgacacaaaacgaacgaacgaacgaacgaaaaaacgactacaacctaaacgccgaaccgataacgaccgcgccgacgaacgaactaacgaacgacgaacaacgcgaaacgcgcgaaacaccgaaaaacgaacgcgacgaacaccgcgcgaaacaaccgaaactctcgaaaaaaccaaaacgacgccgcccccgctacccctacgaaaccccgactaaaaacccgacgaaaaaacgaacgacataacccgacgacccgaaacgcgaaaacgctaaacccccgaaaaaacgtccccaacctcgccgctaccgccgccgccctccgcaaccgcgcgccccgcccgctccaaccgcccccgaaaccgccaccgacccataaaccccgacctcaaaatttacgacgaacgaacgaacgcgaaacctccaaaataccgttccacccgataacgacgacgttaatataccgaaacatctacaccgtacccaacctactatcgaaacaacgcccgataaacatcccgaaaaacgaactaaaaaataaatatccgccgaaatccccgccccgacgaccctcctacctatacgcccaaataaaacgcgaaccaaaaacgcgaaaacgaaaaacgaaaaacgatccgcaaataccgattaccaaataaacgccccaactaacaactataccccgcgacaaaacctatccgcaccccgaaacgccgcgataaaaatcgctcaaacgaaaaacgacccaacccctacccgcgtaatccccaacgctacgaaaacttaccgaaccccgcaacgaaatcacgaaaccgcgcaatcgacgataacgatacgacaacgcgacgaactaaaacgaaaatccgcgctaaacccccaacgccgacccgaccgaaacacccgcatcctaatcccctccgcgacgcccgcccgcgactctctactcgcattaacattccgctcgtatcgctttaaaaattcaatctactcgaacaacaacaaaaaaaaaaaaaacgactaccctactcttacccgctacgaaaccgcccccgtccccacctacgaccgtaacccctt

SEQ ID NO: 1941 - DNA, 657 bp, Artificial Sequence
  chemically treated genomic DNA (Homo sapiens) CpG-island No: 1941
aggcgacgcggggggcgttggtcgtaggggtcggtagggggcgcgttggtcgcggtggttgggtagcgcgagtttgcggcgcgtttaggttcgcgcggttttcggtgtattcgttgtttataaagcgttagttgaggggtcgttgcgggtggagtgcggcggagtcggtttcgcgattttagtttgattcgtcgtttgttgtatcgcgttttcgtcgcgtttttgcgcgtttcgagtttcgacggtcgcgtgagtttcgttcgtgcggggaaggtagggtcgggtcggcgtcgtttgtggagaggattcggcggtcgggtttgtttggagtcgggcgcggtggtagcggcggtagcggcggcgattttcgaggttcgggttagatagcgtagggttatggttgaggcggtttcggtttcggtaagggcggtcgcgcgcgagtgttgtgagttttcgagatttagatttcgagggaggaaggcgggcgggtagggagttgttaggtataggcgtcgttttcgggtttcgtcggttacgtcgtttgtcgttcgtgtttggcggttgtagtttcgcgtgaggggatttagcgggtgggtgtgaaatcgtttattcggggatattaggttgggtcgtaggtttgaggggtattcgtaggta

SEQ ID NO: 1942 - DNA, 657 bp, Artificial Sequence
  chemically treated genomic DNA (Homo sapiens) CpG-island No: 1942
tacctacgaatacccctcaaacctacgacccaacctaatatccccgaataaacgatttcacacccacccgctaaatcccctcacgcgaaactacaaccgccaaacacgaacgacaaacgacgtaaccgacgaaacccgaaaacgacgcctatacctaacaactccctacccgcccgccttcctccctcgaaatctaaatctcgaaaactcacaacactcgcgcgcgaccgcccttaccgaaaccgaaaccgcctcaaccataaccctacgctatctaacccgaacctcgaaaatcgccgccgctaccgccgctaccaccgcgcccgactccaaacaaacccgaccgccgaatcctctccacaaacgacgccgacccgaccctaccttccccgcacgaacgaaactcacgcgaccgtcgaaactcgaaacgcgcaaaaacgcgacgaaaacgcgatacaacaaacgacgaatcaaactaaaatcgcgaaaccgactccgccgcactccacccgcaacgacccctcaactaacgctttataaacaacgaatacaccgaaaaccgcgcgaacctaaacgcgccgcaaactcgcgctacccaaccaccgcgaccaacgcgccccctaccgacccctacgaccaacgccccccgcgtcgcct

SEQ ID NO: 1943 - DNA, 657 bp, Artificial Sequence
  chemically treated genomic DNA (Homo sapiens) CpG-island No: 1943
tgtttgcgagtgttttttagatttgcggtttagtttggtgttttcgggtgggcggttttatatttattcgttaagtttttttacgcgaggttgtagtcgttaagtacgggcgataggcgacgtggtcggcgggattcgagaacggcgtttatgtttggtagttttttgttcgttcgtttttttttttcggggtttgggtttcgggggtttataatattcgcgcgcggtcgtttttatcggggtcggggtcgttttagttatggttttgcgttgtttagttcgggtttcggaagtcgtcgtcgttgtcgtcgttgttatcgcgttcggttttaagtaggttcggtcgtcgggttttttttataggcggcgtcgattcggttttgtttttttcgtacggacgggatttacgcggtcgtcggggttcgggacgcgtaggaacgcggcggaggcgcggtgtagtaggcggcggattaagttggggtcgcgaggtcgatttcgtcgtattttattcgtagcggttttttagttggcgttttgtgggtagcgagtgtatcgggaatcgcgcgggtttagacgcgtcgtaggttcgcgttgtttagttatcgcggttagcgcgttttttgtcggtttttgcggttagcgtttttcgcgtcgttt

SEQ ID NO: 1944 - DNA, 657 bp, Artificial Sequence
  chemically treated genomic DNA (Homo sapiens) CpG-island No: 1944
aaacgacgcgaaaaacgctaaccgcaaaaaccgacaaaaaacgcgctaaccgcgataactaaacaacgcgaacctacgacgcgtctaaacccgcgcgattcccgatacactcgctacccacaaaacgccaactaaaaaaccgctacgaataaaatacgacgaaatcgacctcgcgaccccaacttaatccgccgcctactacaccgcgcctccgccgcgttcctacgcgtcccgaaccccgacgaccgcgtaaatcccgtccgtacgaaaaaaacaaaaccgaatcgacgccgcctataaaaaaaacccgacgaccgaacctacttaaaaccgaacgcgataacaacgacgacaacgacgacgacttccgaaacccgaactaaacaacgcaaaaccataactaaaacgaccccgaccccgataaaaacgaccgcgcgcgaatattataaacccccgaaacccaaaccccgaaaaaaaaaaacgaacgaacaaaaaactaccaaacataaacgccgttctcgaatcccgccgaccacgtcgcctatcgcccgtacttaacgactacaacctcgcgtaaaaaaacttaacgaataaatataaaaccgcccacccgaaaacaccaaactaaaccgcaaatctaaaaaacactcgcaaaca

SEQ ID NO: 1945 - DNA, 751 bp, Artificial Sequence
  chemically treated genomic DNA (Homo sapiens) CpG-island No: 1945
tttcgagtcgagggttgttggacgacggtttttaggtgttgttcggggagcgtggtttcggcgaggcgtcgtcgggtggggatcgtagtatcgggggcggcgggggcgatgggggcggtgggggcggcggcgcggaggcggggacgggggtaggcggcggttgtggtagttgttgttttggcgggttgcggcggagtttttttttgtacggcgttcgtagtaagttttattcgtgtttcgagtgcggtaagagtttcggcgtgcgtaagagttttattatttattatcgtagttatattaaggagcggttttacgagtgcgttgagtgcgagaagagttttaattgttattcgggttttattcgttattagatgacgtatcgcggcgagcggttttataagtgttcggagtgcgagaagatttatagtcgtaaggagtatttgtagaattattagcggttgtatacgggcgagcggtttttttaatgtgtattgtgcggtaagagttttattcgtaagtagaatttgtttaagtattagcgtatttatacgggcgagcgtttttatacgtgcggcgagtgcggtaagagttttcgttataaggagtcgtttaaggattatttgcgcgtgtatagcggcggttcgggtttcggcgttttacggtagttttcgtcgttttttgagcgagattagggttgggttgggggagggtagggtcggacggagtggatcgggggcggtttgagtattaa

SEQ ID NO: 1946 - DNA, 751 bp, Artificial Sequence
  chemically treated genomic DNA (Homo sapiens) CpG-island No: 1946
ttaatactcaaaccgcccccgatccactccgtccgaccctaccctcccccaacccaaccctaatctcgctcaaaaaacgacgaaaactaccgtaaaacgccgaaacccgaaccgccgctatacacgcgcaaataatccttaaacgactccttataacgaaaactcttaccgcactcgccgcacgtataaaaacgctcgcccgtataaatacgctaatacttaaacaaattctacttacgaataaaactcttaccgcacaatacacattaaaaaaaccgctcgcccgtatacaaccgctaataattctacaaatactccttacgactataaatcttctcgcactccgaacacttataaaaccgctcgccgcgatacgtcatctaataacgaataaaacccgaataacaattaaaactcttctcgcactcaacgcactcgtaaaaccgctccttaatataactacgataataaataataaaactcttacgcacgccgaaactcttaccgcactcgaaacacgaataaaacttactacgaacgccgtacaaaaaaaaactccgccgcaacccgccaaaacaacaactaccacaaccgccgcctacccccgtccccgcctccgcgccgccgcccccaccgcccccatcgcccccgccgcccccgatactacgatccccacccgacgacgcctcgccgaaaccacgctccccgaacaacacctaaaaaccgtcgtccaacaaccctcgactcgaaa

SEQ ID NO: 1947 - DNA, 751 bp, Artificial Sequence
  chemically treated genomic DNA (Homo sapiens) CpG-island No: 1947
ttggtgtttaggtcgttttcgatttatttcgttcggttttgtttttttttagtttagttttagtttcgtttaggaggcggcgggagttgtcgtggggcgtcggggttcgggtcgtcgttgtgtacgcgtaggtggtttttgagcgattttttgtagcggaagtttttgtcgtattcgtcgtacgtgtaggggcgttcgttcgtgtggatgcgttggtgtttgagtaggttttgtttgcggatgaagtttttgtcgtatagtgtatattggaaaggtcgttcgttcgtgtgtagtcgttggtggttttgtaggtgttttttacggttgtaggttttttcgtatttcgagtatttgtagggtcgttcgtcgcggtgcgttatttggtggcggatgaggttcgagtggtagttgaagtttttttcgtatttagcgtattcgtagggtcgttttttggtgtggttgcggtggtggatgatgaggtttttgcgtacgtcgaagtttttgtcgtattcggggtacgagtagggtttgttgcgggcgtcgtgtaggaggaggtttcgtcgtagttcgttagggtagtagttgttatagtcgtcgtttgttttcgttttcgttttcgcgtcgtcgtttttatcgtttttatcgttttcgtcgttttcggtgttgcggtttttattcggcggcgtttcgtcggagttacgtttttcgggtagtatttggaaatcgtcgtttagtagttttcggttcgggg

SEQ ID NO: 1948 - DNA, 751 bp, Artificial Sequence
  chemically treated genomic DNA (Homo sapiens) CpG-island No: 1948
ccccgaaccgaaaactactaaacgacgatttccaaatactacccgaaaaacgtaactccgacgaaacgccgccgaataaaaaccgcaacaccgaaaacgacgaaaacgataaaaacgataaaaacgacgacgcgaaaacgaaaacgaaaacaaacgacgactataacaactactaccctaacgaactacgacgaaacctcctcctacacgacgcccgcaacaaaccctactcgtaccccgaatacgacaaaaacttcgacgtacgcaaaaacctcatcatccaccaccgcaaccacaccaaaaaacgaccctacgaatacgctaaatacgaaaaaaacttcaactaccactcgaacctcatccgccaccaaataacgcaccgcgacgaacgaccctacaaatactcgaaatacgaaaaaacctacaaccgtaaaaaacacctacaaaaccaccaacgactacacacgaacgaacgacctttccaatatacactatacgacaaaaacttcatccgcaaacaaaacctactcaaacaccaacgcatccacacgaacgaacgcccctacacgtacgacgaatacgacaaaaacttccgctacaaaaaatcgctcaaaaaccacctacgcgtacacaacgacgacccgaaccccgacgccccacgacaactcccgccgcctcctaaacgaaactaaaactaaactaaaaaaaaacaaaaccgaacgaaataaatcgaaaacgacctaaacaccaa

SEQ ID NO: 1949 - DNA, 942 bp, Artificial Sequence
  chemically treated genomic DNA (Homo sapiens) CpG-island No: 1949
ggttcggattggagtttcggcgagggtcgatttcgttttttacgtagttttttttcgcgaggtttcgtattttttagcgcggttttttttcgtagttttttcggttttcgcgtgggacgtagagagaggttgggcgtcgcgttggttcgggagtggtttacgtttgacgtagtttcgttggaggtcgtggtacgttcgttttggcgttaattttcgcgtttcgggtgagggtgggtggtcgcgtttgggtttcggacgtcgcgggcgttgaaggtttcgggagggcgcggggcggcggtcgcgggcgtgcggttttacgggttgtagggggcgttgtgcgcgtttttaagttcggtcgtcgagcgtagtttttttttaaagggttagcggggtacgtggttcgggacgtagttcgttgtcgttcggtagtagtttttaggttaggcgggtttcgtttcgttttcgtcgtcgttgtcgcgtcgtttcgggttcgataggtcgggtttagggattgtaatttagcgagggacgcgggtagttatggtcgaagcggcgtttgttcgggtaagcgttttcggtttcgcggacgttcggaaggtttaggtcgtcgtcgcgtgagttcgcgcgagggattttggtcgcgcgaggtcgcggggtgagagggttttgcgcgtagttttcgcgttcgttgttttcggtttatcgtttagttcgcgtcgaaggtattgatcgggcggtttaaatgttaggttcggcgggcggggtttcgacgttagcggttgacgattcggtttatttgcggttttagttaggtcgggttttagagttacgttcggcgacgaggaggtcgcgttttaggagtattgttttatttgaggtttcgcggttttttttatagtaggttgggcgggtaggggtcgttagttttacgggatagtagcg

SEQ ID NO: 1950 - DNA, 942 bp, Artificial Sequence
  chemically treated genomic DNA (Homo sapiens) CpG-island No: 1950
cgctactatcccgtaaaactaacgacccctacccgcccaacctactataaaaaaaaccgcgaaacctcaaataaaacaatactcctaaaacgcgacctcctcgtcgccgaacgtaactctaaaacccgacctaactaaaaccgcaaataaaccgaatcgtcaaccgctaacgtcgaaaccccgcccgccgaacctaacatttaaaccgcccgatcaataccttcgacgcgaactaaacgataaaccgaaaacaacgaacgcgaaaactacgcgcaaaaccctctcaccccgcgacctcgcgcgaccaaaatccctcgcgcgaactcacgcgacgacgacctaaaccttccgaacgtccgcgaaaccgaaaacgcttacccgaacaaacgccgcttcgaccataactacccgcgtccctcgctaaattacaatccctaaacccgacctatcgaacccgaaacgacgcgacaacgacgacgaaaacgaaacgaaacccgcctaacctaaaaactactaccgaacgacaacgaactacgtcccgaaccacgtaccccgctaaccctttaaaaaaaaactacgctcgacgaccgaacttaaaaacgcgcacaacgccccctacaacccgtaaaaccgcacgcccgcgaccgccgccccgcgccctcccgaaaccttcaacgcccgcgacgtccgaaacccaaacgcgaccacccaccctcacccgaaacgcgaaaattaacgccaaaacgaacgtaccacgacctccaacgaaactacgtcaaacgtaaaccactcccgaaccaacgcgacgcccaacctctctctacgtcccacgcgaaaaccgaaaaaactacgaaaaaaaaccgcgctaaaaaatacgaaacctcgcgaaaaaaaactacgtaaaaaacgaaatcgaccctcgccgaaactccaatccgaacc

SEQ ID NO: 1951 - DNA, 942 bp, Artificial Sequence
  chemically treated genomic DNA (Homo sapiens) CpG-island No: 1951
cgttattgtttcgtggggttggcggtttttgttcgtttagtttgttgtagggggggtcgcgaggttttaaatgggataatatttttaaggcgcggttttttcgtcgtcgagcgtgattttggggttcggtttggttgaggtcgtagatgggtcggatcgttagtcgttgacgtcggggtttcgttcgtcgggtttggtatttgggtcgttcggttaatgttttcgacgcgggttgggcgatgggtcgggggtaacgagcgcggaggttgcgcgtaaggtttttttatttcgcggtttcgcgcggttagagtttttcgcgcgggtttacgcggcggcggtttgggtttttcgggcgttcgcggggtcgagggcgtttattcgggtaggcgtcgtttcggttatggttgttcgcgtttttcgttgggttgtagtttttggattcggtttgtcgggttcggggcggcgcggtagcgacggcggaagcggagcgggattcgtttaatttgagagttattgtcgggcggtagcgaattgcgtttcgagttacgtgtttcgttggttttttaaaaaagagttgcgttcggcggtcgagtttgaggacgcgtatagcgttttttgtagttcgtaggatcgtacgttcgcggtcgtcgtttcgcgttttttcgaggtttttagcgttcgcggcgttcgggatttaggcgcggttatttatttttattcggggcgcgggagttgacgttagggcgggcgtgttacggtttttagcggggttacgttaggcgtaagttattttcgggttagcgcggcgtttaatttttttttgcgttttacgcgggagtcgggagggttgcgggaaggaatcgcgttggaaagtgcgaaatttcgcgagggaaagttgcgtggggaacggggtcggttttcgtcggggttttagttcggatt

SEQ ID NO: 1952 - DNA, 942 bp, Artificial Sequence
  chemically treated genomic DNA (Homo sapiens) CpG-island No: 1952
aatccgaactaaaaccccgacgaaaaccgaccccgttccccacgcaactttccctcgcgaaatttcgcactttccaacgcgattccttcccgcaaccctcccgactcccgcgtaaaacgcaaaaaaaaattaaacgccgcgctaacccgaaaataacttacgcctaacgtaaccccgctaaaaaccgtaacacgcccgccctaacgtcaactcccgcgccccgaataaaaataaataaccgcgcctaaatcccgaacgccgcgaacgctaaaaacctcgaaaaaacgcgaaacgacgaccgcgaacgtacgatcctacgaactacaaaaaacgctatacgcgtcctcaaactcgaccgccgaacgcaactcttttttaaaaaaccaacgaaacacgtaactcgaaacgcaattcgctaccgcccgacaataactctcaaattaaacgaatcccgctccgcttccgccgtcgctaccgcgccgccccgaacccgacaaaccgaatccaaaaactacaacccaacgaaaaacgcgaacaaccataaccgaaacgacgcctacccgaataaacgccctcgaccccgcgaacgcccgaaaaacccaaaccgccgccgcgtaaacccgcgcgaaaaactctaaccgcgcgaaaccgcgaaataaaaaaaccttacgcgcaacctccgcgctcgttacccccgacccatcgcccaacccgcgtcgaaaacattaaccgaacgacccaaataccaaacccgacgaacgaaaccccgacgtcaacgactaacgatccgacccatctacgacctcaaccaaaccgaaccccaaaatcacgctcgacgacgaaaaaaccgcgccttaaaaatattatcccatttaaaacctcgcgaccccccctacaacaaactaaacgaacaaaaaccgccaaccccacgaaacaataacg

SEQ ID NO: 1953 - DNA, 815 bp, Artificial Sequence
  chemically treated genomic DNA (Homo sapiens) CpG-island No: 1953
cgtcgtggtcggggtggtgtttcggggcgtggcggttttggcggtcgcgttttcgggggtaggtgcggcgtcgtcggtgacggtggtttttagttttgtttttgttttttttggcgggtttttcgttggacgagcgtttttttcggttgcggtagtggtttcggtttatttttttgaggttgtcgattttttttttcgttggggaagggtttggggttttcggcgtcgcggcgttttcgattttttcgtcggggttaggtttagcgttttttttcgggtgatcggtcggggttatgtttagtataggagttggcggtcgttttgcggtttcgggtgcgtttaagttttgggatgggttttgagcgtttcgggcgtggttttcgttggggtgaataaggagtggttgttcgtagggttttttcgatcgcgtaggcggagtcggatttaattttttcggggttttcgttaacgtcgagtttcgcgggtttttcgcgattattttttttgcgttttgggataacgggttcgtatcgtttgttaagttttcgggattatataggttagggggtgttgtgttttttacgatgttttcgtcggcgttgggcggaggtttttcgggggcgacggttatggttttttaggcgttttttttggtagcgggggtgtcgggatcgcggggcgcggagtttttttggtgttgttgaggtcggcggtcgtatttggtttttttagggattcggcggcggggttgttaggttgaggttcggcgtcgcggttttcgggagggtttttttttgttttaggtgtattgtagt

SEQ ID NO: 1954 - DNA, 815 bp, Artificial Sequence
  chemically treated genomic DNA (Homo sapiens) CpG-island No: 1954
actacaatacacctaaaacaaaaaaaaaccctcccgaaaaccgcgacgccgaacctcaacctaacaaccccgccgccgaatccctaaaaaaaccaaatacgaccgccgacctcaacaacaccaaaaaaactccgcgccccgcgatcccgacacccccgctaccaaaaaaaacgcctaaaaaaccataaccgtcgcccccgaaaaacctccgcccaacgccgacgaaaacatcgtaaaaaacacaacaccccctaacctatataatcccgaaaacttaacaaacgatacgaacccgttatcccaaaacgcaaaaaaaataatcgcgaaaaacccgcgaaactcgacgttaacgaaaaccccgaaaaaattaaatccgactccgcctacgcgatcgaaaaaaccctacgaacaaccactccttattcaccccaacgaaaaccacgcccgaaacgctcaaaacccatcccaaaacttaaacgcacccgaaaccgcaaaacgaccgccaactcctatactaaacataaccccgaccgatcacccgaaaaaaaacgctaaacctaaccccgacgaaaaaatcgaaaacgccgcgacgccgaaaaccccaaacccttccccaacgaaaaaaaaaatcgacaacctcaaaaaaataaaccgaaaccactaccgcaaccgaaaaaaacgctcgtccaacgaaaaacccgccaaaaaaaacaaaaacaaaactaaaaaccaccgtcaccgacgacgccgcacctacccccgaaaacgcgaccgccaaaaccgccacgccccgaaacaccaccccgaccacgacg

SEQ ID NO: 1955 - DNA, 815 bp, Artificial Sequence
  chemically treated genomic DNA (Homo sapiens) CpG-island No: 1955
gttgtagtgtatttggagtagagaggggttttttcgaggatcgcgacgtcgagttttagtttggtagtttcgtcgtcgaatttttggaggagttagatgcggtcgtcggttttagtagtattaagaaggtttcgcgtttcgcgatttcggtattttcgttattaaagaaggcgtttgggaggttatggtcgtcgttttcgaggagttttcgtttagcgtcggcgaggatatcgtgggggatatagtattttttgatttgtgtgatttcgggagtttaataggcgatgcgagttcgttgttttaggacgtaaaggggatgatcgcggagggttcgcgggattcggcgttggcggaagtttcggaagggttgagttcggtttcgtttgcgcggtcggaggagttttgcgagtagttattttttgtttattttagcggggattacgttcgggacgtttaggatttattttagagtttgggcgtattcgaggtcgtagagcggtcgttagtttttgtgttggatatggtttcggtcggttattcggaaggggacgttgagtttagtttcggcgagagggtcgaggacgtcgcggcgtcgaaagttttaggtttttttttagcgaaggagaaaatcggtagttttagaaaggtggatcgaggttattatcgtagtcggagagagcgttcgtttagcggggagttcgttagagagagtaggagtaagattgagggttatcgttatcggcggcgtcgtatttgttttcgggagcgcgatcgttaggatcgttacgtttcggagtattatttcggttacggcg

SEQ ID NO: 1956 - DNA, 815 bp, Artificial Sequence
  chemically treated genomic DNA (Homo sapiens) CpG-island No: 1956
cgccgtaaccgaaataatactccgaaacgtaacgatcctaacgatcgcgctcccgaaaacaaatacgacgccgccgataacgataaccctcaatcttactcctactctctctaacgaactccccgctaaacgaacgctctctccgactacgataataacctcgatccacctttctaaaactaccgattttctccttcgctaaaaaaaaacctaaaactttcgacgccgcgacgtcctcgaccctctcgccgaaactaaactcaacgtccccttccgaataaccgaccgaaaccatatccaacacaaaaactaacgaccgctctacgacctcgaatacgcccaaactctaaaataaatcctaaacgtcccgaacgtaatccccgctaaaataaacaaaaaataactactcgcaaaactcctccgaccgcgcaaacgaaaccgaactcaacccttccgaaacttccgccaacgccgaatcccgcgaaccctccgcgatcatcccctttacgtcctaaaacaacgaactcgcatcgcctattaaactcccgaaatcacacaaatcaaaaaatactatatcccccacgatatcctcgccgacgctaaacgaaaactcctcgaaaacgacgaccataacctcccaaacgccttctttaataacgaaaataccgaaatcgcgaaacgcgaaaccttcttaatactactaaaaccgacgaccgcatctaactcctccaaaaattcgacgacgaaactaccaaactaaaactcgacgtcgcgatcctcgaaaaaacccctctctactccaaatacactacaac

SEQ ID NO: 1957 - DNA, 902 bp, Artificial Sequence
  chemically treated genomic DNA (Homo sapiens) CpG-island No: 1957
ggttatttcggtgttcgttcgtcgcggtcgtcgttttttttttagcggtttggttcgggcgggcggtggcgtcgtagtttttagagcggcggggtttcgggcggttcgcggttgtgtagggggaggcgggcgaggggtcgtattagttttcggcgggtcgcgtcggttgaggggcggtcgagttagcggcggtttaggcgagcgggtcgttgcgcgggttttatgtcggtttgcggcgggcgggaaggaggcgggagtttatttgattcggttcggcgttcgttttatttttttcggtcgtcgtcgtcgtcgtcgtatatagtttagtcgttcggcgggggataatgacgtgtttttattcgggtatcgtcgtcgtcgttttcgggttagcgtcgcgttcgtcgcgttttttcgggtcgtcggggggcgcgttagggtcgcgttcgaacgcgtcgtcgtttaggggtcgtcgtataagaagcgcggcgcgtagttaataagtacggcgagtgtgggaggggtcgtcgtttaagagtcgtgggcgaaggtagacgtcgcgcgttattagagcgtcggtcgggtcggtagagggagcgcgttgattggttgggttggtcgcgcgtttgcgcgtcggcgaaagggtttttttcgttttgtgtttttttgggtagagttagacggcgcgcggcgggcgtaggattttgggttttcgtttcgttttgcgtttgattttagatgcgtttttagaagcggggtatttggggacgtaggagtttgggattttcgtttttcgaaaacggatttggtttcgagaaatttttcgtttcgtgggtttcgttttttgtaattattttgcgttttttttggtttagcggacgtagtttttattttttgttttttag

SEQ ID NO: 1958 - DNA, 902 bp, Artificial Sequence
  chemically treated genomic DNA (Homo sapiens) CpG-island No: 1958
ctaaaaaacaaaaaataaaaactacgtccgctaaaccaaaaaaaacgcaaaataattacaaaaaacgaaacccacgaaacgaaaaatttctcgaaaccaaatccgttttcgaaaaacgaaaatcccaaactcctacgtccccaaataccccgcttctaaaaacgcatctaaaatcaaacgcaaaacgaaacgaaaacccaaaatcctacgcccgccgcgcgccgtctaactctacccaaaaaaacacaaaacgaaaaaaaccctttcgccgacgcgcaaacgcgcgaccaacccaaccaatcaacgcgctccctctaccgacccgaccgacgctctaataacgcgcgacgtctaccttcgcccacgactcttaaacgacgacccctcccacactcgccgtacttattaactacgcgccgcgcttcttatacgacgacccctaaacgacgacgcgttcgaacgcgaccctaacgcgccccccgacgacccgaaaaaacgcgacgaacgcgacgctaacccgaaaacgacgacgacgatacccgaataaaaacacgtcattatcccccgccgaacgactaaactatatacgacgacgacgacgacgaccgaaaaaaataaaacgaacgccgaaccgaatcaaataaactcccgcctccttcccgcccgccgcaaaccgacataaaacccgcgcaacgacccgctcgcctaaaccgccgctaactcgaccgcccctcaaccgacgcgacccgccgaaaactaatacgacccctcgcccgcctccccctacacaaccgcgaaccgcccgaaaccccgccgctctaaaaactacgacgccaccgcccgcccgaaccaaaccgctaaaaaaaaaacgacgaccgcgacgaacgaacaccgaaataacc

SEQ ID NO: 1959 - DNA, 902 bp, Artificial Sequence
  chemically treated genomic DNA (Homo sapiens) CpG-island No: 1959
ttaagaaataaaaaataaaggttgcgttcgttaggttaagggaggcgtaaggtagttgtagagggcgaagtttacgaagcggaggatttttcggagttaagttcgttttcgggggacggggattttagatttttgcgtttttaggtgtttcgtttttggaaacgtatttggggttaagcgtaggacgaggcgaaagtttaaagttttacgttcgtcgcgcgtcgtttggttttgtttagggaagtatagggcggaaggagttttttcgtcggcgcgtagacgcgcgattagtttagttaattagcgcgttttttttgtcggttcgatcggcgttttggtgacgcgcgacgtttgttttcgtttacggtttttgggcgacgattttttttatattcgtcgtgtttgttagttgcgcgtcgcgttttttgtgcgacggtttttgggcggcggcgcgttcgggcgcggttttggcgcgtttttcggcggttcggaggggcgcggcgggcgcggcgttgattcggaggcggcggcggcggtgttcggatggaggtacgttattgtttttcgtcgggcggttgggttgtgtgcggcggcggcggcggcggtcgagggggatggagcgagcgtcgagtcgggttaggtaagttttcgtttttttttcgttcgtcgtaggtcggtatggggttcgcgtagcggttcgttcgtttgggtcgtcgttggttcggtcgttttttagtcggcgcggttcgtcgggggttggtgcggtttttcgttcgtttttttttatatagtcgcgggtcgttcgggatttcgtcgttttgggggttgcggcgttatcgttcgttcgggttaggtcgttggggagggggcggcggtcgcggcgggcgggtatcggggtagtt

SEQ ID NO: 1960 - DNA, 902 bp, Artificial Sequence
  chemically treated genomic DNA (Homo sapiens) CpG-island No: 1960
aactaccccgatacccgcccgccgcgaccgccgccccctccccaacgacctaacccgaacgaacgataacgccgcaacccccaaaacgacgaaatcccgaacgacccgcgactatataaaaaaaaacgaacgaaaaaccgcaccaacccccgacgaaccgcgccgactaaaaaacgaccgaaccaacgacgacccaaacgaacgaaccgctacgcgaaccccataccgacctacgacgaacgaaaaaaaaacgaaaacttacctaacccgactcgacgctcgctccatccccctcgaccgccgccgccgccgccgcacacaacccaaccgcccgacgaaaaacaataacgtacctccatccgaacaccgccgccgccgcctccgaatcaacgccgcgcccgccgcgcccctccgaaccgccgaaaaacgcgccaaaaccgcgcccgaacgcgccgccgcccaaaaaccgtcgcacaaaaaacgcgacgcgcaactaacaaacacgacgaatataaaaaaaatcgtcgcccaaaaaccgtaaacgaaaacaaacgtcgcgcgtcaccaaaacgccgatcgaaccgacaaaaaaaacgcgctaattaactaaactaatcgcgcgtctacgcgccgacgaaaaaactccttccgccctatacttccctaaacaaaaccaaacgacgcgcgacgaacgtaaaactttaaactttcgcctcgtcctacgcttaaccccaaatacgtttccaaaaacgaaacacctaaaaacgcaaaaatctaaaatccccgtcccccgaaaacgaacttaactccgaaaaatcctccgcttcgtaaacttcgccctctacaactaccttacgcctcccttaacctaacgaacgcaacctttattttttatttcttaa

SEQ ID NO: 1961 - DNA, 644 bp, Artificial Sequence
  chemically treated genomic DNA (Homo sapiens) CpG-island No: 1961
tcggagcgaattcgtagtttacgtaggcgtagtcggtttttagtagcgcgattatttttttattcgattttcgtaggtcgtcgttcgaagattagtttattagagagtatgcgttatgggtgttttcgcgtggtagtcgttttttttgtttcgtttgtttagtcggaaaggagaaggggcggggtttgcggcgggtttcgtttttaaattgcggcgcgcgcgtgggtggggcgggttttacgtttggagaagggttattttcggggtggacggtaatggttgtgggtaaggagcgaggcgcgattggttgttcggcggacgagttttggggttcgcgagcgtaaagtggaaggcggcggggtcggggttgtggttgcgtcgttcgttatttattttttcgcggcggttcggttttcggtatgatggtggggatcggtggggatttaggtcgcgggttaggaggagggtgttggggaacgtgtgtttagtttattttcgttagtcgttgaacgttagtatcgatagaagatttttttattttaaagcggaggtatacggggtgtcgggggaagatatttttattagatttagagttattttgatttgaaagatgatagtcgtagtacgttagttagaattaagtt

SEQ ID NO: 1962 - DNA, 644 bp, Artificial Sequence
  chemically treated genomic DNA (Homo sapiens) CpG-island No: 1962
aacttaattctaactaacgtactacgactatcatctttcaaatcaaaataactctaaatctaataaaaatatcttcccccgacaccccgtatacctccgctttaaaataaaaaaatcttctatcgatactaacgttcaacgactaacgaaaataaactaaacacacgttccccaacaccctcctcctaacccgcgacctaaatccccaccgatccccaccatcataccgaaaaccgaaccgccgcgaaaaaataaataacgaacgacgcaaccacaaccccgaccccgccgccttccactttacgctcgcgaaccccaaaactcgtccgccgaacaaccaatcgcgcctcgctccttacccacaaccattaccgtccaccccgaaaataacccttctccaaacgtaaaacccgccccacccacgcgcgcgccgcaatttaaaaacgaaacccgccgcaaaccccgccccttctcctttccgactaaacaaacgaaacaaaaaaaacgactaccacgcgaaaacacccataacgcatactctctaataaactaatcttcgaacgacgacctacgaaaatcgaataaaaaaataatcgcgctactaaaaaccgactacgcctacgtaaactacgaattcgctccga

SEQ ID NO: 1963 - DNA, 644 bp, Artificial Sequence
  chemically treated genomic DNA (Homo sapiens) CpG-island No: 1963
gatttgattttggttgacgtgttgcgattgttattttttagattagagtaattttgagtttggtgggagtgttttttttcgatatttcgtatattttcgttttaagatgagagaattttttgtcggtgttagcgtttagcggttaacggaggtgagttggatatacgttttttaatattttttttttggttcgcgatttagatttttatcggtttttattattatatcgggggtcgggtcgtcgcggggaggtagatggcgggcggcgtagttatagtttcggtttcgtcgttttttattttgcgttcgcgggttttagaattcgttcgtcggatagttaatcgcgtttcgttttttgtttatagttattgtcgtttatttcggaagtagtttttttttagacgtaagattcgttttatttacgcgcgcgtcgtagtttgggggcggagttcgtcgtagatttcgttttttttttttttcgattgggtaggcggggtaggaggggcggttattacgcgggagtatttatggcgtatgttttttggtgggttagttttcggacggcggtttgcggaggtcgggtgagagggtgatcgcgttgttgaaagtcgattgcgtttacgtggattgcgggttcgtttcgg

SEQ ID NO: 1964 - DNA, 644 bp, Artificial Sequence
  chemically treated genomic DNA (Homo sapiens) CpG-island No: 1964
ccgaaacgaacccgcaatccacgtaaacgcaatcgactttcaacaacgcgatcaccctctcacccgacctccgcaaaccgccgtccgaaaactaacccaccaaaaaacatacgccataaatactcccgcgtaataaccgcccctcctaccccgcctacccaatcgaaaaaaaaaaaaaacgaaatctacgacgaactccgcccccaaactacgacgcgcgcgtaaataaaacgaatcttacgtctaaaaaaaaactacttccgaaataaacgacaataactataaacaaaaaacgaaacgcgattaactatccgacgaacgaattctaaaacccgcgaacgcaaaataaaaaacgacgaaaccgaaactataactacgccgcccgccatctacctccccgcgacgacccgacccccgatataataataaaaaccgataaaaatctaaatcgcgaaccaaaaaaaaaatattaaaaaacgtatatccaactcacctccgttaaccgctaaacgctaacaccgacaaaaaattctctcatcttaaaacgaaaatatacgaaatatcgaaaaaaaacactcccaccaaactcaaaattactctaatctaaaaaataacaatcgcaacacgtcaaccaaaatcaaatc

SEQ ID NO: 1965 - DNA, 614 bp, Artificial Sequence
  chemically treated genomic DNA (Homo sapiens) CpG-island No: 1965
cgcgtattcgcgggtttgtacgtttatagtcgtttcggttggtttcggcgcgtaatttttattcgtagttgggggcggggacgaggggagggggcggggacgaggttcgagttaggttcgtttcgttttgttttcgtttttcgttttcgagtcggcgtcgcggcgttttttgggaagtgtagttcgcgtttgcgtcggtcggtcgggtcgtcgaagtcgggggtttcgggcggaaacggtattatttattaagggatgcgaggcgttcggggcgggtttaacgaggtcgggggcgggttcgggcgcgtttattttcgtttttttttttcggtttaggttttcggtttcgtttttttttgcgcggatttgggtcgtcgtcgacgagggtcgcgtgcgttcgcgttagggttcgcgtcggaaatcgaggagtggcggggaggttgagttcggggatggcgcgttaggtaaggtaggcggacgcgcggatttttcggcgtagtgcggtttcgaaggcggtagggcgagaaagagttgggattttttcgtaatttcgggatcggttgggtgaggttgggtaggtttgatgtttaggggttcgtgtcgggaagtttagg

SEQ ID NO: 1966 - DNA, 614 bp, Artificial Sequence
  chemically treated genomic DNA (Homo sapiens) CpG-island No: 1966
cctaaacttcccgacacgaacccctaaacatcaaacctacccaacctcacccaaccgatcccgaaattacgaaaaaatcccaactctttctcgccctaccgccttcgaaaccgcactacgccgaaaaatccgcgcgtccgcctaccttacctaacgcgccatccccgaactcaacctccccgccactcctcgatttccgacgcgaaccctaacgcgaacgcacgcgaccctcgtcgacgacgacccaaatccgcgcaaaaaaaaacgaaaccgaaaacctaaaccgaaaaaaaaaaacgaaaataaacgcgcccgaacccgcccccgacctcgttaaacccgccccgaacgcctcgcatcccttaataaataataccgtttccgcccgaaacccccgacttcgacgacccgaccgaccgacgcaaacgcgaactacacttcccaaaaaacgccgcgacgccgactcgaaaacgaaaaacgaaaacaaaacgaaacgaacctaactcgaacctcgtccccgccccctcccctcgtccccgcccccaactacgaataaaaattacgcgccgaaaccaaccgaaacgactataaacgtacaaacccgcgaatacgcg

SEQ ID NO: 1967 - DNA, 614 bp, Artificial Sequence
  chemically treated genomic DNA (Homo sapiens) CpG-island No: 1967
tttgaatttttcggtacgaatttttgagtattaggtttgtttagttttatttagtcgatttcgaagttgcgggggggttttagttttttttcgttttatcgttttcggggtcgtattgcgtcgaggggttcgcgcgttcgtttgttttatttggcgcgttattttcgggtttagttttttcgttatttttcggttttcggcgcgggttttggcgcgggcgtacgcgattttcgtcggcggcggtttaggttcgcgtaggagaaggcggggtcgggggtttgggtcgagggggaggggcgggggtgggcgcgttcgggttcgttttcggtttcgttgagttcgtttcgagcgtttcgtattttttggtgggtggtgtcgttttcgttcggagttttcggtttcggcggttcggtcggtcggcgtagacgcggattatattttttagaaggcgtcgcggcgtcggttcggaagcggggggcggagatagggcggggcggatttggttcgggtttcgttttcgtttttttttttcgttttcgtttttagttgcgggtagaggttgcgcgtcgagattagtcggggcggttgtgggcgtgtaagttcgcgggtacgcg

SEQ ID NO: 1968 - DNA, 614 bp, Artificial Sequence
  chemically treated genomic DNA (Homo sapiens) CpG-island No: 1968
cgcgtacccgcgaacttacacgcccacaaccgccccgactaatctcgacgcgcaacctctacccgcaactaaaaacgaaaacgaaaaaaaaaaacgaaaacgaaacccgaaccaaatccgccccgccctatctccgccccccgcttccgaaccgacgccgcgacgccttctaaaaaatataatccgcgtctacgccgaccgaccgaaccgccgaaaccgaaaactccgaacgaaaacgacaccacccaccaaaaaatacgaaacgctcgaaacgaactcaacgaaaccgaaaacgaacccgaacgcgcccacccccgcccctccccctcgacccaaacccccgaccccgccttctcctacgcgaacctaaaccgccgccgacgaaaatcgcgtacgcccgcgccaaaacccgcgccgaaaaccgaaaaataacgaaaaaactaaacccgaaaataacgcgccaaataaaacaaacgaacgcgcgaacccctcgacgcaatacgaccccgaaaacgataaaacgaaaaaaaactaaaacccccccgcaacttcgaaatcgactaaataaaactaaacaaacctaatactcaaaaattcgtaccgaaaaattcaaa

SEQ ID NO: 1969 - DNA, 514 bp, Artificial Sequence
  chemically treated genomic DNA (Homo sapiens) CpG-island No: 1969
tcgtgtttcgtattttatttttttcgtattttgtttcgtatttaatatttttcgcgtttttcgtcgcgtttttttagtacgtattagtttcgtttatttcgtcgcgtgtttagttcgcgttatcgtcgttttttttaggttttagcgcgttttgcggggtcgcgtacgttagcggaatcgtcgggaagagcgtcgtgtcgttaatggcggaggcgcgtacgtttgtagggtcgcgtacgtttgtagggtcgcgtacgtttgtagggtcgcgtacgtttgtagggtcgcgtatgtttgtagggtcgcgtacgtttgtagggtcgcgtacgtttgtagggtcgcgtacgtattgacggttgatcgttattttttttttcgaggcggtagttttaggtgtaagcgtcgggtttgttgttcgttggcgtttttgtagcggttcgagttgtggtcggcgtggatgaggggtaggcgaggtagggcgtttttttagtattgtcgtttttttcgttttagg

SEQ ID NO: 1970 - DNA, 514 bp, Artificial Sequence
  chemically treated genomic DNA (Homo sapiens) CpG-island No: 1970
cctaaaacgaaaaaaacgacaatactaaaaaaacgccctacctcgcctacccctcatccacgccgaccacaactcgaaccgctacaaaaacgccaacgaacaacaaacccgacgcttacacctaaaactaccgcctcgaaaaaaaaaataacgatcaaccgtcaatacgtacgcgaccctacaaacgtacgcgaccctacaaacgtacgcgaccctacaaacatacgcgaccctacaaacgtacgcgaccctacaaacgtacgcgaccctacaaacgtacgcgaccctacaaacgtacgcgcctccgccattaacgacacgacgctcttcccgacgattccgctaacgtacgcgaccccgcaaaacgcgctaaaacctaaaaaaaacgacgataacgcgaactaaacacgcgacgaaataaacgaaactaatacgtactaaaaaaacgcgacgaaaaacgcgaaaaatattaaatacgaaacaaaatacgaaaaaaataaaatacgaaacacga

SEQ ID NO: 1971 - DNA, 514 bp, Artificial Sequence
  chemically treated genomic DNA (Homo sapiens) CpG-island No: 1971
tttggggcgggaggggcggtaatattggaggggcgttttgtttcgtttgttttttatttacgtcggttatagttcgggtcgttgtaggggcgttagcgggtagtaaattcggcgtttgtatttggaattgtcgtttcgggagggaagatggcggttagtcgttagtgcgtgcgcggttttgtagacgtgcgcggttttgtagacgtgcgcggttttgtagatatgcgcggttttgtagacgtgcgcggttttgtagacgtgcgcggttttgtagacgtgcgcggttttgtagacgtgcgcgttttcgttattgacggtacggcgtttttttcggcggtttcgttagcgtgcgcggtttcgtaaggcgcgttggagtttggggaggacggcggtgacgcgggttgggtacgcggcggagtgggcggggttggtgcgtgttgggggagcgcggcgaggggcgcgggaggtgttgggtgcggggtagggtgcgggaaaggtggagtgcgaggtacgg

SEQ ID NO: 1972 - DNA, 514 bp, Artificial Sequence
  chemically treated genomic DNA (Homo sapiens) CpG-island No: 1972
ccgtacctcgcactccacctttcccgcaccctaccccgcacccaacacctcccgcgcccctcgccgcgctcccccaacacgcaccaaccccgcccactccgccgcgtacccaacccgcgtcaccgccgtcctccccaaactccaacgcgccttacgaaaccgcgcacgctaacgaaaccgccgaaaaaaacgccgtaccgtcaataacgaaaacgcgcacgtctacaaaaccgcgcacgtctacaaaaccgcgcacgtctacaaaaccgcgcacgtctacaaaaccgcgcatatctacaaaaccgcgcacgtctacaaaaccgcgcacgtctacaaaaccgcgcacgcactaacgactaaccgccatcttccctcccgaaacgacaattccaaatacaaacgccgaatttactacccgctaacgcccctacaacgacccgaactataaccgacgtaaataaaaaacaaacgaaacaaaacgcccctccaatattaccgcccctcccgccccaaa

SEQ ID NO: 1973 - DNA, 676 bp, Artificial Sequence
  chemically treated genomic DNA (Homo sapiens) CpG-island No: 1973
ttttcgttattcgcggttcgtcggatacgggggtttttttttttcggcggcgcggttttatttcggtttcggcgattttttatcgtcggttttttttttttggggttattgcgttttatttcgtttttttcgcgttattatttcgtattttcgttttttttttttcgcgcgcgtatttcgttcgttcgttttcgcgggcggtatttgttttaattcgtttttttgttttgtcgtttcgcgttttttgttcgcgtttttttttcgtttttttttcggtttttcgtcgttttcgcgcgttttcgcgtttcgcgttttttcgcgtttatttcgttgtttttttcgtcgtatagttattcgttttattacgtcgtttttttttttgtttcgttttatacgtttcgttcgtttttttttattttttattttcgtcgtacggtatttattattttatcgtcgtttatttgcgattgcggttatattttttcgcgtttatagttttcgttcggtttgttttcgcgtcggatttttttttcgtattttcgttattatttttttttttttttcgtatagttttattttttcgtttgttttattttttttttattttgtttattatatatttatatattttattcgcgattattcgattcgtagtttcgcgagtcgcgcgttttta

SEQ ID NO: 1974 - DNA, 676 bp, Artificial Sequence
  chemically treated genomic DNA (Homo sapiens) CpG-island No: 1974
taaaaacgcgcgactcgcgaaactacgaatcgaataatcgcgaataaaatatataaatatataataaacaaaataaaaaaaaaataaaacaaacgaaaaaataaaactatacgaaaaaaaaaaaaaaataataacgaaaatacgaaaaaaaaatccgacgcgaaaacaaaccgaacgaaaactataaacgcgaaaaaatataaccgcaatcgcaaataaacgacgataaaataataaataccgtacgacgaaaataaaaaataaaaaaaaacgaacgaaacgtataaaacgaaacaaaaaaaaaaacgacgtaataaaacgaataactatacgacgaaaaaaacaacgaaataaacgcgaaaaaacgcgaaacgcgaaaacgcgcgaaaacgacgaaaaaccgaaaaaaaaacgaaaaaaaaacgcgaacaaaaaacgcgaaacgacaaaacaaaaaaacgaattaaaacaaataccgcccgcgaaaacgaacgaacgaaatacgcgcgcgaaaaaaaaaaaacgaaaatacgaaataataacgcgaaaaaaacgaaataaaacgcaataaccccaaaaaaaaaaaaccgacgataaaaaatcgccgaaaccgaaataaaaccgcgccgccgaaaaaaaaaaacccccgtatccgacgaaccgcgaataacgaaaa

SEQ ID NO: 1975 - DNA, 676 bp, Artificial Sequence
  chemically treated genomic DNA (Homo sapiens) CpG-island No: 1975
tgggagcgcgcggttcgcggagttgcgggtcgagtggtcgcgagtggagtgtgtgagtatgtggtgagtaggatggagggagagtgaggtaggcgagagagtggagttgtgcgaggaggagagaggagtggtggcgggggtgcgaagagagggttcggcgcgggggtaggtcgggcgagggttgtgagcgcgagagagtgtggtcgtagtcgtaggtagacggcggtgaagtggtgggtgtcgtgcggcgagagtgggagatggggaaaggcgagcgggacgtgtgaggcggagtagggagaggggcggcgtgatggagcgggtgattgtgcggcgagagggatagcggagtaggcgcgagggggcgcggggcgcgggagcgcgcgggagcggcggagggtcggagggagggcgaggagggggcgcgggtagagggcgcggggcggtagggtaggggggcgggttgaggtaggtgtcgttcgcgagggcgggcgggcgaggtgcgcgcgcggagagagaagggcgggggtgcggggtggtggcgcggggggggcggggtggggcgtagtgattttaggaagagggggtcggcggtgggggatcgtcgggatcggggtggggtcgcgtcgtcggaaggggggggttttcgtgttcgacgggtcgcgaatggcggggg

SEQ ID NO: 1976 - DNA, 676 bp, Artificial Sequence
  chemically treated genomic DNA (Homo sapiens) CpG-island No: 1976
cccccgccattcgcgacccgtcgaacacgaaaaccccccccttccgacgacgcgaccccaccccgatcccgacgatcccccaccgccgaccccctcttcctaaaatcactacgccccaccccgccccccccgcgccaccaccccgcacccccgcccttctctctccgcgcgcgcacctcgcccgcccgccctcgcgaacgacacctacctcaacccgcccccctaccctaccgccccgcgccctctacccgcgccccctcctcgccctccctccgaccctccgccgctcccgcgcgctcccgcgccccgcgccccctcgcgcctactccgctatccctctcgccgcacaatcacccgctccatcacgccgcccctctccctactccgcctcacacgtcccgctcgcctttccccatctcccactctcgccgcacgacacccaccacttcaccgccgtctacctacgactacgaccacactctctcgcgctcacaaccctcgcccgacctacccccgcgccgaaccctctcttcgcacccccgccaccactcctctctcctcctcgcacaactccactctctcgcctacctcactctccctccatcctactcaccacatactcacacactccactcgcgaccactcgacccgcaactccgcgaaccgcgcgctccca

SEQ ID NO: 1977 - DNA, 821 bp, Artificial Sequence
  chemically treated genomic DNA (Homo sapiens) CpG-island No: 1977
gtaggcgttgttcgggttcgtgggcggggtttcgggagggggcggagttaggtttacggtcggtgttaggttgtttcggtaacggtgacgtttcgcggcgtgggcggggttagtacgtaggttgtatattttaggaagtgaggaggaggcgcgggttggagttgcggcggggtttggggcgtagagtagcggcgggaggaggcggatacgtggtaatagcggtagtagttcgggcggcggtagtaatagcggcggcggtatcggttcgagtcgtcggtcgtttttttattttttcgtttcgcggtagttttagttttttttatttggtttttttggtttcgttcgttcggtcgggagttgttttgtgtttttttttttgattttttagcgataggattcggcgtcgggtattgagtatcgttattatggggaagggggtgagtgttcggcgcgttcggggagggggttcggggagttttcgaggggaagaggaggaagtcgggagggcgatcgcggttagcgggaggcggcggaggaggaagcggcgtcgcgtggagtgggttggtagagtcgcgcggtttaaaagacgacgtagtttggaaatggagggagcgtagtaacggggggcgggggaagggagcgtcgaggggttggagcgcggtattgtttaggggggtgggcggattttgggcgggggttgcgcgtttcggaggtcgagcgggtcgggggtttcgagaggcggtgtttgggaagtttcggggtcgggaggagggggtttgtagtagcgggggcggtttcgggattgagtcggtatttttgag

SEQ ID NO: 1978 - DNA, 821 bp, Artificial Sequence
  chemically treated genomic DNA (Homo sapiens) CpG-island No: 1978
ctcaaaaataccgactcaatcccgaaaccgcccccgctactacaaaccccctcctcccgaccccgaaacttcccaaacaccgcctctcgaaacccccgacccgctcgacctccgaaacgcgcaacccccgcccaaaatccgcccacccccctaaacaataccgcgctccaacccctcgacgctcccttcccccgccccccgttactacgctccctccatttccaaactacgtcgtcttttaaaccgcgcgactctaccaacccactccacgcgacgccgcttcctcctccgccgcctcccgctaaccgcgatcgccctcccgacttcctcctcttcccctcgaaaactccccgaaccccctccccgaacgcgccgaacactcacccccttccccataataacgatactcaatacccgacgccgaatcctatcgctaaaaaatcaaaaaaaaaaacacaaaacaactcccgaccgaacgaacgaaaccaaaaaaaccaaataaaaaaaactaaaactaccgcgaaacgaaaaaataaaaaaacgaccgacgactcgaaccgataccgccgccgctattactaccgccgcccgaactactaccgctattaccacgtatccgcctcctcccgccgctactctacgccccaaaccccgccgcaactccaacccgcgcctcctcctcacttcctaaaatatacaacctacgtactaaccccgcccacgccgcgaaacgtcaccgttaccgaaacaacctaacaccgaccgtaaacctaactccgccccctcccgaaaccccgcccacgaacccgaacaacgcctac

SEQ ID NO: 1979 - DNA, 821 bp, Artificial Sequence
  chemically treated genomic DNA (Homo sapiens) CpG-island No: 1979
tttagggatgtcggtttagtttcggggtcgttttcgttgttgtaagtttttttttttcggtttcgaggttttttaagtatcgtttttcggagttttcggttcgttcggttttcggggcgcgtagttttcgtttagggttcgtttatttttttaagtaatgtcgcgttttagtttttcggcgtttttttttttcgtttttcgttattgcgttttttttatttttaaattgcgtcgttttttaagtcgcgcggttttgttagtttattttacgcggcgtcgttttttttttcgtcgtttttcgttggtcgcggtcgttttttcgatttttttttttttttttcgagggtttttcgagtttttttttcgggcgcgtcggatatttatttttttttttatggtggcggtgtttagtgttcggcgtcgggttttgtcgttggagaattagagagaaaagtatagagtagttttcggtcgagcgagcgggattaggggagttaagtggagggagttagggttgtcgcggggcgggagggtgggagggcggtcggcggttcgggtcgatgtcgtcgtcgttgttgttgtcgtcgttcgggttgttatcgttgttgttacgtgttcgttttttttcgtcgttgttttgcgttttagatttcgtcgtagttttagttcgcgttttttttttattttttaaaatatgtaatttgcgtgttggtttcgtttacgtcgcgaaacgttatcgttatcggagtaatttgatatcggtcgtgggtttggtttcgttttttttcgaaatttcgtttacgggttcggatagcgtttgt

SEQ ID NO: 1980 - DNA, 821 bp, Artificial Sequence
  chemically treated genomic DNA (Homo sapiens) CpG-island No: 1980
acaaacgctatccgaacccgtaaacgaaatttcgaaaaaaaacgaaaccaaacccacgaccgatatcaaattactccgataacgataacgtttcgcgacgtaaacgaaaccaacacgcaaattacatattttaaaaaataaaaaaaaaacgcgaactaaaactacgacgaaatctaaaacgcaaaacaacgacgaaaaaaaacgaacacgtaacaacaacgataacaacccgaacgacgacaacaacaacgacgacgacatcgacccgaaccgccgaccgccctcccaccctcccgccccgcgacaaccctaactccctccacttaactcccctaatcccgctcgctcgaccgaaaactactctatacttttctctctaattctccaacgacaaaacccgacgccgaacactaaacaccgccaccataaaaaaaaaaataaatatccgacgcgcccgaaaaaaaaactcgaaaaaccctcgaaaaaaaaaaaaaaaaatcgaaaaaacgaccgcgaccaacgaaaaacgacgaaaaaaaaaacgacgccgcgtaaaataaactaacaaaaccgcgcgacttaaaaaacgacgcaatttaaaaataaaaaaaacgcaataacgaaaaacgaaaaaaaaaaacgccgaaaaactaaaacgcgacattacttaaaaaaataaacgaaccctaaacgaaaactacgcgccccgaaaaccgaacgaaccgaaaactccgaaaaacgatacttaaaaaacctcgaaaccgaaaaaaaaaaacttacaacaacgaaaacgaccccgaaactaaaccgacatccctaaa

SEQ ID NO: 1981 - DNA, 936 bp, Artificial Sequence
  chemically treated genomic DNA (Homo sapiens) CpG-island No: 1981
tagttgtcggcgcggtgtttagggcggtatttcgttcggtttcggtttttttagttttgggttcgatttttattacgtttttgtttcgacgcgaacgcggagttcgagcgcgcgttacgtcgtgtggggtcgaagaggttgttatttagaggcggagtgcgggttcgcgagggtttttattcgattttcgttttcgttagtatttacggattcgcgttttcgtcgcgcgtcgattcgggagtagtatcgttttcggtataggagttttacgcgttttttatttaataggaagttgggtggaagtagcgcggatttacggtatatcgaacgtattttaatagaattcgacgtagatacgcgtttttaatcggcggagatattggtagggttagaaacgcgcgtagcgggggcgggaggtcggtaagtttttcgtttttgttcgagatttcgtttcggttcggtttcgtttttttttttgttttttttttttgtacgtacgggtttcgtttttcgcgcgacgttttttgttgattcggaaacggatttttcggagtcgaggttcgttcgggtgagtgtttttcgttttttgtggttaaatttagttacgtagttttttttttgcggcgttttttatattcggggtttgttggttttcgcggatgttataggttcggtaatcgtttttttgtcggcggggagtttcgcgacgttcggaaatgtttcgaagtttgtcgtttagttgttagatttgcgtttgtgttcggtttcgttattgaggtcgtttttgttcggtttttttattttagttttttttatcgttcgtttattttatcgcgcgcggttttaggtttcgattcggtatgtggtttgttttttatcgtttttattttcgttttttttggttttttagggtagttttgggattcggtagacgtt

SEQ ID NO: 1982 - DNA, 936 bp, Artificial Sequence
  chemically treated genomic DNA (Homo sapiens) CpG-island No: 1982
aacgtctaccgaatcccaaaactaccctaaaaaaccaaaaaaaacgaaaataaaaacgataaaaaacaaaccacataccgaatcgaaacctaaaaccgcgcgcgataaaataaacgaacgataaaaaaaactaaaataaaaaaaccgaacaaaaacgacctcaataacgaaaccgaacacaaacgcaaatctaacaactaaacgacaaacttcgaaacatttccgaacgtcgcgaaactccccgccgacaaaaaaacgattaccgaacctataacatccgcgaaaaccaacaaaccccgaatataaaaaacgccgcaaaaaaaaaactacgtaactaaatttaaccacaaaaaacgaaaaacactcacccgaacgaacctcgactccgaaaaatccgtttccgaatcaacaaaaaacgtcgcgcgaaaaacgaaacccgtacgtacaaaaaaaaaaaacaaaaaaaaaaacgaaaccgaaccgaaacgaaatctcgaacaaaaacgaaaaacttaccgacctcccgcccccgctacgcgcgtttctaaccctaccaatatctccgccgattaaaaacgcgtatctacgtcgaattctattaaaatacgttcgatataccgtaaatccgcgctacttccacccaacttcctattaaataaaaaacgcgtaaaactcctataccgaaaacgatactactcccgaatcgacgcgcgacgaaaacgcgaatccgtaaatactaacgaaaacgaaaatcgaataaaaaccctcgcgaacccgcactccgcctctaaataacaacctcttcgaccccacacgacgtaacgcgcgctcgaactccgcgttcgcgtcgaaacaaaaacgtaataaaaatcgaacccaaaactaaaaaaaccgaaaccgaacgaaataccgccctaaacaccgcgccgacaacta

SEQ ID NO: 1983 - DNA, 936 bp, Artificial Sequence
  chemically treated genomic DNA (Homo sapiens) CpG-island No: 1983
ggcgtttgtcgaattttagggttgttttgaggggttaagaggggcgagggtggggacgatggaagataagttatatgtcgaatcgggatttgaggtcgcgcgcgataggatgggcggacggtgaagagaattagggtggaagggtcggataggggcgattttagtgacggaatcggatatagacgtagatttggtagttgggcgataggtttcggagtattttcgggcgtcgcgggatttttcgtcgataggagggcggttgtcgagtttgtgatattcgcggagattagtagatttcgggtgtggaggacgtcgtaggaagggaattgcgtggttgggtttggttataaaaagcggagggtatttattcgagcggatttcggtttcggagaattcgttttcgggttaataaaaaacgtcgcgcgaggggcggggttcgtacgtgtagggaggggaggtagagaaaaaggcggggtcgggtcggggcggggtttcgggtaggggcggggagtttatcgatttttcgttttcgttgcgcgcgtttttggttttgttagtgttttcgtcggttgaaagcgcgtgtttgcgtcgggttttgttggagtgcgttcggtgtgtcgtgggttcgcgttgtttttatttaattttttgttaggtaagaggcgcgtgaggtttttgtgtcgggggcggtgttgttttcgagtcggcgcgcggcggggacgcgagttcgtaggtgttggcgggagcgagagtcgggtggggattttcgcgagttcgtatttcgtttttgggtagtagttttttcggttttatacggcgtgacgcgcgttcgggtttcgcgttcgcgtcgaggtagaggcgtagtaggggtcgggtttagggttggaggggtcgggatcgggcggggtgtcgttttggatatcgcgtcggtagttg

SEQ ID NO: 1984 - DNA, 936 bp, Artificial Sequence
  chemically treated genomic DNA (Homo sapiens) CpG-island No: 1984
caactaccgacgcgatatccaaaacgacaccccgcccgatcccgacccctccaaccctaaacccgacccctactacgcctctacctcgacgcgaacgcgaaacccgaacgcgcgtcacgccgtataaaaccgaaaaaactactacccaaaaacgaaatacgaactcgcgaaaatccccacccgactctcgctcccgccaacacctacgaactcgcgtccccgccgcgcgccgactcgaaaacaacaccgcccccgacacaaaaacctcacgcgcctcttacctaacaaaaaattaaataaaaacaacgcgaacccacgacacaccgaacgcactccaacaaaacccgacgcaaacacgcgctttcaaccgacgaaaacactaacaaaaccaaaaacgcgcgcaacgaaaacgaaaaatcgataaactccccgcccctacccgaaaccccgccccgacccgaccccgcctttttctctacctcccctccctacacgtacgaaccccgcccctcgcgcgacgttttttattaacccgaaaacgaattctccgaaaccgaaatccgctcgaataaataccctccgctttttataaccaaacccaaccacgcaattcccttcctacgacgtcctccacacccgaaatctactaatctccgcgaatatcacaaactcgacaaccgccctcctatcgacgaaaaatcccgcgacgcccgaaaatactccgaaacctatcgcccaactaccaaatctacgtctatatccgattccgtcactaaaatcgcccctatccgacccttccaccctaattctcttcaccgtccgcccatcctatcgcgcgcgacctcaaatcccgattcgacatataacttatcttccatcgtccccaccctcgcccctcttaacccctcaaaacaaccctaaaattcgacaaacgcc

SEQ ID NO: 1985 - DNA, 567 bp, Artificial Sequence
  chemically treated genomic DNA (Homo sapiens) CpG-island No: 1985
cgttcggggtttcggcgtattttacgtttttgcgttcgcggtttcgtttcgggtttttcgtggggttttaatgatataagtaatttttttcgcgtatttttcgtttcgttttggtacggtttgttcggcgttcgacgttttatttttttttttttgtttttaggttggtttagttttcgtttatattggggtggtgtttagtcggcgttagatcgattttcgatttcggagaggtagcgcggtttttttgggtgttttcgttttttttttttttgtttttttagttttttcggttttttcgttcgtcgcgggaattcgagattttagtgtatgttttatttttgatttcgttcgcgatatgtttatttcggttcggcggcgttttatgcgggattttaagaggtaaatcgaggggacggtcgaggtcgggggttgcgagttggggtatagggcgggtttcgaggcgcgtcgggcggggagggttggggagcggtcgggagcgggcgttagtgtcggtttagggggatttttgtttgttttttcgaaggttgtaggaggattttttag

SEQ ID NO: 1986 - DNA, 567 bp, Artificial Sequence
  chemically treated genomic DNA (Homo sapiens) CpG-island No: 1986
ctaaaaaatcctcctacaaccttcgaaaaaacaaacaaaaatccccctaaaccgacactaacgcccgctcccgaccgctccccaaccctccccgcccgacgcgcctcgaaacccgccctataccccaactcgcaacccccgacctcgaccgtcccctcgatttacctcttaaaatcccgcataaaacgccgccgaaccgaaataaacatatcgcgaacgaaatcaaaaataaaacatacactaaaatctcgaattcccgcgacgaacgaaaaaaccgaaaaaactaaaaaaacaaaaaaaaaaaaaacgaaaacacccaaaaaaaccgcgctacctctccgaaatcgaaaatcgatctaacgccgactaaacaccaccccaatataaacgaaaactaaaccaacctaaaaacaaaaaaaaaaaaataaaacgtcgaacgccgaacaaaccgtaccaaaacgaaacgaaaaatacgcgaaaaaaattacttatatcattaaaaccccacgaaaaacccgaaacgaaaccgcgaacgcaaaaacgtaaaatacgccgaaaccccgaacg

SEQ ID NO: 1987 - DNA, 567 bp, Artificial Sequence
  chemically treated genomic DNA (Homo sapiens) CpG-island No: 1987
ttggaggatttttttgtaattttcgggaagatagataggggtttttttaggtcggtattggcgttcgttttcggtcgttttttagtttttttcgttcggcgcgtttcgggattcgttttgtgttttagttcgtaattttcggtttcggtcgttttttcggtttattttttgaagtttcgtatgaggcgtcgtcgagtcggggtggatatgtcgcgagcggggttaggggtggggtatatattggggtttcgggttttcgcggcgggcgaggaggtcgaagaggttggagaagtaggagaaggggaggcggaagtatttagaggaatcgcgttgttttttcgaagtcgagggtcggtttggcgtcggttaagtattattttagtgtagacgggggttgaattaatttgagagtagagagaggggggtggaacgtcgagcgtcggataggtcgtattaagacggggcggggggtgcgcgaggaaagttgtttatgttattaaagttttacgggaggttcggggcggggtcgcgagcgtagaggcgtagggtacgtcggagtttcgggcg

SEQ ID NO: 1988 - DNA, 567 bp, Artificial Sequence
  chemically treated genomic DNA (Homo sapiens) CpG-island No: 1988
cgcccgaaactccgacgtaccctacgcctctacgctcgcgaccccgccccgaacctcccgtaaaactttaataacataaacaactttcctcgcgcaccccccgccccgtcttaatacgacctatccgacgctcgacgttccacccccctctctctactctcaaattaattcaacccccgtctacactaaaataatacttaaccgacgccaaaccgaccctcgacttcgaaaaaacaacgcgattcctctaaatacttccgcctccccttctcctacttctccaacctcttcgacctcctcgcccgccgcgaaaacccgaaaccccaatatataccccacccctaaccccgctcgcgacatatccaccccgactcgacgacgcctcatacgaaacttcaaaaaataaaccgaaaaaacgaccgaaaccgaaaattacgaactaaaacacaaaacgaatcccgaaacgcgccgaacgaaaaaaactaaaaaacgaccgaaaacgaacgccaataccgacctaaaaaaacccctatctatcttcccgaaaattacaaaaaaatcctccaa

SEQ ID NO: 1989 - DNA, 1013 bp, Artificial Sequence
  chemically treated genomic DNA (Homo sapiens) CpG-island No: 1989
ttattatcgatttttttagcgtcgtttttaattcgattttttattatcgattttttattttcgtttttaattcgatatttatattttttttatttgtagtttaggaagacgtggttggtttaggcggcggagagcgcgaggagttggtcgagggtagtttcgggatagttgtgtaggtgtcgatagatgaagttgcgtcgtagagtttattgttagttattttcgtggttatagcgttattgttttagtattggttcgggcgggggcggcgggaggggcggtagcggcggcggcgggagggggggtagcggcggcgcgataggaagtcgttttttaatagtagacgttttttagttatttttttcgtttttaagtagggattttagggacgaagtcgattacggatcgcgagttaggtagttagtaagcgggcggaaacggggggtcggtgggaggggtcgggtaaggaggggcgcgttgaggggagaagattaattttcggggggattggagtgtgtgcgtgggggttatcgttaggaggaaaagaggagtacgagttcgcgtttcgatattgggatgtacgttttttatatttttttaattcgtggaggagtagaagggttttcgtcgtatttacgcgcgagtcggggaggtcgagttaggtttcgtatttttacggattcgtagatttacgtattgcgcggagagcgataaaagattttagtacgttttgttttttttttttaggttttagtttatttattcgcgtgtcgttcggggttgtgaggttagtgcgtttgcgtcgcggttgttttttaatttttaaatttcgtcgtagaatttcgcgcgacgtatttttttttttttagtgacgattacgggtttttgacgtattacggtgataagcggagggcggggattttagaaagggaatttaggaaggttttttgaggttcgagaatatggttagaaggtgtttttagatgaatgttggtagtttacggttcgtttga

SEQ ID NO: 1990 - DNA, 1013 bp, Artificial Sequence
  chemically treated genomic DNA (Homo sapiens) CpG-island No: 1990
tcaaacgaaccgtaaactaccaacattcatctaaaaacaccttctaaccatattctcgaacctcaaaaaaccttcctaaattccctttctaaaatccccgccctccgcttatcaccgtaatacgtcaaaaacccgtaatcgtcactaaaaaaaaaaaaatacgtcgcgcgaaattctacgacgaaatttaaaaattaaaaaacaaccgcgacgcaaacgcactaacctcacaaccccgaacgacacgcgaataaataaactaaaacctaaaaaaaaaaaacaaaacgtactaaaatcttttatcgctctccgcgcaatacgtaaatctacgaatccgtaaaaatacgaaacctaactcgacctccccgactcgcgcgtaaatacgacgaaaacccttctactcctccacgaattaaaaaaatataaaaaacgtacatcccaatatcgaaacgcgaactcgtactcctcttttcctcctaacgataacccccacgcacacactccaatccccccgaaaattaatcttctcccctcaacgcgcccctccttacccgacccctcccaccgaccccccgtttccgcccgcttactaactacctaactcgcgatccgtaatcgacttcgtccctaaaatccctacttaaaaacgaaaaaaataactaaaaaacgtctactattaaaaaacgacttcctatcgcgccgccgctaccccccctcccgccgccgccgctaccgcccctcccgccgcccccgcccgaaccaatactaaaacaataacgctataaccacgaaaataactaacaataaactctacgacgcaacttcatctatcgacacctacacaactatcccgaaactaccctcgaccaactcctcgcgctctccgccgcctaaaccaaccacgtcttcctaaactacaaataaaaaaaatataaatatcgaattaaaaacgaaaataaaaaatcgataataaaaaatcgaattaaaaacgacgctaaaaaaatcgataataa

SEQ ID NO: 1991 - DNA, 1013 bp, Artificial Sequence
  chemically treated genomic DNA (Homo sapiens) CpG-island No: 1991
ttagacgagtcgtgggttattaatatttatttgagggtattttttaattatattttcgaattttagagaatttttttaaattttttttttggagttttcgtttttcgtttgttatcgtagtgcgttaaaggttcgtagtcgttattggagggaaaaaagtacgtcgcgcgagattttgcgacgggatttggaagttagggaatagtcgcggcgtaagcgtattggttttataatttcggacggtacgcgggtaggtaggttagaatttagaggaggggagtagagcgtgttggggttttttatcgtttttcgcgtagtgcgtgggtttgcggattcgtggaggtgcggagtttgattcggttttttcggttcgcgcgtgagtgcggcggaagtttttttgtttttttacgagttagaggagtgtaggggacgtgtattttagtgtcgggacgcgagttcgtgttttttttttttttttaacggtggtttttacgtatatattttagttttttcgagagttgattttttttttttagcgcgtttttttttattcggttttttttatcggtttttcgttttcgttcgtttgttagttgtttagttcgcggttcgtagtcggtttcgtttttggggtttttgtttgggggcggagaagatggttggaggacgtttgttgttggggggcgattttttgtcgcgtcgtcgttgttttttttttcgtcgtcgtcgttgtcgtttttttcgtcgttttcgttcgagttagtgttggagtagtggcgttatagttacgaaagtgattggtagtgggttttgcggcgtagttttatttgtcggtatttgtatagttatttcggggttgttttcgattagtttttcgcgtttttcgtcgtttggattaattacgtttttttgggttgtaggtgaggaaggtgtgggtgtcgggttagggacgggggtgagagatcggtgatgggggatcgggttagggacggcgttggagggatcgatgatgg

SEQ ID NO: 1992 - DNA, 1013 bp, Artificial Sequence
  chemically treated genomic DNA (Homo sapiens) CpG-island No: 1992
ccatcatcgatccctccaacgccgtccctaacccgatcccccatcaccgatctctcacccccgtccctaacccgacacccacaccttcctcacctacaacccaaaaaaacgtaattaatccaaacgacgaaaaacgcgaaaaactaatcgaaaacaaccccgaaataactatacaaataccgacaaataaaactacgccgcaaaacccactaccaatcactttcgtaactataacgccactactccaacactaactcgaacgaaaacgacgaaaaaaacgacaacgacgacgacgaaaaaaaaaacaacgacgacgcgacaaaaaatcgccccccaacaacaaacgtcctccaaccatcttctccgcccccaaacaaaaaccccaaaaacgaaaccgactacgaaccgcgaactaaacaactaacaaacgaacgaaaacgaaaaaccgataaaaaaaaccgaataaaaaaaaacgcgctaaaaaaaaaaaatcaactctcgaaaaaactaaaatatatacgtaaaaaccaccgttaaaaaaaaaaaaaaaacacgaactcgcgtcccgacactaaaatacacgtcccctacactcctctaactcgtaaaaaaacaaaaaaacttccgccgcactcacgcgcgaaccgaaaaaaccgaatcaaactccgcacctccacgaatccgcaaacccacgcactacgcgaaaaacgataaaaaaccccaacacgctctactcccctcctctaaattctaacctacctacccgcgtaccgtccgaaattataaaaccaatacgcttacgccgcgactattccctaacttccaaatcccgtcgcaaaatctcgcgcgacgtacttttttccctccaataacgactacgaacctttaacgcactacgataacaaacgaaaaacgaaaactccaaaaaaaaaatttaaaaaaattctctaaaattcgaaaatataattaaaaaataccctcaaataaatattaataacccacgactcgtctaa

SEQ ID NO: 1993 - DNA, 1107 bp, Artificial Sequence
  chemically treated genomic DNA (Homo sapiens) CpG-island No: 1993
gtattcgttgttgcgttttcgcgcgtaattatgcgcgcgttatagatattcgcgcgttttattcgatatatttgtatatatatacgtaatatttacgcgcgcgtcgtagtatttacgcgcgttgttcgtacgttcgttttcgttttcgcgtatgtttttcgcgtatagtaacgtacgttcgcgtagtttatttttaatacgtaaagcgttttgcgtagttgcgtaagcgttggtaatagcgcgcgcgtataatatagcgcgttcgtttatgttagcgcgcgcgtattgcgcggttagtttagcgttgtatacgcgtattcgttagcgcgtaaatttgatacgttttttttttttcgcgtcgcgttgcgtagcgttgcggcgtttatatagcgtagtttatattattgcgcgtaagcgcgttaaagcgcgtaggcgcgcgtcgcgtatttttagtagcgtttgtagcgcgcggcgtaaaggcgcgcgcgcgaatgcgtttgcgcgtttagtatatagcgtaagcgcgtaagtaaacgcgcgtataagcgtacgcgcgcgcgcgtcgtttagcgcgcgtttttgtttaatagtttgtcgagcgcgttttgtagggtttgtcgcggttttataggcgtacgcgatgtagcgcgcgtcgtcgtcgggttttaagattgtcgcgtcgcgttgaattagcggcgttcgttttgaagtttaatagttcgtttgcgttattttaagcggttgcgattcgttatttaacgcgtttttgtttttcgtttttttgtgtgtatcgtggagcgaagtgggtcgaggtttataaattaggggtagcgcgtttaagtttataagtttcgatttttttacgtcggacgttaagcgtgtcgatcgggtagtcgattgggtggcggtcgtttcgtttgtgtttttgacgtggagttcgttcggcgattcgggtcgtgtataaaagttacgtgcgtttcgttatgcgaggcgtcgcgatttttaggcggttttgcgtgggtttttttcggtttggtttttcgtatgtatgttagattaaagttttgacgttttgcgtttggttgttgacgtatgttatgttgttta

SEQ ID NO: 1994 - DNA, 1107 bp, Artificial Sequence
  chemically treated genomic DNA (Homo sapiens) CpG-island No: 1994
taaacaacataacatacgtcaacaaccaaacgcaaaacgtcaaaactttaatctaacatacatacgaaaaaccaaaccgaaaaaaacccacgcaaaaccgcctaaaaatcgcgacgcctcgcataacgaaacgcacgtaacttttatacacgacccgaatcgccgaacgaactccacgtcaaaaacacaaacgaaacgaccgccacccaatcgactacccgatcgacacgcttaacgtccgacgtaaaaaaatcgaaacttataaacttaaacgcgctacccctaatttataaacctcgacccacttcgctccacgatacacacaaaaaaacgaaaaacaaaaacgcgttaaataacgaatcgcaaccgcttaaaataacgcaaacgaactattaaacttcaaaacgaacgccgctaattcaacgcgacgcgacaatcttaaaacccgacgacgacgcgcgctacatcgcgtacgcctataaaaccgcgacaaaccctacaaaacgcgctcgacaaactattaaacaaaaacgcgcgctaaacgacgcgcgcgcgcgtacgcttatacgcgcgtttacttacgcgcttacgctatatactaaacgcgcaaacgcattcgcgcgcgcgcctttacgccgcgcgctacaaacgctactaaaaatacgcgacgcgcgcctacgcgctttaacgcgcttacgcgcaataatataaactacgctatataaacgccgcaacgctacgcaacgcgacgcgaaaaaaaaaaaacgtatcaaatttacgcgctaacgaatacgcgtatacaacgctaaactaaccgcgcaatacgcgcgcgctaacataaacgaacgcgctatattatacgcgcgcgctattaccaacgcttacgcaactacgcaaaacgctttacgtattaaaaataaactacgcgaacgtacgttactatacgcgaaaaacatacgcgaaaacgaaaacgaacgtacgaacaacgcgcgtaaatactacgacgcgcgcgtaaatattacgtatatatatacaaatatatcgaataaaacgcgcgaatatctataacgcgcgcataattacgcgcgaaaacgcaacaacgaatac

SEQ ID NO: 1995 - DNA, 1107 bp, Artificial Sequence
  chemically treated genomic DNA (Homo sapiens) CpG-island No: 1995
tgggtagtatggtatgcgttaatagttaggcgtaaagcgttagggttttggtttagtatatatgcggaagattaagtcggggggggtttacgtaaggtcgtttgggaatcgcggcgtttcgtatagcgagacgtacgtggtttttgtgtacggttcgggtcgtcgggcgagttttacgttaggggtataggcgaggcggtcgttatttagtcggttgttcggtcgatacgtttggcgttcggcgtaaggaagtcggggtttgtaaatttgggcgcgttgtttttggtttgtgagtttcggtttatttcgttttacggtgtatatagaggagcggaggataggagcgcgttgagtaacgggtcgtagtcgtttggaataacgtagacgggttattaagttttagggcgggcgtcgttggtttagcgcggcgcggtaattttaaagttcggcgacggcgcgcgttgtatcgcgtgcgtttataaggtcgcggtaagttttgtaaggcgcgttcggtaagttattgagtaggagcgcgcgttaggcggcgcgcgcgcgcgtgcgtttgtgcgcgcgtttgtttgcgcgtttgcgttatatgttgggcgcgtaagcgtattcgcgcgcgcgtttttgcgtcgcgcgttgtaagcgttgttaaagatgcgcggcgcgcgtttgcgcgttttagcgcgtttgcgcgtagtagtgtaagttgcgttgtgtgagcgtcgtagcgttgcgtagcgcggcgcgagagagagagagcgtgttaagtttgcgcgttgacgagtgcgcgtgtgtagcgttaggttggtcgcgtagtgcgcgcgcgttgatatgagcgagcgcgttgtgttgtgcgcgcgcgttgttgttagcgtttgcgtagttgcgtagagcgttttgcgtgttgagagtgagttgcgcgagcgtgcgttgttgtgcgcgagaagtatgcgcgagagcgagagcgagcgtgcgagtagcgcgcgtgagtgttgcggcgcgcgcgtgagtgttgcgtgtgtgtgtgtaagtgtgtcgagtgaagcgcgcgagtgtttgtagcgcgcgtataattgcgcgcgagagcgtagtagcgagtgt

SEQ ID NO: 1996 - DNA, 1107 bp, Artificial Sequence
  chemically treated genomic DNA (Homo sapiens) CpG-island No: 1996
acactcgctactacgctctcgcgcgcaattatacgcgcgctacaaacactcgcgcgcttcactcgacacacttacacacacacacgcaacactcacgcgcgcgccgcaacactcacgcgcgctactcgcacgctcgctctcgctctcgcgcatacttctcgcgcacaacaacgcacgctcgcgcaactcactctcaacacgcaaaacgctctacgcaactacgcaaacgctaacaacaacgcgcgcgcacaacacaacgcgctcgctcatatcaacgcgcgcgcactacgcgaccaacctaacgctacacacgcgcactcgtcaacgcgcaaacttaacacgctctctctctctcgcgccgcgctacgcaacgctacgacgctcacacaacgcaacttacactactacgcgcaaacgcgctaaaacgcgcaaacgcgcgccgcgcatctttaacaacgcttacaacgcgcgacgcaaaaacgcgcgcgcgaatacgcttacgcgcccaacatataacgcaaacgcgcaaacaaacgcgcgcacaaacgcacgcgcgcgcgcgccgcctaacgcgcgctcctactcaataacttaccgaacgcgccttacaaaacttaccgcgaccttataaacgcacgcgatacaacgcgcgccgtcgccgaactttaaaattaccgcgccgcgctaaaccaacgacgcccgccctaaaacttaataacccgtctacgttattccaaacgactacgacccgttactcaacgcgctcctatcctccgctcctctatatacaccgtaaaacgaaataaaccgaaactcacaaaccaaaaacaacgcgcccaaatttacaaaccccgacttccttacgccgaacgccaaacgtatcgaccgaacaaccgactaaataacgaccgcctcgcctatacccctaacgtaaaactcgcccgacgacccgaaccgtacacaaaaaccacgtacgtctcgctatacgaaacgccgcgattcccaaacgaccttacgtaaaccccccccgacttaatcttccgcatatatactaaaccaaaaccctaacgctttacgcctaactattaacgcataccatactaccca

SEQ ID NO: 1997 - DNA, 1218 bp, Artificial Sequence
  chemically treated genomic DNA (Homo sapiens) CpG-island No: 1997
ttatgtcgcggtttttgtttgtttttttatgttcgtgagcggaggcgcgtcggatttcgcgtcgagcgttttgtttgcgtgagttacgttttagttaggtcgtttcgtttcgtagtgtcgtttttatgtattttgttgatcgtcgcgacgttcgtcgttcggttacgtcgcgcgtattgtttatagtcgggttcgtggtatttgtacggagttggtttcgtcggtacgcgttgattatattacgttcgttatcgtgtcgtcgcggtagtcggacgtttcggtttcggacggtggtcgagttgttagatgcggttgtaggttatcgttgttgcgttcgcgttcgttttttttttttacgtttattagtcgtgtttagtttcgtttaggatgttggtagtagttgtttttgagttttgttcgtcgcgttagtcgtgtttttcgttaatgtcggtaggttggtttttgcgatcgcgtggtcgtttagttcgaattatcgtttcgtattgcgtatcgtcgtatttttgttgttcgttcgtttttattcggatcgatttagcgttacgacggtcgagttgttacgtttatttatcgtattgtagtcggattcgattcgttcggttcgggttggtcggtgttagtatgcgttggcgttttatcgatttatgtttggtgtcgtagcgtcgtcgagttatgtacgtcggcgacgtttggttcgatcgagcgtcggttggttcgagttcggttggcggtagtcgattcgatggtcgttatttttgttatcggggtttatttgatcgtttatggattatcgtcgtcgagttcgtatagtcgtttatttttttcgtttcgtagcgcgtagatttttcgaggtcgtaggtcggcgaggtttttggtttcgagttgtatttaggttattcggtagttcgggcgtcgattcgatcgttgagtttcggggtttcgagtagttagcggttggtttcgtacggtagtttgcgatttggaggtcgtagtcgggcgtttttcgattttgttgtatcggtggtagtcgttggtttgttcggtttagttggttgttcgtgcgatgttagtttgcgggatcgtgttcgtttaggttaggttcggatcgagcgagcgtttcgtcgttcgttttcggttgtcgttcgagcgatcgttatcgggtacgttagtcgttcgttttttttcgttcggtagtcgtcg

SEQ ID NO: 1998 - DNA, 1218 bp, Artificial Sequence
  chemically treated genomic DNA (Homo sapiens) CpG-island No: 1998
cgacgactaccgaacgaaaaaaaacgaacgactaacgtacccgataacgatcgctcgaacgacaaccgaaaacgaacgacgaaacgctcgctcgatccgaacctaacctaaacgaacacgatcccgcaaactaacatcgcacgaacaaccaactaaaccgaacaaaccaacgactaccaccgatacaacaaaatcgaaaaacgcccgactacgacctccaaatcgcaaactaccgtacgaaaccaaccgctaactactcgaaaccccgaaactcaacgatcgaatcgacgcccgaactaccgaataacctaaatacaactcgaaaccaaaaacctcgccgacctacgacctcgaaaaatctacgcgctacgaaacgaaaaaaataaacgactatacgaactcgacgacgataatccataaacgatcaaataaaccccgataacaaaaataacgaccatcgaatcgactaccgccaaccgaactcgaaccaaccgacgctcgatcgaaccaaacgtcgccgacgtacataactcgacgacgctacgacaccaaacataaatcgataaaacgccaacgcatactaacaccgaccaacccgaaccgaacgaatcgaatccgactacaatacgataaataaacgtaacaactcgaccgtcgtaacgctaaatcgatccgaataaaaacgaacgaacaacaaaaatacgacgatacgcaatacgaaacgataattcgaactaaacgaccacgcgatcgcaaaaaccaacctaccgacattaacgaaaaacacgactaacgcgacgaacaaaactcaaaaacaactactaccaacatcctaaacgaaactaaacacgactaataaacgtaaaaaaaaaaaacgaacgcgaacgcaacaacgataacctacaaccgcatctaacaactcgaccaccgtccgaaaccgaaacgtccgactaccgcgacgacacgataacgaacgtaatataatcaacgcgtaccgacgaaaccaactccgtacaaataccacgaacccgactataaacaatacgcgcgacgtaaccgaacgacgaacgtcgcgacgatcaacaaaatacataaaaacgacactacgaaacgaaacgacctaactaaaacgtaactcacgcaaacaaaacgctcgacgcgaaatccgacgcgcctccgctcacgaacataaaaaaacaaacaaaaaccgcgacataa

SEQ ID NO: 1999 - DNA, 1218 bp, Artificial Sequence
  chemically treated genomic DNA (Homo sapiens) CpG-island No: 1999
cggcggttgtcgaacgggaagggacgggcggttggcgtgttcggtggcgatcgttcgagcggtagtcgggagcgggcgacgggacgttcgttcggttcgaatttagtttgggcggatacggtttcgtaggttggtatcgtacgggtagttagttggatcgggtaggttagcggttgttatcgatgtagtagggtcgagggacgttcggttgcggtttttaggtcgtaggttgtcgtgcggagttagtcgttggttgttcggagtttcggagtttaacggtcgggtcggcgttcgggttgtcgagtagtttaggtatagttcggaattaggagtttcgtcggtttgcggtttcggaaggtttgcgcgttgcgagacgagggggataggcgattgtgcgggttcgacggcggtggtttatgggcgattaggtgggtttcggtggtaagggtggcggttatcgggtcggttgtcgttaatcgagttcgagttagtcggcgttcggtcgagttaggcgtcgtcggcgtgtatggttcggcgacgttgcggtattaggtatagatcggtgggacgttagcgtatgttagtatcggttagttcgagtcggacggatcgggttcgattgtagtgcgatgaatgagcgtggtagttcggtcgtcgtggcgttggatcggttcggatggagacggacgagtagtaagggtacgacggtgcgtagtgcggggcgatggttcgggttgggcggttacgcggtcgtagggattagtttgtcggtattgacggagagtacggttgacgcggcgagtaggatttaagggtagttgttgttagtattttgagcggggttaggtacggttgatgggcgtagaggaggagggcgggcgcggacgtagtagcgatggtttatagtcgtatttggtagttcgattatcgttcggagtcgaagcgttcggttgtcgcggcgatacgatagcgggcgtgatgtgattagcgcgtgtcggcgagattagtttcgtgtaaatgttacgggttcggttgtagatagtacgcgcgacgtggtcgaacgacggacgtcgcggcgattagtaggatgtatgaggacgatattgcggggcgaagcggtttagttggggcgtgatttacgtaagtaggacgttcggcgcgagattcgacgcgttttcgtttacgaatatggaggggtaggtaggagtcgcggtatag

SEQ ID NO: 2000 - DNA, 1218 bp, Artificial Sequence
  chemically treated genomic DNA (Homo sapiens) CpG-island No: 2000
ctataccgcgactcctacctacccctccatattcgtaaacgaaaacgcgtcgaatctcgcgccgaacgtcctacttacgtaaatcacgccccaactaaaccgcttcgccccgcaatatcgtcctcatacatcctactaatcgccgcgacgtccgtcgttcgaccacgtcgcgcgtactatctacaaccgaacccgtaacatttacacgaaactaatctcgccgacacgcgctaatcacatcacgcccgctatcgtatcgccgcgacaaccgaacgcttcgactccgaacgataatcgaactaccaaatacgactataaaccatcgctactacgtccgcgcccgccctcctcctctacgcccatcaaccgtacctaaccccgctcaaaatactaacaacaactacccttaaatcctactcgccgcgtcaaccgtactctccgtcaataccgacaaactaatccctacgaccgcgtaaccgcccaacccgaaccatcgccccgcactacgcaccgtcgtacccttactactcgtccgtctccatccgaaccgatccaacgccacgacgaccgaactaccacgctcattcatcgcactacaatcgaacccgatccgtccgactcgaactaaccgatactaacatacgctaacgtcccaccgatctatacctaataccgcaacgtcgccgaaccatacacgccgacgacgcctaactcgaccgaacgccgactaactcgaactcgattaacgacaaccgacccgataaccgccacccttaccaccgaaacccacctaatcgcccataaaccaccgccgtcgaacccgcacaatcgcctatccccctcgtctcgcaacgcgcaaaccttccgaaaccgcaaaccgacgaaactcctaattccgaactatacctaaactactcgacaacccgaacgccgacccgaccgttaaactccgaaactccgaacaaccaacgactaactccgcacgacaacctacgacctaaaaaccgcaaccgaacgtccctcgaccctactacatcgataacaaccgctaacctacccgatccaactaactacccgtacgataccaacctacgaaaccgtatccgcccaaactaaattcgaaccgaacgaacgtcccgtcgcccgctcccgactaccgctcgaacgatcgccaccgaacacgccaaccgcccgtcccttcccgttcgacaaccgccg

SEQ ID NO: 2001 - DNA, 535 bp, Artificial Sequence
  chemically treated genomic DNA (Homo sapiens) CpG-island No: 2001
gggcggacgttggcgagcggtcgcggttacgttagcgacggaggaatgcggatcgaggggacgtatcgagcgttggtgtcgttcgcgtgttaggtcgaggttgggcgttgtgcgcgcgcgagcgagacgtttggcggtgcgtggcgcgcgtcgacgttttcgtcgcggttttggacgtgttgacgtaggcggatagatcgacgcgtgcggtgggagcgttgcgaaagcgttcgaacgcgttgttaatagtcgacgttcgacgtaggtttagattatgcgagtattgtagcgcgtggtatgcgggacgcgattggttagtcgtcgggagattttataaggtgcgcgggtagtcgagggtgtttcgtagagagcgtgagaggtttgtttgtgatttgtttcgcgaaggtggtatgttcgtagagtggagtatgtcgcgtcggcggagagtacgtgatttagtgagtatagaggaatttaggtcgttgtatgtttggtatggtatcgtagttttagcgtgagattttagagaaaattt

SEQ ID NO: 2002 - DNA, 535 bp, Artificial Sequence
  chemically treated genomic DNA (Homo sapiens) CpG-island No: 2002
aaattttctctaaaatctcacgctaaaactacgataccataccaaacatacaacgacctaaattcctctatactcactaaatcacgtactctccgccgacgcgacatactccactctacgaacataccaccttcgcgaaacaaatcacaaacaaacctctcacgctctctacgaaacaccctcgactacccgcgcaccttataaaatctcccgacgactaaccaatcgcgtcccgcataccacgcgctacaatactcgcataatctaaacctacgtcgaacgtcgactattaacaacgcgttcgaacgctttcgcaacgctcccaccgcacgcgtcgatctatccgcctacgtcaacacgtccaaaaccgcgacgaaaacgtcgacgcgcgccacgcaccgccaaacgtctcgctcgcgcgcgcacaacgcccaacctcgacctaacacgcgaacgacaccaacgctcgatacgtcccctcgatccgcattcctccgtcgctaacgtaaccgcgaccgctcgccaacgtccgccc

SEQ ID NO: 2003 - DNA, 535 bp, Artificial Sequence
  chemically treated genomic DNA (Homo sapiens) CpG-island No: 2003
gggttttttttggggttttacgttaaggttacgatgttatgttaagtatgtagcgatttaggtttttttgtgtttattgggttacgtatttttcgtcggcgcggtatgttttattttgcgaatatgttattttcgcggagtaagttataaataaattttttacgttttttgcggggtattttcgattgttcgcgtattttgtgagatttttcgacgattggttaatcgcgtttcgtatgttacgcgttgtaatgttcgtatggtttgggtttgcgtcgagcgtcgattgttgatagcgcgttcgagcgttttcgtagcgtttttatcgtacgcgtcggtttgttcgtttgcgttagtacgtttaaaatcgcgacgagagcgtcgacgcgcgttacgtatcgttagacgtttcgttcgcgcgcgtatagcgtttagtttcgatttggtacgcgaacgatattagcgttcgatgcgttttttcgattcgtattttttcgtcgttagcgtggtcgcgatcgttcgttagcgttcgttt

SEQ ID NO: 2004 - DNA, 535 bp, Artificial Sequence
  chemically treated genomic DNA (Homo sapiens) CpG-island No: 2004
aaacgaacgctaacgaacgatcgcgaccacgctaacgacgaaaaaatacgaatcgaaaaaacgcatcgaacgctaatatcgttcgcgtaccaaatcgaaactaaacgctatacgcgcgcgaacgaaacgtctaacgatacgtaacgcgcgtcgacgctctcgtcgcgattttaaacgtactaacgcaaacgaacaaaccgacgcgtacgataaaaacgctacgaaaacgctcgaacgcgctatcaacaatcgacgctcgacgcaaacccaaaccatacgaacattacaacgcgtaacatacgaaacgcgattaaccaatcgtcgaaaaatctcacaaaatacgcgaacaatcgaaaataccccgcaaaaaacgtaaaaaatttatttataacttactccgcgaaaataacatattcgcaaaataaaacataccgcgccgacgaaaaatacgtaacccaataaacacaaaaaaacctaaatcgctacatacttaacataacatcgtaaccttaacgtaaaaccccaaaaaaaaccc

SEQ ID NO: 2005 - DNA, 585 bp, Artificial Sequence
  chemically treated genomic DNA (Homo sapiens) CpG-island No: 2005
agtttcgcgttcgagtttatgaatttcgtgttgcggggtatgaagagtttgaaggcgtcgtttagcgttttggtgttgttagttagcgatagttgcgatcgcgagtatattatttttttttttcgcgtttttaatttagtttcgttttttgttttaaagtcgtcgtttcgggcggtcgtggtcggggcgatcgggcgtcggcgtcgtcgtttttttatattgcgtcgtatcgaaggtcgtttcgggttatttacgttcgtcgggttttattattgtcgtcgtcgttttagttcgcgttggtttcgcggcggcggttgttgttggcgtttttcgttatttttttcgttttcgtcgtcgttttttttttttcgagggcggaggacgcgggcgaatattttgttgttcggtataagatggcggtcggcgtttatttttgggttttgttattggacggcgtttcgtttttttggttttttttttttttttttttttgttttttttcgtcggttgtttttttttaaatgtgttcgttttaggttttttttatcgtagtttcgattttatttattgggtgtttttagaaga

SEQ ID NO: 2006 - DNA, 585 bp, Artificial Sequence
  chemically treated genomic DNA (Homo sapiens) CpG-island No: 2006
tcttctaaaaacacccaataaataaaatcgaaactacgataaaaaaaacctaaaacgaacacatttaaaaaaaaacaaccgacgaaaaaaaacaaaaaaaaaaaaaaaaaaaaaaccaaaaaaacgaaacgccgtccaataacaaaacccaaaaataaacgccgaccgccatcttataccgaacaacaaaatattcgcccgcgtcctccgccctcgaaaaaaaaaaaacgacgacgaaaacgaaaaaaataacgaaaaacgccaacaacaaccgccgccgcgaaaccaacgcgaactaaaacgacgacgacaataataaaacccgacgaacgtaaataacccgaaacgaccttcgatacgacgcaatataaaaaaacgacgacgccgacgcccgatcgccccgaccacgaccgcccgaaacgacgactttaaaacaaaaaacgaaactaaattaaaaacgcgaaaaaaaaaaataatatactcgcgatcgcaactatcgctaactaacaacaccaaaacgctaaacgacgccttcaaactcttcataccccgcaacacgaaattcataaactcgaacgcgaaact

SEQ ID NO: 2007 - DNA, 585 bp, Artificial Sequence
  chemically treated genomic DNA (Homo sapiens) CpG-island No: 2007
ttttttgagagtatttaatgggtggagtcggggttgcggtgggaggggtttgaggcgggtatatttaaagaaaggtagtcggcgaaaagaggtaagagaggagaagaaagagaaattaggggggcgaggcgtcgtttaatgataaagtttaggggtgggcgtcggtcgttattttgtatcgggtagtaggatattcgttcgcgtttttcgttttcggagggggaggggcggcggcggaggcgagaaaagtagcgagagacgttagtagtagtcgtcgtcgcggagttaacgcggattgggacggcggcggtagtagtgggattcggcgagcgtgagtggttcggagcggttttcgatgcggcgtagtatgaagaggcggcggcgtcggcgttcggtcgtttcggttacggtcgttcggggcggcgattttagggtagaagacggggttgggttggaggcgcgggaggagaaggtggtgtattcgcggtcgtaattgtcgttggttgatagtattaaggcgttgggcgacgtttttaagttttttatgtttcgtagtacggagtttatgagttcggacgcggagtt

SEQ ID NO: 2008 - DNA, 585 bp, Artificial Sequence
  chemically treated genomic DNA (Homo sapiens) CpG-island No: 2008
aactccgcgtccgaactcataaactccgtactacgaaacataaaaaacttaaaaacgtcgcccaacgccttaatactatcaaccaacgacaattacgaccgcgaatacaccaccttctcctcccgcgcctccaacccaaccccgtcttctaccctaaaatcgccgccccgaacgaccgtaaccgaaacgaccgaacgccgacgccgccgcctcttcatactacgccgcatcgaaaaccgctccgaaccactcacgctcgccgaatcccactactaccgccgccgtcccaatccgcgttaactccgcgacgacgactactactaacgtctctcgctacttttctcgcctccgccgccgcccctccccctccgaaaacgaaaaacgcgaacgaatatcctactacccgatacaaaataacgaccgacgcccacccctaaactttatcattaaacgacgcctcgcccccctaatttctctttcttctcctctcttacctcttttcgccgactacctttctttaaatatacccgcctcaaacccctcccaccgcaaccccgactccacccattaaatactctcaaaaaa

SEQ ID NO: 2009 - DNA, 693 bp, Artificial Sequence
  chemically treated genomic DNA (Homo sapiens) CpG-island No: 2009
ggtgcgcgcgtagcgagtttttttttcgcgtttttaaagttcgggggtatttcgattttttttacgcgtttggtttcggcgcggtttttattcgagcgggggtcgaaggtgattacgaatacggttattatttggtttttttttacgtcgtttagttttaggcgttcgggttgtagtagtattttcggggcggtcggtttttcgggttttcgttttcggggcggtttcgcggtcggtcgggcgttttcgtcgtcgtttcggttttagtttttcgtttgcggttgcggggtttgcggtagggagacggcggggttttcggtttagcgtagtagcggcgtcgcgtttttttgttttattatggttaggcgaggcggagtcgcgggcgcgaggggcggggcgggcgggttgcgggaatttttttcgtttggtcgcgttaacgtcgtcgtcgttcgtcgggtttggcgttgttcggggtttcgtcgcggaggcgttttttttacggagttagagtaggcgttcgcggagtcggtttcgggaatcgcgagtttattcggaggcgttcgtgtgtacgttcgtgtgtgggacgcgtgcggtcggaacgtttatttttgcgtttatatatttgtgtgcgggtggaggtgtttttttatttagggtttcgtggtatagttattattgtgagtttttatgtta

SEQ ID NO: 2010 - DNA, 693 bp, Artificial Sequence
  chemically treated genomic DNA (Homo sapiens) CpG-island No: 2010
taacataaaaactcacaataataactataccacgaaaccctaaataaaaaaacacctccacccgcacacaaatatataaacgcaaaaataaacgttccgaccgcacgcgtcccacacacgaacgtacacacgaacgcctccgaataaactcgcgattcccgaaaccgactccgcgaacgcctactctaactccgtaaaaaaaacgcctccgcgacgaaaccccgaacaacgccaaacccgacgaacgacgacgacgttaacgcgaccaaacgaaaaaaattcccgcaacccgcccgccccgcccctcgcgcccgcgactccgcctcgcctaaccataataaaacaaaaaaacgcgacgccgctactacgctaaaccgaaaaccccgccgtctccctaccgcaaaccccgcaaccgcaaacgaaaaactaaaaccgaaacgacgacgaaaacgcccgaccgaccgcgaaaccgccccgaaaacgaaaacccgaaaaaccgaccgccccgaaaatactactacaacccgaacgcctaaaactaaacgacgtaaaaaaaaaccaaataataaccgtattcgtaatcaccttcgacccccgctcgaataaaaaccgcgccgaaaccaaacgcgtaaaaaaaatcgaaatacccccgaactttaaaaacgcgaaaaaaaaactcgctacgcgcgcacc

SEQ ID NO: 2011 - DNA, 693 bp, Artificial Sequence
  chemically treated genomic DNA (Homo sapiens) CpG-island No: 2011
tgatataaaaatttatagtggtagttatattacggaattttaggtgagaaggtatttttattcgtatataggtgtatggacgtaaggatgaacgtttcggtcgtacgcgttttatatacggacgtgtatacgggcgttttcgaataggttcgcggttttcgaagtcggtttcgcggacgtttgttttggtttcgtgggaaaggcgttttcgcggcggggtttcgggtagcgttagattcggcgggcggcggcggcgttggcgcggttaggcgaggggggttttcgtagttcgttcgtttcgtttttcgcgttcgcggtttcgtttcgtttagttatggtggagtagggagacgcggcgtcgttgttgcgttgggtcgagggtttcgtcgtttttttgtcgtaggtttcgtagtcgtaggcgggaggttggggtcggggcggcggcgggggcgttcggtcggtcgcggagtcgtttcggaggcgggagttcgaggagtcggtcgtttcggaggtgttgttgtagttcgggcgtttggagttgggcgacgtggaggaggattaggtggtggtcgtgttcgtggttattttcgattttcgttcgggtgagggtcgcgtcggggttaggcgcgtggggagggtcggggtgttttcgagttttgggggcgcgggggaggggttcgttgcgcgcgtatt

SEQ ID NO: 2012 - DNA, 693 bp, Artificial Sequence
  chemically treated genomic DNA (Homo sapiens) CpG-island No: 2012
aatacgcgcgcaacgaacccctcccccgcgcccccaaaactcgaaaacaccccgaccctccccacgcgcctaaccccgacgcgaccctcacccgaacgaaaatcgaaaataaccacgaacacgaccaccacctaatcctcctccacgtcgcccaactccaaacgcccgaactacaacaacacctccgaaacgaccgactcctcgaactcccgcctccgaaacgactccgcgaccgaccgaacgcccccgccgccgccccgaccccaacctcccgcctacgactacgaaacctacgacaaaaaaacgacgaaaccctcgacccaacgcaacaacgacgccgcgtctccctactccaccataactaaacgaaacgaaaccgcgaacgcgaaaaacgaaacgaacgaactacgaaaacccccctcgcctaaccgcgccaacgccgccgccgcccgccgaatctaacgctacccgaaaccccgccgcgaaaacgcctttcccacgaaaccaaaacaaacgtccgcgaaaccgacttcgaaaaccgcgaacctattcgaaaacgcccgtatacacgtccgtatataaaacgcgtacgaccgaaacgttcatccttacgtccatacacctatatacgaataaaaataccttctcacctaaaattccgtaatataactaccactataaatttttatatca

SEQ ID NO: 2013 - DNA, 615 bp, Artificial Sequence
  chemically treated genomic DNA (Homo sapiens) CpG-island No: 2013
tgcgttttttatttttagtttcgaaggtgcgcgcggaggtttttcgtttcggcgggtttggttttggcgtttggtttatttcgttttatcgttattcgtcgtgttcggtttcggtttcggtttaggtgcgggtcgtcggtcgggaggagttggtgtcggagttttttaggttagggcgttgtagaatcgaaagtagtagggggcgggggagaggaaagagggggcgggagcggggacgcgagggcgaggcggttacgcggggtcgggaatgttcgcggtgcggggttttagagtcgttcggtggtcgtgttcgggcgatggtttttcgtttggtcgtcgatttcgatttcgggaaggacgtgttttcgtggttgcgggcgtagcgggtagtgtcggaggttagcggggtcggaagcggcggcgtaggtgcgggaggcgcgttgcggagaggggtgggggcggggagtgggagttttttatatttttcggatttcgattcggtggggagtaattcggggcgtcgtcgttttgagaaggttggtgcgagggcgtcgtttttttttttagagggttgttttggttttgttatttatatttagttacggcggaaggttt

SEQ ID NO: 2014 - DNA, 615 bp, Artificial Sequence
  chemically treated genomic DNA (Homo sapiens) CpG-island No: 2014
aaaccttccgccgtaactaaatataaataacaaaaccaaaacaaccctctaaaaaaaaaaacgacgccctcgcaccaaccttctcaaaacgacgacgccccgaattactccccaccgaatcgaaatccgaaaaatataaaaaactcccactccccgcccccacccctctccgcaacgcgcctcccgcacctacgccgccgcttccgaccccgctaacctccgacactacccgctacgcccgcaaccacgaaaacacgtccttcccgaaatcgaaatcgacgaccaaacgaaaaaccatcgcccgaacacgaccaccgaacgactctaaaaccccgcaccgcgaacattcccgaccccgcgtaaccgcctcgccctcgcgtccccgctcccgccccctctttcctctcccccgccccctactactttcgattctacaacgccctaacctaaaaaactccgacaccaactcctcccgaccgacgacccgcacctaaaccgaaaccgaaaccgaacacgacgaataacgataaaacgaaataaaccaaacgccaaaaccaaacccgccgaaacgaaaaacctccgcgcgcaccttcgaaactaaaaataaaaaacgca

SEQ ID NO: 2015 - DNA, 615 bp, Artificial Sequence
  chemically treated genomic DNA (Homo sapiens) CpG-island No: 2015
agatttttcgtcgtggttgggtgtgggtggtaaagttaaaatagttttttgaggaggggagcgacgttttcgtattagtttttttagggcggcgacgtttcgggttgttttttatcgggtcggagttcggggggtatgagggatttttatttttcgtttttattttttttcgtagcgcgtttttcgtatttgcgtcgtcgttttcggtttcgttggttttcgatattgttcgttgcgttcgtaattacgggagtacgtttttttcgaggtcgaagtcggcgattaggcgaagagttatcgttcggatacgattatcgggcggttttggggtttcgtatcgcgggtattttcggtttcgcgtggtcgtttcgttttcgcgttttcgttttcgtttttttttttttttttttcgttttttgttgttttcggttttgtagcgttttggtttgagaagtttcggtattagtttttttcggtcggcggttcgtatttgagtcggagtcggagtcgggtacggcgggtagcggtggggcggggtggattaggcgttaggattaggttcgtcggggcgggaggttttcgcgcgtattttcggggttgaggatagagggcgta

SEQ ID NO: 2016 - DNA, 615 bp, Artificial Sequence
  chemically treated genomic DNA (Homo sapiens) CpG-island No: 2016
tacgccctctatcctcaaccccgaaaatacgcgcgaaaacctcccgccccgacgaacctaatcctaacgcctaatccaccccgccccaccgctacccgccgtacccgactccgactccgactcaaatacgaaccgccgaccgaaaaaaactaataccgaaacttctcaaaccaaaacgctacaaaaccgaaaacaacaaaaaacgaaaaaaaaaaaaaaaaaaacgaaaacgaaaacgcgaaaacgaaacgaccacgcgaaaccgaaaatacccgcgatacgaaaccccaaaaccgcccgataatcgtatccgaacgataactcttcgcctaatcgccgacttcgacctcgaaaaaaacgtactcccgtaattacgaacgcaacgaacaatatcgaaaaccaacgaaaccgaaaacgacgacgcaaatacgaaaaacgcgctacgaaaaaaaataaaaacgaaaaataaaaatccctcataccccccgaactccgacccgataaaaaacaacccgaaacgtcgccgccctaaaaaaactaatacgaaaacgtcgctcccctcctcaaaaaactattttaactttaccacccacacccaaccacgacgaaaaatct

SEQ ID NO: 2017 - DNA, 589 bp, Artificial Sequence
  chemically treated genomic DNA (Homo sapiens) CpG-island No: 2017
gttcgtttcgtacgggatttttcggatttggttcgggggaggcgggtgggagtagcgggagcggttaggagggtaggggcggggcggtaggagacgttagtttatttttcggcggttgtaattcggaaggtttcggggatggaggggaagtgattgggtgtggggtttcgtcggttcgaagtaacggggttatatcgatcgatcgcggggtaaggttggggatgggggtcggggagtaggggcggaaggtacgaggcggaagtttggggtcgggggttggggacgtttcgagggcgttcggtgcgttgggagttcgcgtttttatagtttggttttgcggttattttcgcgttttttttaattttagggttttttttttttttcgtgagtttttcgttttcgcgtttttttttttttatgtgtttttatttattttcgtgtttttattgggcggcgttttatatttatgcgtttttatttttaggcgtttttcggttttttttttgtatttttttttatttttttagtttcgtttatttttaggcggcgttttatatttacgcgtttttttatttttaggtggtttttt

SEQ ID NO: 2018 - DNA, 589 bp, Artificial Sequence
  chemically treated genomic DNA (Homo sapiens) CpG-island No: 2018
aaaaaaccacctaaaaataaaaaaacgcgtaaatataaaacgccgcctaaaaataaacgaaactaaaaaaataaaaaaaaatacaaaaaaaaaaccgaaaaacgcctaaaaataaaaacgcataaatataaaacgccgcccaataaaaacacgaaaataaataaaaacacataaaaaaaaaaaaacgcgaaaacgaaaaactcacgaaaaaaaaaaaaaaccctaaaattaaaaaaaacgcgaaaataaccgcaaaaccaaactataaaaacgcgaactcccaacgcaccgaacgccctcgaaacgtccccaacccccgaccccaaacttccgcctcgtaccttccgcccctactccccgacccccatccccaaccttaccccgcgatcgatcgatataaccccgttacttcgaaccgacgaaaccccacacccaatcacttcccctccatccccgaaaccttccgaattacaaccgccgaaaaataaactaacgtctcctaccgccccgcccctaccctcctaaccgctcccgctactcccacccgcctcccccgaaccaaatccgaaaaatcccgtacgaaacgaac

SEQ ID NO: 2019 - DNA, 589 bp, Artificial Sequence
  chemically treated genomic DNA (Homo sapiens) CpG-island No: 2019
ggggagttatttggaggtgggggggcgcgtagatgtggggcgtcgtttgggagtgagcgggattggagggatgagagggggtgtaaggaggggatcggggggcgtttggaagtgaggacgtatagatgtggggcgtcgtttaataggggtacggggatgagtgggggtatatggagaggagggggcgcggggacgaggggtttacggaaaggagagggagttttgggattggagggggcgcgggggtggtcgtagggttagattgtggaaacgcgggtttttagcgtatcgggcgttttcggggcgtttttagttttcggttttaagttttcgtttcgtgtttttcgtttttgtttttcggtttttatttttagttttgtttcgcggtcggtcggtgtagtttcgttatttcgggtcggcggggttttatatttagttattttttttttattttcggagtttttcgggttgtagtcgtcgggaaatgagttggcgttttttgtcgtttcgtttttgtttttttggtcgttttcgttgtttttattcgtttttttcgggttaggttcgaggggtttcgtacggggcgggt

SEQ ID NO: 2020 - DNA, 589 bp, Artificial Sequence
  chemically treated genomic DNA (Homo sapiens) CpG-island No: 2020
acccgccccgtacgaaacccctcgaacctaacccgaaaaaaacgaataaaaacaacgaaaacgaccaaaaaaacaaaaacgaaacgacaaaaaacgccaactcatttcccgacgactacaacccgaaaaactccgaaaataaaaaaaaaataactaaatataaaaccccgccgacccgaaataacgaaactacaccgaccgaccgcgaaacaaaactaaaaataaaaaccgaaaaacaaaaacgaaaaacacgaaacgaaaacttaaaaccgaaaactaaaaacgccccgaaaacgcccgatacgctaaaaacccgcgtttccacaatctaaccctacgaccacccccgcgccccctccaatcccaaaactccctctcctttccgtaaacccctcgtccccgcgccccctcctctccatatacccccactcatccccgtacccctattaaacgacgccccacatctatacgtcctcacttccaaacgccccccgatcccctccttacaccccctctcatccctccaatcccgctcactcccaaacgacgccccacatctacgcgcccccccacctccaaataactcccc

SEQ ID NO: 2021 - DNA, 610 bp, Artificial Sequence
  chemically treated genomic DNA (Homo sapiens) CpG-island No: 2021
ttattttcgggcgtttttacggtttttatttttcgcgtttcggtcgcggattttgggtagtcgacgcgtcgaatcggttttgggtttcgcgtcggagtagtagttattttttcgtgggcggggggcggggtttgtcgattttagttcggtagggttcgggggcggggatttggggtagcggtcgcgagatttaggtttcgtttttttttcggggtgggggtgttgtcggtattcgcgtagacgtcggagtttaaggttttgttcgtagaagtcgttcgtaattatcgttaatgttttattaatggggaaattgaggttgggagttaggcgcgtagtttgagtcgtcgttgggttggattttcgagtttgggtcgggcgtacggttttcggggattgtcgggcgtagggtcggggagttacgttttttgagttcggacggcgggtattgcgggtttcgcgtttatacgtaggtgagcggttagcgagttttgtagtttcgtcggtagttagcgaggagttttttttacgttgatgtcggtgggcgttaattgtgtaggttttgggcggggagtaggcggttcgggcgtggttagggtagttcggtttcgtt

SEQ ID NO: 2022 - DNA, 610 bp, Artificial Sequence
  chemically treated genomic DNA (Homo sapiens) CpG-island No: 2022
aacgaaaccgaactaccctaaccacgcccgaaccgcctactccccgcccaaaacctacacaattaacgcccaccgacatcaacgtaaaaaaaactcctcgctaactaccgacgaaactacaaaactcgctaaccgctcacctacgtataaacgcgaaacccgcaatacccgccgtccgaactcaaaaaacgtaactccccgaccctacgcccgacaatccccgaaaaccgtacgcccgacccaaactcgaaaatccaacccaacgacgactcaaactacgcgcctaactcccaacctcaatttccccattaataaaacattaacgataattacgaacgacttctacgaacaaaaccttaaactccgacgtctacgcgaataccgacaacacccccaccccgaaaaaaaaacgaaacctaaatctcgcgaccgctaccccaaatccccgcccccgaaccctaccgaactaaaatcgacaaaccccgccccccgcccacgaaaaaataactactactccgacgcgaaacccaaaaccgattcgacgcgtcgactacccaaaatccgcgaccgaaacgcgaaaaataaaaaccgtaaaaacgcccgaaaataa

SEQ ID NO: 2023 - DNA, 610 bp, Artificial Sequence
  chemically treated genomic DNA (Homo sapiens) CpG-island No: 2023
ggcggggtcgggttgttttggttacgttcggatcgtttgtttttcgtttagggtttgtatagttggcgtttatcggtattagcgtgaagggagtttttcgttggttgtcgacggggttgtagggttcgttagtcgtttatttgcgtgtgagcgcggagttcgtagtattcgtcgttcgggtttagaggacgtgatttttcgattttgcgttcggtagttttcgggggtcgtgcgttcggtttaggttcggaggtttagtttagcggcggtttaggttgcgcgtttggtttttagttttagtttttttattggtaaagtattgacggtggttgcggacggtttttgcggatagagttttgggtttcgacgtttgcgcgggtatcggtagtatttttatttcgaagggagggcgggatttggatttcgcgatcgttgttttaggttttcgttttcgggttttatcgggttgaggtcggtaggtttcgtttttcgtttacgaggaagtggttgttgtttcggcgcggagtttagagtcggttcggcgcgtcgattgtttagagttcgcggtcggggcgcgggaggtgagggtcgtgggggcgttcggaggtgg

SEQ ID NO: 2024 - DNA, 610 bp, Artificial Sequence
  chemically treated genomic DNA (Homo sapiens) CpG-island No: 2024
ccacctccgaacgcccccacgaccctcacctcccgcgccccgaccgcgaactctaaacaatcgacgcgccgaaccgactctaaactccgcgccgaaacaacaaccacttcctcgtaaacgaaaaacgaaacctaccgacctcaacccgataaaacccgaaaacgaaaacctaaaacaacgatcgcgaaatccaaatcccgccctcccttcgaaataaaaatactaccgatacccgcgcaaacgtcgaaacccaaaactctatccgcaaaaaccgtccgcaaccaccgtcaatactttaccaataaaaaaactaaaactaaaaaccaaacgcgcaacctaaaccgccgctaaactaaacctccgaacctaaaccgaacgcacgacccccgaaaactaccgaacgcaaaatcgaaaaatcacgtcctctaaacccgaacgacgaatactacgaactccgcgctcacacgcaaataaacgactaacgaaccctacaaccccgtcgacaaccaacgaaaaactcccttcacgctaataccgataaacgccaactatacaaaccctaaacgaaaaacaaacgatccgaacgtaaccaaaacaacccgaccccgcc

SEQ ID NO: 2025 - DNA, 761 bp, Artificial Sequence
  chemically treated genomic DNA (Homo sapiens) CpG-island No: 2025
atatatacgtgttttggaggaggcggttcgtagggcgggatagggcggggcgggggtaggtttcggtcgtcgggaggaagtggtcgggcggtcgtagggatttcggggcgatcgtcgcgagttcgtagtagttcgggttatggaggcggagtcgtcgttttattcgatggcgggggttgcggggtcgtagggcgacgaggatttgttcggggtttcggacgggttcgaggtttcggtgagcggggattcggagtgcgaggcgcgggcgttttttgtgggttagggttttttcggcgggggcggggcgggtcggggggcggcgggtatcgggggatacgggttcggggcgcgatcgcgggtgcgagcggcgtgcgtggttcgtagttggacgagttggtgggcgcgtattttaattataacgaggaggaggaggagcgtcgttattatcgtcgtaagcgtttgggcgtgtttaagaacgtgttggttgttagcgtcgggggtatgtttatttacggcgtttatttgggtaggtgtcgttcggggattcggggtcgtttcgttcgtttttagttcggttcgggaaatagaaatcgcgggtcgtcgtttttcgttcgtttttatttttttttcgttgttttcgtagttgtagttacggtttttcgcggcgggggtggggttggggggttaagtagcgtagcgttttcgggttttagttagagtttcggtgtgggtgggggacgggggttcgggttttcggatag

SEQ ID NO: 2026 - DNA, 761 bp, Artificial Sequence
  chemically treated genomic DNA (Homo sapiens) CpG-island No: 2026
ctatccgaaaacccgaacccccgtcccccacccacaccgaaactctaactaaaacccgaaaacgctacgctacttaaccccccaaccccacccccgccgcgaaaaaccgtaactacaactacgaaaacaacgaaaaaaaaataaaaacgaacgaaaaacgacgacccgcgatttctatttcccgaaccgaactaaaaacgaacgaaacgaccccgaatccccgaacgacacctacccaaataaacgccgtaaataaacatacccccgacgctaacaaccaacacgttcttaaacacgcccaaacgcttacgacgataataacgacgctcctcctcctcctcgttataattaaaatacgcgcccaccaactcgtccaactacgaaccacgcacgccgctcgcacccgcgatcgcgccccgaacccgtatcccccgatacccgccgccccccgacccgccccgcccccgccgaaaaaaccctaacccacaaaaaacgcccgcgcctcgcactccgaatccccgctcaccgaaacctcgaacccgtccgaaaccccgaacaaatcctcgtcgccctacgaccccgcaacccccgccatcgaataaaacgacgactccgcctccataacccgaactactacgaactcgcgacgatcgccccgaaatccctacgaccgcccgaccacttcctcccgacgaccgaaacctacccccgccccgccctatcccgccctacgaaccgcctcctccaaaacacgtatatat

SEQ ID NO: 2027 - DNA, 761 bp, Artificial Sequence
  chemically treated genomic DNA (Homo sapiens) CpG-island No: 2027
ttgttcgggagttcggattttcgttttttatttatatcgaggttttggttgggattcggggacgttgcgttatttgattttttaattttattttcgtcgcggggggtcgtggttgtagttgcgagggtagcggaggggaagtgagagcgggcgggaggcggcggttcgcggtttttgtttttcgggtcgggttgggagcgggcggggcggtttcgggttttcgagcggtatttatttaggtagacgtcgtaggtgagtatgttttcggcgttggtagttagtacgtttttgagtacgtttaggcgtttgcggcggtagtagcggcgttttttttttttttcgttgtagttggggtacgcgtttattagttcgtttagttgcgagttacgtacgtcgttcgtattcgcgatcgcgtttcgaattcgtgtttttcggtgttcgtcgtttttcggttcgtttcgttttcgtcggggggattttggtttataggggacgttcgcgtttcgtatttcgggttttcgtttatcggggtttcgggttcgttcgggatttcgagtaggttttcgtcgttttgcggtttcgtagttttcgttatcgggtagagcggcggtttcgtttttatggttcgaattattgcggattcgcggcggtcgtttcggagtttttgcgatcgttcggttattttttttcggcggtcgggatttgttttcgtttcgttttgtttcgttttgcgggtcgttttttttaggatacgtgtgtgt

SEQ ID NO: 2028 - DNA, 761 bp, Artificial Sequence
  chemically treated genomic DNA (Homo sapiens) CpG-island No: 2028
acacacacgtatcctaaaaaaaacgacccgcaaaacgaaacaaaacgaaacgaaaacaaatcccgaccgccgaaaaaaaataaccgaacgatcgcaaaaactccgaaacgaccgccgcgaatccgcaataattcgaaccataaaaacgaaaccgccgctctacccgataacgaaaactacgaaaccgcaaaacgacgaaaacctactcgaaatcccgaacgaacccgaaaccccgataaacgaaaacccgaaatacgaaacgcgaacgtcccctataaaccaaaatccccccgacgaaaacgaaacgaaccgaaaaacgacgaacaccgaaaaacacgaattcgaaacgcgatcgcgaatacgaacgacgtacgtaactcgcaactaaacgaactaataaacgcgtaccccaactacaacgaaaaaaaaaaaaaacgccgctactaccgccgcaaacgcctaaacgtactcaaaaacgtactaactaccaacgccgaaaacatactcacctacgacgtctacctaaataaataccgctcgaaaacccgaaaccgccccgcccgctcccaacccgacccgaaaaacaaaaaccgcgaaccgccgcctcccgcccgctctcacttcccctccgctaccctcgcaactacaaccacgaccccccgcgacgaaaataaaattaaaaaatcaaataacgcaacgtccccgaatcccaaccaaaacctcgatataaataaaaaacgaaaatccgaactcccgaacaa

SEQ ID NO: 2029 - DNA, 516 bp, Artificial Sequence
  chemically treated genomic DNA (Homo sapiens) CpG-island No: 2029
cggggaaggtgcggggcgaggcggtcgcgggtttttggtatttttttttttacgtttaggttaagttggcggtgttgttggtgacgttggtggcggtcgcggttttttatttgcggatggagtagaagttgcgtcggggcgtggtttcgcgttagtttcgtatttcgcggttttagtataaggtgcgcggttatcgttatttggaggaggataattcggacgagagcgacgcggagggcgagtatggggacggcgcggaggaggaggcgtcgttcgtagggtttaggtttggtttcgagttcgttggattcggtcgtcggttttgttcgtacgaataggcgtaggggggagacgggtcggaggagtagtgaggggtcgtttggttttcggatttagttttttttttcgtcggttttagtttattacgtttgaggtcggggggatttttttcgagtttcgcgttgtttttaaaggtttttgtttttttttttttacgttggggacgttttttttaga

SEQ ID NO: 2030 - DNA, 516 bp, Artificial Sequence
  chemically treated genomic DNA (Homo sapiens) CpG-island No: 2030
tctaaaaaaaacgtccccaacgtaaaaaaaaaaaaacaaaaacctttaaaaacaacgcgaaactcgaaaaaaatccccccgacctcaaacgtaataaactaaaaccgacgaaaaaaaaaactaaatccgaaaaccaaacgacccctcactactcctccgacccgtctcccccctacgcctattcgtacgaacaaaaccgacgaccgaatccaacgaactcgaaaccaaacctaaaccctacgaacgacgcctcctcctccgcgccgtccccatactcgccctccgcgtcgctctcgtccgaattatcctcctccaaataacgataaccgcgcaccttatactaaaaccgcgaaatacgaaactaacgcgaaaccacgccccgacgcaacttctactccatccgcaaataaaaaaccgcgaccgccaccaacgtcaccaacaacaccgccaacttaacctaaacgtaaaaaaaaaaataccaaaaacccgcgaccgcctcgccccgcaccttccccg

SEQ ID NO: 2031 - DNA, 516 bp, Artificial Sequence
  chemically treated genomic DNA (Homo sapiens) CpG-island No: 2031
tttgggaggggcgtttttaacgtgggggaggggagataggggtttttgaagatagcgcgggattcggagggggttttttcgattttagacgtggtaaattgaggtcggcgaggagggaggttgagttcggggattaggcggttttttattgttttttcggttcgttttttttttgcgtttgttcgtacgggtagggtcggcggtcgagtttagcgggttcggggttaggtttgggttttgcgggcggcgttttttttttcgcgtcgtttttatgttcgtttttcgcgtcgttttcgttcgagttgtttttttttaagtagcggtaatcgcgtattttgtgttggggtcgcgggatgcggggttggcgcggggttacgtttcggcgtagtttttgttttattcgtaggtaggagatcgcggtcgttattagcgttattagtagtatcgttagtttagtttgggcgtaaggagagggatgttagggattcgcggtcgtttcgtttcgtatttttttcg

SEQ ID NO: 2032 - DNA, 516 bp, Artificial Sequence
  chemically treated genomic DNA (Homo sapiens) CpG-island No: 2032
cgaaaaaaatacgaaacgaaacgaccgcgaatccctaacatccctctccttacgcccaaactaaactaacgatactactaataacgctaataacgaccgcgatctcctacctacgaataaaacaaaaactacgccgaaacgtaaccccgcgccaaccccgcatcccgcgaccccaacacaaaatacgcgattaccgctacttaaaaaaaaacaactcgaacgaaaacgacgcgaaaaacgaacataaaaacgacgcgaaaaaaaaaacgccgcccgcaaaacccaaacctaaccccgaacccgctaaactcgaccgccgaccctacccgtacgaacaaacgcaaaaaaaaaacgaaccgaaaaaacaataaaaaaccgcctaatccccgaactcaacctccctcctcgccgacctcaatttaccacgtctaaaatcgaaaaaaccccctccgaatcccgcgctatcttcaaaaacccctatctcccctcccccacgttaaaaacgcccctcccaaa

SEQ ID NO: 2033 - DNA, 548 bp, Artificial Sequence
  chemically treated genomic DNA (Homo sapiens) CpG-island No: 2033
gagagtcgagtttcgcgggcgcgcgtagcggttggagcgcgggggcgaggtcgggttatttttttttttcggtcgcgtattgtttggttcgcggcggttttaggtattatttttttcgttcgggttgagttcgttgtggtagtgattagttttcgcggttagcggtattgtttatcgacgagcggcgttttttttttttttttttttttacgatttttttttttgcggcggtacgtcgtttagtagtttgtttcgtttcgtcgttaattttgagttggaggagaagtaattttggtagtggtcgcggggttggaatttcgttttttttcggtagtagtaggttcgtaagtcgttggggttaggtggggtaagagtttcgtcggcgtattagcgttgtttcggattgtttgtaacgtgtttttagcgagttgggagcggggttgtgattgcgagtcgtttgggggagggggatttgtttttttttttttttagagatttcggtttgtaattggattaaacgttgtcgaaaggatgtaaataggtagagt

SEQ ID NO: 2034 - DNA, 548 bp, Artificial Sequence
  chemically treated genomic DNA (Homo sapiens) CpG-island No: 2034
actctacctatttacatcctttcgacaacgtttaatccaattacaaaccgaaatctctaaaaaaaaaaaaaaacaaatccccctcccccaaacgactcgcaatcacaaccccgctcccaactcgctaaaaacacgttacaaacaatccgaaacaacgctaatacgccgacgaaactcttaccccacctaaccccaacgacttacgaacctactactaccgaaaaaaaacgaaattccaaccccgcgaccactaccaaaattacttctcctccaactcaaaattaacgacgaaacgaaacaaactactaaacgacgtaccgccgcaaaaaaaaaaatcgtaaaaaaaaaaaaaaaaaaaaaacgccgctcgtcgataaacaataccgctaaccgcgaaaactaatcactaccacaacgaactcaacccgaacgaaaaaaataatacctaaaaccgccgcgaaccaaacaatacgcgaccgaaaaaaaaaaataacccgacctcgcccccgcgctccaaccgctacgcgcgcccgcgaaactcgactctc

SEQ ID NO: 2035 - DNA, 548 bp, Artificial Sequence
  chemically treated genomic DNA (Homo sapiens) CpG-island No: 2035
gttttgtttatttatattttttcgatagcgtttgatttagttgtaagtcgaggtttttagaggaaaagaaaaataagttttttttttttagacgattcgtagttataatttcgtttttagttcgttggaaatacgttgtaaatagttcgaagtagcgttgatgcgtcggcgaaatttttgttttatttaattttagcgatttgcgagtttattgttgtcgaggagaagcgggattttaatttcgcggttattgttaaagttgttttttttttagtttaaagttgacgacggggcgaagtaggttgttggacggcgtgtcgtcgtagagaaggaaatcgtggggagaagggggagaagagggcgtcgttcgtcggtggatagtgtcgttagtcgcgggagttagttattgttatagcgggtttagttcggacgggaagggtggtgtttggaatcgtcgcgggttaggtagtgcgcggtcgggaaggggaggtggttcggtttcgttttcgcgttttagtcgttgcgcgcgttcgcgaagttcgattttt

SEQ ID NO: 2036 - DNA, 548 bp, Artificial Sequence
  chemically treated genomic DNA (Homo sapiens) CpG-island No: 2036
aaaaatcgaacttcgcgaacgcgcgcaacgactaaaacgcgaaaacgaaaccgaaccacctccccttcccgaccgcgcactacctaacccgcgacgattccaaacaccacccttcccgtccgaactaaacccgctataacaataactaactcccgcgactaacgacactatccaccgacgaacgacgccctcttctcccccttctccccacgatttccttctctacgacgacacgccgtccaacaacctacttcgccccgtcgtcaactttaaactaaaaaaaaaacaactttaacaataaccgcgaaattaaaatcccgcttctcctcgacaacaataaactcgcaaatcgctaaaattaaataaaacaaaaatttcgccgacgcatcaacgctacttcgaactatttacaacgtatttccaacgaactaaaaacgaaattataactacgaatcgtctaaaaaaaaaaaacttatttttcttttcctctaaaaacctcgacttacaactaaatcaaacgctatcgaaaaaatataaataaacaaaac

SEQ ID NO: 2037 - DNA, 1011 bp, Artificial Sequence
  chemically treated genomic DNA (Homo sapiens) CpG-island No: 2037
gagatcgttcggttcgcgttcgttattgttttttcgtcgtttttgcggcgcgcggggtcgcgttggcgcggcgggggttaataaggcgcgtttcgggtcggtcggcgggagggcgaggcggagaagagcggtttgagtcgtcgtcgcggcgcgcggagttaagagcgaggcggcggcggcggcgataggataaaggagattatgtgcggagggagggaggagggagagggaggaggaggaggagggcgcgcggcggttttttttcggcggtcgttcggggtttttcgatagtcggtttcgtttttttagtcgcgtcgcgggttgtttggttttgggttcgtcgcggtgttggagggagtcgtttcgggagtttggattttgtgcggatttcgtcggcgcgcggtttaggaggcgttgtaacggcggggcgcggggcggcggcgtttttggtcggagtttgcgggttggcgggtgagcgttcggggttggttgggtttcggttcgcgttcggtttgcgggcgtttgtttttttcgtcggtttatagtttaagtgaattttatcggcggtcgtcgcgggttttttggttggacggtagtaggagggggcggcggttacgcgggggttttttgtttcggatttcgtttttcgattgcgtcgagcgcgttttttttagacgttcgtagttttcggagcgggattttttcggcgcgtcgagttcgagtcgtcggtgttatcgtttttttttcgtttcgtttcgcgcgtttcgtttttcgtcgttttttttttcgttttcggcgtcgggtcggtttagcggaggcgcggtttttaggcgcgatatcgatagttgttgtttttttcgcggttcgagttttcggtttttttcggttgttttttttgcgggcgggcgcggcggaaattgtatcgtttttcgtttttttcgtagttgtcgtttttaagattgcgttatggtagggaaaggttattaggttcgtagtttggggttgaattgt

SEQ ID NO: 2038 - DNA, 1011 bp, Artificial Sequence
  chemically treated genomic DNA (Homo sapiens) CpG-island No: 2038
acaattcaaccccaaactacgaacctaataacctttccctaccataacgcaatcttaaaaacgacaactacgaaaaaaacgaaaaacgatacaatttccgccgcgcccgcccgcaaaaaaaacaaccgaaaaaaaccgaaaactcgaaccgcgaaaaaaacaacaactatcgatatcgcgcctaaaaaccgcgcctccgctaaaccgacccgacgccgaaaacgaaaaaaaaaacgacgaaaaacgaaacgcgcgaaacgaaacgaaaaaaaaacgataacaccgacgactcgaactcgacgcgccgaaaaaatcccgctccgaaaactacgaacgtctaaaaaaaacgcgctcgacgcaatcgaaaaacgaaatccgaaacaaaaaacccccgcgtaaccgccgccccctcctactaccgtccaaccaaaaaacccgcgacgaccgccgataaaattcacttaaactataaaccgacgaaaaaaacaaacgcccgcaaaccgaacgcgaaccgaaacccaaccaaccccgaacgctcacccgccaacccgcaaactccgaccaaaaacgccgccgccccgcgccccgccgttacaacgcctcctaaaccgcgcgccgacgaaatccgcacaaaatccaaactcccgaaacgactccctccaacaccgcgacgaacccaaaaccaaacaacccgcgacgcgactaaaaaaacgaaaccgactatcgaaaaaccccgaacgaccgccgaaaaaaaaccgccgcgcgccctcctcctcctcctccctctccctcctccctccctccgcacataatctcctttatcctatcgccgccgccgccgcctcgctcttaactccgcgcgccgcgacgacgactcaaaccgctcttctccgcctcgccctcccgccgaccgacccgaaacgcgccttattaacccccgccgcgccaacgcgaccccgcgcgccgcaaaaacgacgaaaaaacaataacgaacgcgaaccgaacgatctc

SEQ ID NO: 2039 - DNA, 1011 bp, Artificial Sequence
  chemically treated genomic DNA (Homo sapiens) CpG-island No: 2039
gtaatttaattttaggttgcgggtttagtggtttttttttgttatggcgtaattttggaagcggtaattgcggggagggcgaggagcggtgtagttttcgtcgcgttcgttcgtaaggaaggtagtcggggggagtcgagggttcgagtcgcggggggagtaatagttgtcgatgtcgcgtttggggatcgcgttttcgttgggtcgattcggcgtcggggacgagaggaggggcggcgaggggcggggcgcgcggggcgggacggaggaggggcggtggtatcggcggttcgggttcggcgcgtcgaggaagtttcgtttcgagagttgcgagcgtttggaggaggcgcgttcggcgtagtcggggagcgaagttcggagtaaggggttttcgcgtagtcgtcgtttttttttgttatcgtttagttagggagttcgcggcggtcgtcgatggagtttatttgagttgtgaatcggcgggagaggtaggcgttcgtaagtcgagcgcgggtcggagtttagttagtttcgggcgtttattcgttagttcgtaagtttcggttagaggcgtcgtcgtttcgcgtttcgtcgttgtagcgttttttgggtcgcgcgtcggcgagattcgtataaaatttagattttcggagcggttttttttagtatcgcggcgggtttaggattaggtagttcgcggcgcggttggagaggcgggatcggttgtcggggagtttcgggcggtcgtcggggagaagtcgtcgcgcgttttttttttttttttttttttttttttttttttttttcgtatatggttttttttgttttgtcgtcgtcgtcgtcgtttcgtttttagtttcgcgcgtcgcggcggcggtttaggtcgttttttttcgtttcgttttttcgtcggtcggttcgggacgcgttttgttagttttcgtcgcgttagcgcggtttcgcgcgtcgtaggagcggcggggagatagtggcgagcgcgggtcgggcgatttt

SEQ ID NO: 2040 - DNA, 1011 bp, Artificial Sequence
  chemically treated genomic DNA (Homo sapiens) CpG-island No: 2040
aaaatcgcccgacccgcgctcgccactatctccccgccgctcctacgacgcgcgaaaccgcgctaacgcgacgaaaactaacaaaacgcgtcccgaaccgaccgacgaaaaaacgaaacgaaaaaaaacgacctaaaccgccgccgcgacgcgcgaaactaaaaacgaaacgacgacgacgacgacaaaacaaaaaaaaccatatacgaaaaaaaaaaaaaaaaaaaaaaaaaaaaaaaaaaaaaacgcgcgacgacttctccccgacgaccgcccgaaactccccgacaaccgatcccgcctctccaaccgcgccgcgaactacctaatcctaaacccgccgcgatactaaaaaaaaccgctccgaaaatctaaattttatacgaatctcgccgacgcgcgacccaaaaaacgctacaacgacgaaacgcgaaacgacgacgcctctaaccgaaacttacgaactaacgaataaacgcccgaaactaactaaactccgacccgcgctcgacttacgaacgcctacctctcccgccgattcacaactcaaataaactccatcgacgaccgccgcgaactccctaactaaacgataacaaaaaaaaacgacgactacgcgaaaaccccttactccgaacttcgctccccgactacgccgaacgcgcctcctccaaacgctcgcaactctcgaaacgaaacttcctcgacgcgccgaacccgaaccgccgataccaccgcccctcctccgtcccgccccgcgcgccccgcccctcgccgcccctcctctcgtccccgacgccgaatcgacccaacgaaaacgcgatccccaaacgcgacatcgacaactattactccccccgcgactcgaaccctcgactccccccgactaccttccttacgaacgaacgcgacgaaaactacaccgctcctcgccctccccgcaattaccgcttccaaaattacgccataacaaaaaaaaaccactaaacccgcaacctaaaattaaattac

SEQ ID NO: 2041 - DNA, 883 bp, Artificial Sequence
  chemically treated genomic DNA (Homo sapiens) CpG-island No: 2041
cgggggacgttttgttcggaagttcgtgttcgttcgcggcgcggttaggcgggttttatgagggggatttttttaataatcgagttttcgggttgggcgcggggtagcgtagtgatttttttcgcgttcggtagttcggtcggggtcgcggggtcgcggggtcgcggggtcggttcggggtcgttaggttttttcgtcgggtttcgcggcggcgtgtggcggggcggggcgcgggtaggcgggcgtacgttttgcgttcgttttttaggttgtaggtggggttgtgcggtcgcgttgtttttaggaagttttacgggttttcgtttgtcgggtcgcggcgtcgtttttaggatgtagtgtggatcggtcgggcgttgacggaggcggcgcgattgcgggcggcgcggcgtaggggtagttagcgaggagcgcggtagaggaaaggttaggtaggcgtcgtttgggaagagtatcgggcggtcgggtttgcgtggtgtcgcgcgcggcggttgcgacgacgatttttttcgggtcgggcgggatagcgtagggttatggtcgaggcggtcgcgtttcggtaagggcgattcgcgcgcgtagggattcgcggtttgggggtttaggcggtcggtttcggtatacggcgtcgtaggttttggggaggggtttcggggttcgggcggattatcgggtttgggttttcgcgaatggggcgcggggttcgtcggggtttattgcgttcgtcggtcgggtttttatttcgagtcgaattcgagcgttggcggaacggttgttttcgtttcgggtcgttttacgttaagttttttgggtttttcgggttttttgttttcgttttagtcgttgttttttttttttgggtgtt

SEQ ID NO: 2042 - DNA, 883 bp, Artificial Sequence
  chemically treated genomic DNA (Homo sapiens) CpG-island No: 2042
aacacccaaaaaaaaaaaacaacgactaaaacgaaaacaaaaaacccgaaaaacccaaaaaacttaacgtaaaacgacccgaaacgaaaacaaccgttccgccaacgctcgaattcgactcgaaataaaaacccgaccgacgaacgcaataaaccccgacgaaccccgcgccccattcgcgaaaacccaaacccgataatccgcccgaaccccgaaacccctccccaaaacctacgacgccgtataccgaaaccgaccgcctaaacccccaaaccgcgaatccctacgcgcgcgaatcgcccttaccgaaacgcgaccgcctcgaccataaccctacgctatcccgcccgacccgaaaaaaatcgtcgtcgcaaccgccgcgcgcgacaccacgcaaacccgaccgcccgatactcttcccaaacgacgcctacctaacctttcctctaccgcgctcctcgctaactacccctacgccgcgccgcccgcaatcgcgccgcctccgtcaacgcccgaccgatccacactacatcctaaaaacgacgccgcgacccgacaaacgaaaacccgtaaaacttcctaaaaacaacgcgaccgcacaaccccacctacaacctaaaaaacgaacgcaaaacgtacgcccgcctacccgcgccccgccccgccacacgccgccgcgaaacccgacgaaaaaacctaacgaccccgaaccgaccccgcgaccccgcgaccccgcgaccccgaccgaactaccgaacgcgaaaaaaatcactacgctaccccgcgcccaacccgaaaactcgattattaaaaaaatccccctcataaaacccgcctaaccgcgccgcgaacgaacacgaacttccgaacaaaacgtcccccg

SEQ ID NO: 2043 - DNA, 883 bp, Artificial Sequence
  chemically treated genomic DNA (Homo sapiens) CpG-island No: 2043
ggtatttagaaggaggggatagcggttggggcgggggtaggaagttcggagggtttaaagaatttggcgtggggcggttcggggcggggataatcgtttcgttagcgttcgggttcggttcggagtgggggttcggtcgacgggcgtagtaggtttcggcggatttcgcgttttattcgcgggagtttaggttcggtggttcgttcggatttcggaatttttttttagggtttgcggcgtcgtgtgtcggggtcggtcgtttgggtttttaggtcgcgagtttttgcgcgcgcgggtcgtttttatcggagcgcgatcgtttcggttatggttttgcgttgtttcgttcggttcggaggaagtcgtcgtcgtagtcgtcgcgcgcggtattacgtaggttcggtcgttcggtgttttttttaggcggcgtttgtttggttttttttttgtcgcgtttttcgttggttgtttttgcgtcgcgtcgttcgtagtcgcgtcgttttcgttagcgttcggtcggtttatattgtattttgggagcggcgtcgcggttcggtagacgaaggttcgtgaggttttttggaggtagcgcggtcgtatagttttatttgtagtttgagaggcgaacgtagggcgtgcgttcgtttgttcgcgtttcgtttcgttatacgtcgtcgcggggttcgacgggaggatttagcgatttcgggtcgatttcgcgatttcgcgatttcgcgatttcggtcggattgtcgagcgcggggggagttattgcgttgtttcgcgtttagttcgaggattcggttattgaaagggttttttttatgggattcgtttggtcgcgtcgcgggcgagtacgggttttcgggtagggcgtttttcg

SEQ ID NO: 2044 - DNA, 883 bp, Artificial Sequence
  chemically treated genomic DNA (Homo sapiens) CpG-island No: 2044
cgaaaaacgccctacccgaaaacccgtactcgcccgcgacgcgaccaaacgaatcccataaaaaaaaccctttcaataaccgaatcctcgaactaaacgcgaaacaacgcaataactccccccgcgctcgacaatccgaccgaaatcgcgaaatcgcgaaatcgcgaaatcgacccgaaatcgctaaatcctcccgtcgaaccccgcgacgacgtataacgaaacgaaacgcgaacaaacgaacgcacgccctacgttcgcctctcaaactacaaataaaactatacgaccgcgctacctccaaaaaacctcacgaaccttcgtctaccgaaccgcgacgccgctcccaaaatacaatataaaccgaccgaacgctaacgaaaacgacgcgactacgaacgacgcgacgcaaaaacaaccaacgaaaaacgcgacaaaaaaaaaaccaaacaaacgccgcctaaaaaaaacaccgaacgaccgaacctacgtaataccgcgcgcgacgactacgacgacgacttcctccgaaccgaacgaaacaacgcaaaaccataaccgaaacgatcgcgctccgataaaaacgacccgcgcgcgcaaaaactcgcgacctaaaaacccaaacgaccgaccccgacacacgacgccgcaaaccctaaaaaaaaattccgaaatccgaacgaaccaccgaacctaaactcccgcgaataaaacgcgaaatccgccgaaacctactacgcccgtcgaccgaacccccactccgaaccgaacccgaacgctaacgaaacgattatccccgccccgaaccgccccacgccaaattctttaaaccctccgaacttcctacccccgccccaaccgctatcccctccttctaaatacc

SEQ ID NO: 2045 - DNA, 884 bp, Artificial Sequence
  chemically treated genomic DNA (Homo sapiens) CpG-island No: 2045
ggcggttcggggcggggataatcgtttcgttagcgtttggttcggttcggagtggggggttcggttggtaagcgtagtaggttcgggtagacgtcgcggttttgtttttcggagttttaggcgcggtagtacggttcggttttcgtagttttcgtgtgtcgggttcgggtcgttcggggaatttaggtcgcgagttcgtgcgcgcgttggtcgtttttatcggagttgcggtcgttttttttatggttttgcgttgtttttcgcggtttagataaagtcgtcgtcgttgttgcgcgcgttttacgtagggttcgtttttcggtgtttttcgtagcggcgttcgtttagttttgtttttgtcgtcgttgttttttgattgtttttgttttgcgtcgttcgtagttgcgttaacgtttttagcgttcggtcggttcgtattgtattttgggagtcggcgcggtcgacgaaggtatatgaggttttttggaggtaggtagtcgtatagttttatttgtagtttcggaggcgaattgtaggcgcgatttcgtttggttcgcgttcgggagttgatttcgcgatttttggtcgatttttcgtttttttttcgattgtcgcgtgtgcgcgcgtagttattgcgttggtttcgcgatttaggtcgagggattcggttatcgaaagagttttttttataagattcgtttggtcgcgttcgcgggtaagtaggggtttttaggtagggtttttttcggtgatcgcgggtagtgtggtttttcgtttagttgggttcggcgcggtcgaataggtatttttgtcgttcgaggttttgggtttggaggtttgggttgttttcggggggtagttgtaatttatttttatttgtgttt

SEQ ID NO: 2046 - DNA, 884 bp, Artificial Sequence
  chemically treated genomic DNA (Homo sapiens) CpG-island No: 2046
aaacacaaataaaaataaattacaactaccccccgaaaacaacccaaacctccaaacccaaaacctcgaacgacaaaaatacctattcgaccgcgccgaacccaactaaacgaaaaaccacactacccgcgatcaccgaaaaaaaccctacctaaaaacccctacttacccgcgaacgcgaccaaacgaatcttataaaaaaaactctttcgataaccgaatccctcgacctaaatcgcgaaaccaacgcaataactacgcgcgcacacgcgacaatcgaaaaaaaaacgaaaaatcgaccaaaaatcgcgaaatcaactcccgaacgcgaaccaaacgaaatcgcgcctacaattcgcctccgaaactacaaataaaactatacgactacctacctccaaaaaacctcatataccttcgtcgaccgcgccgactcccaaaatacaatacgaaccgaccgaacgctaaaaacgttaacgcaactacgaacgacgcaaaacaaaaacaatcaaaaaacaacgacgacaaaaacaaaactaaacgaacgccgctacgaaaaacaccgaaaaacgaaccctacgtaaaacgcgcgcaacaacgacgacgactttatctaaaccgcgaaaaacaacgcaaaaccataaaaaaaacgaccgcaactccgataaaaacgaccaacgcgcgcacgaactcgcgacctaaattccccgaacgacccgaacccgacacacgaaaactacgaaaaccgaaccgtactaccgcgcctaaaactccgaaaaacaaaaccgcgacgtctacccgaacctactacgcttaccaaccgaaccccccactccgaaccgaaccaaacgctaacgaaacgattatccccgccccgaaccgcc

SEQ ID NO: 2047 - DNA, 884 bp, Artificial Sequence
  chemically treated genomic DNA (Homo sapiens) CpG-island No: 2047
aaatatagatggggatgagttatagttgtttttcgaaaatagtttaaatttttaggtttaggatttcgggcggtagaagtgtttgttcggtcgcgtcgggtttagttgggcgaggggttatattgttcgcggttatcggggagggttttgtttggaagtttttgtttgttcgcgggcgcggttaggcgggttttatgagggggattttttcggtaatcgagtttttcggtttgggtcgcggggttagcgtagtgattgcgcgcgtatacgcggtagtcggggaaggggcgaggggtcggttaggggtcgcggggttagttttcgggcgcgggttaggcggggtcgcgtttgtagttcgttttcggagttgtaggtggggttgtgcggttgtttgtttttaggaagttttatgtgttttcgtcggtcgcgtcggtttttaggatatagtgcggatcggtcgggcgttaaaggcgttgacgtaattgcgggcggcgtagggtaggggtagttagggagtagcggcggtagagatagggttgggcgggcgtcgttgcggagagtatcgggaggcgggttttgcgtggggcgcgcgtagtagcggcgacgattttatttgggtcgcgggggatagcgtagggttatggaggaggcggtcgtagtttcggtaagggcgattagcgcgcgtacgaattcgcggtttggatttttcgggcgattcgggttcggtatacgggggttgcgggagtcgagtcgtattatcgcgtttggggtttcggggaatagggtcgcggcgtttgttcgggtttattgcgtttgttagtcgggttttttatttcgggtcgagttaggcgttggcggaacggttgttttcgtttcgggtcgtt

SEQ ID NO: 2048 - DNA, 884 bp, Artificial Sequence
  chemically treated genomic DNA (Homo sapiens) CpG-island No: 2048
aacgacccgaaacgaaaacaaccgttccgccaacgcctaactcgacccgaaataaaaaacccgactaacaaacgcaataaacccgaacaaacgccgcgaccctattccccgaaaccccaaacgcgataatacgactcgactcccgcaacccccgtataccgaacccgaatcgcccgaaaaatccaaaccgcgaattcgtacgcgcgctaatcgcccttaccgaaactacgaccgcctcctccataaccctacgctatcccccgcgacccaaataaaatcgtcgccgctactacgcgcgccccacgcaaaacccgcctcccgatactctccgcaacgacgcccgcccaaccctatctctaccgccgctactccctaactacccctaccctacgccgcccgcaattacgtcaacgcctttaacgcccgaccgatccgcactatatcctaaaaaccgacgcgaccgacgaaaacacataaaacttcctaaaaacaaacaaccgcacaaccccacctacaactccgaaaacgaactacaaacgcgaccccgcctaacccgcgcccgaaaactaaccccgcgacccctaaccgacccctcgccccttccccgactaccgcgtatacgcgcgcaatcactacgctaaccccgcgacccaaaccgaaaaactcgattaccgaaaaaatccccctcataaaacccgcctaaccgcgcccgcgaacaaacaaaaacttccaaacaaaaccctccccgataaccgcgaacaatataacccctcgcccaactaaacccgacgcgaccgaacaaacacttctaccgcccgaaatcctaaacctaaaaatttaaactattttcgaaaaacaactataactcatccccatctatattt

SEQ ID NO: 2049 - DNA, 1004 bp, Artificial Sequence
  chemically treated genomic DNA (Homo sapiens) CpG-island No: 2049
ttcgcggcggcggattacggaggggttcggggcgggggttagcgtttcggtttatttgggtgtaggtgttgggcggggggcgcgcgttattttgaggatgttgtcgaagatggtgtcgcggaattttagtagcgttttttggtcgaattcgcggtcgtggatgatgcgtatttgtttgaggaacgtggatttgtcgttttcgttcgcgtttagtagtaggatttttattaggcgtcggatcgcgcgtcgttcgcgggttagtagcgcgtcgatgtcgcggttacgttttcgggtttcgcgtttcgcgtcgcgcgcgtcgttgttcgttttgcgttcgcgggtttcgtcggtttcggtcggtagtaggtagcggttgagggttcgtattatttcggatatggttttttaggtcgcggtcgcgtttcgtcggcgttcgggggttatggacgttttcgtcggcgagggcgagttcgggtcgaggtatcgttttacgtttcgtcgttcgttttaggtcgcgttcgtcgtcgtcgttgtagtcgtttcgaggttcgtattcgtcgttcggtcgttattcgggttcggcggaggggcgggcggcgtcgcgtgaggttcggcggattgggtcggttgtcgtttatttggtcgtgagagtttttcgattggtttatttcgttaagggaggcgggtatttttttcggtttcggggcggggtcgacgtcgaaagaggcgggatttttgaggtgaaggcgttttttattggacgtttaggttgaggtttttttttttagaatgaaagggaggcggggtcgttcgggaggcggagcgatcgttcgttatggttaattataattgttttgagtggatattagacgtgtttaacgggttttggattgggtgttcgggggacggggcgtgacgagaagtgttaggtgtatagaaagatttttttttggtttttagattgggttcgtttgtgagattaggatttcgcggagtagtttaaa

SEQ ID NO: 2050 - DNA, 1004 bp, Artificial Sequence
  chemically treated genomic DNA (Homo sapiens) CpG-island No: 2050
tttaaactactccgcgaaatcctaatctcacaaacgaacccaatctaaaaaccaaaaaaaaatctttctatacacctaacacttctcgtcacgccccgtcccccgaacacccaatccaaaacccgttaaacacgtctaatatccactcaaaacaattataattaaccataacgaacgatcgctccgcctcccgaacgaccccgcctccctttcattctaaaaaaaaaaacctcaacctaaacgtccaataaaaaacgccttcacctcaaaaatcccgcctctttcgacgtcgaccccgccccgaaaccgaaaaaaatacccgcctcccttaacgaaataaaccaatcgaaaaactctcacgaccaaataaacgacaaccgacccaatccgccgaacctcacgcgacgccgcccgcccctccgccgaacccgaataacgaccgaacgacgaatacgaacctcgaaacgactacaacgacgacgacgaacgcgacctaaaacgaacgacgaaacgtaaaacgatacctcgacccgaactcgccctcgccgacgaaaacgtccataacccccgaacgccgacgaaacgcgaccgcgacctaaaaaaccatatccgaaataatacgaaccctcaaccgctacctactaccgaccgaaaccgacgaaacccgcgaacgcaaaacgaacaacgacgcgcgcgacgcgaaacgcgaaacccgaaaacgtaaccgcgacatcgacgcgctactaacccgcgaacgacgcgcgatccgacgcctaataaaaatcctactactaaacgcgaacgaaaacgacaaatccacgttcctcaaacaaatacgcatcatccacgaccgcgaattcgaccaaaaaacgctactaaaattccgcgacaccatcttcgacaacatcctcaaaataacgcgcgccccccgcccaacacctacacccaaataaaccgaaacgctaacccccgccccgaacccctccgtaatccgccgccgcgaa

SEQ ID NO: 2051 - DNA, 1004 bp, Artificial Sequence
  chemically treated genomic DNA (Homo sapiens) CpG-island No: 2051
tttgggttatttcgcgaggttttggttttataggcggatttaatttgggaattaagggagaatttttttgtatatttggtatttttcgttacgtttcgtttttcgaatatttaatttaaagttcgttgggtacgtttgatgtttatttagagtaattataattggttatggcggacgatcgtttcgtttttcgggcgatttcgttttttttttattttgaaagaaagaattttagtttgggcgtttaatgagaagcgtttttattttaaagatttcgtttttttcggcgtcgatttcgtttcgaggtcggaagggatgttcgttttttttggcgagatgagttaatcgaagggtttttacggttagatggacggtagtcggtttaattcgtcgggttttacgcggcgtcgttcgttttttcgtcgggttcgagtggcggtcgggcgacgagtgcgggtttcggagcgattgtagcggcggcggcggacgcggtttgaggcgagcggcggggcgtggggcggtgtttcggttcgggttcgttttcgtcggcgggagcgtttatggttttcgggcgtcggcggggcgcggtcgcggtttgaggggttatgttcggggtggtgcggatttttagtcgttgtttgttgtcggtcgaggtcggcggggttcgcgagcgtagggcgggtagcggcgcgcgcgacgcggagcgcgaggttcggaggcgtagtcgcgatatcgacgcgttgttggttcgcgagcggcgcgcggttcggcgtttggtgaagattttgttgttgggcgcgggcgagagcggtaagtttacgttttttaagtagatgcgtattatttacggtcgcgagttcgattagaaggcgttgttggagtttcgcgatattattttcgataatatttttaaggtgacgcgcgtttttcgtttagtatttgtatttaggtgggtcggggcgttaattttcgtttcgggttttttcgtggttcgtcgtcgcggg

SEQ ID NO: 2052 - DNA, 1004 bp, Artificial Sequence
  chemically treated genomic DNA (Homo sapiens) CpG-island No: 2052
cccgcgacgacgaaccacgaaaaaacccgaaacgaaaattaacgccccgacccacctaaatacaaatactaaacgaaaaacgcgcgtcaccttaaaaatattatcgaaaataatatcgcgaaactccaacaacgccttctaatcgaactcgcgaccgtaaataatacgcatctacttaaaaaacgtaaacttaccgctctcgcccgcgcccaacaacaaaatcttcaccaaacgccgaaccgcgcgccgctcgcgaaccaacaacgcgtcgatatcgcgactacgcctccgaacctcgcgctccgcgtcgcgcgcgccgctacccgccctacgctcgcgaaccccgccgacctcgaccgacaacaaacaacgactaaaaatccgcaccaccccgaacataacccctcaaaccgcgaccgcgccccgccgacgcccgaaaaccataaacgctcccgccgacgaaaacgaacccgaaccgaaacaccgccccacgccccgccgctcgcctcaaaccgcgtccgccgccgccgctacaatcgctccgaaacccgcactcgtcgcccgaccgccactcgaacccgacgaaaaaacgaacgacgccgcgtaaaacccgacgaattaaaccgactaccgtccatctaaccgtaaaaacccttcgattaactcatctcgccaaaaaaaacgaacatcccttccgacctcgaaacgaaatcgacgccgaaaaaaacgaaatctttaaaataaaaacgcttctcattaaacgcccaaactaaaattctttctttcaaaataaaaaaaaaacgaaatcgcccgaaaaacgaaacgatcgtccgccataaccaattataattactctaaataaacatcaaacgtacccaacgaactttaaattaaatattcgaaaaacgaaacgtaacgaaaaataccaaatatacaaaaaaattctcccttaattcccaaattaaatccgcctataaaaccaaaacctcgcgaaataacccaaa

SEQ ID NO: 2053 - DNA, 552 bp, Artificial Sequence
  chemically treated genomic DNA (Homo sapiens) CpG-island No: 2053
acgatttcggttttcgtttcggtcgaggttttttttgtaggtcgcgagaattaggtgcgttagcggcgttcgggaacgcggaagagttagtggagcggttttgtagtttaaagtatttcgtcgattttagtacggtcgttttatcgttttttattagatttagttttagggattgcgtagtcgtagagtttcgttcgagtatcggaagtttaggtcgttagtattttcgggaagtgatttcgttttcgaagtcgattggttgttgttttgttttcgttcgcgtcggtggcgttttttttgtagcgcgtgcgtgttgcgttattgagtagcgttatggaggattttgaagtattgggtttcgaatatatgggtatcgattttcggtttttttaggtatacgcgagggttggggagtcggtttacggttttgcggggcgcgttatcgttttttacgtcgtttaaatcgtatttttggttttttaggttgttatcgatttgggttggtcgcgatttacgttgatttaggagaaggttattttattggttttagaa

SEQ ID NO: 2054 - DNA, 552 bp, Artificial Sequence
  chemically treated genomic DNA (Homo sapiens) CpG-island No: 2054
ttctaaaaccaataaaataaccttctcctaaatcaacgtaaatcgcgaccaacccaaatcgataacaacctaaaaaaccaaaaatacgatttaaacgacgtaaaaaacgataacgcgccccgcaaaaccgtaaaccgactccccaaccctcgcgtatacctaaaaaaaccgaaaatcgatacccatatattcgaaacccaatacttcaaaatcctccataacgctactcaataacgcaacacgcacgcgctacaaaaaaaacgccaccgacgcgaacgaaaacaaaacaacaaccaatcgacttcgaaaacgaaatcacttcccgaaaatactaacgacctaaacttccgatactcgaacgaaactctacgactacgcaatccctaaaactaaatctaataaaaaacgataaaacgaccgtactaaaatcgacgaaatactttaaactacaaaaccgctccactaactcttccgcgttcccgaacgccgctaacgcacctaattctcgcgacctacaaaaaaaacctcgaccgaaacgaaaaccgaaatcgt

SEQ ID NO: 2055 - DNA, 552 bp, Artificial Sequence
  chemically treated genomic DNA (Homo sapiens) CpG-island No: 2055
ttttagggttagtgggatggtttttttttggattagcgtaggtcgcgattagtttagatcggtgatagtttaggagattaggagtgcggtttaagcggcgtgaagagcgatggcgcgtttcgtagagtcgtaagtcggttttttagttttcgcgtgtatttgaaggagtcggggatcgatgtttatgtgttcgaagtttagtgttttagagttttttatggcgttgtttagtagcgtagtacgtacgcgttgtaggaaaaacgttatcgacgcgagcgggagtaaagtaataattaatcggtttcggagacgaagttatttttcggaagtgttggcggtttaggttttcggtattcggacggagttttgcgattgcgtagtttttaggattgggtttagtaggaggcggtggagcggtcgtgttggggtcgacggggtattttggattatagagtcgttttattggttttttcgcgttttcggacgtcgttgacgtatttgattttcgcgatttgtaggagaagtttcggtcggggcgagggtcgaggtcgt

SEQ ID NO: 2056 - DNA, 552 bp, Artificial Sequence
  chemically treated genomic DNA (Homo sapiens) CpG-island No: 2056
acgacctcgaccctcgccccgaccgaaacttctcctacaaatcgcgaaaatcaaatacgtcaacgacgtccgaaaacgcgaaaaaaccaataaaacgactctataatccaaaataccccgtcgaccccaacacgaccgctccaccgcctcctactaaacccaatcctaaaaactacgcaatcgcaaaactccgtccgaataccgaaaacctaaaccgccaacacttccgaaaaataacttcgtctccgaaaccgattaattattactttactcccgctcgcgtcgataacgtttttcctacaacgcgtacgtactacgctactaaacaacgccataaaaaactctaaaacactaaacttcgaacacataaacatcgatccccgactccttcaaatacacgcgaaaactaaaaaaccgacttacgactctacgaaacgcgccatcgctcttcacgccgcttaaaccgcactcctaatctcctaaactatcaccgatctaaactaatcgcgacctacgctaatccaaaaaaaaaccatcccactaaccctaaaa

SEQ ID NO: 2057 - DNA, 850 bp, Artificial Sequence
  chemically treated genomic DNA (Homo sapiens) CpG-island No: 2057
cggggtttttttttttagttacggatttgggagtttatgattgcgaattcgtatattttttttagtttttttacgaagtagataggtttgtcgatgaattgagttagtatgtcggcgttgatgcgcgatttgggtaagtttattatgtttattatgattatggtttaagattgcggttggcgggaaatttacggacgattgaaattgtgcgtttcgcgggtgtttatggggtagatttttcggtattaattagcgaagattagcgttttagtttcgttaattaaatgcgcggaaatttaaatcgtaatcgcgttgtttttgaaaggggtggagaaggggttggatgagttcggaagtggagattggttgtttagtgacgcgcggcgtttcggaagttgatagatatagggcgagaggtagtggaggcgggatttggataggggcggaatttgagattatttttttgcgattataggattttcggcggtgatttgatttcggaagtggggtgtgaagtttcggtgttggtgcggcgggggattgcggggttagttttaggtatttcgtttcgcgggaggcgtcgtaattttattgtttttttatttttttcgcgaatagagttaaaagagttaggcgggagtcggtattagttgttgtcgcggtgttgtgggtgttgcgtattagttgtttattgttgtttcgtttttttttttgttagttttgcgtgggaggcgcgggagttttgcggaatgatacgtggtgtggcgtcggggttgtgatattcgtttttttggagatgggtagcggggttattagtgattttgattattttttttaggtttttgttatt

SEQ ID NO: 2058 - DNA, 850 bp, Artificial Sequence
  chemically treated genomic DNA (Homo sapiens) CpG-island No: 2058
aataacaaaaacctaaaaaaaataatcaaaatcactaataaccccgctacccatctccaaaaaaacgaatatcacaaccccgacgccacaccacgtatcattccgcaaaactcccgcgcctcccacgcaaaactaacaaaaaaaaaaacgaaacaacaataaacaactaatacgcaacacccacaacaccgcgacaacaactaataccgactcccgcctaactcttttaactctattcgcgaaaaaaataaaaaaacaataaaattacgacgcctcccgcgaaacgaaatacctaaaactaaccccgcaatcccccgccgcaccaacaccgaaacttcacaccccacttccgaaatcaaatcaccgccgaaaatcctataatcgcaaaaaaataatctcaaattccgcccctatccaaatcccgcctccactacctctcgccctatatctatcaacttccgaaacgccgcgcgtcactaaacaaccaatctccacttccgaactcatccaaccccttctccacccctttcaaaaacaacgcgattacgatttaaatttccgcgcatttaattaacgaaactaaaacgctaatcttcgctaattaataccgaaaaatctaccccataaacacccgcgaaacgcacaatttcaatcgtccgtaaatttcccgccaaccgcaatcttaaaccataatcataataaacataataaacttacccaaatcgcgcatcaacgccgacatactaactcaattcatcgacaaacctatctacttcgtaaaaaaactaaaaaaaatatacgaattcgcaatcataaactcccaaatccgtaactaaaaaaaaaaaccccg

SEQ ID NO: 2059 - DNA, 850 bp, Artificial Sequence
  chemically treated genomic DNA (Homo sapiens) CpG-island No: 2059
agtggtaaaagtttgaagaaagtgattaagattattgatgatttcgttgtttatttttaagggggcgggtattataatttcgacgttatattacgtattatttcgtaaaattttcgcgttttttacgtagaattggtaagagggaaggcgagatagtagtgaatagttggtacgtagtatttatagtatcgcggtagtagttagtgtcgattttcgtttagtttttttgattttgttcgcgggaagaatggggaaatagtaaggttgcggcgtttttcgcgagacgaggtatttgaggttggtttcgtagtttttcgtcgtattagtatcggagttttatattttattttcggggttaagttatcgtcgggaattttgtgatcgtagaaaggtagttttaggtttcgtttttatttaagtttcgtttttattgtttttcgttttgtatttgttaattttcgggacgtcgcgcgttattaagtagttaatttttattttcggatttatttagttttttttttattttttttagagatagcgcgattgcgatttaggttttcgcgtatttaattggcgaagttggagcgttagttttcgttgattggtgtcgagaaatttgttttatagatattcgcggggcgtatagttttagtcgttcgtgggtttttcgttagtcgtagttttggattataattatggtggatatgatggatttgtttaggtcgcgtattaacgtcggtatgttagtttaatttatcgataagtttgtttgtttcgtagggaggttggaaaaggtgtgcgggttcgtaattatgggtttttaagttcgtagttggagggagggatttcg

SEQ ID NO: 2060 - DNA, 850 bp, Artificial Sequence
  chemically treated genomic DNA (Homo sapiens) CpG-island No: 2060
cgaaatccctccctccaactacgaacttaaaaacccataattacgaacccgcacaccttttccaacctccctacgaaacaaacaaacttatcgataaattaaactaacataccgacgttaatacgcgacctaaacaaatccatcatatccaccataattataatccaaaactacgactaacgaaaaacccacgaacgactaaaactatacgccccgcgaatatctataaaacaaatttctcgacaccaatcaacgaaaactaacgctccaacttcgccaattaaatacgcgaaaacctaaatcgcaatcgcgctatctctaaaaaaaataaaaaaaaaactaaataaatccgaaaataaaaattaactacttaataacgcgcgacgtcccgaaaattaacaaatacaaaacgaaaaacaataaaaacgaaacttaaataaaaacgaaacctaaaactacctttctacgatcacaaaattcccgacgataacttaaccccgaaaataaaatataaaactccgatactaatacgacgaaaaactacgaaaccaacctcaaatacctcgtctcgcgaaaaacgccgcaaccttactatttccccattcttcccgcgaacaaaatcaaaaaaactaaacgaaaatcgacactaactactaccgcgatactataaatactacgtaccaactattcactactatctcgccttccctcttaccaattctacgtaaaaaacgcgaaaattttacgaaataatacgtaatataacgtcgaaattataatacccgcccccttaaaaataaacaacgaaatcatcaataatcttaatcactttcttcaaacttttaccact

SEQ ID NO: 2061 - DNA, 740 bp, Artificial Sequence
  chemically treated genomic DNA (Homo sapiens) CpG-island No: 2061
gagttcgtcgtacggagttcgaataattacgacgagtatagcgagtgacgcgcgcgagcgaagcgtacgataaagagcgtttattacgtatacgagagtacgcgtatagagttagatatatcgttatttggttagtatttcggatatgagtcgtatcgggtgttgattagataatttataaggcgataagtaaggacggatcgagcgagagatatattatagatatttgcggagtagacgcggagataagtacgagtataggatagattaagagacgcgtatagagtgatgttgttagtagatattcgatagttcgttgttatataaataggtcgtacgtatagcgtgatacgttattgtgtatagagaatcgaataagtgagatacgtatatggagtatatagtattagtacgtatgatattttatatacgtagattacgcgtattagcgcggtatgtagagcgtataacgtgagtacgagtatcgaagtatatagtatagtatagaagcgtattagtattagtacgatagtatatagtaggagcgatatgagcgtagcgcgttagtatatgattagagatagcgtacgagtagtatgtagaatagttatagatagtagagtatcgttagtaacgatagacgatgagatagttattaatattgtatagcgatagtcgtattcgtagtagagatagtgtagcgatagtagtagtagttagtatagagatagcgatagtag

SEQ ID NO: 2062 - DNA, 740 bp, Artificial Sequence
  chemically treated genomic DNA (Homo sapiens) CpG-island No: 2062
ctactatcgctatctctatactaactactactactatcgctacactatctctactacgaatacgactatcgctatacaatattaataactatctcatcgtctatcgttactaacgatactctactatctataactattctacatactactcgtacgctatctctaatcatatactaacgcgctacgctcatatcgctcctactatatactatcgtactaatactaatacgcttctatactatactatatacttcgatactcgtactcacgttatacgctctacataccgcgctaatacgcgtaatctacgtatataaaatatcatacgtactaatactatatactccatatacgtatctcacttattcgattctctatacacaataacgtatcacgctatacgtacgacctatttatataacaacgaactatcgaatatctactaacaacatcactctatacgcgtctcttaatctatcctatactcgtacttatctccgcgtctactccgcaaatatctataatatatctctcgctcgatccgtccttacttatcgccttataaattatctaatcaacacccgatacgactcatatccgaaatactaaccaaataacgatatatctaactctatacgcgtactctcgtatacgtaataaacgctctttatcgtacgcttcgctcgcgcgcgtcactcgctatactcgtcgtaattattcgaactccgtacgacgaactc

SEQ ID NO: 2063 - DNA, 740 bp, Artificial Sequence
  chemically treated genomic DNA (Homo sapiens) CpG-island No: 2063
ttgttgtcgttgtttttgtgttggttgttgttgttgtcgttgtattgtttttgttgcggatgcgattgtcgttatgtagtgttgatggttgttttatcgtttgtcgttgttgacgatgttttgttgtttgtagttgttttgtatgttattcgtgcgttgtttttgattatatgttggcgcgttgcgtttatgtcgtttttgttatatgttgtcgtattgatgttggtgcgtttttatgttatgttatatgtttcgatgttcgtgtttacgttgtgcgttttgtatgtcgcgttgatgcgcgtggtttgcgtgtgtgagatgttatgcgtgttggtgttatgtgttttatgtacgtgttttatttgttcgattttttgtgtataatggcgtgttacgttgtacgtgcgatttgtttgtatgataacggattgtcgagtgtttgttgatagtattattttgtgcgcgttttttagtttattttgtgttcgtatttgttttcgcgtttatttcgtagatgtttgtggtgtgtttttcgttcggttcgtttttgtttgtcgttttgtgggttgtttggttagtattcggtgcgatttatgttcgaggtattggttaggtagcggtgtgtttggttttgtgcgcgtgttttcgtgtacgtggtgggcgttttttgtcgtgcgtttcgttcgcgcgcgttattcgttgtgttcgtcgtgattgttcgaatttcgtgcggcggattt

SEQ ID NO: 2064 - DNA, 740 bp, Artificial Sequence
  chemically treated genomic DNA (Homo sapiens) CpG-island No: 2064
aaatccgccgcacgaaattcgaacaatcacgacgaacacaacgaataacgcgcgcgaacgaaacgcacgacaaaaaacgcccaccacgtacacgaaaacacgcgcacaaaaccaaacacaccgctacctaaccaatacctcgaacataaatcgcaccgaatactaaccaaacaacccacaaaacgacaaacaaaaacgaaccgaacgaaaaacacaccacaaacatctacgaaataaacgcgaaaacaaatacgaacacaaaataaactaaaaaacgcgcacaaaataatactatcaacaaacactcgacaatccgttatcatacaaacaaatcgcacgtacaacgtaacacgccattatacacaaaaaatcgaacaaataaaacacgtacataaaacacataacaccaacacgcataacatctcacacacgcaaaccacgcgcatcaacgcgacatacaaaacgcacaacgtaaacacgaacatcgaaacatataacataacataaaaacgcaccaacatcaatacgacaacatataacaaaaacgacataaacgcaacgcgccaacatataatcaaaaacaacgcacgaataacatacaaaacaactacaaacaacaaaacatcgtcaacaacgacaaacgataaaacaaccatcaacactacataacgacaatcgcatccgcaacaaaaacaatacaacgacaacaacaacaaccaacacaaaaacaacgacaacaa

SEQ ID NO: 2065 - DNA, 505 bp, Artificial Sequence
  chemically treated genomic DNA (Homo sapiens) CpG-island No: 2065
gtggttacggttcggtttcgtttcgcgttcgcgtaattttttttttaggttgcgttcgttttttaggttgcgcgggaggttgttttgttttttttttaggtaggtgtattcgcgattcgcggagttttcgttattttttattttacggtagcggcgtttcgtttatatttcgacgtttcggatatttaaagagttggagggtgggaaagtgcgtattttttggattcgttttagcgttattttatttcgttgtcggggattcgggcggttcggtcggggttgtttgaggcggttcgttgtcggtttagtcgttattaagttgtacgtcgggagtcgtagtttgcgtttgcgcgcgcggggtattgtggggtcgtcgtcgtcgcgtgtcgagcgttttggcgcggtcgaggggaagtagcggggttgttcgggttacgttggttattcgtatttggttttgtggtttcgattattagttagtaaggtttcggagaggttagcgaag

SEQ ID NO: 2066 - DNA, 505 bp, Artificial Sequence
  chemically treated genomic DNA (Homo sapiens) CpG-island No: 2066
cttcgctaacctctccgaaaccttactaactaataatcgaaaccacaaaaccaaatacgaataaccaacgtaacccgaacaaccccgctacttcccctcgaccgcgccaaaacgctcgacacgcgacgacgacgaccccacaataccccgcgcgcgcaaacgcaaactacgactcccgacgtacaacttaataacgactaaaccgacaacgaaccgcctcaaacaaccccgaccgaaccgcccgaatccccgacaacgaaataaaataacgctaaaacgaatccaaaaaatacgcactttcccaccctccaactctttaaatatccgaaacgtcgaaatataaacgaaacgccgctaccgtaaaataaaaaataacgaaaactccgcgaatcgcgaatacacctacctaaaaaaaaaacaaaacaacctcccgcgcaacctaaaaaacgaacgcaacctaaaaaaaaaattacgcgaacgcgaaacgaaaccgaaccgtaaccac

SEQ ID NO: 2067 - DNA, 505 bp, Artificial Sequence
  chemically treated genomic DNA (Homo sapiens) CpG-island No: 2067
tttcgttggttttttcggggttttgttgattagtggtcgaagttataggattaggtgcgggtggttagcgtaattcgggtagtttcgttgttttttttcggtcgcgttaggacgttcggtacgcggcgacgacggttttatagtgtttcgcgcgcgtaagcgtaggttgcggttttcggcgtgtagtttggtggcggttgagtcggtagcgggtcgttttaggtagtttcggtcgggtcgttcgggttttcggtagcggggtaggatggcgttaaagcggatttagaaggtacgtatttttttattttttaattttttgggtgttcgaagcgtcgaggtgtgggcggggcgtcgttgtcgtgaagtgaaaggtgacggaggtttcgcgagtcgcggatatatttgtttgggaaggaggtagaatagtttttcgcgtagtttgaaaagcgaacgtagtttgagaaagggattgcgcgagcgcggggcggggtcgggtcgtggttat

SEQ ID NO: 2068 - DNA, 505 bp, Artificial Sequence
  chemically treated genomic DNA (Homo sapiens) CpG-island No: 2068
ataaccacgacccgaccccgccccgcgctcgcgcaatccctttctcaaactacgttcgcttttcaaactacgcgaaaaactattctacctccttcccaaacaaatatatccgcgactcgcgaaacctccgtcacctttcacttcacgacaacgacgccccgcccacacctcgacgcttcgaacacccaaaaaattaaaaaataaaaaaatacgtaccttctaaatccgctttaacgccatcctaccccgctaccgaaaacccgaacgacccgaccgaaactacctaaaacgacccgctaccgactcaaccgccaccaaactacacgccgaaaaccgcaacctacgcttacgcgcgcgaaacactataaaaccgtcgtcgccgcgtaccgaacgtcctaacgcgaccgaaaaaaaacaacgaaactacccgaattacgctaaccacccgcacctaatcctataacttcgaccactaatcaacaaaaccccgaaaaaaccaacgaaa

SEQ ID NO: 2069 - DNA, 682 bp, Artificial Sequence
  chemically treated genomic DNA (Homo sapiens) CpG-island No: 2069
ttgattcgtaaagacggttgtatgtattgtttcgatttaggttgtttgaaagcgtgttcggcggaaggtgtaattatttagtatgttaacggtatcgtcgatttttagttcgagtagtgtattggttgcggttattgtattgcgggttgttcgttcgatatttcgcgttttaattcggaagataatcgcgtttataaatgtacgttgtgcgttgatcgcgtggtggttgtgtaagaattagtttgcgtgaagatttgtttaacgggcgcgatttatttcggtacgaaagagtcgatgaatacgttggcgagcgagcgcgtcgttgagttgaaaattcgcgggtacgataatgcgcgtttgtacgattcggatgcgtcggtcgtattttgtcgtgtgaggacgtattacgttgaatagtttatcgttatatggtttttcgagaatcggaattttttaaattttaattttggtaatttttggggatttttttcgtttacggtttttgtttttttttcggtcgatttttacgtttcggggggcgggattaatcgtcgcgaggggtaaatttatcgttcgtttaaatgcgggcgtttataaatatttgcggtcggtggggttttttttttcggggttgtggtatatagatttttttttttatttcgtcgtagggttatgcgttttt

SEQ ID NO: 2070 - DNA, 682 bp, Artificial Sequence
  chemically treated genomic DNA (Homo sapiens) CpG-island No: 2070
aaaaacgcataaccctacgacgaaataaaaaaaaaaatctatataccacaaccccgaaaaaaaaaaccccaccgaccgcaaatatttataaacgcccgcatttaaacgaacgataaatttacccctcgcgacgattaatcccgccccccgaaacgtaaaaatcgaccgaaaaaaaaacaaaaaccgtaaacgaaaaaaatccccaaaaattaccaaaattaaaatttaaaaaattccgattctcgaaaaaccatataacgataaactattcaacgtaatacgtcctcacacgacaaaatacgaccgacgcatccgaatcgtacaaacgcgcattatcgtacccgcgaattttcaactcaacgacgcgctcgctcgccaacgtattcatcgactctttcgtaccgaaataaatcgcgcccgttaaacaaatcttcacgcaaactaattcttacacaaccaccacgcgatcaacgcacaacgtacatttataaacgcgattatcttccgaattaaaacgcgaaatatcgaacgaacaacccgcaatacaataaccgcaaccaatacactactcgaactaaaaatcgacgataccgttaacatactaaataattacaccttccgccgaacacgctttcaaacaacctaaatcgaaacaatacatacaaccgtctttacgaatcaa

SEQ ID NO: 2071 - DNA, 682 bp, Artificial Sequence
  chemically treated genomic DNA (Homo sapiens) CpG-island No: 2071
aggagcgtatgattttgcggcgagatggaggagagggtttgtatgttatagtttcggaggggagggttttatcggtcgtaggtgtttgtgggcgttcgtatttaggcgggcgatggatttgtttttcgcgacggttggtttcgtttttcgagacgtggaaatcggtcgggaggggagtagaaatcgtaagcgggaggggtttttaggggttgttagagttagagtttggagagtttcggttttcgggaggttatgtgacgatgggttgtttagcgtggtgcgtttttatacgatagggtacgatcggcgtattcggatcgtatagacgcgtattgtcgtattcgcgggtttttagtttagcgacgcgttcgttcgttagcgtgtttatcgattttttcgtatcgaagtgaatcgcgttcgttgggtaggtttttacgtaggttggtttttgtataattattacgcggttaacgtatagcgtatatttgtagacgcggttgtttttcgggttgaggcgcggaatgtcgaacggatagttcgtaatgtaataatcgtagttaatgtattgttcggattggaagtcgacgatatcgttggtatattgaataattgtatttttcgtcgggtacgtttttaggtagtttggatcggaatagtgtatatagtcgtttttgcggattag

SEQ ID NO: 2072 - DNA, 682 bp, Artificial Sequence
  chemically treated genomic DNA (Homo sapiens) CpG-island No: 2072
ctaatccgcaaaaacgactatatacactattccgatccaaactacctaaaaacgtacccgacgaaaaatacaattattcaatataccaacgatatcgtcgacttccaatccgaacaatacattaactacgattattacattacgaactatccgttcgacattccgcgcctcaacccgaaaaacaaccgcgtctacaaatatacgctatacgttaaccgcgtaataattatacaaaaaccaacctacgtaaaaacctacccaacgaacgcgattcacttcgatacgaaaaaatcgataaacacgctaacgaacgaacgcgtcgctaaactaaaaacccgcgaatacgacaatacgcgtctatacgatccgaatacgccgatcgtaccctatcgtataaaaacgcaccacgctaaacaacccatcgtcacataacctcccgaaaaccgaaactctccaaactctaactctaacaacccctaaaaacccctcccgcttacgatttctactcccctcccgaccgatttccacgtctcgaaaaacgaaaccaaccgtcgcgaaaaacaaatccatcgcccgcctaaatacgaacgcccacaaacacctacgaccgataaaaccctcccctccgaaactataacatacaaaccctctcctccatctcgccgcaaaatcatacgctcct

SEQ ID NO: 2073 - DNA, 619 bp, Artificial Sequence
  chemically treated genomic DNA (Homo sapiens) CpG-island No: 2073
cgggtggcgcgttgggtttcggttcgttattattaagatttgaggatcgcgcgagttcgggaggaaggcggttgagttttcgttatcggtcgattgatgagaaggggtcgcggttgatttcggtttttaggtacgggagattgtcgggaaagtcgtcggcgacggagggcgacgcgttggtttcggagtttttatttttatttcgacgatcgtttttttttttcgtttcgatttattttcgaaattttgttagaattcgacgatttttatattgtttattcgagcgcggaggtgatgtcgtttttatcgtaggagcgagcgtcgcgtcgttaggaggcggttgaggtgcgcgcgggagatttcgaagttagcgtcgtcgttaatagagtttaaggagttataacgaggttgttcgcgggcgcgttgtttttagagggttgttttattttttttttcgtaggattttgcgtcggagtttgtagttattgcgcgcgggtagggaggatgggaggaggggcggggcgtttcgagagggcggagttgagcgtcggttgttttgattaatatttgtgggtttaatgggagtacggaaattttaggttgattttggattgatttt

SEQ ID NO: 2074 - DNA, 619 bp, Artificial Sequence
  chemically treated genomic DNA (Homo sapiens) CpG-island No: 2074
aaaatcaatccaaaatcaacctaaaatttccgtactcccattaaacccacaaatattaatcaaaacaaccgacgctcaactccgccctctcgaaacgccccgcccctcctcccatcctccctacccgcgcgcaataactacaaactccgacgcaaaatcctacgaaaaaaaaaataaaacaaccctctaaaaacaacgcgcccgcgaacaacctcgttataactccttaaactctattaacgacgacgctaacttcgaaatctcccgcgcgcacctcaaccgcctcctaacgacgcgacgctcgctcctacgataaaaacgacatcacctccgcgctcgaataaacaatataaaaatcgtcgaattctaacaaaatttcgaaaataaatcgaaacgaaaaaaaaaaacgatcgtcgaaataaaaataaaaactccgaaaccaacgcgtcgccctccgtcgccgacgactttcccgacaatctcccgtacctaaaaaccgaaatcaaccgcgaccccttctcatcaatcgaccgataacgaaaactcaaccgccttcctcccgaactcgcgcgatcctcaaatcttaataataacgaaccgaaacccaacgcgccacccg

SEQ ID NO: 2075 - DNA, 619 bp, Artificial Sequence
  chemically treated genomic DNA (Homo sapiens) CpG-island No: 2075
gaagttagtttaagattagtttggagttttcgtgtttttattgggtttatagatgttaattagagtagtcggcgtttagtttcgttttttcgggacgtttcgtttttttttttattttttttgttcgcgcgtagtgattgtaggtttcggcgtaaaattttgcgggagagggggtggggtaattttttggaggtagcgcgttcgcgggtagtttcgttgtggttttttgggttttgttggcggcggcgttagtttcggagtttttcgcgcgtattttagtcgttttttagcggcgcggcgttcgtttttacggtaagagcggtattattttcgcgttcgggtgggtagtgtggaggtcgtcgagttttgatagaatttcgaggatggatcgggacgagggaggagagcggtcgtcgggatggaggtgggggtttcggggttaacgcgtcgtttttcgtcgtcggcgattttttcggtagtttttcgtatttgagggtcggggttagtcgcgatttttttttattagtcggtcggtggcggaggtttagtcgtttttttttcgagttcgcgcggtttttaagttttgatggtgacgggtcgaagtttagcgcgttattcg

SEQ ID NO: 2076 - DNA, 619 bp, Artificial Sequence
  chemically treated genomic DNA (Homo sapiens) CpG-island No: 2076
cgaataacgcgctaaacttcgacccgtcaccatcaaaacttaaaaaccgcgcgaactcgaaaaaaaaacgactaaacctccgccaccgaccgactaataaaaaaaaatcgcgactaaccccgaccctcaaatacgaaaaactaccgaaaaaatcgccgacgacgaaaaacgacgcgttaaccccgaaacccccacctccatcccgacgaccgctctcctccctcgtcccgatccatcctcgaaattctatcaaaactcgacgacctccacactacccacccgaacgcgaaaataataccgctcttaccgtaaaaacgaacgccgcgccgctaaaaaacgactaaaatacgcgcgaaaaactccgaaactaacgccgccgccaacaaaacccaaaaaaccacaacgaaactacccgcgaacgcgctacctccaaaaaattaccccaccccctctcccgcaaaattttacgccgaaacctacaatcactacgcgcgaacaaaaaaaataaaaaaaaaaacgaaacgtcccgaaaaaacgaaactaaacgccgactactctaattaacatctataaacccaataaaaacacgaaaactccaaactaatcttaaactaacttc

SEQ ID NO: 2077 - DNA, 547 bp, Artificial Sequence
  chemically treated genomic DNA (Homo sapiens) CpG-island No: 2077
aaaatttcgtcggtgtttaattatattatttttttagattattttttttttttcgcgcggcggggagggagagaagcggggtttttttttatcgcgtttacgtattttaggttattcgcgcggtcggaggttatattcgcggcggggataattttttgttcgatttttttatatattcgttttgttttttatttcgcgttggaaagcgcgcggggaagagaagaagaaaatttttttattttcgttcgtttttgtattcgcgagatatatagagcgtcgtcgcgcggttagcgcgagcgcgaagtagatagcgattattcgttttcgcgagacgtcgcggtttcgcgagcgacgttcgaggaggattgcggaggatagttagacgatattaggagtcgcgacgtagcggtagtacgtagatcgagtttatagtagcgttgcgtagcgcgtacggagcgagtaagcgtgtcgatgaagcgcgatcgacggtcgacggtcgaagagatagatatttcgacgcgcgagtaacgagcgagttacgataagt

SEQ ID NO: 2078 - DNA, 547 bp, Artificial Sequence
  chemically treated genomic DNA (Homo sapiens) CpG-island No: 2078
acttatcgtaactcgctcgttactcgcgcgtcgaaatatctatctcttcgaccgtcgaccgtcgatcgcgcttcatcgacacgcttactcgctccgtacgcgctacgcaacgctactataaactcgatctacgtactaccgctacgtcgcgactcctaatatcgtctaactatcctccgcaatcctcctcgaacgtcgctcgcgaaaccgcgacgtctcgcgaaaacgaataatcgctatctacttcgcgctcgcgctaaccgcgcgacgacgctctatatatctcgcgaatacaaaaacgaacgaaaataaaaaaattttcttcttctcttccccgcgcgctttccaacgcgaaataaaaaacaaaacgaatatataaaaaaatcgaacaaaaaattatccccgccgcgaatataacctccgaccgcgcgaataacctaaaatacgtaaacgcgataaaaaaaaaccccgcttctctccctccccgccgcgcgaaaaaaaaaaaataatctaaaaaaataatataattaaacaccgacgaaatttt

SEQ ID NO: 2079 - DNA, 547 bp, Artificial Sequence
  chemically treated genomic DNA (Homo sapiens) CpG-island No: 2079
atttgtcgtggttcgttcgttgttcgcgcgtcgaggtgtttgttttttcgatcgtcggtcgtcggtcgcgttttatcgatacgtttgttcgtttcgtacgcgttgcgtagcgttgttgtgagttcggtttgcgtgttgtcgttgcgtcgcgatttttggtatcgtttggttgtttttcgtagtttttttcgagcgtcgttcgcggagtcgcggcgtttcgcgggggcgagtggtcgttgtttgtttcgcgttcgcgttgatcgcgcgacgacgttttgtgtgtttcgcgagtgtagaggcgagcgggggtagaggggttttttttttttttttttcgcgcgttttttagcgcggggtgggaggtagagcgggtgtgtgagggggtcgaataaagggttgttttcgtcgcgggtgtggttttcgatcgcgcgggtgatttggggtgcgtgggcgcggtgggggggggtttcgttttttttttttttcgtcgcgcggaaaagggggggtggtttagaggagtaatatagttgggtatcggcggggtttt

SEQ ID NO: 2080 - DNA, 547 bp, Artificial Sequence
  chemically treated genomic DNA (Homo sapiens) CpG-island No: 2080
aaaaccccgccgatacccaactatattactcctctaaaccacccccccttttccgcgcgacgaaaaaaaaaaaaaacgaaacccccccccaccgcgcccacgcaccccaaatcacccgcgcgatcgaaaaccacacccgcgacgaaaacaaccctttattcgaccccctcacacacccgctctacctcccaccccgcgctaaaaaacgcgcgaaaaaaaaaaaaaaaaaacccctctacccccgctcgcctctacactcgcgaaacacacaaaacgtcgtcgcgcgatcaacgcgaacgcgaaacaaacaacgaccactcgcccccgcgaaacgccgcgactccgcgaacgacgctcgaaaaaaactacgaaaaacaaccaaacgataccaaaaatcgcgacgcaacgacaacacgcaaaccgaactcacaacaacgctacgcaacgcgtacgaaacgaacaaacgtatcgataaaacgcgaccgacgaccgacgatcgaaaaaacaaacacctcgacgcgcgaacaacgaacgaaccacgacaaat

SEQ ID NO: 2081 - DNA, 919 bp, Artificial Sequence
  chemically treated genomic DNA (Homo sapiens) CpG-island No: 2081
gtcgacggacggaaaggtcggcgcgtacgggcgtggtgcggcggggataggaggtagttacgggcgtattttagggttagtatataatgggtcgcgtaggtcgggtaggcgtttagttgggacgtcgtcgtattacgtgggttgtagagcgtacggggtaggtagttgtcggtggtttagggcgggcgttgcgcggttagcgttcgtgcgtgcgtgcgcgcgcgcgcgtgcgcgtgtttgcgtttaagggatttgcgattaggcggcgcggcggatagttcggcggcggggcggggggagttatattgcggggttttttttcgtttattttggtttttttcggagcggagacggtaaatggcggatttcgatatttacgacgatcgggtttatagtagtttcggcggcggtagagggtgaggcgggcgtgcgcgggtttcgtcgggggttgcgggatcggcggagtcggggtcgttagggtggcggtcgttttgcgtttagtcggggcggcgggaggcgggggttcgcggaggtttaggagcggcgtttggagggtcggggtttggaaatggcgcgttcggagacggggcggcggcggttgggttttcggggttttgtttgcggggcggattttttttattgtttttcgttaacgataacgtgttggtttttgttttgttttggtcgcggcggcgtcgatgttcggagacgagcgttcgtttttagttttattttttttacggtaggattagtgcggggttgagttgtggcgttggggtacgggttatacggtttgtttcgtttcggtttcggtttttttcgcggttttttgttgtttgttcgttttgtaggtttttggttttttcgttacgaggtcggtcgattggggaaggtcggtagttaagaggggcgatttttt

SEQ ID NO: 2082 - DNA, 919 bp, Artificial Sequence
  chemically treated genomic DNA (Homo sapiens) CpG-island No: 2082
aaaaaatcgcccctcttaactaccgaccttccccaatcgaccgacctcgtaacgaaaaaaccaaaaacctacaaaacgaacaaacaacaaaaaaccgcgaaaaaaaccgaaaccgaaacgaaacaaaccgtataacccgtaccccaacgccacaactcaaccccgcactaatcctaccgtaaaaaaaataaaactaaaaacgaacgctcgtctccgaacatcgacgccgccgcgaccaaaacaaaacaaaaaccaacacgttatcgttaacgaaaaacaataaaaaaaatccgccccgcaaacaaaaccccgaaaacccaaccgccgccgccccgtctccgaacgcgccatttccaaaccccgaccctccaaacgccgctcctaaacctccgcgaacccccgcctcccgccgccccgactaaacgcaaaacgaccgccaccctaacgaccccgactccgccgatcccgcaacccccgacgaaacccgcgcacgcccgcctcaccctctaccgccgccgaaactactataaacccgatcgtcgtaaatatcgaaatccgccatttaccgtctccgctccgaaaaaaaccaaaataaacgaaaaaaaaccccgcaatataactccccccgccccgccgccgaactatccgccgcgccgcctaatcgcaaatcccttaaacgcaaacacgcgcacgcgcgcgcgcgcacgcacgcacgaacgctaaccgcgcaacgcccgccctaaaccaccgacaactacctaccccgtacgctctacaacccacgtaatacgacgacgtcccaactaaacgcctacccgacctacgcgacccattatatactaaccctaaaatacgcccgtaactacctcctatccccgccgcaccacgcccgtacgcgccgacctttccgtccgtcgac

SEQ ID NO: 2083 - DNA, 919 bp, Artificial Sequence
  chemically treated genomic DNA (Homo sapiens) CpG-island No: 2083
agggaatcgttttttttggttgtcgattttttttagtcggtcggtttcgtggcgaaggggttaggggtttgtaaggcgggtaggtaatagagggtcgcgaaagaggtcgggatcggagcggggtaggtcgtgtggttcgtattttagcgttatagtttagtttcgtattggttttatcgtaggggggatggggttggaagcgggcgttcgttttcgggtatcggcgtcgtcgcggttaaggtagggtaaaaattaatacgttgtcgttggcgggaggtagtggaagggattcgtttcgtaagtaagatttcgggagtttagtcgtcgtcgtttcgttttcgagcgcgttatttttaggtttcggttttttaggcgtcgtttttaggttttcgcgggttttcgtttttcgtcgtttcggttgagcgtaggacggtcgttattttgacggtttcgatttcgtcggtttcgtagttttcgacggggttcgcgtacgttcgttttattttttgtcgtcgtcgaagttgttgtaggttcgatcgtcgtaggtgtcgaagttcgttatttgtcgttttcgtttcgagaggaattagggtgagcgaggaaggatttcgtaatataatttttttcgtttcgtcgtcgggttgttcgtcgcgtcgtttgatcgtaaattttttggacgtaggtacgcgtacgcgcgcgcgcgtacgtacgtacggacgttggtcgcgtagcgttcgttttgggttatcggtagttgtttgtttcgtgcgttttgtagtttacgtggtgcggcggcgttttagttggacgtttgttcggtttacgcggtttattatgtgttggttttggggtgcgttcgtggttgttttttattttcgtcgtattacgttcgtgcgcgtcggttttttcgttcgtcggt

SEQ ID NO: 2084 - DNA, 919 bp, Artificial Sequence
  chemically treated genomic DNA (Homo sapiens) CpG-island No: 2084
accgacgaacgaaaaaaccgacgcgcacgaacgtaatacgacgaaaataaaaaacaaccacgaacgcaccccaaaaccaacacataataaaccgcgtaaaccgaacaaacgtccaactaaaacgccgccgcaccacgtaaactacaaaacgcacgaaacaaacaactaccgataacccaaaacgaacgctacgcgaccaacgtccgtacgtacgtacgcgcgcgcgcgtacgcgtacctacgtccaaaaaatttacgatcaaacgacgcgacgaacaacccgacgacgaaacgaaaaaaattatattacgaaatccttcctcgctcaccctaattcctctcgaaacgaaaacgacaaataacgaacttcgacacctacgacgatcgaacctacaacaacttcgacgacgacaaaaaataaaacgaacgtacgcgaaccccgtcgaaaactacgaaaccgacgaaatcgaaaccgtcaaaataacgaccgtcctacgctcaaccgaaacgacgaaaaacgaaaacccgcgaaaacctaaaaacgacgcctaaaaaaccgaaacctaaaaataacgcgctcgaaaacgaaacgacgacgactaaactcccgaaatcttacttacgaaacgaatcccttccactacctcccgccaacgacaacgtattaatttttaccctaccttaaccgcgacgacgccgatacccgaaaacgaacgcccgcttccaaccccatcccccctacgataaaaccaatacgaaactaaactataacgctaaaatacgaaccacacgacctaccccgctccgatcccgacctctttcgcgaccctctattacctacccgccttacaaacccctaaccccttcgccacgaaaccgaccgactaaaaaaaatcgacaaccaaaaaaaacgattccct

SEQ ID NO: 2085 - DNA, 605 bp, Artificial Sequence
  chemically treated genomic DNA (Homo sapiens) CpG-island No: 2085
tttcggcgttaattgtatttattaggtttggttaatatagagtcgcgttaattttttgaggttgcgttaagatttgaagcggcggatcgagagttcgggtttgagattgagagagtaacggaatggaggcggggtagaggcggaaatataatttgtagggttagagcgaggcgcgagaaggacggcggcgtgagggggcggggcgcgtagcgcgagaaggtaggtacgaggggcgagcgcgaggcggggtacggcgcgtggcgtgagacggggcggggcgcgcgtatcggcgcgcggtcgcgtgacgcgtttttaaatttttaatcgtcgtagtttattcgtttgtgttttgcgtttttttttttcgcgttttggagtcggattcggtttcggaaattcgatttgtagacgcggtatttttattgcgtagaggtcgtagttggcggaaggagagaggcggtcgttttgttaataggtcgggggaagtcgtgttttcgcggttgttcggtgcgatatttttttcggatttagtatgtaggtgtcgggcgattgttatgaatttcggagttatgaggatttatagtaaaggatatttttagggtaag

SEQ ID NO: 2086 - DNA, 605 bp, Artificial Sequence
  chemically treated genomic DNA (Homo sapiens) CpG-island No: 2086
cttaccctaaaaatatcctttactataaatcctcataactccgaaattcataacaatcgcccgacacctacatactaaatccgaaaaaaatatcgcaccgaacaaccgcgaaaacacgacttcccccgacctattaacaaaacgaccgcctctctccttccgccaactacgacctctacgcaataaaaataccgcgtctacaaatcgaatttccgaaaccgaatccgactccaaaacgcgaaaaaaaaaaacgcaaaacacaaacgaataaactacgacgattaaaaatttaaaaacgcgtcacgcgaccgcgcgccgatacgcgcgccccgccccgtctcacgccacgcgccgtaccccgcctcgcgctcgcccctcgtacctaccttctcgcgctacgcgccccgccccctcacgccgccgtccttctcgcgcctcgctctaaccctacaaattatatttccgcctctaccccgcctccattccgttactctctcaatctcaaacccgaactctcgatccgccgcttcaaatcttaacgcaacctcaaaaaattaacgcgactctatattaaccaaacctaataaatacaattaacgccgaaa

SEQ ID NO: 2087 - DNA, 605 bp, Artificial Sequence
  chemically treated genomic DNA (Homo sapiens) CpG-island No: 2087
tttattttggaaatgttttttattgtggatttttatggtttcggagtttatggtagtcgttcggtatttatatgttgggttcggagaaagtgtcgtatcgggtagtcgcgaaagtacggtttttttcggtttgttgataggacggtcgttttttttttttcgttagttacggtttttacgtagtagaggtatcgcgtttgtaggtcgggttttcggggtcggattcggttttaaggcgcggaggaggaaggcgtaaagtataaacgagtgggttgcggcggttgaagatttgaaaacgcgttacgcggtcgcgcgtcgatacgcgcgtttcgtttcgttttacgttacgcgtcgtgtttcgtttcgcgttcgtttttcgtgtttgttttttcgcgttgcgcgtttcgtttttttacgtcgtcgtttttttcgcgtttcgttttggttttgtaggttgtgttttcgtttttatttcgtttttatttcgttgtttttttagttttagattcgggttttcggttcgtcgttttaggttttggcgtagttttagagagttggcgcggttttgtgttgattaaatttagtggatgtagttagcgtcggag

SEQ ID NO: 2088 - DNA, 605 bp, Artificial Sequence
  chemically treated genomic DNA (Homo sapiens) CpG-island No: 2088
ctccgacgctaactacatccactaaatttaatcaacacaaaaccgcgccaactctctaaaactacgccaaaacctaaaacgacgaaccgaaaacccgaatctaaaactaaaaaaacaacgaaataaaaacgaaataaaaacgaaaacacaacctacaaaaccaaaacgaaacgcgaaaaaaacgacgacgtaaaaaaacgaaacgcgcaacgcgaaaaaacaaacacgaaaaacgaacgcgaaacgaaacacgacgcgtaacgtaaaacgaaacgaaacgcgcgtatcgacgcgcgaccgcgtaacgcgttttcaaatcttcaaccgccgcaacccactcgtttatactttacgccttcctcctccgcgccttaaaaccgaatccgaccccgaaaacccgacctacaaacgcgatacctctactacgtaaaaaccgtaactaacgaaaaaaaaaaaacgaccgtcctatcaacaaaccgaaaaaaaccgtactttcgcgactacccgatacgacactttctccgaacccaacatataaataccgaacgactaccataaactccgaaaccataaaaatccacaataaaaaacatttccaaaataaa

SEQ ID NO: 2089 - DNA, 510 bp, Artificial Sequence
  chemically treated genomic DNA (Homo sapiens) CpG-island No: 2089
cgcgacggttcgtgtcgtcgtggagataagcgggatacggagagagaattatattttttagttgatttttttgcgcgcgtttttgtttgcgcgcggggggcgagtgtatcgggcgttcgttttttgtcgagtttttgtcgttcgttcgagtttttgttaggggatgaggtgggaggcgttagaaattatttagttatagttaatcgtttaatgtagtattcgttcgtttttttcgttagcggaagcgttcgcgaagtataatgtagtattgagtcgcggtggaggttgtagcgttacggtcgtcgtagtatcggtcggggttgggtggaggtggcgcggggatttcgggggcgcggagcgagggaaacggattcggcggcgtcggtatgaggagttgagcgtttcgggcgaggcgggttgacggtagtattatgtaggcggtagtggttgtgttcgtgttttttttgttgttttgtgttttggggatttgtttttcggcgcgttgcggtt

SEQ ID NO: 2090 - DNA, 510 bp, Artificial Sequence
  chemically treated genomic DNA (Homo sapiens) CpG-island No: 2090
aaccgcaacgcgccgaaaaacaaatccccaaaacacaaaacaacaaaaaaaacacgaacacaaccactaccgcctacataatactaccgtcaacccgcctcgcccgaaacgctcaactcctcataccgacgccgccgaatccgtttccctcgctccgcgcccccgaaatccccgcgccacctccacccaaccccgaccgatactacgacgaccgtaacgctacaacctccaccgcgactcaatactacattatacttcgcgaacgcttccgctaacgaaaaaaacgaacgaatactacattaaacgattaactataactaaataatttctaacgcctcccacctcatcccctaacaaaaactcgaacgaacgacaaaaactcgacaaaaaacgaacgcccgatacactcgccccccgcgcgcaaacaaaaacgcgcgcaaaaaaatcaactaaaaaatataattctctctccgtatcccgcttatctccacgacgacacgaaccgtcgcg

SEQ ID NO: 2091 - DNA, 510 bp, Artificial Sequence
  chemically treated genomic DNA (Homo sapiens) CpG-island No: 2091
ggtcgtagcgcgtcggagggtaggtttttaggatatagagtagtaagaaaggtacggatatagttattgtcgtttgtatggtgttgtcgttagttcgtttcgttcgagacgtttagttttttatgtcggcgtcgtcgagttcgtttttttcgtttcgcgttttcggggttttcgcgttatttttatttagtttcggtcggtgttgcggcggtcgtggcgttgtaatttttatcgcggtttagtgttgtattgtgtttcgcggacgttttcgttggcggggggagcgagcgagtgttgtattgggcggttggttgtagttaagtggtttttagcgttttttattttattttttggtaaaggttcgggcgggcgataagagttcggtagggagcgagcgttcggtgtattcgtttttcgcgcgtaggtaagggcgcgcgtaggagagttagttgggaaatgtagtttttttttcgtgtttcgtttgtttttacgacggtacggatcgtcgcg

SEQ ID NO: 2092 - DNA, 510 bp, Artificial Sequence
  chemically treated genomic DNA (Homo sapiens) CpG-island No: 2092
cgcgacgatccgtaccgtcgtaaaaacaaacgaaacacgaaaaaaaaactacatttcccaactaactctcctacgcgcgcccttacctacgcgcgaaaaacgaatacaccgaacgctcgctccctaccgaactcttatcgcccgcccgaacctttaccaaaaaataaaataaaaaacgctaaaaaccacttaactacaaccaaccgcccaatacaacactcgctcgctccccccgccaacgaaaacgtccgcgaaacacaatacaacactaaaccgcgataaaaattacaacgccacgaccgccgcaacaccgaccgaaactaaataaaaataacgcgaaaaccccgaaaacgcgaaacgaaaaaaacgaactcgacgacgccgacataaaaaactaaacgtctcgaacgaaacgaactaacgacaacaccatacaaacgacaataactatatccgtacctttcttactactctatatcctaaaaacctaccctccgacgcgctacgacc

SEQ ID NO: 2093 - DNA, 592 bp, Artificial Sequence
  chemically treated genomic DNA (Homo sapiens) CpG-island No: 2093
ttcgttcgttttagttttttattttttaaagatcggttttatattttcgtatttttttatttttttcgtttttttatttttttatttttttatattttttttatttttatttttttttttttataattttttaattcgtttttttttttttttaatttttttttcgattatttatattatgttttattatatttatattgttttatatcgtttttatcgatcgattatcgttttttttattttttttttaatcgtattttatttttttttatcgtaatttttttttttttcgtcgcgttagttaattttatttttttttttttttatttttttttttatttttattatttttttttttttatttttataattatatttattcgtttagttttttcgcgttttttttattattttttttttttttttatatagtttttattcgatttcgttttgttattttttttttttatacggttcgtcgcgtttgttttttcgtttatatattatttttatgttttttcgtatattttatttacgttatttttttgtttttattttatatattttatttttttttagtgtttattttatt

SEQ ID NO: 2094 - DNA, 592 bp, Artificial Sequence
  chemically treated genomic DNA (Homo sapiens) CpG-island No: 2094
aataaaataaacactaaaaaaaaataaaatatataaaataaaaacaaaaaaataacgtaaataaaatatacgaaaaaacataaaaataatatataaacgaaaaaacaaacgcgacgaaccgtataaaaaaaaaaaataacaaaacgaaatcgaataaaaactatataaaaaaaaaaaaaaaataataaaaaaaacgcgaaaaaactaaacgaataaatataattataaaaataaaaaaaaaaaaataataaaaataaaaaaaaaaataaaaaaaaaaaaaaataaaattaactaacgcgacgaaaaaaaaaaaaattacgataaaaaaaaataaaatacgattaaaaaaaaaataaaaaaaacgataatcgatcgataaaaacgatataaaacaatataaatataataaaacataatataaataatcgaaaaaaaaattaaaaaaaaaaaaaaacgaattaaaaaattataaaaaaaaaaaaataaaaataaaaaaaatataaaaaaataaaaaaataaaaaaacgaaaaaaataaaaaaatacgaaaatataaaaccgatctttaaaaaataaaaaactaaaacgaacgaa

SEQ ID NO: 2095 - DNA, 592 bp, Artificial Sequence
  chemically treated genomic DNA (Homo sapiens) CpG-island No: 2095
agtggagtgggtattaggagagggtgaggtatgtggggtgagggtaggagagtggcgtgggtggggtgtgcgagggggtatgggggtggtatgtgagcggggaggtaggcgcggcgggtcgtgtagaggaggagggtagtagagcggggtcggatagaagttgtgtgagggaggggagggggtggtgaaggagacgcgaggaggttgggcggatgagtgtagttgtgaaggtggggggggaggggtagtgagggtggggaggggggtgagagggggagggggtggagttaattaacgcggcggggaaggggggggttgcgatagggggaagtagggtgcgattagggagagggtgagggagacggtggtcggtcggtgaggacgatgtgagataatgtgggtgtggtaggatatggtgtaagtgatcggggggagggttaggggaaaggaggggcgagttggagggttgtgggaggagaagggtaggggtgagggagatgtaggggagtaagggggtgaaaggacggggaggatgggggggtacgaggatgtggggtcggtttttggaagatagagaattaggacggacggg

SEQ ID NO: 2096 - DNA, 592 bp, Artificial Sequence
  chemically treated genomic DNA (Homo sapiens) CpG-island No: 2096
cccgtccgtcctaattctctatcttccaaaaaccgaccccacatcctcgtacccccccatcctccccgtcctttcacccccttactcccctacatctccctcacccctacccttctcctcccacaaccctccaactcgcccctcctttcccctaaccctccccccgatcacttacaccatatcctaccacacccacattatctcacatcgtcctcaccgaccgaccaccgtctccctcaccctctccctaatcgcaccctacttccccctatcgcaaccccccccttccccgccgcgttaattaactccaccccctccccctctcacccccctccccaccctcactacccctccccccccaccttcacaactacactcatccgcccaacctcctcgcgtctccttcaccaccccctcccctccctcacacaacttctatccgaccccgctctactaccctcctcctctacacgacccgccgcgcctacctccccgctcacataccacccccataccccctcgcacaccccacccacgccactctcctaccctcaccccacatacctcaccctctcctaatacccactccact

SEQ ID NO: 2097 - DNA, 563 bp, Artificial Sequence
  chemically treated genomic DNA (Homo sapiens) CpG-island No: 2097
tcgacgatttggattatttttcgggttatttttatttggagatgtagttgaatttcgagtcgcgttcgtcggttttatagcgcgttcgggatttgaagttgtagcgggagggtttgcggtaggagttttagttggcggtcgtttcgtagcgtttcgttgtgcgttattttttgggcgttttcgtattttatttggaggagttggacgaggttcgcgagtgttttttcgaggtggtttacgagtattcgggtaattttaatgtttgggttaatttggtatacgtgtacgggcggttgggttaggaagaagaggaggaggcgtgcgtcgtacggttggtcgattttatgggtttggtagaggagttcgaggtcgtcggggatttttagtttcgcgtcgttcgttgtttggtcgagtagggttacgcgtatggtttcgacgtcggttgcgttagtttagaggagcgtgcgcgggggttggcggtaggtatcgcgttttacgataaggcgttaggttacgggtagtaggtaggtgatttttgtttttttatttttttttgggaggat

SEQ ID NO: 2098 - DNA, 563 bp, Artificial Sequence
  chemically treated genomic DNA (Homo sapiens) CpG-island No: 2098
atcctcccaaaaaaaaataaaaaaacaaaaatcacctacctactacccgtaacctaacgccttatcgtaaaacgcgatacctaccgccaacccccgcgcacgctcctctaaactaacgcaaccgacgtcgaaaccatacgcgtaaccctactcgaccaaacaacgaacgacgcgaaactaaaaatccccgacgacctcgaactcctctaccaaacccataaaatcgaccaaccgtacgacgcacgcctcctcctcttcttcctaacccaaccgcccgtacacgtataccaaattaacccaaacattaaaattacccgaatactcgtaaaccacctcgaaaaaacactcgcgaacctcgtccaactcctccaaataaaatacgaaaacgcccaaaaaataacgcacaacgaaacgctacgaaacgaccgccaactaaaactcctaccgcaaaccctcccgctacaacttcaaatcccgaacgcgctataaaaccgacgaacgcgactcgaaattcaactacatctccaaataaaaataacccgaaaaataatccaaatcgtcga

SEQ ID NO: 2099 - DNA, 563 bp, Artificial Sequence
  chemically treated genomic DNA (Homo sapiens) CpG-island No: 2099
gtttttttagagggaggtagggagataggggttatttatttgttgttcgtagtttagcgttttgtcgtagagcgcgatgtttgtcgttagttttcgcgtacgtttttttgggttggcgtagtcgacgtcgaagttatgcgcgtagttttgttcggttaggtagcgagcggcgcggagttgggggttttcggcggtttcgggtttttttgttaggtttatgaggtcggttagtcgtgcggcgtacgttttttttttttttttttggtttagtcgttcgtatacgtgtgttagattggtttaggtattgaggttgttcgggtgttcgtgggttatttcgaggaagtattcgcgggtttcgtttagtttttttaggtagaatgcgaaagcgtttaggaggtgacgtatagcggggcgttgcggggcggtcgttagttggagtttttgtcgtagattttttcgttgtagttttaggtttcgggcgcgttgtggggtcggcgagcgcggttcgaagtttaattgtatttttaggtgaaagtggttcgggaggtagtttaggtcgtcga

SEQ ID NO: 2100 - DNA, 563 bp, Artificial Sequence
  chemically treated genomic DNA (Homo sapiens) CpG-island No: 2100
tcgacgacctaaactacctcccgaaccactttcacctaaaaatacaattaaacttcgaaccgcgctcgccgaccccacaacgcgcccgaaacctaaaactacaacgaaaaaatctacgacaaaaactccaactaacgaccgccccgcaacgccccgctatacgtcacctcctaaacgctttcgcattctacctaaaaaaactaaacgaaacccgcgaatacttcctcgaaataacccacgaacacccgaacaacctcaatacctaaaccaatctaacacacgtatacgaacgactaaaccaaaaaaaaaaaaaaaaaacgtacgccgcacgactaaccgacctcataaacctaacaaaaaaacccgaaaccgccgaaaacccccaactccgcgccgctcgctacctaaccgaacaaaactacgcgcataacttcgacgtcgactacgccaacccaaaaaaacgtacgcgaaaactaacgacaaacatcgcgctctacgacaaaacgctaaactacgaacaacaaataaataacccctatctccctacctccctctaaaaaaac

SEQ ID NO: 2101 - DNA, 636 bp, Artificial Sequence
  chemically treated genomic DNA (Homo sapiens) CpG-island No: 2101
gtttgcggtgaagggtttatttcgcgttttcgattttaggtttattattatatgggcgtggacgcggtgtaggagttgttggcggtggacgaggcggcgttgaattaggcgttggtgtttttggttaaggcgggcgagtcggagttgggtgttacgttgttcgagttgtagttgttgcgcggtaagtgtttgcgtattaagggcgaggacgttaacgcggtcgtttgttttaagcgcgtagtggagttggacgacgcgggttttagttatatcgacggtttcggttgtttgttcgaggcgttgttggcgtagtggagttaggtatagttgagcgacggggagttgggtcgcgaggtggacgtttggttgcgtcgcgtttaggataagtatttcgcggcgcgtttgcgttaggagttgtagcgcgtgtggcgcgggtatacggacgaggtgttggggttggttcgggttttggtggtttagggacggtcggcgttggtgcggttgtttttcgagattatggagcgcgagggcgagggcgttagcgcgtcgcgggatcgtcgggttgttttattttagggtttaggtgtttaggtcggaggttttttgggatttcgtttaggtttcgtttagttgatg

SEQ ID NO: 2102 - DNA, 636 bp, Artificial Sequence
  chemically treated genomic DNA (Homo sapiens) CpG-island No: 2102
catcaactaaacgaaacctaaacgaaatcccaaaaaacctccgacctaaacacctaaaccctaaaataaaacaacccgacgatcccgcgacgcgctaacgccctcgccctcgcgctccataatctcgaaaaacaaccgcaccaacgccgaccgtccctaaaccaccaaaacccgaaccaaccccaacacctcgtccgtatacccgcgccacacgcgctacaactcctaacgcaaacgcgccgcgaaatacttatcctaaacgcgacgcaaccaaacgtccacctcgcgacccaactccccgtcgctcaactatacctaactccactacgccaacaacgcctcgaacaaacaaccgaaaccgtcgatataactaaaacccgcgtcgtccaactccactacgcgcttaaaacaaacgaccgcgttaacgtcctcgcccttaatacgcaaacacttaccgcgcaacaactacaactcgaacaacgtaacacccaactccgactcgcccgccttaaccaaaaacaccaacgcctaattcaacgccgcctcgtccaccgccaacaactcctacaccgcgtccacgcccatataataataaacctaaaatcgaaaacgcgaaataaacccttcaccgcaaac

SEQ ID NO: 2103 - DNA, 636 bp, Artificial Sequence
  chemically treated genomic DNA (Homo sapiens) CpG-island No: 2103
tattagttgggcggggtttgggcggggttttagggagttttcggtttgggtatttgagttttagaatgagatagttcggcggtttcgcggcgcgttggcgttttcgttttcgcgttttatggtttcgaagagtagtcgtattagcgtcggtcgtttttgggttattagggttcgggttagttttaatatttcgttcgtgtgttcgcgttatacgcgttgtagtttttggcgtaggcgcgtcgcggggtatttgttttgggcgcggcgtagttaggcgtttatttcgcggtttagtttttcgtcgtttagttgtgtttggttttattgcgttagtagcgtttcgagtaggtagtcgaagtcgtcggtgtggttggagttcgcgtcgtttagttttattgcgcgtttgaagtaggcggtcgcgttggcgttttcgtttttgatgcgtaggtatttgtcgcgtagtagttgtagttcgggtagcgtggtatttagtttcgattcgttcgttttggttaggaatattagcgtttggtttagcgtcgtttcgtttatcgttagtagtttttgtatcgcgtttacgtttatatagtagtagatttggggtcggggacgcggggtgagttttttatcgtaggt

SEQ ID NO: 2104 - DNA, 636 bp, Artificial Sequence
  chemically treated genomic DNA (Homo sapiens) CpG-island No: 2104
acctacgataaaaaactcaccccgcgtccccgaccccaaatctactactatataaacgtaaacgcgatacaaaaactactaacgataaacgaaacgacgctaaaccaaacgctaatattcctaaccaaaacgaacgaatcgaaactaaataccacgctacccgaactacaactactacgcgacaaatacctacgcatcaaaaacgaaaacgccaacgcgaccgcctacttcaaacgcgcaataaaactaaacgacgcgaactccaaccacaccgacgacttcgactacctactcgaaacgctactaacgcaataaaaccaaacacaactaaacgacgaaaaactaaaccgcgaaataaacgcctaactacgccgcgcccaaaacaaataccccgcgacgcgcctacgccaaaaactacaacgcgtataacgcgaacacacgaacgaaatattaaaactaacccgaaccctaataacccaaaaacgaccgacgctaatacgactactcttcgaaaccataaaacgcgaaaacgaaaacgccaacgcgccgcgaaaccgccgaactatctcattctaaaactcaaatacccaaaccgaaaactccctaaaaccccgcccaaaccccgcccaactaata

SEQ ID NO: 2105 - DNA, 1048 bp, Artificial Sequence
  chemically treated genomic DNA (Homo sapiens) CpG-island No: 2105
cgcgcgggagttagggtgtgtcggtttttaggtatagggcgtagcgcgtaaggattttggggtttattttgtgttcggttcgttcgcgtcgagtttcggaggcgtcggcgtgcgtttttattatttagttgtcggtatacgatgttttttagtagcgataggcgttttaggatcgtattttggatggggttggcgttgtgcgcgttgaggttggttatttcggcgcgcggtcggatttcgtggaaggcgttttcgttgcgtatcgcgatgggtcggtatttggttaggaagagtacgaagtcggttatcgcgattaagtttaatattaatagtattttgattttttttagtgaagttattaaatagttcggtcggttttcgtttcggatttgcgttttttcgggtttcggcgaggcgcggggtagttaggggtcgtgtaagttttatatattagacggtcggtagggatttaagtttttgttcgttttattttaaggatgttcgggcggcggagacggttgggaggtcggattggtggtggggagaacggaatcgtttatatggaagttttcgttttgtagaagtgtttttcgagacgtttgtttagtttacggcgtacggtttcgtttaggcgttttcgcgaaaggttagggatttgagggttttttttttgtattagtaagtggttcgtttttggatttttagtcgtcggcgtcgcggatttcgaggtcggtaggcggggttgttcgggaggtatagagggagcggcgtataggtgtcggatttagggatcgtcgttcgtttacggcggagcgcgtcgcgtttggggtcgtatagttttttattttggttcgtaggcggtcgtcgcggcgcgttattcgcgttttttagcggaagattcgttttttcgggtaggcgtttttgtttcgtttatcgattcgttttatcgcgtcgggtagaggggaagttcgttcggggagttcgtattttttaggtttcgtagttacgtttaagttttaattatttttaaagtgggggtagtattagg

SEQ ID NO: 2106 - DNA, 1048 bp, Artificial Sequence
  chemically treated genomic DNA (Homo sapiens) CpG-island No: 2106
cctaatactacccccactttaaaaataattaaaacttaaacgtaactacgaaacctaaaaaatacgaactccccgaacgaacttcccctctacccgacgcgataaaacgaatcgataaacgaaacaaaaacgcctacccgaaaaaacgaatcttccgctaaaaaacgcgaataacgcgccgcgacgaccgcctacgaaccaaaataaaaaactatacgaccccaaacgcgacgcgctccgccgtaaacgaacgacgatccctaaatccgacacctatacgccgctccctctatacctcccgaacaaccccgcctaccgacctcgaaatccgcgacgccgacgactaaaaatccaaaaacgaaccacttactaatacaaaaaaaaaaccctcaaatccctaacctttcgcgaaaacgcctaaacgaaaccgtacgccgtaaactaaacaaacgtctcgaaaaacacttctacaaaacgaaaacttccatataaacgattccgttctccccaccaccaatccgacctcccaaccgtctccgccgcccgaacatccttaaaataaaacgaacaaaaacttaaatccctaccgaccgtctaatatataaaacttacacgacccctaactaccccgcgcctcgccgaaacccgaaaaaacgcaaatccgaaacgaaaaccgaccgaactatttaataacttcactaaaaaaaatcaaaatactattaatattaaacttaatcgcgataaccgacttcgtactcttcctaaccaaataccgacccatcgcgatacgcaacgaaaacgccttccacgaaatccgaccgcgcgccgaaataaccaacctcaacgcgcacaacgccaaccccatccaaaatacgatcctaaaacgcctatcgctactaaaaaacatcgtataccgacaactaaataataaaaacgcacgccgacgcctccgaaactcgacgcgaacgaaccgaacacaaaataaaccccaaaatccttacgcgctacgccctatacctaaaaaccgacacaccctaactcccgcgcg

SEQ ID NO: 2107 - DNA, 1048 bp, Artificial Sequence
  chemically treated genomic DNA (Homo sapiens) CpG-island No: 2107
tttagtgttgtttttattttgagagtaattgagatttgagcgtgattgcggagtttggaggatgcgggtttttcgagcgggttttttttttgttcggcgcgatggagcgggtcggtgagcggaataaaggcgtttgttcgggggagcgggtttttcgttgaagagcgcgggtggcgcgtcgcgacggtcgtttgcgggttaaggtgggaggttgtgcggttttaggcgcggcgcgtttcgtcgtgggcgggcggcgatttttgagttcggtatttgtgcgtcgttttttttgtgtttttcgggtagtttcgtttgtcggtttcggagttcgcggcgtcggcggttagaggtttagaggcgaattatttgttggtgtagaagagaaatttttaaatttttggtttttcgcggagacgtttggacggggtcgtgcgtcgtggattgagtaggcgtttcggggagtatttttgtagagcgaggatttttatgtgagcgatttcgttttttttattattaattcgattttttagtcgttttcgtcgttcgagtatttttgaggtgggacgagtaggggtttggatttttgtcggtcgtttggtgtgtgaggtttgtacggtttttggttgtttcgcgtttcgtcggagttcgagggggcgtaggttcggggcgagggtcggtcgggttgtttgatggttttattgagaagagttaaagtgttgttggtgttgaatttgatcgcggtagtcggtttcgtgttttttttggttaagtgtcggtttatcgcggtgcgtagcggagacgttttttacgagattcggtcgcgcgtcgaggtggttaattttagcgcgtatagcgttagttttatttaggatgcggttttgaagcgtttgtcgttgttggaggatatcgtgtatcggtagttgaatggtaaggacgtacgtcggcgttttcggggttcgacgcgggcgggtcgggtatagggtgagttttagggtttttgcgcgttgcgttttgtgtttgggagtcggtatattttggttttcgcgcg

SEQ ID NO: 2108 - DNA, 1048 bp, Artificial Sequence
  chemically treated genomic DNA (Homo sapiens) CpG-island No: 2108
cgcgcgaaaaccaaaatataccgactcccaaacacaaaacgcaacgcgcaaaaaccctaaaactcaccctatacccgacccgcccgcgtcgaaccccgaaaacgccgacgtacgtccttaccattcaactaccgatacacgatatcctccaacaacgacaaacgcttcaaaaccgcatcctaaataaaactaacgctatacgcgctaaaattaaccacctcgacgcgcgaccgaatctcgtaaaaaacgtctccgctacgcaccgcgataaaccgacacttaaccaaaaaaaacacgaaaccgactaccgcgatcaaattcaacaccaacaacactttaactcttctcaataaaaccatcaaacaacccgaccgaccctcgccccgaacctacgccccctcgaactccgacgaaacgcgaaacaaccaaaaaccgtacaaacctcacacaccaaacgaccgacaaaaatccaaacccctactcgtcccacctcaaaaatactcgaacgacgaaaacgactaaaaaatcgaattaataataaaaaaaacgaaatcgctcacataaaaatcctcgctctacaaaaatactccccgaaacgcctactcaatccacgacgcacgaccccgtccaaacgtctccgcgaaaaaccaaaaatttaaaaatttctcttctacaccaacaaataattcgcctctaaacctctaaccgccgacgccgcgaactccgaaaccgacaaacgaaactacccgaaaaacacaaaaaaaacgacgcacaaataccgaactcaaaaatcgccgcccgcccacgacgaaacgcgccgcgcctaaaaccgcacaacctcccaccttaacccgcaaacgaccgtcgcgacgcgccacccgcgctcttcaacgaaaaacccgctcccccgaacaaacgcctttattccgctcaccgacccgctccatcgcgccgaacaaaaaaaaaacccgctcgaaaaacccgcatcctccaaactccgcaatcacgctcaaatctcaattactctcaaaataaaaacaacactaaa

SEQ ID NO: 2109 - DNA, 924 bp, Artificial Sequence
  chemically treated genomic DNA (Homo sapiens) CpG-island No: 2109
gcgggcgtcgggtcgagcgttacgtttttttcgtttttcgcgcggagtttattttatttcgtcggtaaatttattagcgtttatagcgtcgtcggttttcggatacgttttaagtttttaaatcgcgtcgagagttttcggggtttttagggtatatcggtttgtttcggagttggcgcgtcgcgaggttggtcggaaggagtcggattttaaaagttatagtagttttttatttttttttaaaacgtcgcgggtagcgcggcggggaggtacgcgtgtcgaattatttttcgttcgttagattcggtcgcgcggttcgtttcgcgttttcgggagttaaaacgtcgagttttttaattggcggacgcggtgatatcgtcgttgcggtatcgagagttatatagtttcggagttgaggagttcggaggggacgcgtaggtggcggcggagggcggggcgcggttcgaggggagcggcggcggcgttagtttttttttcgtcgtttttcgttattttgttttcgagaggttgtcggcggtcgtcgtcgtcgttcgtaggttgtcgagcgtatagtttttcggttcgtcgattcgtgcgcgcgcgtattcgggtagggcgggggtttttggagagtggggatcgcgcgggatggaggtagttaaggtatgttggttgcggtcggcgttggagggattttttagtttttagtattttttgagcgggcgggttcgttttatttcggttggcgatgaagatatttttttttgtgtgttcgcggtttcgcgttgcgtggttaggaatggttagagggaaaatttggtttggaggttcggattttgagattttcggagttaggtcgggcgtgagcgggtttgggggggttttttgcgtgtaagaattttaatttttttagttattgttttt

SEQ ID NO: 2110 - DNA, 924 bp, Artificial Sequence
  chemically treated genomic DNA (Homo sapiens) CpG-island No: 2110
aaaaacaataactaaaaaaattaaaattcttacacgcaaaaaacccccccaaacccgctcacgcccgacctaactccgaaaatctcaaaatccgaacctccaaaccaaattttccctctaaccattcctaaccacgcaacgcgaaaccgcgaacacacaaaaaaaaatatcttcatcgccaaccgaaataaaacgaacccgcccgctcaaaaaatactaaaaactaaaaaatccctccaacgccgaccgcaaccaacataccttaactacctccatcccgcgcgatccccactctccaaaaacccccgccctacccgaatacgcgcgcgcacgaatcgacgaaccgaaaaactatacgctcgacaacctacgaacgacgacgacgaccgccgacaacctctcgaaaacaaaataacgaaaaacgacgaaaaaaaaactaacgccgccgccgctcccctcgaaccgcgccccgccctccgccgccacctacgcgtcccctccgaactcctcaactccgaaactatataactctcgataccgcaacgacgatatcaccgcgtccgccaattaaaaaactcgacgttttaactcccgaaaacgcgaaacgaaccgcgcgaccgaatctaacgaacgaaaaataattcgacacgcgtacctccccgccgcgctacccgcgacgttttaaaaaaaaataaaaaactactataacttttaaaatccgactccttccgaccaacctcgcgacgcgccaactccgaaacaaaccgatataccctaaaaaccccgaaaactctcgacgcgatttaaaaacttaaaacgtatccgaaaaccgacgacgctataaacgctaataaatttaccgacgaaataaaataaactccgcgcgaaaaacgaaaaaaacgtaacgctcgacccgacgcccgc

SEQ ID NO: 2111 - DNA, 924 bp, Artificial Sequence
  chemically treated genomic DNA (Homo sapiens) CpG-island No: 2111
agaagtagtgattggggaggttagaatttttgtacgtagagaatttttttaagttcgtttacgttcggtttggtttcgaaggttttagaattcgagtttttaggttagattttttttttagttatttttggttacgtagcgcggagtcgcgagtatatagaaaaggatgtttttatcgttaatcgggatggaacgaattcgttcgtttagggagtattgagaattaaagggtttttttagcgtcggtcgtagttagtatgttttgattgtttttatttcgcgcggtttttattttttagaagttttcgttttgttcgggtgcgcgcgcgtacgagtcggcgaatcggggagttgtgcgttcggtagtttgcgggcggcggcggcggtcgtcgatagtttttcggggatagggtggcgaagagcggcggaggaggagttggcgtcgtcgtcgtttttttcgggtcgcgtttcgtttttcgtcgttatttgcgcgtttttttcgggttttttagtttcggggttgtgtggttttcggtgtcgtagcggcggtgttatcgcgttcgttaattgggagattcggcgttttggttttcgggggcgcgggacgagtcgcgcggtcggatttggcgagcggagggtgattcggtacgcgtattttttcgtcgcgttgttcgcgacgttttgggagggggtagagaattgttgtgatttttgaggttcgatttttttcggttagtttcgcgacgcgttagtttcgagataggtcggtgtgttttgaaggtttcgaaggttttcggcgcggtttgggggtttggaacgtgttcgggagtcggcggcgttgtgagcgttggtgagtttgtcggcggggtggggtggatttcgcgcggggggcggagaggacgtagcgttcggttcggcgttcgt

SEQ ID NO: 2112 - DNA, 924 bp, Artificial Sequence
  chemically treated genomic DNA (Homo sapiens) CpG-island No: 2112
acgaacgccgaaccgaacgctacgtcctctccgccccccgcgcgaaatccaccccaccccgccgacaaactcaccaacgctcacaacgccgccgactcccgaacacgttccaaacccccaaaccgcgccgaaaaccttcgaaaccttcaaaacacaccgacctatctcgaaactaacgcgtcgcgaaactaaccgaaaaaaatcgaacctcaaaaatcacaacaattctctaccccctcccaaaacgtcgcgaacaacgcgacgaaaaaatacgcgtaccgaatcaccctccgctcgccaaatccgaccgcgcgactcgtcccgcgcccccgaaaaccaaaacgccgaatctcccaattaacgaacgcgataacaccgccgctacgacaccgaaaaccacacaaccccgaaactaaaaaacccgaaaaaaacgcgcaaataacgacgaaaaacgaaacgcgacccgaaaaaaacgacgacgacgccaactcctcctccgccgctcttcgccaccctatccccgaaaaactatcgacgaccgccgccgccgcccgcaaactaccgaacgcacaactccccgattcgccgactcgtacgcgcgcgcacccgaacaaaacgaaaacttctaaaaaataaaaaccgcgcgaaataaaaacaatcaaaacatactaactacgaccgacgctaaaaaaaccctttaattctcaatactccctaaacgaacgaattcgttccatcccgattaacgataaaaacatccttttctatatactcgcgactccgcgctacgtaaccaaaaataactaaaaaaaaaatctaacctaaaaactcgaattctaaaaccttcgaaaccaaaccgaacgtaaacgaacttaaaaaaattctctacgtacaaaaattctaacctccccaatcactacttct

SEQ ID NO: 2113 - DNA, 995 bp, Artificial Sequence
  chemically treated genomic DNA (Homo sapiens) CpG-island No: 2113
cgcgcgcgggcgggcgcggaagcgcgcggggggtggggggggggcggggttggggtagagagcggagagagaggggggtgggtcgagcgttgtgttggtggtgtggtggcgcgtgtggtgggggagggcgagtcgtaggggtaggggcggcgggtgggtggtgtggggcggtggggggtgacggttcggcgggcgcggcggggagggtgtgtggtgcgcgcgtggagcgaagaggggtgggtgtcgcgaggtgagaggggggcgtcgttgttggagaggtgtggtggagaggaggggagtgggatcgggaaatgtggggggtcgtggcggcgtgggggagggggaggcggaaggggcgcggggcgggggggtggtgtggtgggggcgagggggaggaggggcgcgcgtcgtgggcgcgggggggaggtggtttgtgggagggcgtgggggtggaggtgagggggagaggcgagaattgtggggggcgtcgaaaacgggtgggggtgtaagggattcgcgtttgaatgagatcgttgagtgagacggattgcgtgatagacggtttagaaggtcgtgggtgaagcgtggggtaggacgtgaaggttagaaaattgatcgcggcgaatgtggtcggtagatggtgtatagttagtgttgcgttattgggtgtcgggtatttagtggtatgataacggaagagcgatgatgttgtattcggtcgtttggtagtgggagagttcgtttgatttttttagcgtttacggtagatagggatcgaattgttttacgacgttttaaatttagttcgcgtattattttaaatggcgaatagttatatttttgggatttattttagttttaggatgtgatgagtcgatatcgaggtgttaaatatcgtcgtcgatatgaatttttgggcggtattagtttgttattttcggagtaatttttattcgttgaggcgatggttttttaatttaggaattatcggatga

SEQ ID NO: 2114 - DNA, 995 bp, Artificial Sequence
  chemically treated genomic DNA (Homo sapiens) CpG-island No: 2114
tcatccgataattcctaaattaaaaaaccatcgcctcaacgaataaaaattactccgaaaataacaaactaataccgcccaaaaattcatatcgacgacgatatttaacacctcgatatcgactcatcacatcctaaaactaaaataaatcccaaaaatataactattcgccatttaaaataatacgcgaactaaatttaaaacgtcgtaaaacaattcgatccctatctaccgtaaacgctaaaaaaatcaaacgaactctcccactaccaaacgaccgaatacaacatcatcgctcttccgttatcataccactaaatacccgacacccaataacgcaacactaactatacaccatctaccgaccacattcgccgcgatcaattttctaaccttcacgtcctaccccacgcttcacccacgaccttctaaaccgtctatcacgcaatccgtctcactcaacgatctcattcaaacgcgaatcccttacacccccacccgttttcgacgccccccacaattctcgcctctccccctcacctccacccccacgccctcccacaaaccacctcccccccgcgcccacgacgcgcgcccctcctccccctcgcccccaccacaccacccccccgccccgcgccccttccgcctccccctcccccacgccgccacgaccccccacatttcccgatcccactcccctcctctccaccacacctctccaacaacgacgcccccctctcacctcgcgacacccacccctcttcgctccacgcgcgcaccacacaccctccccgccgcgcccgccgaaccgtcaccccccaccgccccacaccacccacccgccgcccctacccctacgactcgccctcccccaccacacgcgccaccacaccaccaacacaacgctcgacccacccccctctctctccgctctctaccccaaccccgccccccccccaccccccgcgcgcttccgcgcccgcccgcgcgcg

SEQ ID NO: 2115 - DNA, 995 bp, Artificial Sequence
  chemically treated genomic DNA (Homo sapiens) CpG-island No: 2115
ttattcggtggtttttgaattgaaaggttatcgttttaacggataaaagttatttcggggataataggttgatatcgtttaagagtttatatcgacggcggtgtttggtatttcgatgtcggtttattatattttggggttgaagtaggttttaagggtatggttgttcgttatttaaagtggtacgcgagttgggtttagaacgtcgtgagatagttcggtttttatttgtcgtgggcgttggagaaattaggcgggtttttttattattaagcgatcgagtgtagtattatcgttttttcgttgttatgttattgaatgttcggtatttaatggcgtagtattagttgtgtattatttatcgattatattcgtcgcgattagttttttgatttttacgttttgttttacgttttatttacgattttttaggtcgtttgttacgtagttcgttttatttaacggttttatttaagcgcgggttttttatatttttattcgttttcggcgttttttataattttcgttttttttttttatttttatttttacgtttttttataaattatttttttttcgcgtttacggcgcgcgttttttttttttttcgtttttattatattattttttcgtttcgcgtttttttcgttttttttttttttacgtcgttacggttttttatatttttcggttttattttttttttttttattatatttttttaatagcggcgttttttttttatttcgcgatatttattttttttcgttttacgcgcgtattatatatttttttcgtcgcgttcgtcgggtcgttattttttatcgttttatattatttattcgtcgtttttgtttttgcggttcgtttttttttattatacgcgttattatattattaatataacgttcggtttattttttttttttttcgttttttgttttaatttcgttttttttttatttttcgcgcgttttcgcgttcgttcgcgcgcg

SEQ ID NO: 2116 - DNA, 995 bp, Artificial Sequence
  chemically treated genomic DNA (Homo sapiens) CpG-island No: 2116
cgcgcgcgaacgaacgcgaaaacgcgcgaaaaataaaaaaaaaacgaaattaaaacaaaaaacgaaaaaaaaaaaaaataaaccgaacgttatattaataatataataacgcgtataataaaaaaaaacgaaccgcaaaaacaaaaacgacgaataaataatataaaacgataaaaaataacgacccgacgaacgcgacgaaaaaaatatataatacgcgcgtaaaacgaaaaaaaataaatatcgcgaaataaaaaaaaaacgccgctattaaaaaaatataataaaaaaaaaaaaaataaaaccgaaaaatataaaaaaccgtaacgacgtaaaaaaaaaaaaaacgaaaaaaacgcgaaacgaaaaaataatataataaaaacgaaaaaaaaaaaaaacgcgcgccgtaaacgcgaaaaaaaaataatttataaaaaaacgtaaaaataaaaataaaaaaaaaaaacgaaaattataaaaaacgccgaaaacgaataaaaatataaaaaacccgcgcttaaataaaaccgttaaataaaacgaactacgtaacaaacgacctaaaaaatcgtaaataaaacgtaaaacaaaacgtaaaaatcaaaaaactaatcgcgacgaatataatcgataaataatacacaactaatactacgccattaaataccgaacattcaataacataacaacgaaaaaacgataatactacactcgatcgcttaataataaaaaaacccgcctaatttctccaacgcccacgacaaataaaaaccgaactatctcacgacgttctaaacccaactcgcgtaccactttaaataacgaacaaccatacccttaaaacctacttcaaccccaaaatataataaaccgacatcgaaataccaaacaccgccgtcgatataaactcttaaacgatatcaacctattatccccgaaataacttttatccgttaaaacgataacctttcaattcaaaaaccaccgaataa

SEQ ID NO: 2117 - DNA, 719 bp, Artificial Sequence
  chemically treated genomic DNA (Homo sapiens) CpG-island No: 2117
tcgtatcgtcgtgtttttcggtttaagttttaatattcgggcgaattggcgtgttttattagttcggtagtatgaattattattcgttagttattttattggagacgacggaagatcgttgtcgaagcggcgttttatcgtttttagtatgacgttttgtattgttttattgttgaagtcgtcggtagtgatcgtttagtgtagtgttttacgattatagtagtttagcgcgaacgtgatacgtagttttttttcgttattatagtagaattcgaattcgttagagtattatcgttgattgtttttttttacggttattttgtttgtatgtgttcgtttcgatggcggtatagtaggttttcgtttaagtaatagcgtattttggcgtatgattcggtaaatacgtttggaattgatcgtaggcgtattattaagttttgtttgtttgcgaatagcgtttatattcgacgataatttatacgttggtagttttgcgtatgatatggtgtatacggagaagtattattcgtattattagtgtgacgattgcgtcggttatttatttagttatcggttcgtttgagaatgacgtgtattgcgtacgcgatattcggagataagcggttgattaagtttatttttttattttcgggtaataaggtgcgtgcggtatttatttgattgttcgtttatatttaacggattttttgaggagatta

SEQ ID NO: 2118 - DNA, 719 bp, Artificial Sequence
  chemically treated genomic DNA (Homo sapiens) CpG-island No: 2118
taatctcctcaaaaaatccgttaaatataaacgaacaatcaaataaataccgcacgcaccttattacccgaaaataaaaaaataaacttaatcaaccgcttatctccgaatatcgcgtacgcaatacacgtcattctcaaacgaaccgataactaaataaataaccgacgcaatcgtcacactaataatacgaataatacttctccgtatacaccatatcatacgcaaaactaccaacgtataaattatcgtcgaatataaacgctattcgcaaacaaacaaaacttaataatacgcctacgatcaattccaaacgtatttaccgaatcatacgccaaaatacgctattacttaaacgaaaacctactataccgccatcgaaacgaacacatacaaacaaaataaccgtaaaaaaaaacaatcaacgataatactctaacgaattcgaattctactataataacgaaaaaaaactacgtatcacgttcgcgctaaactactataatcgtaaaacactacactaaacgatcactaccgacgacttcaacaataaaacaatacaaaacgtcatactaaaaacgataaaacgccgcttcgacaacgatcttccgtcgtctccaataaaataactaacgaataataattcatactaccgaactaataaaacacgccaattcgcccgaatattaaaacttaaaccgaaaaacacgacgatacga

SEQ ID NO: 2119 - DNA, 719 bp, Artificial Sequence
  chemically treated genomic DNA (Homo sapiens) CpG-island No: 2119
tgatttttttaaagaattcgttgaatatggacgggtaattaagtggatatcgtacgtattttattgttcggggatggggagataagtttagttagtcgtttgttttcgggtgtcgcgtgcgtagtgtacgttatttttagacgaatcgatgattggatggatggtcgacgtagtcgttatattgatgatacggatagtgttttttcgtatatattatgttatgcgtagagttgttaacgtatgagttatcgtcgggtataggcgttgttcgtagataggtagaatttgatggtacgtttgcgattaattttaaacgtgtttatcggattatgcgttagaatgcgttgttgtttgagcgaaaatttgttgtatcgttatcgaaacgggtatatataggtagagtggtcgtgaaagaaagtaattagcgatggtgttttgacgggttcgagttttgttgtgataacggagagagattgcgtgttacgttcgcgttggattgttgtgatcgtgaggtattgtattgggcggttattatcggcggttttaatagtgaaatagtataggacgttatgttgggagcggtggaacgtcgtttcggtaacgatttttcgtcgtttttagtggagtggttgacggataatggtttatgttatcgggttaatgaaatacgttagttcgttcggatgttgggatttgaatcgaagaatacggcggtgcgg

SEQ ID NO: 2120 - DNA, 719 bp, Artificial Sequence
  chemically treated genomic DNA (Homo sapiens) CpG-island No: 2120
ccgcaccgccgtattcttcgattcaaatcccaacatccgaacgaactaacgtatttcattaacccgataacataaaccattatccgtcaaccactccactaaaaacgacgaaaaatcgttaccgaaacgacgttccaccgctcccaacataacgtcctatactatttcactattaaaaccgccgataataaccgcccaatacaatacctcacgatcacaacaatccaacgcgaacgtaacacgcaatctctctccgttatcacaacaaaactcgaacccgtcaaaacaccatcgctaattactttctttcacgaccactctacctatatatacccgtttcgataacgatacaacaaattttcgctcaaacaacaacgcattctaacgcataatccgataaacacgtttaaaattaatcgcaaacgtaccatcaaattctacctatctacgaacaacgcctatacccgacgataactcatacgttaacaactctacgcataacataatatatacgaaaaaacactatccgtatcatcaatataacgactacgtcgaccatccatccaatcatcgattcgtctaaaaataacgtacactacgcacgcgacacccgaaaacaaacgactaactaaacttatctccccatccccgaacaataaaatacgtacgatatccacttaattacccgtccatattcaacgaattctttaaaaaaatca

SEQ ID NO: 2121 - DNA, 730 bp, Artificial Sequence
  chemically treated genomic DNA (Homo sapiens) CpG-island No: 2121
ttttcgtcgttttatttttatttatcgttacgcggttatttattagcgcgtcgcgattattatcgtgtgcgattgttgatatatgagttgcgttcgaggtgttttacgtatttataggtttatatttcgtattgttacgtttatacgttattggcgcgtattgttatattattattatttatcgcgttattttcgatttttattttatttttatttttttttatttttttttatagttttttttcgatattttatttttttatttttatttagtatatttttttttacgttttatcgtcgtcgttatatttttcgtttatttattagttttttttcgtttcgtttcgttcgttatattttttttttttttcgcgtacgtatatcgtatattatttttttttcgtatattttattcgttacgcgcggtttatttttatttcgttttatcgcgttttttttcgcgtacgtattatttcgttatataatttatatacgcggtatatttatacgttttttcgcgcgtcgcgcgtttttttatatataattcgtatttatcgcgttatcgcgttttttttttttttttgtacgtatattattttttttatatatattcgttattcgttttttttcgtttttatttttttcgttttttcgcgttacgttcgttatttttattcgtacgcgtttttatatttcgtatatttattatttttattttattatttttatt

SEQ ID NO: 2122 - DNA, 730 bp, Artificial Sequence
  chemically treated genomic DNA (Homo sapiens) CpG-island No: 2122
aataaaaataataaaataaaaataataaatatacgaaatataaaaacgcgtacgaataaaaataacgaacgtaacgcgaaaaaacgaaaaaaataaaaacgaaaaaaaacgaataacgaatatatataaaaaaaataatatacgtacaaaaaaaaaaaaaaaacgcgataacgcgataaatacgaattatatataaaaaaacgcgcgacgcgcgaaaaaacgtataaatataccgcgtatataaattatataacgaaataatacgtacgcgaaaaaaaacgcgataaaacgaaataaaaataaaccgcgcgtaacgaataaaatatacgaaaaaaaaataatatacgatatacgtacgcgaaaaaaaaaaaaaatataacgaacgaaacgaaacgaaaaaaaactaataaataaacgaaaaatataacgacgacgataaaacgtaaaaaaaaatatactaaataaaaataaaaaaataaaatatcgaaaaaaaactataaaaaaaaataaaaaaaaataaaaataaaataaaaatcgaaaataacgcgataaataataataatataacaatacgcgccaataacgtataaacgtaacaatacgaaatataaacctataaatacgtaaaacacctcgaacgcaactcatatatcaacaatcgcacacgataataatcgcgacgcgctaataaataaccgcgtaacgataaataaaaataaaacgacgaaaa

SEQ ID NO: 2123 - DNA, 730 bp, Artificial Sequence
  chemically treated genomic DNA (Homo sapiens) CpG-island No: 2123
ggtgggggtggtggggtgggggtggtgggtgtgcgaggtgtgggggcgcgtgcgggtgggggtggcgagcgtggcgcgagagggcgaggggggtgagggcgggggaaggcgagtggcgggtgtgtgtggggggagtggtgtgcgtgtagggagagaggaggagcgcggtggcgcggtgagtgcgggttgtgtgtgggggggcgcgcggcgcgcgagagagcgtgtgggtgtgtcgcgtgtgtgagttgtgtggcgaggtgatgcgtgcgcggaggagggcgcggtggggcggggtggaggtgggtcgcgcgtgacgggtggagtgtgcgaggagagagtggtgtgcggtgtgcgtgcgcgagagagagagagagtgtggcgggcgaagcggggcgggagaagattggtgagtgagcgaggagtgtggcggcggcggtggggcgtggggagaggtgtgttgggtggggatggagaggtggggtgtcgaggaggggttgtgagaaagagtggggaggaatggaagtgaggtgggagtcggaagtggcgcggtgggtggtgatgatgtgatagtgcgcgttaatggcgtgtgagcgtgatagtacggaatgtggatttgtgagtgcgtgaagtatttcgagcgtaatttatgtgttaatagtcgtatacgatagtgatcgcggcgcgttgataagtgatcgcgtgacgatgaatgagagtgagacgacgggga

SEQ ID NO: 2124 - DNA, 730 bp, Artificial Sequence
  chemically treated genomic DNA (Homo sapiens) CpG-island No: 2124
tccccgtcgtctcactctcattcatcgtcacgcgatcacttatcaacgcgccgcgatcactatcgtatacgactattaacacataaattacgctcgaaatacttcacgcactcacaaatccacattccgtactatcacgctcacacgccattaacgcgcactatcacatcatcaccacccaccgcgccacttccgactcccacctcacttccattcctccccactctttctcacaacccctcctcgacaccccacctctccatccccacccaacacacctctccccacgccccaccgccgccgccacactcctcgctcactcaccaatcttctcccgccccgcttcgcccgccacactctctctctctctcgcgcacgcacaccgcacaccactctctcctcgcacactccacccgtcacgcgcgacccacctccaccccgccccaccgcgccctcctccgcgcacgcatcacctcgccacacaactcacacacgcgacacacccacacgctctctcgcgcgccgcgcgcccccccacacacaacccgcactcaccgcgccaccgcgctcctcctctctccctacacgcacaccactccccccacacacacccgccactcgccttcccccgccctcacccccctcgccctctcgcgccacgctcgccacccccacccgcacgcgcccccacacctcgcacacccaccacccccaccccaccacccccacc

SEQ ID NO: 2125 - DNA, 659 bp, Artificial Sequence
  chemically treated genomic DNA (Homo sapiens) CpG-island No: 2125
gtgtagtgtgagtgagtttagcgtcgatttcgtagtgtgagtgagtttagcgtcgatttcgtagtgtgagtgagttcggtttcgatttcgtagtgtgagtgagttcggtttcgatttcgtagtgtgagtgagttcggcgtcgatttcgtagtgtgagtgagttcggcgtcgatttcgtagtgtgagtgagttcggtttcgatttcgtagtgtgagtgagttcggtttcgatttcgtagtgtgagtgagttcggtttcgatttcgtagtgtgagtgagttcggcgtcgatttcgtagtgtgagtgagttcggtttcgatttcgtagtgtgagtgagttcggcgtcgatttcgtagtgtgagttcggcgtcgatttcgtagtgtgagtgagttcggcgtcgatttcgtagtgtgagtgagttcggtttcgatttcgtagtgtgagtgagttcggtttcgatttcgtagtgtgagtgagttcggcgtcgatttcgtagtgtgagtgagttcggcgtcgatttcgtagtgtgagttcggtttcgatttcgtagtgtgagtgagttcggcgtcgatttcgtagtgtgagtgagtgagtgtggttggttgacgatgggatttgttgtatgacgtggttagagtttatgtgttgagttagtatata

SEQ ID NO: 2126 - DNA, 659 bp, Artificial Sequence
  chemically treated genomic DNA (Homo sapiens) CpG-island No: 2126
tatatactaactcaacacataaactctaaccacgtcatacaacaaatcccatcgtcaaccaaccacactcactcactcacactacgaaatcgacgccgaactcactcacactacgaaatcgaaaccgaactcacactacgaaatcgacgccgaactcactcacactacgaaatcgacgccgaactcactcacactacgaaatcgaaaccgaactcactcacactacgaaatcgaaaccgaactcactcacactacgaaatcgacgccgaactcactcacactacgaaatcgacgccgaactcacactacgaaatcgacgccgaactcactcacactacgaaatcgaaaccgaactcactcacactacgaaatcgacgccgaactcactcacactacgaaatcgaaaccgaactcactcacactacgaaatcgaaaccgaactcactcacactacgaaatcgaaaccgaactcactcacactacgaaatcgacgccgaactcactcacactacgaaatcgacgccgaactcactcacactacgaaatcgaaaccgaactcactcacactacgaaatcgaaaccgaactcactcacactacgaaatcgacgctaaactcactcacactacgaaatcgacgctaaactcactcacactacac

SEQ ID NO: 2127 - DNA, 659 bp, Artificial Sequence
  chemically treated genomic DNA (Homo sapiens) CpG-island No: 2127
tgtgtgttagtttagtatatggattttggttacgttatgtaataggttttatcgttagttagttatatttatttatttatattacggagtcgacgtcggatttatttatattacggagtcgaagtcggatttatattacggagtcgacgtcggatttatttatattacggagtcgacgtcggatttatttatattacggagtcgaagtcggatttatttatattacggagtcgaagtcggatttatttatattacggagtcgacgtcggatttatttatattacggagtcgacgtcggatttatattacggagtcgacgtcggatttatttatattacggagtcgaagtcggatttatttatattacggagtcgacgtcggatttatttatattacggagtcgaagtcggatttatttatattacggagtcgaagtcggatttatttatattacggagtcgaagtcggatttatttatattacggagtcgacgtcggatttatttatattacggagtcgacgtcggatttatttatattacggagtcgaagtcggatttatttatattacggagtcgaagtcggatttatttatattacggagtcgacgttggatttatttatattacggagtcgacgttggatttatttatattatat

SEQ ID NO: 2128 - DNA, 659 bp, Artificial Sequence
  chemically treated genomic DNA (Homo sapiens) CpG-island No: 2128
atataatataaataaatccaacgtcgactccgtaatataaataaatccaacgtcgactccgtaatataaataaatccgacttcgactccgtaatataaataaatccgacttcgactccgtaatataaataaatccgacgtcgactccgtaatataaataaatccgacgtcgactccgtaatataaataaatccgacttcgactccgtaatataaataaatccgacttcgactccgtaatataaataaatccgacttcgactccgtaatataaataaatccgacgtcgactccgtaatataaataaatccgacttcgactccgtaatataaataaatccgacgtcgactccgtaatataaatccgacgtcgactccgtaatataaataaatccgacgtcgactccgtaatataaataaatccgacttcgactccgtaatataaataaatccgacttcgactccgtaatataaataaatccgacgtcgactccgtaatataaataaatccgacgtcgactccgtaatataaatccgacttcgactccgtaatataaataaatccgacgtcgactccgtaatataaataaataaatataactaactaacgataaaacctattacataacgtaaccaaaatccatatactaaactaacacaca

SEQ ID NO: 2129 - DNA, 669 bp, Artificial Sequence
  chemically treated genomic DNA (Homo sapiens) CpG-island No: 2129
ggcgtggttaggcgggttgtaggcgtggcgaggtcgggcgaggagcgcggcgggttcgaggggcggattgtgggcgtggcgcgcgggggagggggcgtgattaggcggggtgtgggcggggcgagggcgcggcgcggtagggttgcgcggtcgggtggcgcgggaggaagttacgtgggaacgcgggtttatatgattgttcgcgcgatggaattcgtgtcgcgggtgtagtcggggcggtagttgaggcggaggttgacgaggaggcggatttttcggcgttaggtagggcgtggggcggcggtagtttttatttgtttagggcgcgcggttcgattattttcggcggacggggtttagtcgtcgcgtttggttttcgattcgttttttgtcgttcgcgtttcgcgttcggttttacggttttagtttttcggaggtttttttgtttttttgcgcgtttgttttttgggggttttcgtgttttttcgcgttttcgttttttcggggttttttgtttttttgcgtcgggagagttttgtttaggttatagttggtcgcgtttcgaggcgttttttcggggtttttagaggcgttttcgggatagtttttttttcgtttcgtttttggtgttttgtttttttgttttgtttggttacgttgagcgatggt

SEQ ID NO: 2130 - DNA, 669 bp, Artificial Sequence
  chemically treated genomic DNA (Homo sapiens) CpG-island No: 2130
accatcgctcaacgtaaccaaacaaaacaaaaaaacaaaacaccaaaaacgaaacgaaaaaaaaactatcccgaaaacgcctctaaaaaccccgaaaaaacgcctcgaaacgcgaccaactataacctaaacaaaactctcccgacgcaaaaaaacaaaaaaccccgaaaaaacgaaaacgcgaaaaaacacgaaaacccccaaaaaacaaacgcgcaaaaaaacaaaaaaacctccgaaaaactaaaaccgtaaaaccgaacgcgaaacgcgaacgacaaaaaacgaatcgaaaaccaaacgcgacgactaaaccccgtccgccgaaaataatcgaaccgcgcgccctaaacaaataaaaactaccgccgccccacgccctacctaacgccgaaaaatccgcctcctcgtcaacctccgcctcaactaccgccccgactacacccgcgacacgaattccatcgcgcgaacaatcatataaacccgcgttcccacgtaacttcctcccgcgccacccgaccgcgcaaccctaccgcgccgcgccctcgccccgcccacaccccgcctaatcacgccccctcccccgcgcgccacgcccacaatccgcccctcgaacccgccgcgctcctcgcccgacctcgccacgcctacaacccgcctaaccacgcc

SEQ ID NO: 2131 - DNA, 669 bp, Artificial Sequence
  chemically treated genomic DNA (Homo sapiens) CpG-island No: 2131
gttatcgtttagcgtgattaggtagggtagaagagtagggtattaggaacggggcgaggaggaaattgtttcgaggacgtttttgagagtttcgggaaagcgtttcggaacgcggttagttgtaatttggatagggttttttcggcgtaggagggtaggggatttcgaggggacggaggcgcgagagagtacggggatttttaaaggataggcgcgtaggagggtagggggattttcgagggattggggtcgtggggtcgaacgcggggcgcgggcggtaggaaacgagtcggggattaagcgcggcggttgagtttcgttcgtcgggggtggtcgggtcgcgcgttttgggtaggtgggggttatcgtcgttttacgttttatttgacgtcgggggattcgttttttcgttagttttcgttttagttgtcgtttcgattgtattcgcggtacgggttttatcgcgcgggtagttatgtgagttcgcgtttttacgtgattttttttcgcgttattcggtcgcgtagttttgtcgcgtcgcgttttcgtttcgtttatatttcgtttggttacgttttttttttcgcgcgttacgtttatagttcgtttttcgggttcgtcgcgtttttcgttcggtttcgttacgtttataattcgtttagttacgtt

SEQ ID NO: 2132 - DNA, 669 bp, Artificial Sequence
  chemically treated genomic DNA (Homo sapiens) CpG-island No: 2132
aacgtaactaaacgaattataaacgtaacgaaaccgaacgaaaaacgcgacgaacccgaaaaacgaactataaacgtaacgcgcgaaaaaaaaaacgtaaccaaacgaaatataaacgaaacgaaaacgcgacgcgacaaaactacgcgaccgaataacgcgaaaaaaaatcacgtaaaaacgcgaactcacataactacccgcgcgataaaacccgtaccgcgaatacaatcgaaacgacaactaaaacgaaaactaacgaaaaaacgaatcccccgacgtcaaataaaacgtaaaacgacgataacccccacctacccaaaacgcgcgacccgaccacccccgacgaacgaaactcaaccgccgcgcttaatccccgactcgtttcctaccgcccgcgccccgcgttcgaccccacgaccccaatccctcgaaaatccccctaccctcctacgcgcctatcctttaaaaatccccgtactctctcgcgcctccgtcccctcgaaatcccctaccctcctacgccgaaaaaaccctatccaaattacaactaaccgcgttccgaaacgctttcccgaaactctcaaaaacgtcctcgaaacaatttcctcctcgccccgttcctaataccctactcttctaccctacctaatcacgctaaacgataac

SEQ ID NO: 2133 - DNA, 831 bp, Artificial Sequence
  chemically treated genomic DNA (Homo sapiens) CpG-island No: 2133
tttttcgtttagatttcgaggagtcgtagaacgcgttgattagggttttagggttgggtttttttggtcgaggacgacgagcggggtttagagagggcgcgcgtagggttaaggttatattgcgcgtcggcgcgggaattcgaatttaggtttaagtcgcgttcgttaggttaggttaaggagagtcgattcgcgttttttagacgtcgttcgggattttcgttcgggttttgggagtttagtattggtcgagagagagggagatcgcgtttcgagttcgtcgttcgtcgcgttttttatttcgcgatttttatttcgcgttttttatttcgcgttcgtagtcgtcgtcgtcgtttcgcgattagcggattttttagaggtagttttcgttcggatcgttttcggcgtaggagtttttttatcggtcgttttttcgcgagacgtcgcggtcgtcggaggggttacggaggtcgagggcgttcgtttttagcgcgtttgcgttcggttagttcgttcgttttcgttttcgcgagttagtgttatgtggcgtcgtatttacggttagagatcgatttcgtttatcggtcgttacgagttacgttttttttttagtagttaattcgcggcgttgatatcgttcggcggatcgggcgcgcggcggttcggggacgcgtagttgtttcgtcgttcgattcgggagttttacgttgtagttaaatacgatttcgttaattaatttttatgtagtgtttgttgtttattcgattttttttcgagtatcggtttattggtaaaggatcgtgatgtttatcggttggggtttgagattcg

SEQ ID NO: 2134 - DNA, 831 bp, Artificial Sequence
  chemically treated genomic DNA (Homo sapiens) CpG-island No: 2134
cgaatctcaaaccccaaccgataaacatcacgatcctttaccaataaaccgatactcgaaaaaaaatcgaataaacaacaaacactacataaaaattaattaacgaaatcgtatttaactacaacgtaaaactcccgaatcgaacgacgaaacaactacgcgtccccgaaccgccgcgcgcccgatccgccgaacgatatcaacgccgcgaattaactactaaaaaaaaaacgtaactcgtaacgaccgataaacgaaatcgatctctaaccgtaaatacgacgccacataacactaactcgcgaaaacgaaaacgaacgaactaaccgaacgcaaacgcgctaaaaacgaacgccctcgacctccgtaacccctccgacgaccgcgacgtctcgcgaaaaaacgaccgataaaaaaactcctacgccgaaaacgatccgaacgaaaactacctctaaaaaatccgctaatcgcgaaacgacgacgacgactacgaacgcgaaataaaaaacgcgaaataaaaatcgcgaaataaaaaacgcgacgaacgacgaactcgaaacgcgatctccctctctctcgaccaatactaaactcccaaaacccgaacgaaaatcccgaacgacgtctaaaaaacgcgaatcgactctccttaacctaacctaacgaacgcgacttaaacctaaattcgaattcccgcgccgacgcgcaatataaccttaaccctacgcgcgccctctctaaaccccgctcgtcgtcctcgaccaaaaaaacccaaccctaaaaccctaatcaacgcgttctacgactcctcgaaatctaaacgaaaaa

SEQ ID NO: 2135 - DNA, 831 bp, Artificial Sequence
  chemically treated genomic DNA (Homo sapiens) CpG-island No: 2135
cgagttttaagttttagtcggtgagtattacgattttttgttaatgagtcgatgttcgagaaagggtcggatagataataggtattgtataaaggttggttaacgggatcgtgtttggttgtaacgtggagttttcgggtcgaacggcgagatagttgcgcgttttcgagtcgtcgcgcgttcggttcgtcgggcgatgttaacgtcgcggattggttgttgagaaaggggcgtggttcgtggcggtcggtgggcggagtcgatttttggtcgtaaatacggcgttatatggtattggttcgcgagggcgggggcgggcgggttggtcgggcgtaggcgcgttgagggcgggcgttttcggttttcgtggttttttcggcggtcgcgacgtttcgcgagaagacgatcggtagaggggtttttgcgtcgggggcggttcgggcgagggttgtttttggggggttcgttagtcgcggggcggcggcggcggttgcgggcgcgaggtgaggggcgcgaggtgagggtcgcgaggtgaggggcgcggcgggcggcgggttcggggcgcggtttttttttttttcggttagtgttgggtttttagggttcgggcgggggtttcgggcgacgtttgaggggcgcgggtcggttttttttaatttggtttggcgggcgcggtttgggtttgggttcgagttttcgcgtcggcgcgtagtgtgattttggttttgcgcgcgttttttttgagtttcgttcgtcgttttcggttagggggatttagttttggggttttgattagcgcgttttgcggtttttcggggtttggacgagaaa

SEQ ID NO: 2136 - DNA, 831 bp, Artificial Sequence
  chemically treated genomic DNA (Homo sapiens) CpG-island No: 2136
tttctcgtccaaaccccgaaaaaccgcaaaacgcgctaatcaaaaccccaaaactaaatccccctaaccgaaaacgacgaacgaaactcaaaaaaaacgcgcgcaaaaccaaaatcacactacgcgccgacgcgaaaactcgaacccaaacccaaaccgcgcccgccaaaccaaattaaaaaaaaccgacccgcgcccctcaaacgtcgcccgaaacccccgcccgaaccctaaaaacccaacactaaccgaaaaaaaaaaaaaccgcgccccgaacccgccgcccgccgcgcccctcacctcgcgaccctcacctcgcgcccctcacctcgcgcccgcaaccgccgccgccgccccgcgactaacgaaccccccaaaaacaaccctcgcccgaaccgcccccgacgcaaaaacccctctaccgatcgtcttctcgcgaaacgtcgcgaccgccgaaaaaaccacgaaaaccgaaaacgcccgccctcaacgcgcctacgcccgaccaacccgcccgcccccgccctcgcgaaccaataccatataacgccgtatttacgaccaaaaatcgactccgcccaccgaccgccacgaaccacgcccctttctcaacaaccaatccgcgacgttaacatcgcccgacgaaccgaacgcgcgacgactcgaaaacgcgcaactatctcgccgttcgacccgaaaactccacgttacaaccaaacacgatcccgttaaccaacctttatacaatacctattatctatccgaccctttctcgaacatcgactcattaacaaaaaatcgtaatactcaccgactaaaacttaaaactcg

SEQ ID NO: 2137 - DNA, 833 bp, Artificial Sequence
  chemically treated genomic DNA (Homo sapiens) CpG-island No: 2137
tacgaatcggtggtatagttcgacgatattttttatttcgggaattttagttacgttttcgcgtcgttcgttagtttcgtttcgggcgtttttatttttttcgtttacgtcgtttacgaagttttcggggtcgttgaaggagggttcgttcgcgtcgtcgttttttagcgttcggggttcggtttcggtcgttttgttttcgttttttttcgcgttttcggatatcgtttgggttcggttgtcggagcgttcgtttcgagtttgtttttttggggtttcgttttgtgtcgggatagggggtttagtatgcgattcgggtagtttttcggcgtcggcggcgagggcgattcggacggcggaggtcgtttttgtttcggtcgtcggttcggtttttatttcggattacggttcggttttcgcgatttttatttttttattggagtttcggttttcgcggttttcggagcgtcggtttcgcgggtagtagtagtttttcggttggcggcggttcggcggtcggttgttgttggtcgggttcggcgcgtttttcggtcgtttcggtatcgttacgtttttcgcgttttgtatgggtttaacgttgtttattcgtagggtttcgcggtcgtcgcgttttcgatttttttaggtcgtatcgcgcgtcgcgacggttatagtttagttatgtgcgtgcgacggggaggtcgtattaaggtcgcggggcggggggcgtatttacgttttggggttttacgaacgattttgagaggattcgtatttataagatcgcgttcgaaaattattaaattgatatatttgtgataagaaagtgttta

SEQ ID NO: 2138 - DNA, 833 bp, Artificial Sequence
  chemically treated genomic DNA (Homo sapiens) CpG-island No: 2138
taaacactttcttatcacaaatatatcaatttaataattttcgaacgcgatcttataaatacgaatcctctcaaaatcgttcgtaaaaccccaaaacgtaaatacgccccccgccccgcgaccttaatacgacctccccgtcgcacgcacataactaaactataaccgtcgcgacgcgcgatacgacctaaaaaaatcgaaaacgcgacgaccgcgaaaccctacgaataaacaacgttaaacccatacaaaacgcgaaaaacgtaacgataccgaaacgaccgaaaaacgcgccgaacccgaccaacaacaaccgaccgccgaaccgccgccaaccgaaaaactactactacccgcgaaaccgacgctccgaaaaccgcgaaaaccgaaactccaataaaaaaataaaaatcgcgaaaaccgaaccgtaatccgaaataaaaaccgaaccgacgaccgaaacaaaaacgacctccgccgtccgaatcgccctcgccgccgacgccgaaaaactacccgaatcgcatactaaaccccctatcccgacacaaaacgaaaccccaaaaaaacaaactcgaaacgaacgctccgacaaccgaacccaaacgatatccgaaaacgcgaaaaaaaacgaaaacaaaacgaccgaaaccgaaccccgaacgctaaaaaacgacgacgcgaacgaaccctccttcaacgaccccgaaaacttcgtaaacgacgtaaacgaaaaaaataaaaacgcccgaaacgaaactaacgaacgacgcgaaaacgtaactaaaattcccgaaataaaaaatatcgtcgaactataccaccgattcgta

SEQ ID NO: 2139 - DNA, 833 bp, Artificial Sequence
  chemically treated genomic DNA (Homo sapiens) CpG-island No: 2139
taagtatttttttgttataaatatattagtttgatgattttcgggcgcggttttgtggatgcgagtttttttagggtcgttcgtgaggttttagggcgtgggtgcgtttttcgtttcgcggttttggtgcggttttttcgtcgtacgtatatggttgggttgtagtcgtcgcggcgcgcggtgcggtttgggagagtcggaagcgcggcggtcgcggagttttgcgagtaggtagcgttgggtttatgtaggacgcggagaacgtggcggtgtcgaggcggtcgaggagcgcgtcgagttcggttagtagtagtcggtcgtcgagtcgtcgttagtcgaggggttgttgttgttcgcggggtcggcgtttcggaggtcgcggggatcgaggttttagtgaggaggtggggatcgcggaggtcgggtcgtagttcgaggtgaggatcgagtcggcgatcgaggtagaggcggttttcgtcgttcgagtcgttttcgtcgtcggcgtcgaggagttgttcgggtcgtatgttgagttttttgtttcggtatagggcgaggttttaggagagtaggttcgggacgagcgtttcgatagtcgggtttaggcggtgttcgaggacgcgggaggaaacgagggtagagcggtcgaggtcgaatttcgggcgttggagaacggcgacgcggacgagtttttttttagcgatttcgaggatttcgtggacgacgtgagcgaggaaggtgagggcgttcggggcggggttggcgagcggcgcgggagcgtggttggggttttcgaggtgggagatatcgtcgggttgtgttatcggttcgtg

SEQ ID NO: 2140 - DNA, 833 bp, Artificial Sequence
  chemically treated genomic DNA (Homo sapiens) CpG-island No: 2140
cacgaaccgataacacaacccgacgatatctcccacctcgaaaaccccaaccacgctcccgcgccgctcgccaaccccgccccgaacgccctcaccttcctcgctcacgtcgtccacgaaatcctcgaaatcgctaaaaaaaaactcgtccgcgtcgccgttctccaacgcccgaaattcgacctcgaccgctctaccctcgtttcctcccgcgtcctcgaacaccgcctaaacccgactatcgaaacgctcgtcccgaacctactctcctaaaacctcgccctataccgaaacaaaaaactcaacatacgacccgaacaactcctcgacgccgacgacgaaaacgactcgaacgacgaaaaccgcctctacctcgatcgccgactcgatcctcacctcgaactacgacccgacctccgcgatccccacctcctcactaaaacctcgatccccgcgacctccgaaacgccgaccccgcgaacaacaacaacccctcgactaacgacgactcgacgaccgactactactaaccgaactcgacgcgctcctcgaccgcctcgacaccgccacgttctccgcgtcctacataaacccaacgctacctactcgcaaaactccgcgaccgccgcgcttccgactctcccaaaccgcaccgcgcgccgcgacgactacaacccaaccatatacgtacgacgaaaaaaccgcaccaaaaccgcgaaacgaaaaacgcacccacgccctaaaacctcacgaacgaccctaaaaaaactcgcatccacaaaaccgcgcccgaaaatcatcaaactaatatatttataacaaaaaaatactta

SEQ ID NO: 2141 - DNA, 542 bp, Artificial Sequence
  chemically treated genomic DNA (Homo sapiens) CpG-island No: 2141
tttgcgttcgtattttattcgtcgtttgttggatatcgtttattagtttatcgttcgttacgttcgtagcgttaaagaggatatcgtttttttttattagtttatcgagcgagtatatacggttaacgttaacgtttattgttttgtaacgtttgcgtttttgttttgtaatttgtcgatttttcgtgtaattttttttagtttggtaaaagttaattagttcggtttgtatattttcgtttaatgttttaacggtataggtagaaattacgttttttggtattcgcgatggtgtatattatatcgtaaggattattttgttagtaggttagtacgttggcggcgatatcgttattcggtaggtaaaattttttacgttagttgtgttgttttttaatcgcggtatttagcgcgtttattagcgtaatatgcgagtttattagcgggttgttcgtttcgtacgtgcgtagtgtcgtagagtaagaagattatcggcgcgtagcgatataatagtttttaataatatggcgattatagtattt

SEQ ID NO: 2142 - DNA, 542 bp, Artificial Sequence
  chemically treated genomic DNA (Homo sapiens) CpG-island No: 2142
aaatactataatcgccatattattaaaaactattatatcgctacgcgccgataatcttcttactctacgacactacgcacgtacgaaacgaacaacccgctaataaactcgcatattacgctaataaacgcgctaaataccgcgattaaaaaacaacacaactaacgtaaaaaattttacctaccgaataacgatatcgccgccaacgtactaacctactaacaaaataatccttacgatataatatacaccatcgcgaataccaaaaaacgtaatttctacctataccgttaaaacattaaacgaaaatatacaaaccgaactaattaacttttaccaaactaaaaaaaattacacgaaaaatcgacaaattacaaaacaaaaacgcaaacgttacaaaacaataaacgttaacgttaaccgtatatactcgctcgataaactaataaaaaaaaacgatatcctctttaacgctacgaacgtaacgaacgataaactaataaacgatatccaacaaacgacgaataaaatacgaacgcaaa

SEQ ID NO: 2143 - DNA, 542 bp, Artificial Sequence
  chemically treated genomic DNA (Homo sapiens) CpG-island No: 2143
gaatattgtaatcgttatattattaaaagttgttgtatcgttgcgcgtcgatgatttttttgttttacgatattgcgtacgtgcgaagcgagtaattcgttgataagttcgtatgttacgttgataaacgcgttgagtgtcgcgattgaggagtaatatagttggcgtgaaggattttgtttgtcggatggcgatgtcgtcgttagcgtgttgatttgttggtaggataatttttacgatgtgatgtatattatcgcggatgttagaaggcgtgatttttgtttgtgtcgttaaagtattaggcggggatatgtaggtcgagttgattgatttttgttaggttaaaggggattatacggaaaatcggtagattgtagagtaggagcgtaagcgttgtaaggtaatgggcgttgacgttaatcgtgtgtattcgttcgatgaattggtgagggggaacgatattttttttagcgttacgggcgtgacgggcggtgagttggtgaacggtatttaatagacggcgaatggggtgcggacgtaga

SEQ ID NO: 2144 - DNA, 542 bp, Artificial Sequence
  chemically treated genomic DNA (Homo sapiens) CpG-island No: 2144
tctacgtccgcaccccattcgccgtctattaaataccgttcaccaactcaccgcccgtcacgcccgtaacgctaaaaaaaatatcgttccccctcaccaattcatcgaacgaatacacacgattaacgtcaacgcccattaccttacaacgcttacgctcctactctacaatctaccgattttccgtataatcccctttaacctaacaaaaatcaatcaactcgacctacatatccccgcctaatactttaacgacacaaacaaaaatcacgccttctaacatccgcgataatatacatcacatcgtaaaaattatcctaccaacaaatcaacacgctaacgacgacatcgccatccgacaaacaaaatccttcacgccaactatattactcctcaatcgcgacactcaacgcgtttatcaacgtaacatacgaacttatcaacgaattactcgcttcgcacgtacgcaatatcgtaaaacaaaaaaatcatcgacgcgcaacgatacaacaacttttaataatataacgattacaatattc

SEQ ID NO: 2145 - DNA, 638 bp, Artificial Sequence
  chemically treated genomic DNA (Homo sapiens) CpG-island No: 2145
ttcgcggtttcggatttcggattttttaggttttcgcgttttattttcgattagtttcgggttaggttagggcgtagacggggtttttcgttttttacgcgggttcgttttatgtcgggcggggtttggggttcgttattttcgttcgtggtcggagagttttaggttcgagttacgcggtttttcgggttcgggtcggggttcgatggttacgtggaggcgggacggtcgattgataggcggttaaaggttgttgtgcgttgggttggcggggacgtttagttttagttttatcgcgtttttggagttcgttatcgtgttggtttaggttggcgtcgtgcgaggttacgttcggggatcgtgggttatagggtatcgggtgtggcgggtagaggggtttcgggttttgtggaaggggaacgcggtggcgtgtttgcgtttttttttttgtagcgtcgtgtagttcgtcgtttatcgtaagtaagagtcgggcggggtcggggaatcgggagatcggacgggggtggggtgggggagtcgcggttcgacgtcgttttgttgtttggattcggggttttggagtagggacggtttttttgtcgattatttggggatttttcggggcggtgggttatttt

SEQ ID NO: 2146 - DNA, 638 bp, Artificial Sequence
  chemically treated genomic DNA (Homo sapiens) CpG-island No: 2146
aaaataacccaccgccccgaaaaatccccaaataatcgacaaaaaaaccgtccctactccaaaaccccgaatccaaacaacaaaacgacgtcgaaccgcgactcccccaccccacccccgtccgatctcccgattccccgaccccgcccgactcttacttacgataaacgacgaactacacgacgctacaaaaaaaaaaacgcaaacacgccaccgcgttccccttccacaaaacccgaaacccctctacccgccacacccgataccctataacccacgatccccgaacgtaacctcgcacgacgccaacctaaaccaacacgataacgaactccaaaaacgcgataaaactaaaactaaacgtccccgccaacccaacgcacaacaacctttaaccgcctatcaatcgaccgtcccgcctccacgtaaccatcgaaccccgacccgaacccgaaaaaccgcgtaactcgaacctaaaactctccgaccacgaacgaaaataacgaaccccaaaccccgcccgacataaaacgaacccgcgtaaaaaacgaaaaaccccgtctacgccctaacctaacccgaaactaatcgaaaataaaacgcgaaaacctaaaaaatccgaaatccgaaaccgcgaa

SEQ ID NO: 2147 - DNA, 638 bp, Artificial Sequence
  chemically treated genomic DNA (Homo sapiens) CpG-island No: 2147
gaggtggtttatcgtttcgaggggtttttaggtgatcgataagggggtcgtttttattttagggtttcgagtttaggtagtagggcggcgtcgggtcgcggtttttttattttattttcgttcggtttttcggtttttcggtttcgttcggtttttatttgcggtaggcggcgagttgtacggcgttgtaggggaagaggcgtaggtacgttatcgcgttttttttttatagggttcggagtttttttgttcgttatattcggtgttttgtggtttacggttttcgggcgtggtttcgtacgacgttaatttgggttagtacggtggcgagttttaggggcgcggtgaggttgaggttgagcgttttcgttagtttagcgtatagtagtttttggtcgtttgttagtcggtcgtttcgtttttacgtagttatcgagtttcgattcgggttcggaagatcgcgtggttcgggtttggggtttttcggttacgggcggaggtggcgggttttaggtttcgttcggtatggggcgggttcgcgtgagggacgggaagtttcgtttacgttttagtttggttcgaggttggtcgggggtggggcgcgagggtttggagggttcggggttcgaggtcgcgga

SEQ ID NO: 2148 - DNA, 638 bp, Artificial Sequence
  chemically treated genomic DNA (Homo sapiens) CpG-island No: 2148
tccgcgacctcgaaccccgaaccctccaaaccctcgcgccccacccccgaccaacctcgaaccaaactaaaacgtaaacgaaacttcccgtccctcacgcgaacccgccccataccgaacgaaacctaaaacccgccacctccgcccgtaaccgaaaaaccccaaacccgaaccacgcgatcttccgaacccgaatcgaaactcgataactacgtaaaaacgaaacgaccgactaacaaacgaccaaaaactactatacgctaaactaacgaaaacgctcaacctcaacctcaccgcgcccctaaaactcgccaccgtactaacccaaattaacgtcgtacgaaaccacgcccgaaaaccgtaaaccacaaaacaccgaatataacgaacaaaaaaactccgaaccctataaaaaaaaaacgcgataacgtacctacgcctcttcccctacaacgccgtacaactcgccgcctaccgcaaataaaaaccgaacgaaaccgaaaaaccgaaaaaccgaacgaaaataaaataaaaaaaccgcgacccgacgccgccctactacctaaactcgaaaccctaaaataaaaacgacccccttatcgatcacctaaaaacccctcgaaacgataaaccacctc

SEQ ID NO: 2149 - DNA, 822 bp, Artificial Sequence
  chemically treated genomic DNA (Homo sapiens) CpG-island No: 2149
tattttattttcgtattcgttcgttcgtttagtaaatagtgagaacgcgtaaatttttgcggggttcgggttttcgggacgggttggacggataggtttgaggggcgcggttcggggacgcgggagggggcgtgggaggcggaagttttaggagagtttttggggattttagggtcgcgggagcggttgtgggtgcggggtcgggatttgtatttttcgcgttgggtcggcggacgttcgaggtttgtaggagattcggggtttagggttcggagtttaggaggtgattcgggagggtttgggacggttcggggttaggggtcgagtcgagagcggttcgcgtcgtttttaggaaggaaggagagttacgttcggtttcgttacgttttagagatttggaatcgcgtaaaggacgtttcggattcggttattttggggtttggcggtcgtttttttagaaaacgggttcgcggagggaggatcggggttttcgtagttaaggttttttttcgttcgttttagttcgtagtttttcgggttttttagagtcgcggtttcgagagttttcgggggtttttatcgggggtcggaggtcggaggagggaggcgaggtttgcgcgggacggtgtcgcgcggatggtagaggacgttcgtgggtgtcgtttttacgtcggttgtttcgggtttttcgtttcgtttttatttttgttttgatttgggagcggtcgtcgtcgtttagttttattcgataaggattttagagcgttgatcgtagggggtatagggtattagaaggtttcgttttgtatgtttttagtttgg

SEQ ID NO: 2150 - DNA, 822 bp, Artificial Sequence
  chemically treated genomic DNA (Homo sapiens) CpG-island No: 2150
ccaaactaaaaacatacaaaacgaaaccttctaataccctataccccctacgatcaacgctctaaaatccttatcgaataaaactaaacgacgacgaccgctcccaaatcaaaacaaaaataaaaacgaaacgaaaaacccgaaacaaccgacgtaaaaacgacacccacgaacgtcctctaccatccgcgcgacaccgtcccgcgcaaacctcgcctccctcctccgacctccgacccccgataaaaacccccgaaaactctcgaaaccgcgactctaaaaaacccgaaaaactacgaactaaaacgaacgaaaaaaaaccttaactacgaaaaccccgatcctccctccgcgaacccgttttctaaaaaaacgaccgccaaaccccaaaataaccgaatccgaaacgtcctttacgcgattccaaatctctaaaacgtaacgaaaccgaacgtaactctccttccttcctaaaaacgacgcgaaccgctctcgactcgacccctaaccccgaaccgtcccaaaccctcccgaatcacctcctaaactccgaaccctaaaccccgaatctcctacaaacctcgaacgtccgccgacccaacgcgaaaaatacaaatcccgaccccgcacccacaaccgctcccgcgaccctaaaatccccaaaaactctcctaaaacttccgcctcccacgccccctcccgcgtccccgaaccgcgcccctcaaacctatccgtccaacccgtcccgaaaacccgaaccccgcaaaaatttacgcgttctcactatttactaaacgaacgaacgaatacgaaaataaaata

SEQ ID NO: 2151 - DNA, 822 bp, Artificial Sequence
  chemically treated genomic DNA (Homo sapiens) CpG-island No: 2151
ttaagttggaagtatgtagggcggaattttttggtattttgtgttttttgcggttagcgttttgaagtttttgtcgggtgggattggacggcggcggtcgtttttaggttagggtaggagtgggggcggggcggggggttcggagtagtcggcgtgggggcgatatttacgggcgttttttgttattcgcgcggtatcgtttcgcgtaggtttcgtttttttttttcgattttcggttttcggtggggattttcgaggattttcgggatcgcggttttggagggttcggagggttgcgggttggagcgggcggggaggagttttggttgcgggagtttcggtttttttttcgcggattcgttttttaggagagcggtcgttaggttttagggtggtcgagttcgaagcgttttttgcgcggttttaagtttttggaacgtggcggggtcgggcgtggtttttttttttttttgggagcggcgcgggtcgttttcggttcgatttttggtttcgggtcgttttaggttttttcgaattattttttggatttcgagttttgggtttcgggttttttgtaggtttcgggcgttcgtcggtttagcgcgggaaatgtaaatttcgatttcgtatttataatcgttttcgcggttttggagtttttagaggtttttttgggattttcgttttttacgttttttttcgcgttttcgggtcgcgttttttaggtttgttcgtttagttcgtttcggaagttcgggtttcgtagggatttgcgcgtttttattgtttattgggcgagcggacgaatacggaaatgaagtg

SEQ ID NO: 2152 - DNA, 822 bp, Artificial Sequence
  chemically treated genomic DNA (Homo sapiens) CpG-island No: 2152
cacttcatttccgtattcgtccgctcgcccaataaacaataaaaacgcgcaaatccctacgaaacccgaacttccgaaacgaactaaacgaacaaacctaaaaaacgcgacccgaaaacgcgaaaaaaaacgtaaaaaacgaaaatcccaaaaaaacctctaaaaactccaaaaccgcgaaaacgattataaatacgaaatcgaaatttacatttcccgcgctaaaccgacgaacgcccgaaacctacaaaaaacccgaaacccaaaactcgaaatccaaaaaataattcgaaaaaacctaaaacgacccgaaaccaaaaatcgaaccgaaaacgacccgcgccgctcccaaaaaaaaaaaaaaaccacgcccgaccccgccacgttccaaaaacttaaaaccgcgcaaaaaacgcttcgaactcgaccaccctaaaacctaacgaccgctctcctaaaaaacgaatccgcgaaaaaaaaaccgaaactcccgcaaccaaaactcctccccgcccgctccaacccgcaaccctccgaaccctccaaaaccgcgatcccgaaaatcctcgaaaatccccaccgaaaaccgaaaatcgaaaaaaaaaaacgaaacctacgcgaaacgataccgcgcgaataacaaaaaacgcccgtaaatatcgcccccacgccgactactccgaaccccccgccccgcccccactcctaccctaacctaaaaacgaccgccgccgtccaatcccacccgacaaaaacttcaaaacgctaaccgcaaaaaacacaaaataccaaaaaattccgccctacatacttccaacttaa

SEQ ID NO: 2153 - DNA, 526 bp, Artificial Sequence
  chemically treated genomic DNA (Homo sapiens) CpG-island No: 2153
ggatcgcggtgggtgttcggggaggcggattttcggtgtatttttgcgcgtgtgtatttttttttgcgtgcgtgttcgcgcgtgcgtgttcgtatatgcgcgttattttcgtattgttttcgttttttgcgtttgtttaggttatcgtttgttttggtttttaggttttggtttttagtggacgagaattatcgagtttgcggggttagacgttgatcgttcgggttagtatttaggcgggcgggagttgtgcggtttagggttcgcgcgggtcgggtagaggttcgagttaggattttcgagcgtgaatttcggagtcggcggcgttggggttagaggggtcgggcgggaggtgatggcggaggcgaaggggcgacgggatttggtttggttcgtgtgtgtttttatgaggtttggcgtcggtcgtcgttgtacggtgagttttagggaggcggatttgggtttcgagaaggatatttatttggatttgtttatatacgcggttcgggtttttcgggagtagaat

SEQ ID NO: 2154 - DNA, 526 bp, Artificial Sequence
  chemically treated genomic DNA (Homo sapiens) CpG-island No: 2154
attctactcccgaaaaacccgaaccgcgtatataaacaaatccaaataaatatccttctcgaaacccaaatccgcctccctaaaactcaccgtacaacgacgaccgacgccaaacctcataaaaacacacacgaaccaaaccaaatcccgtcgccccttcgcctccgccatcacctcccgcccgacccctctaaccccaacgccgccgactccgaaattcacgctcgaaaatcctaactcgaacctctacccgacccgcgcgaaccctaaaccgcacaactcccgcccgcctaaatactaacccgaacgatcaacgtctaaccccgcaaactcgataattctcgtccactaaaaaccaaaacctaaaaaccaaaacaaacgataacctaaacaaacgcaaaaaacgaaaacaatacgaaaataacgcgcatatacgaacacgcacgcgcgaacacgcacgcaaaaaaaaatacacacgcgcaaaaatacaccgaaaatccgcctccccgaacacccaccgcgatcc

SEQ ID NO: 2155 - DNA, 526 bp, Artificial Sequence
  chemically treated genomic DNA (Homo sapiens) CpG-island No: 2155
gttttgttttcgaggggttcgggtcgcgtatgtgggtaaatttaggtgggtgtttttttcggggtttagattcgtttttttggggtttatcgtatagcgacggtcggcgttaggttttatgaggatatatacgggttaggttaggtttcgtcgttttttcgttttcgttattatttttcgttcggtttttttggttttagcgtcgtcggtttcggggtttacgttcgggggttttggttcgagtttttattcggttcgcgcgaattttgggtcgtatagttttcgttcgtttaggtgttggttcgggcggttagcgtttagtttcgtagattcggtgattttcgtttattagaggttaaagtttgggaattagagtaagcgatgatttgaataggcgtaggaagcgagggtagtgcggaggtggcgcgtatgtgcgagtacgtacgcgcgaatacgtacgtagggagaggtgtatacgcgtaggagtgtatcggaagttcgttttttcggatatttatcgcggttt

SEQ ID NO: 2156 - DNA, 526 bp, Artificial Sequence
  chemically treated genomic DNA (Homo sapiens) CpG-island No: 2156
aaaccgcgataaatatccgaaaaaacgaacttccgatacactcctacgcgtatacacctctccctacgtacgtattcgcgcgtacgtactcgcacatacgcgccacctccgcactaccctcgcttcctacgcctattcaaatcatcgcttactctaattcccaaactttaacctctaataaacgaaaatcaccgaatctacgaaactaaacgctaaccgcccgaaccaacacctaaacgaacgaaaactatacgacccaaaattcgcgcgaaccgaataaaaactcgaaccaaaacccccgaacgtaaaccccgaaaccgacgacgctaaaaccaaaaaaaccgaacgaaaaataataacgaaaacgaaaaaacgacgaaacctaacctaacccgtatatatcctcataaaacctaacgccgaccgtcgctatacgataaaccccaaaaaaacgaatctaaaccccgaaaaaaacacccacctaaatttacccacatacgcgacccgaacccctcgaaaacaaaac

SEQ ID NO: 2157 - DNA, 636 bp, Artificial Sequence
  chemically treated genomic DNA (Homo sapiens) CpG-island No: 2157
tcggcgttttcgggcggaaggcggggtttttcggttagtgatttcgtttcgaggcgtttttcgggcggggaagggcggggttcgcgttgggaaattttttttttaaggtcgaggcgtcgttgcgcgttttttaggcgtggtggtggggtcgtgggttttagtttagtggtttaggttacgggtcgtacggtcgcggtcgttattttgttcgcgttcgggtttttgcggcgggcggggcggtgtttcggtcggaagcggttgtgcggcggtcgcgttgttattttaggttagtgagcgcgattcggttcgcgtttcgattttcgggagcgtcgcggtcgtagcgaggggtcggagatagtttagttgaaaggttcgggcgtttcggcggggagcgcgtttcgcgttgtagggtaatcgcgtcgggcggtcggtcgtttggtcgggttttagcgggagttatcgggggttgcgggcggtcgtgggatttgcggagattttttcggggcgtagggaatacgttatagttttcgtcgcggcgggtttgtggggagcggcgttttagtttttttcgggaggtttagttaggtgtttggagcgggagagtcggatttagatttttgttttatttagaatagt

SEQ ID NO: 2158 - DNA, 636 bp, Artificial Sequence
  chemically treated genomic DNA (Homo sapiens) CpG-island No: 2158
actattctaaataaaacaaaaatctaaatccgactctcccgctccaaacacctaactaaacctcccgaaaaaaactaaaacgccgctccccacaaacccgccgcgacgaaaactataacgtattccctacgccccgaaaaaatctccgcaaatcccacgaccgcccgcaacccccgataactcccgctaaaacccgaccaaacgaccgaccgcccgacgcgattaccctacaacgcgaaacgcgctccccgccgaaacgcccgaacctttcaactaaactatctccgacccctcgctacgaccgcgacgctcccgaaaatcgaaacgcgaaccgaatcgcgctcactaacctaaaataacaacgcgaccgccgcacaaccgcttccgaccgaaacaccgccccgcccgccgcaaaaacccgaacgcgaacaaaataacgaccgcgaccgtacgacccgtaacctaaaccactaaactaaaacccacgaccccaccaccacgcctaaaaaacgcgcaacgacgcctcgaccttaaaaaaaaaatttcccaacgcgaaccccgcccttccccgcccgaaaaacgcctcgaaacgaaatcactaaccgaaaaaccccgccttccgcccgaaaacgccga

SEQ ID NO: 2159 - DNA, 636 bp, Artificial Sequence
  chemically treated genomic DNA (Homo sapiens) CpG-island No: 2159
gttattttaggtaaagtaggaatttgagttcgattttttcgttttaggtatttggttgagtttttcgggaaaggttgggacgtcgttttttataagttcgtcgcggcgaaggttgtagcgtgttttttgcgtttcgaggaggttttcgtaggttttacggtcgttcgtagttttcggtggttttcgttgaggttcggttaggcggtcggtcgttcggcgcgattattttatagcgcggaacgcgtttttcgtcgagacgttcgggttttttaattaggttattttcggtttttcgttgcggtcgcggcgttttcgagagtcgagacgcgaatcgggtcgcgtttattgatttgaggtggtagcgcggtcgtcgtatagtcgttttcggtcgggatatcgtttcgttcgtcgtaggagttcggacgcgggtaagatggcggtcgcggtcgtgcggttcgtgatttggattattgggttgggatttacgattttattattacgtttggaggacgcgtagcggcgtttcggttttggaaggggagttttttagcgcgagtttcgttttttttcgttcgggaggcgtttcggggcggggttattggtcgggaggtttcgtttttcgttcgaaagcgtcgg

SEQ ID NO: 2160 - DNA, 636 bp, Artificial Sequence
  chemically treated genomic DNA (Homo sapiens) CpG-island No: 2160
ccgacgctttcgaacgaaaaacgaaacctcccgaccaataaccccgccccgaaacgcctcccgaacgaaaaaaaacgaaactcgcgctaaaaaactccccttccaaaaccgaaacgccgctacgcgtcctccaaacgtaataataaaatcgtaaatcccaacccaataatccaaatcacgaaccgcacgaccgcgaccgccatcttacccgcgtccgaactcctacgacgaacgaaacgatatcccgaccgaaaacgactatacgacgaccgcgctaccacctcaaatcaataaacgcgacccgattcgcgtctcgactctcgaaaacgccgcgaccgcaacgaaaaaccgaaaataacctaattaaaaaacccgaacgtctcgacgaaaaacgcgttccgcgctataaaataatcgcgccgaacgaccgaccgcctaaccgaacctcaacgaaaaccaccgaaaactacgaacgaccgtaaaacctacgaaaacctcctcgaaacgcaaaaaacacgctacaaccttcgccgcgacgaacttataaaaaacgacgtcccaacctttcccgaaaaactcaaccaaatacctaaaacgaaaaaatcgaactcaaattcctactttacctaaaataac

SEQ ID NO: 2161 - DNA, 703 bp, Artificial Sequence
  chemically treated genomic DNA (Homo sapiens) CpG-island No: 2161
ttcgttttcgtttacgtttcgataatgttttcgggttcgtagtttcgttttcggttaggtcgtcgtttttcgtattttttcgttttttgttgttcgcgcgattttttttttcggtttttttagtagtttttattttcgtttttttagtattaggttaagcggcgggaggttcggagagtttcggtttttttttttcgggttcgggcgcgttggggggcgaggatgttgcggtttttttttgcgcggcgttgtttatcggttgtatttttttttggcgtcggggattttcgcgataggtgtttagggttcgggtttcgcgttacgtttttgggaaggcgggaggcgcgtatcgaggtcgtttagtagtcgtttgcgcgtttcgcggtcgagtcgagttgagcgttcgcggagttagcggagttagcggagttagcggttcggtttcgggagggaataaaaggggtcggcgtaggggcgggcgcgggagggcggggtttggggcgggcgggaggggggggcgggttaggcgcgcgtgggcggtttcgcggtttttaggttttagtgtttcgcggaaagtaggcgggcgggcggaaaacgcggagtaatttttttttttttttttcgttttatttttttttttttttaggtcgtagttgttttttgtggggcgtttagggttcgtttatatttattttcgcgttgg

SEQ ID NO: 2162 - DNA, 703 bp, Artificial Sequence
  chemically treated genomic DNA (Homo sapiens) CpG-island No: 2162
ccaacgcgaaaataaatataaacgaaccctaaacgccccacaaaaaacaactacgacctaaaaaaaaaaaaaaataaaacgaaaaaaaaaaaaaaaaattactccgcgttttccgcccgcccgcctactttccgcgaaacactaaaacctaaaaaccgcgaaaccgcccacgcgcgcctaacccgcccccccctcccgcccgccccaaaccccgccctcccgcgcccgcccctacgccgaccccttttattccctcccgaaaccgaaccgctaactccgctaactccgctaactccgcgaacgctcaactcgactcgaccgcgaaacgcgcaaacgactactaaacgacctcgatacgcgcctcccgccttcccaaaaacgtaacgcgaaacccgaaccctaaacacctatcgcgaaaatccccgacgccaaaaaaaaatacaaccgataaacaacgccgcgcaaaaaaaaaccgcaacatcctcgccccccaacgcgcccgaacccgaaaaaaaaaaaccgaaactctccgaacctcccgccgcttaacctaatactaaaaaaacgaaaataaaaactactaaaaaaaccgaaaaaaaaaatcgcgcgaacaacaaaaaacgaaaaaatacgaaaaacgacgacctaaccgaaaacgaaactacgaacccgaaaacattatcgaaacgtaaacgaaaacgaa

SEQ ID NO: 2163 - DNA, 703 bp, Artificial Sequence
  chemically treated genomic DNA (Homo sapiens) CpG-island No: 2163
ttagcgcggaggtggatgtgggcgaattttggacgttttataaaggatagttgcggtttgggaagggaaggagatggagcggggagagggggaagaggttgtttcgcgtttttcgttcgttcgtttgtttttcgcgaggtattgaggtttgaaaatcgcgaggtcgtttacgcgcgtttgattcgtttttttttttcgttcgttttaggtttcgttttttcgcgttcgtttttgcgtcggttttttttgttttttttcggagtcgggtcgttggtttcgttggtttcgttggtttcgcgggcgtttagttcggttcggtcgcggggcgcgtaggcggttgttgggcggtttcggtgcgcgtttttcgtttttttagagacgtggcgcgaggttcgggttttgagtatttatcgcggggattttcggcgttaggagggggtgtagtcggtgggtagcgtcgcgtagggaggggtcgtagtattttcgttttttagcgcgttcgggttcgagaggaggaggtcggggtttttcgggtttttcgtcgtttagtttgatgttggaaggacgaaggtaggggttgttggaggggtcgagggagggggtcgcgcgggtaataaaggacggagagatgcggggggcggcggtttggtcgaaagcggggttgcgggttcggaggtattgtcggggcgtgggcgggggcggg

SEQ ID NO: 2164 - DNA, 703 bp, Artificial Sequence
  chemically treated genomic DNA (Homo sapiens) CpG-island No: 2164
cccgcccccgcccacgccccgacaatacctccgaacccgcaaccccgctttcgaccaaaccgccgccccccgcatctctccgtcctttattacccgcgcgaccccctccctcgacccctccaacaacccctaccttcgtccttccaacatcaaactaaacgacgaaaaacccgaaaaaccccgacctcctcctctcgaacccgaacgcgctaaaaaacgaaaatactacgacccctccctacgcgacgctacccaccgactacaccccctcctaacgccgaaaatccccgcgataaatactcaaaacccgaacctcgcgccacgtctctaaaaaaacgaaaaacgcgcaccgaaaccgcccaacaaccgcctacgcgccccgcgaccgaaccgaactaaacgcccgcgaaaccaacgaaaccaacgaaaccaacgacccgactccgaaaaaaaacaaaaaaaaccgacgcaaaaacgaacgcgaaaaaacgaaacctaaaacgaacgaaaaaaaaaaacgaatcaaacgcgcgtaaacgacctcgcgattttcaaacctcaatacctcgcgaaaaacaaacgaacgaacgaaaaacgcgaaacaacctcttccccctctccccgctccatctccttcccttcccaaaccgcaactatcctttataaaacgtccaaaattcgcccacatccacctccgcgctaa

SEQ ID NO: 2165 - DNA, 1222 bp, Artificial Sequence
  chemically treated genomic DNA (Homo sapiens) CpG-island No: 2165
cgttcgcggtcgtcggtttcggttttttttcgacgtattatatttagtaatcggcgttgataggacgtagtggcggcggcggcggcgggaggaggaagcggaatggttgtcgcggtggagttattttcgttttttcgttttattttttcgcggttgtagtcgtcgtcgagttttgatagttcgagtcggggcggaagcgttcggcggcgtgtagcgttcgtttttcgttgtttttagcgtttcgggttatttcgattattcgggttaattaatttcgcgattttgtttagcgtttagttttcgtcgttcgtcgcgtttttcgtttcgcgtttcgcgcgtcggtattcggtttcgtcgtcgtaatttcgtcgtttcgtcgcggcgtttttcgtttttattatttcgtagttcgcgtgtacgtttttgagttttttagtcgttcgttcgttcgttcgcggtatttcggggcgttcgtttttttttttattcgagttcgtttttcgtttttcggtatttcgcgttttcgtatttcgttatttttatttcggggttcgtacgcgtttttttcgttttgtcgttttttttttcgtcggttatttttggttatttcggggtttttcgttcgggtaggagttttcgcgcgtttggtattttcgtttattttcgggttatttatcgatgtggttgttttcgatgtgttcgatgaggtcggttagggtggggaagtggagttcgtagttttcgaatcggtaggtattggagaagaaggaggcggcggcgatgtttgttatggtgttatatcgagagtttttttggtgtcggttttgcgagcgtcgggcgggcgagggagggagggaggtcgggtggggtgaggagaggaggggttgggggagggggagagaggcggggtgaggggagcggcgaggacgggacggagggagagggggcgagagagatggaaggagagcgaggagttatcgggaggtagaggggaggcggcggttgcggcggcggcgtcgggagcggcggggggagggcgggggcgggggcggggggggaaggtcgtcgtagttgggaggagggattagggcgcgcggttatagttgtgcggttttaattttagcgcgcggatttaggttttatttgcgagttttgttattaattttatttcgttaggtttgttttttacggtttgttattcgtgttatttgtttggagtttt

SEQ ID NO: 2166 - DNA, 1222 bp, Artificial Sequence
  chemically treated genomic DNA (Homo sapiens) CpG-island No: 2166
aaaactccaaacaaataacacgaataacaaaccgtaaaaaacaaacctaacgaaataaaattaataacaaaactcgcaaataaaacctaaatccgcgcgctaaaattaaaaccgcacaactataaccgcgcgccctaatccctcctcccaactacgacgaccttccccccccgcccccgcccccgccctccccccgccgctcccgacgccgccgccgcaaccgccgcctcccctctacctcccgataactcctcgctctccttccatctctctcgccccctctccctccgtcccgtcctcgccgctcccctcaccccgcctctctccccctcccccaacccctcctctcctcaccccacccgacctccctccctccctcgcccgcccgacgctcgcaaaaccgacaccaaaaaaactctcgatataacaccataacaaacatcgccgccgcctccttcttctccaatacctaccgattcgaaaactacgaactccacttccccaccctaaccgacctcatcgaacacatcgaaaacaaccacatcgataaataacccgaaaataaacgaaaataccaaacgcgcgaaaactcctacccgaacgaaaaaccccgaaataaccaaaaataaccgacgaaaaaaaaaacgacaaaacgaaaaaaacgcgtacgaaccccgaaataaaaataacgaaatacgaaaacgcgaaataccgaaaaacgaaaaacgaactcgaataaaaaaaaaaacgaacgccccgaaataccgcgaacgaacgaacgaacgactaaaaaactcaaaaacgtacacgcgaactacgaaataataaaaacgaaaaacgccgcgacgaaacgacgaaattacgacgacgaaaccgaataccgacgcgcgaaacgcgaaacgaaaaacgcgacgaacgacgaaaactaaacgctaaacaaaatcgcgaaattaattaacccgaataatcgaaataacccgaaacgctaaaaacaacgaaaaacgaacgctacacgccgccgaacgcttccgccccgactcgaactatcaaaactcgacgacgactacaaccgcgaaaaaataaaacgaaaaaacgaaaataactccaccgcgacaaccattccgcttcctcctcccgccgccgccgccgccactacgtcctatcaacgccgattactaaatataatacgtcgaaaaaaaaccgaaaccgacgaccgcgaacg

SEQ ID NO: 2167 - DNA, 1222 bp, Artificial Sequence
  chemically treated genomic DNA (Homo sapiens) CpG-island No: 2167
gaggttttaaatagatggtacggatggtaagtcgtaaagggtaggtttagcgagataaagttggtggtagggttcgtaggtgaggtttgggttcgcgcgttgaggttggggtcgtatagttgtagtcgcgcgttttggtttttttttttagttgcggcggtttttttttttcgttttcgttttcgtttttttttcgtcgttttcgacgtcgtcgtcgtagtcgtcgttttttttttgtttttcggtggtttttcgttttttttttatttttttcgtttttttttttttcgtttcgttttcgtcgttttttttatttcgttttttttttttttttttagttttttttttttttattttattcggtttttttttttttttcgttcgttcggcgttcgtagagtcgatattaggggggttttcgatgtagtattatgataggtatcgtcgtcgttttttttttttttaatatttgtcgattcgggggttgcggattttatttttttattttggtcgattttatcgagtatatcgaggataattatatcggtaaatggttcgggggtgggcgggggtgttaggcgcgcggaaatttttgttcgggcggggagtttcggaatggttaggggtggtcggcggggagggaggcggtagggcggggagggcgcgtgcgagtttcgaggtgggggtggcgggatgcgggggcgcgaggtgtcggggggcggggagcgggttcgggtgggggagggggcgggcgtttcgaggtgtcgcgggcgggcgggcgggcggttgggggatttaggggcgtgtacgcgggttgcgaagtggtgggagcggggagcgtcgcggcggggcggcggggttgcggcggcggggtcgagtgtcggcgcgcggggcgcggggcggagggcgcggcgggcggcgggagttgggcgttgggtagggtcgcggagttagttggttcgggtggtcggagtagttcgaggcgttgagggtagcggggggcgggcgttgtacgtcgtcgggcgttttcgtttcggttcgagttgttagggttcggcggcggttgtagtcgcggggaggtggagcgggggggcgggggtggttttatcgcggtagttatttcgtttttttttttcgtcgtcgtcgtcgttattgcgttttgttagcgtcggttgttaggtgtggtgcgtcgggagggggtcggggtcggcggtcgcgggcg

SEQ ID NO: 2168 - DNA, 1222 bp, Artificial Sequence
  chemically treated genomic DNA (Homo sapiens) CpG-island No: 2168
cgcccgcgaccgccgaccccgaccccctcccgacgcaccacacctaacaaccgacgctaacaaaacgcaataacgacgacgacgacgaaaaaaaaaaacgaaataactaccgcgataaaaccacccccgcccccccgctccacctccccgcgactacaaccgccgccgaaccctaacaactcgaaccgaaacgaaaacgcccgacgacgtacaacgcccgccccccgctaccctcaacgcctcgaactactccgaccacccgaaccaactaactccgcgaccctacccaacgcccaactcccgccgcccgccgcgccctccgccccgcgccccgcgcgccgacactcgaccccgccgccgcaaccccgccgccccgccgcgacgctccccgctcccaccacttcgcaacccgcgtacacgcccctaaatcccccaaccgcccgcccgcccgcccgcgacacctcgaaacgcccgccccctcccccacccgaacccgctccccgccccccgacacctcgcgcccccgcatcccgccacccccacctcgaaactcgcacgcgccctccccgccctaccgcctccctccccgccgaccacccctaaccattccgaaactccccgcccgaacaaaaatttccgcgcgcctaacacccccgcccacccccgaaccatttaccgatataattatcctcgatatactcgataaaatcgaccaaaataaaaaaataaaatccgcaacccccgaatcgacaaatattaaaaaaaaaaaaaacgacgacgatacctatcataatactacatcgaaaacccccctaatatcgactctacgaacgccgaacgaacgaaaaaaaaaaaaaaaccgaataaaataaaaaaaaaaaaaactaaaaaaaaaaaaaaaaaacgaaataaaaaaaacgacgaaaacgaaacgaaaaaaaaaaaaacgaaaaaaataaaaaaaaaacgaaaaaccaccgaaaaacaaaaaaaaaacgacgactacgacgacgacgtcgaaaacgacgaaaaaaaaacgaaaacgaaaacgaaaaaaaaaaaccgccgcaactaaaaaaaaaaaccaaaacgcgcgactacaactatacgaccccaacctcaacgcgcgaacccaaacctcacctacgaaccctaccaccaactttatctcgctaaacctaccctttacgacttaccatccgtaccatctatttaaaacctc

SEQ ID NO: 2169 - DNA, 557 bp, Artificial Sequence
  chemically treated genomic DNA (Homo sapiens) CpG-island No: 2169
ggaggtgtagcgacgggggagtttacggttacgggcggcgttatttgtagtcgtacgatgcgtcgggttacggcgtgaggagggttagcgattcggtgcggataggtttcgagggtttggttttgtttcgtgtgtcgcgttttagtagttttagtagttgtaatttttcggcgatggttacgttcgcggagaagcgtagtttcgtgttttagaattatacgcggttcgagggcggttagtttcgaaatttttattcgtttttttgtttttttagtattatcgagaacgttattttggagtttttgattatggacgttgatgttaatttgaacgatgaggattttttgtcggacgacgtggtgtagtatttaaatttttagaattaagtagggtacgagtagtatttttttagcgttttttcggacgatagtaaagtgttttacgggttcggtgattttgacgcgttcgggttgttagatagttacgttggttagtagttttatgttttcgagtagttttgtttcgagggtagtaaaatcgatttgtttatttagtgg

SEQ ID NO: 2170 - DNA, 557 bp, Artificial Sequence
  chemically treated genomic DNA (Homo sapiens) CpG-island No: 2170
ccactaaataaacaaatcgattttactaccctcgaaacaaaactactcgaaaacataaaactactaaccaacgtaactatctaacaacccgaacgcgtcaaaatcaccgaacccgtaaaacactttactatcgtccgaaaaaacgctaaaaaaatactactcgtaccctacttaattctaaaaatttaaatactacaccacgtcgtccgacaaaaaatcctcatcgttcaaattaacatcaacgtccataatcaaaaactccaaaataacgttctcgataatactaaaaaaacaaaaaaacgaataaaaatttcgaaactaaccgccctcgaaccgcgtataattctaaaacacgaaactacgcttctccgcgaacgtaaccatcgccgaaaaattacaactactaaaactactaaaacgcgacacacgaaacaaaaccaaaccctcgaaacctatccgcaccgaatcgctaaccctcctcacgccgtaacccgacgcatcgtacgactacaaataacgccgcccgtaaccgtaaactcccccgtcgctacacctcc

SEQ ID NO: 2171 - DNA, 557 bp, Artificial Sequence
  chemically treated genomic DNA (Homo sapiens) CpG-island No: 2171
ttattgaatgggtaggtcggttttgttgttttcggggtagggttgttcgagggtatggaattgttggttagcgtggttgtttggtagttcgggcgcgttaaagttatcgggttcgtggggtattttgttgtcgttcgggagggcgttggggaagtgttgttcgtattttgtttggttttgggaatttaaatattgtattacgtcgttcggtaggaaatttttatcgtttaggttggtattagcgtttatggttagggattttagggtgacgttttcggtgatgttgggaggatagggggacgagtggaagtttcgggattggtcgttttcgggtcgcgtgtaattttgaagtacgagattgcgttttttcgcggacgtggttatcgtcggggggttgtagttgttgaggttgttgaagcgcggtatacgaggtagggttaggttttcggagtttgttcgtatcgggtcgttggttttttttacgtcgtggttcggcgtatcgtgcggttgtaggtggcgtcgttcgtagtcgtgggttttttcgtcgttgtattttt

SEQ ID NO: 2172 - DNA, 557 bp, Artificial Sequence
  chemically treated genomic DNA (Homo sapiens) CpG-island No: 2172
aaaaatacaacgacgaaaaaacccacgactacgaacgacgccacctacaaccgcacgatacgccgaaccacgacgtaaaaaaaaccaacgacccgatacgaacaaactccgaaaacctaaccctacctcgtataccgcgcttcaacaacctcaacaactacaaccccccgacgataaccacgtccgcgaaaaaacgcaatctcgtacttcaaaattacacgcgacccgaaaacgaccaatcccgaaacttccactcgtccccctatcctcccaacatcaccgaaaacgtcaccctaaaatccctaaccataaacgctaataccaacctaaacgataaaaatttcctaccgaacgacgtaatacaatatttaaattcccaaaaccaaacaaaatacgaacaacacttccccaacgccctcccgaacgacaacaaaataccccacgaacccgataactttaacgcgcccgaactaccaaacaaccacgctaaccaacaattccataccctcgaacaaccctaccccgaaaacaacaaaaccgacctacccattcaataa

SEQ ID NO: 2173 - DNA, 900 bp, Artificial Sequence
  chemically treated genomic DNA (Homo sapiens) CpG-island No: 2173
gagcgcgggtattaagcgtgcgttttttttttcgagacgcgtttttttttcggaatttaatgttttgttttttttttttttttttttttttattcgtagagaattcggtggcggttaaatcgggaggttgtttttcgggttcggttacggtgtatttggagtagggcggtattaagttggtgaaggatttgagtttcggggatcgcgtgttggcggcggacgattagggtcggttgttttatagcgatttttttatttttttggatcgcgacgacggcgttaagaaggttttttacgtgatcgagacgcgggagtcgcgcgagcgtttgttgtttatcgtcgcgtatttgttttttgtggcgtcgtataacgattcggttatcggggagttcgaggcgttttcgggttcggggtcgtttttcgggggcgtattggggtttcgggcgttgttcgttagtcgcgtgcgttcgggttagcgcgtgtacgtggtggtcgagcgtgacggggatcgtcggtttttgttcgtcgttgtgtatagcgtgattttaagcgaggaggtcgcgggcgtttacgcgtcgtttacggtttagggtattatttttattaatcgggtgttggtttcgtgttacgcggttatcgaggagtatagttgggcgtatcgggttttcgcgttttttcgtttggcgtacgcgtttttggttgtattggcgttcgcgcgtacggatcgcggcggggatagcggcggcggggatcgcgggggcggcggcggtagagtagttttaatcgttttaggtgttgtcgacgtttcgggtgcgggggttatcgcgggtatttattggtattcgtagttgttttattaaataggtatttggtttttggatagcgaggttttgtattcgt

SEQ ID NO: 2174 - DNA, 900 bp, Artificial Sequence
  chemically treated genomic DNA (Homo sapiens) CpG-island No: 2174
acgaatacaaaacctcgctatccaaaaaccaaatacctatttaataaaacaactacgaataccaataaatacccgcgataacccccgcacccgaaacgtcgacaacacctaaaacgattaaaactactctaccgccgccgcccccgcgatccccgccgccgctatccccgccgcgatccgtacgcgcgaacgccaatacaaccaaaaacgcgtacgccaaacgaaaaaacgcgaaaacccgatacgcccaactatactcctcgataaccgcgtaacacgaaaccaacacccgattaataaaaataataccctaaaccgtaaacgacgcgtaaacgcccgcgacctcctcgcttaaaatcacgctatacacaacgacgaacaaaaaccgacgatccccgtcacgctcgaccaccacgtacacgcgctaacccgaacgcacgcgactaacgaacaacgcccgaaaccccaatacgcccccgaaaaacgaccccgaacccgaaaacgcctcgaactccccgataaccgaatcgttatacgacgccacaaaaaacaaatacgcgacgataaacaacaaacgctcgcgcgactcccgcgtctcgatcacgtaaaaaaccttcttaacgccgtcgtcgcgatccaaaaaaataaaaaaatcgctataaaacaaccgaccctaatcgtccgccgccaacacgcgatccccgaaactcaaatccttcaccaacttaataccgccctactccaaatacaccgtaaccgaacccgaaaaacaacctcccgatttaaccgccaccgaattctctacgaataaaaaaaaaaaaaaaaaaaaaaaacaaaacattaaattccgaaaaaaaaacgcgtctcgaaaaaaaaaacgcacgcttaatacccgcgctc

SEQ ID NO: 2175 - DNA, 900 bp, Artificial Sequence
  chemically treated genomic DNA (Homo sapiens) CpG-island No: 2175
gcgggtgtagggtttcgttgtttaggagttaggtgtttatttggtagagtagttgcgagtattagtggatgttcgcggtggttttcgtattcggagcgtcggtagtatttggagcggttagggttattttgtcgtcgtcgttttcgcggttttcgtcgtcgttgttttcgtcgcggttcgtgcgcgcgggcgttagtgtagttaggagcgcgtgcgttaggcggaagggcgcgaaggttcggtgcgtttagttgtgtttttcgatgatcgcgtagtacgaggttagtattcggttgatgagaatggtgttttgggtcgtgagcggcgcgtaggcgttcgcggttttttcgtttagggttacgttgtgtatagcggcgggtaggagtcggcggttttcgttacgttcggttattacgtatacgcgttggttcgggcgtacgcggttggcgaatagcgttcgaggttttagtgcgttttcggaaggcggtttcgagttcgaggacgtttcgggtttttcggtggtcgagtcgttgtgcggcgttataaagagtaggtgcgcggcggtgagtagtaggcgttcgcgcggttttcgcgtttcgattacgtagaagatttttttggcgtcgtcgtcgcggtttaggaaagtgaggaagtcgttgtagagtagtcggttttggtcgttcgtcgttagtacgcggttttcggggtttaggttttttattagtttggtgtcgttttgttttaggtgtatcgtggtcgagttcgggaagtagtttttcgatttggtcgttatcgagttttttgcgggtgaggagaagggaaagaagagaggatagggtattgagtttcgagagggaggcgcgtttcggggaggagggcgtacgtttggtgttcgcgttt

SEQ ID NO: 2176 - DNA, 900 bp, Artificial Sequence
  chemically treated genomic DNA (Homo sapiens) CpG-island No: 2176
aaacgcgaacaccaaacgtacgccctcctccccgaaacgcgcctccctctcgaaactcaataccctatcctctcttctttcccttctcctcacccgcaaaaaactcgataacgaccaaatcgaaaaactacttcccgaactcgaccacgatacacctaaaacaaaacgacaccaaactaataaaaaacctaaaccccgaaaaccgcgtactaacgacgaacgaccaaaaccgactactctacaacgacttcctcactttcctaaaccgcgacgacgacgccaaaaaaatcttctacgtaatcgaaacgcgaaaaccgcgcgaacgcctactactcaccgccgcgcacctactctttataacgccgcacaacgactcgaccaccgaaaaacccgaaacgtcctcgaactcgaaaccgccttccgaaaacgcactaaaacctcgaacgctattcgccaaccgcgtacgcccgaaccaacgcgtatacgtaataaccgaacgtaacgaaaaccgccgactcctacccgccgctatacacaacgtaaccctaaacgaaaaaaccgcgaacgcctacgcgccgctcacgacccaaaacaccattctcatcaaccgaatactaacctcgtactacgcgatcatcgaaaaacacaactaaacgcaccgaaccttcgcgcccttccgcctaacgcacgcgctcctaactacactaacgcccgcgcgcacgaaccgcgacgaaaacaacgacgacgaaaaccgcgaaaacgacgacgacaaaataaccctaaccgctccaaatactaccgacgctccgaatacgaaaaccaccgcgaacatccactaatactcgcaactactctaccaaataaacacctaactcctaaacaacgaaaccctacacccgc

SEQ ID NO: 2177 - DNA, 778 bp, Artificial Sequence
  chemically treated genomic DNA (Homo sapiens) CpG-island No: 2177
tatcgagaggggggattacggagagggggattattgatagaggggggattatggagagggagggattacggagagagggagggattacggagagagggagggattatggagaggggggattatggagagggagggattacggagagggggtattatgaagagggggattatggagagagggagggattacggagagggagggattatggagagaggggggattatggagagagggagggattacggagagggagggattatggagagaggggggattatggagagagggagggattacggagagggagggattacggagagagggagggattacggagagagggggattacggagagagggaggattatagagacgggggattatggagagggtgattacggagagagggagggattacggagagagggagggattacggagagagggagggattatggagaggggggattacggagagggggattacggagagagggagggattatggaggggggattacggagaggggtattacggagagagggagggattatggagagagggagggattacggagagagggagggattacggagagagggagggattacggagagagggagggattacggagagagggaggatgatagagagaggggggattatggaaaaggagggattacggagagagggagggattatggagagagggagggattatggagagggagggattatggagagggaggattatagagagagggagggattatggag

SEQ ID NO: 2178 - DNA, 778 bp, Artificial Sequence
  chemically treated genomic DNA (Homo sapiens) CpG-island No: 2178
ctccataatccctccctctctctataatcctccctctccataatccctccctctccataatccctccctctctccataatccctccctctctccgtaatccctccttttccataatcccccctctctctatcatcctccctctctccgtaatccctccctctctccgtaatccctccctctctccgtaatccctccctctctccgtaatccctccctctctccataatccctccctctctccgtaatacccctctccgtaatcccccctccataatccctccctctctccgtaatccccctctccgtaatcccccctctccataatccctccctctctccgtaatccctccctctctccgtaatccctccctctctccgtaatcaccctctccataatcccccgtctctataatcctccctctctccgtaatccccctctctccgtaatccctccctctctccgtaatccctccctctccgtaatccctccctctctccataatcccccctctctccataatccctccctctccgtaatccctccctctctccataatcccccctctctccataatccctccctctccgtaatccctccctctctccataatccccctcttcataataccccctctccgtaatccctccctctccataatcccccctctccataatccctccctctctccgtaatccctccctctctccgtaatccctccctctccataatcccccctctatcaataatccccctctccgtaatcccccctctcgata

SEQ ID NO: 2179 - DNA, 778 bp, Artificial Sequence
  chemically treated genomic DNA (Homo sapiens) CpG-island No: 2179
ttttataatttttttttttttttgtaattttttttttttataatttttttttttttataatttttttttttttttataattttttttttttttcgtaatttttttttttttataattttttttttttttgttatttttttttttttcgtaattttttttttttttcgtaattttttttttttttcgtaattttttttttttttcgtaatttttttttttttttataattttttttttttttcgtaatattttttttcgtaattttttttttataattttttttttttttcgtaattttttttttcgtaattttttttttttataattttttttttttttcgtaattttttttttttttcgtaattttttttttttttcgtaattattttttttataatttttcgtttttgtaatttttttttttttcgtaattttttttttttcgtaattttttttttttttcgtaattttttttttttcgtaatttttttttttttttataattttttttttttttataattttttttttttcgtaatttttttttttttttataattttttttttttttataattttttttttttcgtaatttttttttttttttataatttttttttttataatatttttttttcgtaatttttttttttttataattttttttttttataattttttttttttttcgtaattttttttttttttcgtaatttttttttttttataattttttttttattagtaattttttttttcgtaattttttttttcggta

SEQ ID NO: 2180 - DNA, 778 bp, Artificial Sequence
  chemically treated genomic DNA (Homo sapiens) CpG-island No: 2180
taccgaaaaaaaaaattacgaaaaaaaaaattactaataaaaaaaaaattataaaaaaaaaaaaattacgaaaaaaaaaaaaaattacgaaaaaaaaaaaaaattataaaaaaaaaaaattataaaaaaaaaaaaattacgaaaaaaaaatattataaaaaaaaaaattataaaaaaaaaaaaaaattacgaaaaaaaaaaaattataaaaaaaaaaaaaattataaaaaaaaaaaaaaattacgaaaaaaaaaaaattataaaaaaaaaaaaaattataaaaaaaaaaaaaaattacgaaaaaaaaaaaattacgaaaaaaaaaaaaaattacgaaaaaaaaaaaattacgaaaaaaaaaaaaattacaaaaacgaaaaattataaaaaaaataattacgaaaaaaaaaaaaaattacgaaaaaaaaaaaaaattacgaaaaaaaaaaaaaattataaaaaaaaaaaattacgaaaaaaaaaattacgaaaaaaaaaaaaaattataaaaaaaaaattacgaaaaaaaatattacgaaaaaaaaaaaaaattataaaaaaaaaaaaaaattacgaaaaaaaaaaaaaattacgaaaaaaaaaaaaaattacgaaaaaaaaaaaaaattacgaaaaaaaaaaaaataacaaaaaaaaaaaaaattataaaaaaaaaaaaattacgaaaaaaaaaaaaaattataaaaaaaaaaaaaaattataaaaaaaaaaaaattataaaaaaaaaaaattacaaaaaaaaaaaaaaattataaaa

SEQ ID NO: 2181 - DNA, 525 bp, Artificial Sequence
  chemically treated genomic DNA (Homo sapiens) CpG-island No: 2181
ggggtcgaatggtcggcgtcgattggacggtagagtcgtcgtttttggtcgatttttttttttattggttttttcgggtatcgttttttgaatagggcgggagattcggtgtgtcgtacgtaggttttttattttttagttggttttcggtgttttttattttttcggtggtcgggcgcgaattattggaaattggtttttttcgttggggtcgaaggtattttttttgcggcggcgatttagcggggtgtcgttcggtcggcgtgacgtagtcggatcggcgttagacggaaatttagcggtgagtagtggggtgtcggggtagtttgttttttttttttgtttagttcgcggcgtgtgaggtgcgtttaggtgtatttagtttcgcgtcggagtttggtttttagcgttttaagtcgcgtattttaggattttttttcggtatttggggtatggtttttgcgtttcgttgtttttcgtaggttgttcgggggttcgagaatttttattggtggagcgtagtta

SEQ ID NO: 2182 - DNA, 525 bp, Artificial Sequence
  chemically treated genomic DNA (Homo sapiens) CpG-island No: 2182
taactacgctccaccaataaaaattctcgaacccccgaacaacctacgaaaaacaacgaaacgcaaaaaccataccccaaataccgaaaaaaaatcctaaaatacgcgacttaaaacgctaaaaaccaaactccgacgcgaaactaaatacacctaaacgcacctcacacgccgcgaactaaacaaaaaaaaaaaacaaactaccccgacaccccactactcaccgctaaatttccgtctaacgccgatccgactacgtcacgccgaccgaacgacaccccgctaaatcgccgccgcaaaaaaaataccttcgaccccaacgaaaaaaaccaatttccaataattcgcgcccgaccaccgaaaaaataaaaaacaccgaaaaccaactaaaaaataaaaaacctacgtacgacacaccgaatctcccgccctattcaaaaaacgatacccgaaaaaaccaataaaaaaaaaaatcgaccaaaaacgacgactctaccgtccaatcgacgccgaccattcgacccc

SEQ ID NO: 2183 - DNA, 525 bp, Artificial Sequence
  chemically treated genomic DNA (Homo sapiens) CpG-island No: 2183
tggttgcgttttattagtaagggttttcgagttttcgggtagtttgcggggggtagcgaggcgtaaagattatgttttaagtgtcgagggaaagttttgagatgcgcgatttgggacgttaggggttaagtttcgacgcggggttgggtgtatttggacgtattttatacgtcgcgagttaagtagaaaagggaggtaggttgtttcgatattttattatttatcgttaggttttcgtttggcgtcgattcggttgcgttacgtcggtcgaacgatatttcgttgagtcgtcgtcgtagggaaggtattttcggttttaacgggaaaagttaatttttagtaattcgcgttcgattatcggggaggtaaggagtatcggaggttagttgggggatgggaagtttgcgtgcggtatatcgaatttttcgttttgtttagggggcggtgttcgaggaagttaataggaagaggagtcggttaagagcgacggttttgtcgtttagtcggcgtcggttattcggtttt

SEQ ID NO: 2184 - DNA, 525 bp, Artificial Sequence
  chemically treated genomic DNA (Homo sapiens) CpG-island No: 2184
aaaaccgaataaccgacgccgactaaacgacaaaaccgtcgctcttaaccgactcctcttcctattaacttcctcgaacaccgccccctaaacaaaacgaaaaattcgatataccgcacgcaaacttcccatcccccaactaacctccgatactccttacctccccgataatcgaacgcgaattactaaaaattaacttttcccgttaaaaccgaaaataccttccctacgacgacgactcaacgaaatatcgttcgaccgacgtaacgcaaccgaatcgacgccaaacgaaaacctaacgataaataataaaatatcgaaacaacctacctcccttttctacttaactcgcgacgtataaaatacgtccaaatacacccaaccccgcgtcgaaacttaacccctaacgtcccaaatcgcgcatctcaaaactttccctcgacacttaaaacataatctttacgcctcgctaccccccgcaaactacccgaaaactcgaaaacccttactaataaaacgcaacca

SEQ ID NO: 2185 - DNA, 769 bp, Artificial Sequence
  chemically treated genomic DNA (Homo sapiens) CpG-island No: 2185
gttttggttttttttttggcgtttgcgtttacgatggtcgcgcgcgcgatacgttcgtttttttcgtttgttcgtttcgtgtatgattcgtttcgcggcggagacgcgttcgttgcgttattagtgttttcgagacgagtttcgacgtagtagttgttagttttattttgttgttggtgcgcgacgtagttagttgcgtgattttcgtgattgcgttataagttttgtttttttcgatttggagtttttgtttaggacggtaagacgtaggagggagcggattaggtgatagggtcgtttttgtgagtttcgcgggcgtttggcgatgttttttttttttgtttgtttgttgttcgtcgttttcggcgcgacgattgtttgttttttttatttttaggttgtatagtggcggcgcgttttttttttttgcgcggtcgagtttgtcgtcgtcggattcggtttgcgggggtagttacggtgtttgttaggtcggtcgtttttttggagtttttgtttttcgttgaggaagcggcgtcgtttgacgcgggacggtcgggcgggcgttatgttgtgaatcgtttcggcggagttgtaagatggcggttgggcggaggtcggtttcggttttgtggtcggaaaggcgaggtttttcgttgaggggggatttgttggggttttagaatgtgcgtgagttaagtagttgtggggaaacgttgtttggagtaagtggagaaagagacggaattcgtaggggttatagttaatgttt

SEQ ID NO: 2186 - DNA, 769 bp, Artificial Sequence
  chemically treated genomic DNA (Homo sapiens) CpG-island No: 2186
aaacattaactataacccctacgaattccgtctctttctccacttactccaaacaacgtttccccacaactacttaactcacgcacattctaaaaccccaacaaatcccccctcaacgaaaaacctcgcctttccgaccacaaaaccgaaaccgacctccgcccaaccgccatcttacaactccgccgaaacgattcacaacataacgcccgcccgaccgtcccgcgtcaaacgacgccgcttcctcaacgaaaaacaaaaactccaaaaaaacgaccgacctaacaaacaccgtaactacccccgcaaaccgaatccgacgacgacaaactcgaccgcgcaaaaaaaaaaaacgcgccgccactatacaacctaaaaataaaaaaaacaaacaatcgtcgcgccgaaaacgacgaacaacaaacaaacaaaaaaaaaaaacatcgccaaacgcccgcgaaactcacaaaaacgaccctatcacctaatccgctccctcctacgtcttaccgtcctaaacaaaaactccaaatcgaaaaaaacaaaacttataacgcaatcacgaaaatcacgcaactaactacgtcgcgcaccaacaacaaaataaaactaacaactactacgtcgaaactcgtctcgaaaacactaataacgcaacgaacgcgtctccgccgcgaaacgaatcatacacgaaacgaacaaacgaaaaaaacgaacgtatcgcgcgcgcgaccatcgtaaacgcaaacgccaaaaaaaaaaccaaaac

SEQ ID NO: 2187 - DNA, 769 bp, Artificial Sequence
  chemically treated genomic DNA (Homo sapiens) CpG-island No: 2187
agatattaattgtaatttttacgggtttcgtttttttttttatttattttagataacgtttttttatagttgtttggtttacgtatattttggaattttagtaaatttttttttaacggggagtttcgttttttcggttatagggtcgaagtcggttttcgtttagtcgttattttatagtttcgtcgaggcggtttataatatggcgttcgttcgatcgtttcgcgttaggcggcgtcgtttttttagcggagggtagaagttttaagagggcggtcggtttagtaaatatcgtaattattttcgtaggtcggattcggcggcgataggttcggtcgcgtaggaaagaggggcgcgtcgttattgtgtagtttgggagtgaagggagtaggtagtcgtcgcgtcggggacggcgggtagtaaataagtaggaaaagggggtatcgttaggcgttcgcgaggtttataggaacggttttgttatttagttcgtttttttttgcgttttatcgttttggataaagattttaagtcgaaggagataaagtttgtaacgtaattacgggaattacgtagttgattgcgtcgcgtattaataataaaatggagttgatagttgttgcgtcgagattcgtttcgaaaatattgatgacgtagcgagcgcgttttcgtcgcggggcgggttatgtacggggcgagtaggcggaaagggcgggcgtgtcgcgcgcgcgattatcgtgggcgtaggcgttagggagggaattagagt

SEQ ID NO: 2188 - DNA, 769 bp, Artificial Sequence
  chemically treated genomic DNA (Homo sapiens) CpG-island No: 2188
actctaattccctccctaacgcctacgcccacgataatcgcgcgcgcgacacgcccgccctttccgcctactcgccccgtacataacccgccccgcgacgaaaacgcgctcgctacgtcatcaatattttcgaaacgaatctcgacgcaacaactatcaactccattttattattaatacgcgacgcaatcaactacgtaattcccgtaattacgttacaaactttatctccttcgacttaaaatctttatccaaaacgataaaacgcaaaaaaaaacgaactaaataacaaaaccgttcctataaacctcgcgaacgcctaacgatacccccttttcctacttatttactacccgccgtccccgacgcgacgactacctactcccttcactcccaaactacacaataacgacgcgcccctctttcctacgcgaccgaacctatcgccgccgaatccgacctacgaaaataattacgatatttactaaaccgaccgccctcttaaaacttctaccctccgctaaaaaaacgacgccgcctaacgcgaaacgatcgaacgaacgccatattataaaccgcctcgacgaaactataaaataacgactaaacgaaaaccgacttcgaccctataaccgaaaaaacgaaactccccgttaaaaaaaaatttactaaaattccaaaatatacgtaaaccaaacaactataaaaaaacgttatctaaaataaataaaaaaaaaaacgaaacccgtaaaaattacaattaatatct

SEQ ID NO: 2189 - DNA, 710 bp, Artificial Sequence
  chemically treated genomic DNA (Homo sapiens) CpG-island No: 2189
ggggttcgcgttttcgtttgttttgtcgtcggtttgagtgttcggcggtttcgcggggttgagttttaggattagcgtgtgcgtgtgtgtgtgtgtgtgtgtgtgtgtgtgatcgcgtatgtatgcgggtatttgtgggtaagagtgtgggtgtacgtatcgggatgtttgtttcgtcgtaaaggtcggggtaggtgcgcgcgtttgggtgttatcgttgttattaaggagttgaagcgggagggagagggaagtggggggagtttttgcgtggggtggcgggggggcgtagacgtcggttcgatcgggggcggcgggcgtaggttgtgcgggtagcgtcggagttagagcgtggtattgttcgttcgaggagttagtggttttgcgttttgggggtttgtaggggtcgatagtcggtcgtgttgtatttagcgtgcgggttttcgttcgttttatcgttttttagcgatcgttagtttggttgtttatttggtttttttagtcggtttgtttttttatttgttttttcggtgtcggttttagtgttcgtgcgttcgcgggattcgggaagtcgcgcgggagagttttggcgtatttagtttttttttgttcgcgttttggtcgcggttttgggaagggattgcgagcgagtcgggagttttttgggggttgttattttgggaagaattcgtgttttttttattttaatt

SEQ ID NO: 2190 - DNA, 710 bp, Artificial Sequence
  chemically treated genomic DNA (Homo sapiens) CpG-island No: 2190
aattaaaataaaaaaaacacgaattcttcccaaaataacaacccccaaaaaactcccgactcgctcgcaatcccttcccaaaaccgcgaccaaaacgcgaacaaaaaaaaactaaatacgccaaaactctcccgcgcgacttcccgaatcccgcgaacgcacgaacactaaaaccgacaccgaaaaaacaaataaaaaaacaaaccgactaaaaaaaccaaataaacaaccaaactaacgatcgctaaaaaacgataaaacgaacgaaaacccgcacgctaaatacaacacgaccgactatcgacccctacaaacccccaaaacgcaaaaccactaactcctcgaacgaacaataccacgctctaactccgacgctacccgcacaacctacgcccgccgcccccgatcgaaccgacgtctacgcccccccgccaccccacgcaaaaactccccccacttccctctccctcccgcttcaactccttaataacaacgataacacccaaacgcgcgcacctaccccgacctttacgacgaaacaaacatcccgatacgtacacccacactcttacccacaaatacccgcatacatacgcgatcacacacacacacacacacacacacacacgcacacgctaatcctaaaactcaaccccgcgaaaccgccgaacactcaaaccgacgacaaaacaaacgaaaacgcgaacccc

SEQ ID NO: 2191 - DNA, 710 bp, Artificial Sequence
  chemically treated genomic DNA (Homo sapiens) CpG-island No: 2191
ggttggggtggggagggtacggattttttttagggtagtaatttttagagaattttcggttcgttcgtagtttttttttaaagtcgcggttagagcgcggataaagagaggttgagtgcgttaggattttttcgcgcggtttttcgggtttcgcgggcgtacgggtattggaatcggtatcgggagggtagatagggaggtaggtcggttggaggggttagataggtagttaggttggcggtcgttgagaggcgatggagcgagcgggagttcgtacgttgggtgtagtacggtcgattgtcgatttttgtaggtttttagagcgtagaattattggtttttcggacggatagtgttacgttttggtttcggcgttattcgtatagtttgcgttcgtcgttttcgatcgaatcggcgtttgcgttttttcgttattttacgtaggagttttttttatttttttttttttttcgttttagttttttggtgatagcggtgatatttagacgcgcgtatttatttcgatttttgcggcgagatagatatttcggtgcgtgtatttatatttttatttatagatgttcgtatatatgcgcgattatatatatatatatatatatatatatacgtatacgttggttttggggtttagtttcgcggagtcgtcgaatatttagatcgacggtaggatagacggaggcgcgggtttt

SEQ ID NO: 2192 - DNA, 710 bp, Artificial Sequence
  chemically treated genomic DNA (Homo sapiens) CpG-island No: 2192
aaaacccgcgcctccgtctatcctaccgtcgatctaaatattcgacgactccgcgaaactaaaccccaaaaccaacgtatacgtatatatatatatatatatatatatataatcgcgcatatatacgaacatctataaataaaaatataaatacacgcaccgaaatatctatctcgccgcaaaaatcgaaataaatacgcgcgtctaaatatcaccgctatcaccaaaaaactaaaacgaaaaaaaaaaaaaaataaaaaaaactcctacgtaaaataacgaaaaaacgcaaacgccgattcgatcgaaaacgacgaacgcaaactatacgaataacgccgaaaccaaaacgtaacactatccgtccgaaaaaccaataattctacgctctaaaaacctacaaaaatcgacaatcgaccgtactacacccaacgtacgaactcccgctcgctccatcgcctctcaacgaccgccaacctaactacctatctaacccctccaaccgacctacctccctatctaccctcccgataccgattccaatacccgtacgcccgcgaaacccgaaaaaccgcgcgaaaaaatcctaacgcactcaacctctctttatccgcgctctaaccgcgactttaaaaaaaaactacgaacgaaccgaaaattctctaaaaattactaccctaaaaaaaatccgtaccctccccaccccaacc

SEQ ID NO: 2193 - DNA, 575 bp, Artificial Sequence
  chemically treated genomic DNA (Homo sapiens) CpG-island No: 2193
gatttcgagtaggcggcggggtcgggtcgggcgggagagtggggtttgcggagggtcgggaggggtcggtgtcggttcgggggcggggtcgtggggcggggatttcggcgtttcggtatttttttatcgtaggggtcggggcgggtcgtcgtttttacgttagtttaggtttatacgtggcggttgatgtaacgttcgtgtttttatattttttttttcgattaaagcggacgcgttttatttcgaggaatcgggtacgttgcgggcggtgtcgttgtttttagatcgatcgcgtttttgttcgttggtcggaggttttcgtttcgggtcggcggatatttaaaggagtcgtattttttttcgggtttgtttttcgtaagttatattttttcgcggattatttttaaaggagacgggacgtttgttcgttgatagttttcgtataaagcgcggtttattttttcgttgaaaggagcgtgagggtgcggtcgttgggaaataaaggttgtagggcgaggagtggggaaagagaaaaatttgaaaggttaaagattgttaaagtgagggagtattag

SEQ ID NO: 2194 - DNA, 575 bp, Artificial Sequence
  chemically treated genomic DNA (Homo sapiens) CpG-island No: 2194
ctaatactccctcactttaacaatctttaacctttcaaatttttctctttccccactcctcgccctacaacctttatttcccaacgaccgcaccctcacgctcctttcaacgaaaaaataaaccgcgctttatacgaaaactatcaacgaacaaacgtcccgtctcctttaaaaataatccgcgaaaaaatataacttacgaaaaacaaacccgaaaaaaaatacgactcctttaaatatccgccgacccgaaacgaaaacctccgaccaacgaacaaaaacgcgatcgatctaaaaacaacgacaccgcccgcaacgtacccgattcctcgaaataaaacgcgtccgctttaatcgaaaaaaaaaatataaaaacacgaacgttacatcaaccgccacgtataaacctaaactaacgtaaaaacgacgacccgccccgacccctacgataaaaaaataccgaaacgccgaaatccccgccccacgaccccgcccccgaaccgacaccgacccctcccgaccctccgcaaaccccactctcccgcccgacccgaccccgccgcctactcgaaatc

SEQ ID NO: 2195 - DNA, 575 bp, Artificial Sequence
  chemically treated genomic DNA (Homo sapiens) CpG-island No: 2195
ttgatgtttttttattttggtagtttttaattttttaggtttttttttttttttatttttcgttttgtagtttttattttttaacggtcgtatttttacgttttttttagcggagaaatagatcgcgttttgtgcggaagttgttagcgagtaagcgtttcgttttttttaagagtgattcgcgagggggtgtggtttgcggagagtaggttcgaaagggggtgcggtttttttaagtattcgtcggttcgaggcggaggttttcggttagcgggtaggggcgcggtcggtttgggagtagcggtatcgttcgtagcgtattcggtttttcgaagtggggcgcgttcgttttaatcggggagagagatgtgggggtacgggcgttatattagtcgttacgtgtgggtttaagttggcgtggaggcggcggttcgtttcggtttttgcggtggaaaagtatcggggcgtcgaggttttcgttttacggtttcgttttcgggtcggtatcggtttttttcggtttttcgtaagttttattttttcgttcggttcggtttcgtcgtttgttcgagatt

SEQ ID NO: 2196 - DNA, 575 bp, Artificial Sequence
  chemically treated genomic DNA (Homo sapiens) CpG-island No: 2196
aatctcgaacaaacgacgaaaccgaaccgaacgaaaaaataaaacttacgaaaaaccgaaaaaaaccgataccgacccgaaaacgaaaccgtaaaacgaaaacctcgacgccccgatacttttccaccgcaaaaaccgaaacgaaccgccgcctccacgccaacttaaacccacacgtaacgactaatataacgcccgtacccccacatctctctccccgattaaaacgaacgcgccccacttcgaaaaaccgaatacgctacgaacgataccgctactcccaaaccgaccgcgcccctacccgctaaccgaaaacctccgcctcgaaccgacgaatacttaaaaaaaccgcaccccctttcgaacctactctccgcaaaccacaccccctcgcgaatcactcttaaaaaaaacgaaacgcttactcgctaacaacttccgcacaaaacgcgatctatttctccgctaaaaaaaacgtaaaaatacgaccgttaaaaaataaaaactacaaaacgaaaaataaaaaaaaaaaaaaacctaaaaaattaaaaactaccaaaataaaaaaacatcaa

SEQ ID NO: 2197 - DNA, 1114 bp, Artificial Sequence
  chemically treated genomic DNA (Homo sapiens) CpG-island No: 2197
gttcgaattcgaggcgggatcgagggagtaagcgttttagttagatttcgtcggtttagttcgtttcgttgtttatttaataagttgtgggtgggggagggtaaagcgattgggaaaagaggaatcggagtagtcggtttgtgatcgagcgggtcggttaggagtaagaaaggggggatagtagtgagacgtgggagcgaggggagatagcgatagtggtaggacgggggagtgttgttttcgcggtttttattcgttcgtatttttttttaagtagttggaaattcgggttttttttgtcggagttagaggttttcgtaggcgtaagtttttagagtttcgggtgtagagcgcgcggggggttagtatttttcgtaggttattttttcgtcgagtttcgattcggttagttcggtcgcgatgttgttttcgttcgttaggattcggttttatttacggttagcgcgtaggtttagaaggttacgaagatttcggagtagagtagtgttagtttcgttatggcggcgacggcggcgggggtcggaacggcggggtcggagttataaacgcgttttagcgtttatcgttcgtttcgtagtttgttcgttcgtttcgtagcgttatttaattcgtttacgtgatgcgtcggtattacgtgattttacgtcggtttttcgcgtagcgtcgtcgttcgtttagagtaaggcgacgttggaatcgtagcgttggggattgtggtagttgtagttacgcgtttcggcggaggtttgggcgtttttttttttaggaatttcgatatttggtcggtttttttcgagtttttttatttcgttttgttagttttgttttattttcgagtttgttcgcgggtttttaaggcgttttttttggtagtcgtgcgttttagtttgtggcgggtggcgtcgcgcgtgttttttgttttattttgtttacggcgttttttcgttttagtgcgtttgttggcgttcgtttcgttgtttggttaatatttgttgtttttcgaaatcgttttttcggtaagttttttttaatttagtggtagggaagcgcgtttgttgggttttcgcgatgttttggtgatgtttattaagtt

SEQ ID NO: 2198 - DNA, 1114 bp, Artificial Sequence
  chemically treated genomic DNA (Homo sapiens) CpG-island No: 2198
aacttaataaacatcaccaaaacatcgcgaaaacccaacaaacgcgcttccctaccactaaattaaaaaaaacttaccgaaaaaacgatttcgaaaaacaacaaatattaaccaaacaacgaaacgaacgccaacaaacgcactaaaacgaaaaaacgccgtaaacaaaataaaacaaaaaacacgcgcgacgccacccgccacaaactaaaacgcacgactaccaaaaaaaacgccttaaaaacccgcgaacaaactcgaaaataaaacaaaactaacaaaacgaaataaaaaaactcgaaaaaaaccgaccaaatatcgaaattcctaaaaaaaaaaacgcccaaacctccgccgaaacgcgtaactacaactaccacaatccccaacgctacgattccaacgtcgccttactctaaacgaacgacgacgctacgcgaaaaaccgacgtaaaatcacgtaataccgacgcatcacgtaaacgaattaaataacgctacgaaacgaacgaacaaactacgaaacgaacgataaacgctaaaacgcgtttataactccgaccccgccgttccgacccccgccgccgtcgccgccataacgaaactaacactactctactccgaaatcttcgtaaccttctaaacctacgcgctaaccgtaaataaaaccgaatcctaacgaacgaaaacaacatcgcgaccgaactaaccgaatcgaaactcgacgaaaaaataacctacgaaaaatactaaccccccgcgcgctctacacccgaaactctaaaaacttacgcctacgaaaacctctaactccgacaaaaaaaacccgaatttccaactacttaaaaaaaaatacgaacgaataaaaaccgcgaaaacaacactcccccgtcctaccactatcgctatctcccctcgctcccacgtctcactactatcccccctttcttactcctaaccgacccgctcgatcacaaaccgactactccgattcctcttttcccaatcgctttaccctcccccacccacaacttattaaataaacaacgaaacgaactaaaccgacgaaatctaactaaaacgcttactccctcgatcccgcctcgaattcgaac

SEQ ID NO: 2199 - DNA, 1114 bp, Artificial Sequence
  chemically treated genomic DNA (Homo sapiens) CpG-island No: 2199
agtttaataagtattattaggatatcgcgggagtttagtaaacgcgtttttttgttattgggttagggaaggtttgtcggaaggacgatttcggaggatagtaggtgttagttaggtagcggagcgagcgttaataggcgtattggggcggagagacgtcgtgagtaaggtgaggtagagggtacgcgcggcgttattcgttataggttaggacgtacggttgttagagaggacgttttaggggttcgcgagtaggttcgggaataaaatagggttggtagggcgaggtggagagattcgagaaggatcggttagatgtcgaagtttttagagaggagggcgtttaagttttcgtcgagacgcgtgattataattattataatttttagcgttgcggttttagcgtcgttttgttttagacgggcggcggcgttgcgcggggaatcggcgtggggttacgtggtatcggcgtattacgtgggcgagttaggtgacgttgcggggcgggcggatagattgcgggacggacggtggacgttgggacgcgtttgtagtttcggtttcgtcgtttcgattttcgtcgtcgtcgtcgttatgacggggttagtattgttttatttcggggttttcgtggttttttgggtttgcgcgttggtcgtgggtgaggtcgggttttggcgggcgggagtagtatcgcggtcgagttggtcgggtcggaattcggcggggaagtggtttgcggggaatattggtttttcgcgcgttttgtattcgaggttttggggatttgcgtttgcgagggtttttgatttcgataaaggagattcggatttttagttgtttgaggaggggtgcgggcgggtaggggtcgcgagggtagtattttttcgttttgttattatcgttgttttttttcgtttttacgttttattgttgtttttttttttttgtttttgatcggttcgttcggttataagtcggttgtttcggtttttttttttttagtcgttttgtttttttttatttatagtttgttgggtaaatagcggaacggattgggtcggcgggatttggttggagcgtttgttttttcggtttcgtttcggattcgggt

SEQ ID NO: 2200 - DNA, 1114 bp, Artificial Sequence
  chemically treated genomic DNA (Homo sapiens) CpG-island No: 2200
acccgaatccgaaacgaaaccgaaaaaacaaacgctccaaccaaatcccgccgacccaatccgttccgctatttacccaacaaactataaataaaaaaaaacaaaacgactaaaaaaaaaaaaaccgaaacaaccgacttataaccgaacgaaccgatcaaaaacaaaaaaaaaaaaacaacaataaaacgtaaaaacgaaaaaaaacaacgataataacaaaacgaaaaaatactaccctcgcgacccctacccgcccgcacccctcctcaaacaactaaaaatccgaatctcctttatcgaaatcaaaaaccctcgcaaacgcaaatccccaaaacctcgaatacaaaacgcgcgaaaaaccaatattccccgcaaaccacttccccgccgaattccgacccgaccaactcgaccgcgatactactcccgcccgccaaaacccgacctcacccacgaccaacgcgcaaacccaaaaaaccacgaaaaccccgaaataaaacaatactaaccccgtcataacgacgacgacgacgaaaatcgaaacgacgaaaccgaaactacaaacgcgtcccaacgtccaccgtccgtcccgcaatctatccgcccgccccgcaacgtcacctaactcgcccacgtaatacgccgataccacgtaaccccacgccgattccccgcgcaacgccgccgcccgtctaaaacaaaacgacgctaaaaccgcaacgctaaaaattataataattataatcacgcgtctcgacgaaaacttaaacgccctcctctctaaaaacttcgacatctaaccgatccttctcgaatctctccacctcgccctaccaaccctattttattcccgaacctactcgcgaacccctaaaacgtcctctctaacaaccgtacgtcctaacctataacgaataacgccgcgcgtaccctctacctcaccttactcacgacgtctctccgccccaatacgcctattaacgctcgctccgctacctaactaacacctactatcctccgaaatcgtccttccgacaaaccttccctaacccaataacaaaaaaacgcgtttactaaactcccgcgatatcctaataatacttattaaact

SEQ ID NO: 2201 - DNA, 710 bp, Artificial Sequence
  chemically treated genomic DNA (Homo sapiens) CpG-island No: 2201
cgtttaacgaagcgcggagatgtagtttcgttagtttagggcgaagagttcgtggagttgaggggttgtggtaggtttttttcgttcggtttggttcgcgttgtgtttaacgttcggttatagtttcgttatagtcgttgttttcgttttagtgattgataagataagttaggtcggtcgggacggggtagggatttcggtaaggcgcgggttgtttcgagcgtttgttttcggtatttttaatttaggtttttatttttgttagttttggttcggtacggttcggtattagtcgtacggtttagcggaattgcgcggaaatttatttcgggtttttagttttgttttcgcgttagttcgtatttttttgagtaggcggtggagcggttcgtcgttttaggtcgcggtcgagtttaggtttcgtcgttgtttattttgggaaatgtagttcgtgttgcgtttagtcggaaggcggcgtttgcggaggaggtcgggagtacgtgggttggggatttgtagagtttcgtttgttttcggtttatcgcggcgagtaggtatttcgggttagatcggcgcggggcgttgcggtttaattttttagtaggacgacgtgattcgaggggtcggaggacggaggtgggagttcgggttagagggtggaggttggggaggttgtttggttattttggcgtttcgttgtcgggggtatt

SEQ ID NO: 2202 - DNA, 710 bp, Artificial Sequence
  chemically treated genomic DNA (Homo sapiens) CpG-island No: 2202
aatacccccgacaacgaaacgccaaaataaccaaacaacctccccaacctccaccctctaacccgaactcccacctccgtcctccgacccctcgaatcacgtcgtcctactaaaaaattaaaccgcaacgccccgcgccgatctaacccgaaatacctactcgccgcgataaaccgaaaacaaacgaaactctacaaatccccaacccacgtactcccgacctcctccgcaaacgccgccttccgactaaacgcaacacgaactacatttcccaaaataaacaacgacgaaacctaaactcgaccgcgacctaaaacgacgaaccgctccaccgcctactcaaaaaaatacgaactaacgcgaaaacaaaactaaaaacccgaaataaatttccgcgcaattccgctaaaccgtacgactaataccgaaccgtaccgaaccaaaactaacaaaaataaaaacctaaattaaaaataccgaaaacaaacgctcgaaacaacccgcgccttaccgaaatccctaccccgtcccgaccgacctaacttatcttatcaatcactaaaacgaaaacaacgactataacgaaactataaccgaacgttaaacacaacgcgaaccaaaccgaacgaaaaaaacctaccacaacccctcaactccacgaactcttcgccctaaactaacgaaactacatctccgcgcttcgttaaacg

SEQ ID NO: 2203 - DNA, 710 bp, Artificial Sequence
  chemically treated genomic DNA (Homo sapiens) CpG-island No: 2203
gatgttttcggtagcggagcgttagagtgattaggtaatttttttagtttttattttttagttcgggtttttattttcgtttttcggtttttcgagttacgtcgttttattaaggagttgggtcgtagcgtttcgcgtcggtttgattcggaatgtttgttcgtcgcggtaggtcgaggataggcggggttttgtaggtttttaatttacgtgttttcggtttttttcgtaggcgtcgtttttcggttaggcgtaatacggattatattttttagggtgaatagcggcggggtttagattcggtcgcggtttggggcggcgagtcgttttatcgtttgtttaggggagtgcgagttggcgcgaggatagggttaaggattcggaatgagttttcgcgtagtttcgttgggtcgtgcggttggtatcgggtcgtgtcgagttagaattggtaggagtgggggtttgagttggaggtgtcggggataggcgttcggggtagttcgcgttttgtcgaggtttttgtttcgtttcggtcggtttggtttgttttgttagttattggggcggaggtagcggttgtagcggggttgtagtcgggcgttgagtatagcgcgggttaggtcgaacggaagggatttgttatagttttttaattttacggatttttcgttttagattagcggagttgtattttcgcgtttcgttggacg

SEQ ID NO: 2204 - DNA, 710 bp, Artificial Sequence
  chemically treated genomic DNA (Homo sapiens) CpG-island No: 2204
cgtccaacgaaacgcgaaaatacaactccgctaatctaaaacgaaaaatccgtaaaattaaaaaactataacaaatcccttccgttcgacctaacccgcgctatactcaacgcccgactacaaccccgctacaaccgctacctccgccccaataactaacaaaacaaaccaaaccgaccgaaacgaaacaaaaacctcgacaaaacgcgaactaccccgaacgcctatccccgacacctccaactcaaacccccactcctaccaattctaactcgacacgacccgataccaaccgcacgacccaacgaaactacgcgaaaactcattccgaatccttaaccctatcctcgcgccaactcgcactcccctaaacaaacgataaaacgactcgccgccccaaaccgcgaccgaatctaaaccccgccgctattcaccctaaaaaatataatccgtattacgcctaaccgaaaaacgacgcctacgaaaaaaaccgaaaacacgtaaattaaaaacctacaaaaccccgcctatcctcgacctaccgcgacgaacaaacattccgaatcaaaccgacgcgaaacgctacgacccaactccttaataaaacgacgtaactcgaaaaaccgaaaaacgaaaataaaaacccgaactaaaaaataaaaactaaaaaaattacctaatcactctaacgctccgctaccgaaaacatc

SEQ ID NO: 2205 - DNA, 598 bp, Artificial Sequence
  chemically treated genomic DNA (Homo sapiens) CpG-island No: 2205
gttgacgtttatgaaggagatcgtttcgtagcgcgtgggtcggtagtagggttggttgacgggtcgggagttcgggggcggtcgtagggtttcggcgtttagtaggttggttaggttgaggtcgtgtggagagcgcgcgtcggaggagcgttgtagaagcggaaacgtattagttcgtcggagcggtggtttaggtcgagcgcgcgtatcggtattagttgcgagcgtaggcgtagtttcgcgttttcgttgttcgagcgcgttgttcggttttttagtcgcgtcgcgcggattcgcggggaagagtagatgggggtgtaggcggcgggggcgcgggtcgagaagtgtttgcggcgcggtcgtcgggtttttttattgtattagcgggtcgtgcgtttttttggaatgagatttagttacgcgcggtgtttcgggttagtttcgtttcgttttttcgtttttttatttattcggtaggtggtcggcgggggacgttaggataggcggggggttttcgcggggggtagggttgcggggcgcggagtttagggaggtttttgcgacgttgtttagtagagttagagcggttagggtgggt

SEQ ID NO: 2206 - DNA, 598 bp, Artificial Sequence
  chemically treated genomic DNA (Homo sapiens) CpG-island No: 2206
acccaccctaaccgctctaactctactaaacaacgtcgcaaaaacctccctaaactccgcgccccgcaaccctaccccccgcgaaaaccccccgcctatcctaacgtcccccgccgaccacctaccgaataaataaaaaaacgaaaaaacgaaacgaaactaacccgaaacaccgcgcgtaactaaatctcattccaaaaaaacgcacgacccgctaatacaataaaaaaacccgacgaccgcgccgcaaacacttctcgacccgcgcccccgccgcctacacccccatctactcttccccgcgaatccgcgcgacgcgactaaaaaaccgaacaacgcgctcgaacaacgaaaacgcgaaactacgcctacgctcgcaactaataccgatacgcgcgctcgacctaaaccaccgctccgacgaactaatacgtttccgcttctacaacgctcctccgacgcgcgctctccacacgacctcaacctaaccaacctactaaacgccgaaaccctacgaccgcccccgaactcccgacccgtcaaccaaccctactaccgacccacgcgctacgaaacgatctccttcataaacgtcaac

SEQ ID NO: 2207 - DNA, 598 bp, Artificial Sequence
  chemically treated genomic DNA (Homo sapiens) CpG-island No: 2207
gtttattttggtcgttttggttttgttgagtagcgtcgtagaggtttttttgggtttcgcgtttcgtagttttgtttttcgcgaaggtttttcgtttgttttggcgtttttcgtcggttatttgtcgggtaggtgagagggcgagggggcggggcggggttggttcgggatatcgcgcgtgattgggttttattttagggggacgtacggttcgttggtgtagtggaagagttcggcggtcgcgtcgtagatatttttcggttcgcgttttcgtcgtttgtatttttatttgttttttttcgcgggttcgcgcggcgcggttggggggtcgggtagcgcgttcgggtagcgggggcgcggggttgcgtttgcgttcgtagttggtgtcggtgcgcgcgttcggtttgggttatcgtttcgacgagttggtgcgttttcgtttttgtagcgttttttcggcgcgcgttttttatacgattttagtttggttagtttattgggcgtcggggttttgcgatcgttttcgggttttcggttcgttagttagttttgttgtcgatttacgcgttacgaagcggttttttttatggacgttaat

SEQ ID NO: 2208 - DNA, 598 bp, Artificial Sequence
  chemically treated genomic DNA (Homo sapiens) CpG-island No: 2208
attaacgtccataaaaaaaaccgcttcgtaacgcgtaaatcgacaacaaaactaactaacgaaccgaaaacccgaaaacgatcgcaaaaccccgacgcccaataaactaaccaaactaaaatcgtataaaaaacgcgcgccgaaaaaacgctacaaaaacgaaaacgcaccaactcgtcgaaacgataacccaaaccgaacgcgcgcaccgacaccaactacgaacgcaaacgcaaccccgcgcccccgctacccgaacgcgctacccgaccccccaaccgcgccgcgcgaacccgcgaaaaaaaacaaataaaaatacaaacgacgaaaacgcgaaccgaaaaatatctacgacgcgaccgccgaactcttccactacaccaacgaaccgtacgtccccctaaaataaaacccaatcacgcgcgatatcccgaaccaaccccgccccgccccctcgccctctcacctacccgacaaataaccgacgaaaaacgccaaaacaaacgaaaaaccttcgcgaaaaacaaaactacgaaacgcgaaacccaaaaaaacctctacgacgctactcaacaaaaccaaaacgaccaaaataaac

SEQ ID NO: 2209 - DNA, 846 bp, Artificial Sequence
  chemically treated genomic DNA (Homo sapiens) CpG-island No: 2209
agtcgttttttcgttcgtttttttagaattttttgtttttttttaaattatttttaatattttttatatacgggtttcgtttttaaatacggagtgtaatttcgcgtatagtagcgcggaggttgtagcgttattaagaaaggcgtcgttaatttttatttagtgtttttttttattagttttttttttacgtcgcgtttcgaagcgtacgatatcgtggtgttcggtgttttttttggtagcgcggtattggagtttaaggcgtgcgtgttatattttatttttcggtagtcgttcgggtgcgcgcgttacgcgtttttatatttacgttggcgttcgttagagttgggattttggtcggggttttcgatttacgtcgcggaatttgggggttgtagaaggcgagtgcgcggcgggagtcgttttgtcgtaggttcgagttttttttttgttatcgtggggtttcggagttgtttcgcgttttcgttttaggcggtttgcgggattattttttcggggttagcgttgtttcgcgtcggcggtagttgtaagcgcgggcggcggggtatagcgggtggttcggttttaaagtcggcgggaggttacgtttagtttcgcgttgtacgttttattgtttcgggtagcgcggcggcggttttcgcggttagaggaatcgcggtttcgagtttcggggagaggcggcggttttcggtttacgtatcgaggttgcgtcgcgtttcgttttcgagtttcgttcgttttagagtttttttttttttcgcgattttttttatttttttcgttttaggtttatttagttggcgggagtcgggtattgggaagttg

SEQ ID NO: 2210 - DNA, 846 bp, Artificial Sequence
  chemically treated genomic DNA (Homo sapiens) CpG-island No: 2210
caacttcccaatacccgactcccgccaactaaataaacctaaaacgaaaaaaataaaaaaaatcgcgaaaaaaaaaaaaactctaaaacgaacgaaactcgaaaacgaaacgcgacgcaacctcgatacgtaaaccgaaaaccgccgcctctccccgaaactcgaaaccgcgattcctctaaccgcgaaaaccgccgccgcgctacccgaaacaataaaacgtacaacgcgaaactaaacgtaacctcccgccgactttaaaaccgaaccacccgctataccccgccgcccgcgcttacaactaccgccgacgcgaaacaacgctaaccccgaaaaaataatcccgcaaaccgcctaaaacgaaaacgcgaaacaactccgaaaccccacgataacaaaaaaaaaactcgaacctacgacaaaacgactcccgccgcgcactcgccttctacaacccccaaattccgcgacgtaaatcgaaaaccccgaccaaaatcccaactctaacgaacgccaacgtaaatataaaaacgcgtaacgcgcgcacccgaacgactaccgaaaaataaaatataacacgcacgccttaaactccaataccgcgctaccaaaaaaaacaccgaacaccacgatatcgtacgcttcgaaacgcgacgtaaaaaaaaaactaataaaaaaaaacactaaataaaaattaacgacgcctttcttaataacgctacaacctccgcgctactatacgcgaaattacactccgtatttaaaaacgaaacccgtatataaaaaatattaaaaataatttaaaaaaaaacaaaaaattctaaaaaaacgaacgaaaaaacgact

SEQ ID NO: 2211 - DNA, 846 bp, Artificial Sequence
  chemically treated genomic DNA (Homo sapiens) CpG-island No: 2211
taattttttagtgttcggttttcgttagttaggtgagtttggagcgggaaggatgaaagggatcgcggagagggagggggttttggggcgagcggagttcgggggcggggcgcggcgtagtttcggtgcgtgggtcgggaatcgtcgttttttttcggggttcggggtcgcggtttttttggtcgcgggagtcgtcgtcgcgttgttcgaaataatgaggcgtgtagcgcggggttgagcgtagtttttcgtcggttttgaggtcgagttattcgttgtgtttcgtcgttcgcgtttgtagttgtcgtcggcgcggagtagcgttggtttcggagaggtgatttcgtaggtcgtttgggacgggagcgcggggtagtttcgagattttacggtggtaggaggaggattcgagtttgcggtaggacgattttcgtcgcgtattcgttttttgtagtttttaagtttcgcggcgtgagtcggggatttcggttagggttttagttttagcgggcgttagcgtgagtgtgggagcgcgtagcgcgcgtattcgagcggttgtcggggaataaaatgtgatacgtacgttttggattttagtgtcgcgttgttagggggagtatcgagtattacggtgtcgtgcgtttcgaggcgcggcgtgggaagaaggttggtaagggagggtattgggtaagggttggcgacgttttttttggtggcgttgtagttttcgcgttgttgtgcgcggagttatatttcgtgtttaggagcgagattcgtgtgtggggaatgttgaaggtggtttggggaaaagtaggaaattttggagaagcgaacgggaggacggtt

SEQ ID NO: 2212 - DNA, 846 bp, Artificial Sequence
  chemically treated genomic DNA (Homo sapiens) CpG-island No: 2212
aaccgtcctcccgttcgcttctccaaaatttcctacttttccccaaaccaccttcaacattccccacacacgaatctcgctcctaaacacgaaatataactccgcgcacaacaacgcgaaaactacaacgccaccaaaaaaaacgtcgccaacccttacccaataccctcccttaccaaccttcttcccacgccgcgcctcgaaacgcacgacaccgtaatactcgatactccccctaacaacgcgacactaaaatccaaaacgtacgtatcacattttattccccgacaaccgctcgaatacgcgcgctacgcgctcccacactcacgctaacgcccgctaaaactaaaaccctaaccgaaatccccgactcacgccgcgaaacttaaaaactacaaaaaacgaatacgcgacgaaaatcgtcctaccgcaaactcgaatcctcctcctaccaccgtaaaatctcgaaactaccccgcgctcccgtcccaaacgacctacgaaatcacctctccgaaaccaacgctactccgcgccgacgacaactacaaacgcgaacgacgaaacacaacgaataactcgacctcaaaaccgacgaaaaactacgctcaaccccgcgctacacgcctcattatttcgaacaacgcgacgacgactcccgcgaccaaaaaaaccgcgaccccgaaccccgaaaaaaaacgacgattcccgacccacgcaccgaaactacgccgcgccccgcccccgaactccgctcgccccaaaaccccctccctctccgcgatccctttcatccttcccgctccaaactcacctaactaacgaaaaccgaacactaaaaaatta

SEQ ID NO: 2213 - DNA, 769 bp, Artificial Sequence
  chemically treated genomic DNA (Homo sapiens) CpG-island No: 2213
ttttcggcgtagttattagtttcgttttggttgttttttcgttcgttttatttagaggcggtatttaggacgcgagtaggcggatagtaggacgcggggtacgtcggtatttgaagttttttagaagtgtacgtcgggattaggatttcgggaggtcgatttttttttgttttacgaatgtcgggaattgtggttttcgtcggacgcgagttgtgagacggtttaaggggtcgcggggtatgttgggatcgttagttttttcggcgcgttttaggatttcgggtttttttatttcgggcggatgtttaaagatttcgtttttttaagagtttttgcggtcgggcgcgaaaatggcggcggcggcgacggtcgggcgtttttgaagtagtagttatggagttttttttagggtcggggtcggagcggttttttgattcgtatcggtaagagattcggcgggaagagatcgattttcgcgtgttttcggttttcggcgtttgattatttcgtttttcgtttttaggttttcgggtgattgttttttattgttcgtgttgttgttttacgcgttagtcgggttttgttttttcgttttgcgtttttttttcgggatttacgtttttttggttagttgcgcgttgttagatagcgtttttcgtaggtttcgacgcgggcgttcggggagtgttagagttgggtttggttcgaggttatatagttattattttttgtgtttttagattcgtagtgcggattatgtgtgcggtgt

SEQ ID NO: 2214 - DNA, 769 bp, Artificial Sequence
  chemically treated genomic DNA (Homo sapiens) CpG-island No: 2214
acaccgcacacataatccgcactacgaatctaaaaacacaaaaaataataactatataacctcgaaccaaacccaactctaacactccccgaacgcccgcgtcgaaacctacgaaaaacgctatctaacaacgcgcaactaaccaaaaaaacgtaaatcccgaaaaaaaaacgcaaaacgaaaaaacaaaacccgactaacgcgtaaaacaacaacacgaacaataaaaaacaatcacccgaaaacctaaaaacgaaaaacgaaataatcaaacgccgaaaaccgaaaacacgcgaaaatcgatctcttcccgccgaatctcttaccgatacgaatcaaaaaaccgctccgaccccgaccctaaaaaaaactccataactactacttcaaaaacgcccgaccgtcgccgccgccgccattttcgcgcccgaccgcaaaaactcttaaaaaaacgaaatctttaaacatccgcccgaaataaaaaaacccgaaatcctaaaacgcgccgaaaaaactaacgatcccaacataccccgcgaccccttaaaccgtctcacaactcgcgtccgacgaaaaccacaattcccgacattcgtaaaacaaaaaaaaatcgacctcccgaaatcctaatcccgacgtacacttctaaaaaacttcaaataccgacgtaccccgcgtcctactatccgcctactcgcgtcctaaataccgcctctaaataaaacgaacgaaaaaacaaccaaaacgaaactaataactacgccgaaaa

SEQ ID NO: 2215 - DNA, 769 bp, Artificial Sequence
  chemically treated genomic DNA (Homo sapiens) CpG-island No: 2215
gtatcgtatatatggttcgtattacgaatttggggatataggaggtggtgattgtgtggtttcgggttagatttagttttgatatttttcgaacgttcgcgtcggaatttgcgaaggacgttgtttggtagcgcgtagttgattaggaagacgtggatttcgagaaagaggcgtaggacgaggaggtagaattcgattggcgcgtagagtagtagtacgagtagtaggaagtagttattcggaagtttgggggcgagaggcgaagtggttaggcgtcgaaggtcgagagtacgcggggatcggttttttttcgtcgggttttttatcggtgcgagttaaagagtcgtttcggtttcggttttgagggaagttttataattgttgttttaggagcgttcggtcgtcgtcgtcgtcgttattttcgcgttcggtcgtaggggtttttgggaaggcggagtttttgggtattcgttcggggtgaggggattcgaagttttgaggcgcgtcggaagggttagcggttttagtatatttcgcggttttttgggtcgttttataattcgcgttcggcggagattataattttcggtattcgtggggtagggaggagtcggtttttcggaattttggtttcggcgtgtatttttgaaggattttaggtatcggcgtgtttcgcgttttattgttcgtttgttcgcgttttgggtgtcgtttttgagtagggcgggcgaggaggtagttaaggcggagttgatggttgcgtcgaggg

SEQ ID NO: 2216 - DNA, 769 bp, Artificial Sequence
  chemically treated genomic DNA (Homo sapiens) CpG-island No: 2216
ccctcgacgcaaccatcaactccgccttaactacctcctcgcccgccctactcaaaaacgacacccaaaacgcgaacaaacgaacaataaaacgcgaaacacgccgatacctaaaatccttcaaaaatacacgccgaaaccaaaattccgaaaaaccgactcctccctaccccacgaataccgaaaattataatctccgccgaacgcgaattataaaacgacccaaaaaaccgcgaaatatactaaaaccgctaacccttccgacgcgcctcaaaacttcgaatcccctcaccccgaacgaatacccaaaaactccgccttcccaaaaacccctacgaccgaacgcgaaaataacgacgacgacgacgaccgaacgctcctaaaacaacaattataaaacttccctcaaaaccgaaaccgaaacgactctttaactcgcaccgataaaaaacccgacgaaaaaaaaccgatccccgcgtactctcgaccttcgacgcctaaccacttcgcctctcgcccccaaacttccgaataactacttcctactactcgtactactactctacgcgccaatcgaattctacctcctcgtcctacgcctctttctcgaaatccacgtcttcctaatcaactacgcgctaccaaacaacgtccttcgcaaattccgacgcgaacgttcgaaaaatatcaaaactaaatctaacccgaaaccacacaatcaccacctcctatatccccaaattcgtaatacgaaccatatatacgatac

SEQ ID NO: 2217 - DNA, 970 bp, Artificial Sequence
  chemically treated genomic DNA (Homo sapiens) CpG-island No: 2217
ggcgtaacggtagtgaagtgaaaaatggcgggaaaggtcgtttttgagttggtcgtgtatttgcgtaacgttggtttgggagtcggtcggtggtggaggagttttcgacgatagttttaaggtttgtcgttttttacgcgttcggttgttattagattatggacgtaggtagtcgcgcgttttatcgtttcgggttcggcgttttacgtcgatcggacgggcgtcgtttatattatcgaggcgagttcggatattgaagttattttgttgttttcggtttagggttgtaggttttgtagcgcgaagagcgacgagttgtgtaggtagagagggttcgggggtagcggcggtcgtagcggtcgtggtaacgcgttttgttgtagatgtaggagtagtcggttcgcgcggtgtcgttcggtttcgcgttttttcgtcgtttggcgtttaagggagggagacgcggggttagcggggcgttcgtcgcgtcgttttttattaggttttgttcgggaattttagttcgttttcgttcgcgtcgcgttttatcgttatttggtgcgtcggttttggaattacgttttgatttgtgcgtcggttatgcgtaaggttttggttagcgtcgtttttttcgtagaggttaggtatttttggcgtaggaagcgtcgttttaattttagtatttgtgagcgggagaaggacgtgcgcggtttttttcgtttcggaggggttcggttttggtaggggtggtttatgcggcgcgttttagagaagggcgagagcgtagttatcgggaggaagaaagattagggtaggatttgtagggtggttcgaggtgttattgagaaggtcgcgcggttgtttaggtcgtagaattttcgcgttttgtttttattcgggttttaagtattagtcgagttttatagttaagaaaggttttttttttgggatgcgagggagacgttttttgtaa

SEQ ID NO: 2218 - DNA, 970 bp, Artificial Sequence
  chemically treated genomic DNA (Homo sapiens) CpG-island No: 2218
ttacaaaaaacgtctccctcgcatcccaaaaaaaaaacctttcttaactataaaactcgactaatacttaaaacccgaataaaaacaaaacgcgaaaattctacgacctaaacaaccgcgcgaccttctcaataacacctcgaaccaccctacaaatcctaccctaatctttcttcctcccgataactacgctctcgcccttctctaaaacgcgccgcataaaccacccctaccaaaaccgaacccctccgaaacgaaaaaaaccgcgcacgtccttctcccgctcacaaatactaaaattaaaacgacgcttcctacgccaaaaatacctaacctctacgaaaaaaacgacgctaaccaaaaccttacgcataaccgacgcacaaatcaaaacgtaattccaaaaccgacgcaccaaataacgataaaacgcgacgcgaacgaaaacgaactaaaattcccgaacaaaacctaataaaaaacgacgcgacgaacgccccgctaaccccgcgtctccctcccttaaacgccaaacgacgaaaaaacgcgaaaccgaacgacaccgcgcgaaccgactactcctacatctacaacaaaacgcgttaccacgaccgctacgaccgccgctacccccgaaccctctctacctacacaactcgtcgctcttcgcgctacaaaacctacaaccctaaaccgaaaacaacaaaataacttcaatatccgaactcgcctcgataatataaacgacgcccgtccgatcgacgtaaaacgccgaacccgaaacgataaaacgcgcgactacctacgtccataatctaataacaaccgaacgcgtaaaaaacgacaaaccttaaaactatcgtcgaaaactcctccaccaccgaccgactcccaaaccaacgttacgcaaatacacgaccaactcaaaaacgacctttcccgccatttttcacttcactaccgttacgcc

SEQ ID NO: 2219 - DNA, 970 bp, Artificial Sequence
  chemically treated genomic DNA (Homo sapiens) CpG-island No: 2219
ttataggggacgtttttttcgtattttaggggaagggttttttttggttatagggttcggttgatgtttagggttcgggtaaggatagggcgcgggagttttgcggtttggatagtcgcgcggtttttttagtggtatttcgggttattttgtaaattttgttttggtttttttttttttcggtagttgcgttttcgtttttttttgggacgcgtcgtataggttatttttattaaaatcggattttttcgaagcggaagaagtcgcgtacgtttttttttcgtttataggtgttggagttggagcggcgttttttgcgttagaagtatttggtttttgcggagagggcggcgttggttaaggttttgcgtatgatcgacgtataggttaaaacgtggttttagaatcgacgtattaagtggcggtgaggcgcggcgcgggcgagggcggattggggttttcgagtagggtttggtgagaagcgacgcggcgggcgtttcgttgatttcgcgttttttttttttaggcgttagacggcggaggagcgcgaggtcgagcggtatcgcgcgggtcggttgtttttgtatttgtagtaggacgcgttgttacggtcgttgcggtcgtcgttgttttcggattttttttgtttgtataattcgtcgtttttcgcgttgtagaatttgtagttttgggtcgaggataataaagtggttttagtgttcgggttcgtttcggtggtgtgagcgacgttcgttcgatcggcgtggagcgtcgggttcggagcggtggagcgcgcggttgtttgcgtttatggtttagtggtagtcgggcgcgtgaggagcggtaggttttgaggttgtcgtcgagggtttttttattatcggtcggtttttaagttagcgttgcgtagatgtacggttagtttagaggcggtttttttcgttattttttattttattgtcgttacgtt

SEQ ID NO: 2220 - DNA, 970 bp, Artificial Sequence
  chemically treated genomic DNA (Homo sapiens) CpG-island No: 2220
aacgtaacgacaataaaataaaaaataacgaaaaaaaccgcctctaaactaaccgtacatctacgcaacgctaacttaaaaaccgaccgataataaaaaaaccctcgacgacaacctcaaaacctaccgctcctcacgcgcccgactaccactaaaccataaacgcaaacaaccgcgcgctccaccgctccgaacccgacgctccacgccgatcgaacgaacgtcgctcacaccaccgaaacgaacccgaacactaaaaccactttattatcctcgacccaaaactacaaattctacaacgcgaaaaacgacgaattatacaaacaaaaaaaatccgaaaacaacgacgaccgcaacgaccgtaacaacgcgtcctactacaaatacaaaaacaaccgacccgcgcgataccgctcgacctcgcgctcctccgccgtctaacgcctaaaaaaaaaaaacgcgaaatcaacgaaacgcccgccgcgtcgcttctcaccaaaccctactcgaaaaccccaatccgccctcgcccgcgccgcgcctcaccgccacttaatacgtcgattctaaaaccacgttttaacctatacgtcgatcatacgcaaaaccttaaccaacgccgccctctccgcaaaaaccaaatacttctaacgcaaaaaacgccgctccaactccaacacctataaacgaaaaaaaaacgtacgcgacttcttccgcttcgaaaaaatccgattttaataaaaataacctatacgacgcgtcccaaaaaaaaacgaaaacgcaactaccgaaaaaaaaaaaaaccaaaacaaaatttacaaaataacccgaaataccactaaaaaaaccgcgcgactatccaaaccgcaaaactcccgcgccctatccttacccgaaccctaaacatcaaccgaaccctataaccaaaaaaaacccttcccctaaaatacgaaaaaaacgtcccctataa

SEQ ID NO: 2221 - DNA, 734 bp, Artificial Sequence
  chemically treated genomic DNA (Homo sapiens) CpG-island No: 2221
gacgttggaggggttagataattttattcgtgagtcggtttttggtaaagcggcggtcgttgtttatttaggggaaggtgagtttcgttaggttttcggcgtcgtttaaattcgagggtttaggtattgtaggcgtttttttagcgggcggcggtataggtagcgggcggtgcgtagggacgcggattacgtcgtttgggtttatttcggagttgtcgggtagcggggtaagtgagtcggcgggatcgtagttcgaggtttcgtggtatttattcgagaacgttttattttttttatgattttggttttcgcgatttaggtttagatcgttttttggggtttcggggtcgtttaggatttgatcgatgtcgaagttgattggttcgtggtgtgggaggttgtgtggatttagtattttcggttttatcggtttgggtcgaggagaatcgtcggaggttcggtggttggggaggatgttttaggtagcgttagaagtttagcggcggcgcgtttcggagagtggttttaggggttcgcggggttggttaaggtagggcgtcggggttttcgaaatagtagtatttttgtgtattcggagtagtcgcgttcgtgttagtcgttgtcgggcgttagcgtagggatttgtatttcgggggagtacggttagttggggtttttggagtttttttgttggtttttaagcgtaaatagacgttgggttgtcggcgtcgttg

SEQ ID NO: 2222 - DNA, 734 bp, Artificial Sequence
  chemically treated genomic DNA (Homo sapiens) CpG-island No: 2222
caacgacgccgacaacccaacgtctatttacgcttaaaaaccaacaaaaaaactccaaaaaccccaactaaccgtactcccccgaaatacaaatccctacgctaacgcccgacaacgactaacacgaacgcgactactccgaatacacaaaaatactactatttcgaaaaccccgacgccctaccttaaccaaccccgcgaacccctaaaaccactctccgaaacgcgccgccgctaaacttctaacgctacctaaaacatcctccccaaccaccgaacctccgacgattctcctcgacccaaaccgataaaaccgaaaatactaaatccacacaacctcccacaccacgaaccaatcaacttcgacatcgatcaaatcctaaacgaccccgaaaccccaaaaaacgatctaaacctaaatcgcgaaaaccaaaatcataaaaaaaataaaacgttctcgaataaataccacgaaacctcgaactacgatcccgccgactcacttaccccgctacccgacaactccgaaataaacccaaacgacgtaatccgcgtccctacgcaccgcccgctacctataccgccgcccgctaaaaaaacgcctacaatacctaaaccctcgaatttaaacgacgccgaaaacctaacgaaactcaccttcccctaaataaacaacgaccgccgctttaccaaaaaccgactcacgaataaaattatctaacccctccaacgtc

SEQ ID NO: 2223 - DNA, 734 bp, Artificial Sequence
  chemically treated genomic DNA (Homo sapiens) CpG-island No: 2223
tagcggcgtcggtagtttagcgtttatttgcgtttaagagttagtaaggaagttttaggggttttagttggtcgtgttttttcgggatgtaagtttttgcgttgacgttcggtagcggttggtacgggcgcggttgtttcgggtgtatagggatgttgttgtttcggggatttcggcgttttgttttggttagtttcgcgggtttttgaggttatttttcggagcgcgtcgtcgttgggtttttggcgttgtttgaggtattttttttaattatcgaattttcggcggtttttttcggtttagatcgatggagtcggggatgttgggtttatataattttttatattacgagttaattagtttcggtatcgattagattttgagcggtttcgaaattttagggggcggtttaggtttgggtcgcgggggttagggttatggggagaatggggcgttttcgggtggatattacggagtttcgggttacggtttcgtcggtttatttgtttcgttgttcggtagtttcggagtgggtttaggcggcgtgattcgcgtttttgcgtatcgttcgttgtttgtgtcgtcgttcgttgggggggcgtttgtagtgtttgggttttcgggtttgggcggcgtcggaggtttagcgggatttatttttttttggatggatagcggtcgtcgttttgttaaggatcggtttacgggtgaggttgtttgatttttttagcgtt

SEQ ID NO: 2224 - DNA, 734 bp, Artificial Sequence
  chemically treated genomic DNA (Homo sapiens) CpG-island No: 2224
aacgctaaaaaaatcaaacaacctcacccgtaaaccgatccttaacaaaacgacgaccgctatccatccaaaaaaaaataaatcccgctaaacctccgacgccgcccaaacccgaaaacccaaacactacaaacgcccccccaacgaacgacgacacaaacaacgaacgatacgcaaaaacgcgaatcacgccgcctaaacccactccgaaactaccgaacaacgaaacaaataaaccgacgaaaccgtaacccgaaactccgtaatatccacccgaaaacgccccattctccccataaccctaacccccgcgacccaaacctaaaccgccccctaaaatttcgaaaccgctcaaaatctaatcgataccgaaactaattaactcgtaatataaaaaattatataaacccaacatccccgactccatcgatctaaaccgaaaaaaaccgccgaaaattcgataattaaaaaaaatacctcaaacaacgccaaaaacccaacgacgacgcgctccgaaaaataacctcaaaaacccgcgaaactaaccaaaacaaaacgccgaaatccccgaaacaacaacatccctatacacccgaaacaaccgcgcccgtaccaaccgctaccgaacgtcaacgcaaaaacttacatcccgaaaaaacacgaccaactaaaacccctaaaacttccttactaactcttaaacgcaaataaacgctaaactaccgacgccgcta

SEQ ID NO: 2225 - DNA, 663 bp, Artificial Sequence
  chemically treated genomic DNA (Homo sapiens) CpG-island No: 2225
cgttacgtattaattttgtgttaagtcgtaggtagcggtttcggattttgggatttaatttaacgtggcggggcgggattttcggcgggaggcggaggcggaggcgtaggcgttggttggtaggtgtcgttaatcggacggtggtcgttagggcgagaggcgggagtcggagaggtgaggtaggattcgggttttattgtcgttttttcgagtttttgtgacgcggattttagtgttaggatggttcggggcgagcggcggcgtcgcgtagtgtcggtagagggagtgcggatagtcgagagggcggttcggggaggtttcgggcgacgggacggtcggggcggcgggtcgcgtagtacggttggaggagtggttttggtcgtcgtggttttgtttttggttttgggtatgtcggggcgttgggtgttggcgtggtatcgtgcgcggcgggcggttacgttgtatttcgcgttttttgtgttgtttgtcgatttttttagtttcgtcgtggtttcggattttttttggggaatttatcgtttttacgtttatttcggtatgaagattcgtagttcgaagtttttttttatcggtaatcgggttttagggcgggtaggtaggcggatttttaatttgggcgttttagtttgaagcgagagtaag

SEQ ID NO: 2226 - DNA, 663 bp, Artificial Sequence
  chemically treated genomic DNA (Homo sapiens) CpG-island No: 2226
cttactctcgcttcaaactaaaacgcccaaattaaaaatccgcctacctacccgccctaaaacccgattaccgataaaaaaaaacttcgaactacgaatcttcataccgaaataaacgtaaaaacgataaattccccaaaaaaaatccgaaaccacgacgaaactaaaaaaatcgacaaacaacacaaaaaacgcgaaatacaacgtaaccgcccgccgcgcacgataccacgccaacacccaacgccccgacatacccaaaaccaaaaacaaaaccacgacgaccaaaaccactcctccaaccgtactacgcgacccgccgccccgaccgtcccgtcgcccgaaacctccccgaaccgccctctcgactatccgcactccctctaccgacactacgcgacgccgccgctcgccccgaaccatcctaacactaaaatccgcgtcacaaaaactcgaaaaaacgacaataaaacccgaatcctacctcacctctccgactcccgcctctcgccctaacgaccaccgtccgattaacgacacctaccaaccaacgcctacgcctccgcctccgcctcccgccgaaaatcccgccccgccacgttaaattaaatcccaaaatccgaaaccgctacctacgacttaacacaaaattaatacgtaacg

SEQ ID NO: 2227 - DNA, 663 bp, Artificial Sequence
  chemically treated genomic DNA (Homo sapiens) CpG-island No: 2227
tttgttttcgttttaagttggggcgtttagattaggagttcgtttgtttgttcgttttggggttcggttatcggtgaggaggggtttcgggttgcgggtttttatgtcgaagtagacgtgagggcggtaggttttttagaagaggttcggggttacggcggggttggaggagtcggtaggtaatataggaggcgcggagtgtagcgtgatcgttcgtcgcgtacggtattacgttagtatttagcgtttcgatatatttagggttaaagataggattacgacggttagagttatttttttagtcgtgttacgcggttcgtcgtttcggtcgtttcgtcgttcggggttttttcgagtcgttttttcggttgttcgtattttttttgtcggtattgcgcggcgtcgtcgttcgtttcgagttattttggtattgaggttcgcgttataagagttcggagaggcggtagtggagttcgggttttgttttattttttcggttttcgtttttcgttttggcgattatcgttcggttagcgatatttgttagttagcgtttgcgttttcgttttcgtttttcgtcggaagtttcgtttcgttacgttaggttaagttttagagttcggaatcgttgtttgcggtttgatatagggttggtacgtagcg

SEQ ID NO: 2228 - DNA, 663 bp, Artificial Sequence
  chemically treated genomic DNA (Homo sapiens) CpG-island No: 2228
cgctacgtaccaaccctatatcaaaccgcaaacaacgattccgaactctaaaacttaacctaacgtaacgaaacgaaacttccgacgaaaaacgaaaacgaaaacgcaaacgctaactaacaaatatcgctaaccgaacgataatcgccaaaacgaaaaacgaaaaccgaaaaaataaaacaaaacccgaactccactaccgcctctccgaactcttataacgcgaacctcaataccaaaataactcgaaacgaacgacgacgccgcgcaataccgacaaaaaaaatacgaacaaccgaaaaaacgactcgaaaaaaccccgaacgacgaaacgaccgaaacgacgaaccgcgtaacacgactaaaaaaataactctaaccgtcgtaatcctatctttaaccctaaatatatcgaaacgctaaatactaacgtaataccgtacgcgacgaacgatcacgctacactccgcgcctcctatattacctaccgactcctccaaccccgccgtaaccccgaacctcttctaaaaaacctaccgccctcacgtctacttcgacataaaaacccgcaacccgaaacccctcctcaccgataaccgaaccccaaaacgaacaaacaaacgaactcctaatctaaacgccccaacttaaaacgaaaacaaa

SEQ ID NO: 2229 - DNA, 780 bp, Artificial Sequence
  chemically treated genomic DNA (Homo sapiens) CpG-island No: 2229
tgttacgcggcgatttttgagttacggggtttttagcgttcgggaagttaggtttgttaggttggggcggttggcggggtagggtttttcggttcgttttaagtttaggtaggcgttcgcgattcgcgcgggtagggagaacgcgtttttatagtgttcgcgaggtgtagtgcgtttttgggggtttcggggtcgtcgggttaggtcggtttggcgtttagggattggtcggacgggttgggtttttggcgggggtggaagaggaggttgtcgcgttttgttcggtttaggtgtcgttttcgggggcggggtttggagtttcgtagcgggagattttcggtcggattggcggacgagcgtcgagagatagaagtcgaggagaggaggttaagtcgggcggcgcggggagcgtattgagtaggtaaagtcgtagggtcgttagtatgttttttcgaaattatcggagtcgggttatcgtggttaggggtttcgttttggagatggagtttaaacgcggtcgttttcgatttagtttttttagcgatttgttcgaggtgagagattcgcgtttttgtttttttttttcgcggttttcgggggtagttttagttatttcggtttttttttttcgttcgcgtgtacgtcgaggggcggagacgtacggtttgggtataaattcgacggagttgttgatttaaaaagtaaggtgtggacggtttgtatttttatcggatttatgttgtttatttcgcggtttggttaggattatttgtttgagtt

SEQ ID NO: 2230 - DNA, 780 bp, Artificial Sequence
  chemically treated genomic DNA (Homo sapiens) CpG-island No: 2230
aactcaaacaaataatcctaaccaaaccgcgaaataaacaacataaatccgataaaaatacaaaccgtccacaccttactttttaaatcaacaactccgtcgaatttatacccaaaccgtacgtctccgcccctcgacgtacacgcgaacgaaaaaaaaaaaccgaaataactaaaactacccccgaaaaccgcgaaaaaaaaaaacaaaaacgcgaatctctcacctcgaacaaatcgctaaaaaaactaaatcgaaaacgaccgcgtttaaactccatctccaaaacgaaacccctaaccacgataacccgactccgataatttcgaaaaaacatactaacgaccctacgactttacctactcaatacgctccccgcgccgcccgacttaacctcctctcctcgacttctatctctcgacgctcgtccgccaatccgaccgaaaatctcccgctacgaaactccaaaccccgcccccgaaaacgacacctaaaccgaacaaaacgcgacaacctcctcttccacccccgccaaaaacccaacccgtccgaccaatccctaaacgccaaaccgacctaacccgacgaccccgaaacccccaaaaacgcactacacctcgcgaacactataaaaacgcgttctccctacccgcgcgaatcgcgaacgcctacctaaacttaaaacgaaccgaaaaaccctaccccgccaaccgccccaacctaacaaacctaacttcccgaacgctaaaaaccccgtaactcaaaaatcgccgcgtaaca

SEQ ID NO: 2231 - DNA, 780 bp, Artificial Sequence
  chemically treated genomic DNA (Homo sapiens) CpG-island No: 2231
ggtttaggtagataattttaattaggtcgcggaatgggtagtatggattcgatgaaaatgtagatcgtttatattttattttttaagttaataatttcgtcgggtttgtatttagatcgtgcgttttcgtttttcggcgtgtacgcgggcgagggaaggaggtcgaggtggttggggttgttttcgggagtcgcggaaggggaaggtagggacgcgagttttttatttcgggtaggtcgttgaagaggttgagtcggaagcggtcgcgtttgaattttatttttagggcggagtttttggttacggtgattcggtttcggtggtttcgggagaatatgttggcggttttgcgattttgtttgtttagtgcgtttttcgcgtcgttcggtttagtttttttttttcggtttttgtttttcgacgttcgttcgttagttcggtcgggaatttttcgttgcggggttttaaatttcgttttcggagacgatatttgggtcgggtagggcgcggtaatttttttttttattttcgttaaaggtttagttcgttcggttagtttttgggcgttaagtcgatttggttcgacggtttcggagtttttaggggcgtattgtatttcgcgagtattgtgggagcgcgttttttttgttcgcgcgggtcgcgagcgtttatttggatttgggacggatcgagaagttttgtttcgttagtcgttttaatttggtaagtttggtttttcgggcgttgaaaatttcgtggtttagggatcgtcgcgtagta

SEQ ID NO: 2232 - DNA, 780 bp, Artificial Sequence
  chemically treated genomic DNA (Homo sapiens) CpG-island No: 2232
tactacgcgacgatccctaaaccacgaaattttcaacgcccgaaaaaccaaacttaccaaattaaaacgactaacgaaacaaaacttctcgatccgtcccaaatccaaataaacgctcgcgacccgcgcgaacaaaaaaaacgcgctcccacaatactcgcgaaatacaatacgcccctaaaaactccgaaaccgtcgaaccaaatcgacttaacgcccaaaaactaaccgaacgaactaaacctttaacgaaaataaaaaaaaaaattaccgcgccctacccgacccaaatatcgtctccgaaaacgaaatttaaaaccccgcaacgaaaaattcccgaccgaactaacgaacgaacgtcgaaaaacaaaaaccgaaaaaaaaaaactaaaccgaacgacgcgaaaaacgcactaaacaaacaaaatcgcaaaaccgccaacatattctcccgaaaccaccgaaaccgaatcaccgtaaccaaaaactccgccctaaaaataaaattcaaacgcgaccgcttccgactcaacctcttcaacgacctacccgaaataaaaaactcgcgtccctaccttccccttccgcgactcccgaaaacaaccccaaccacctcgacctccttccctcgcccgcgtacacgccgaaaaacgaaaacgcacgatctaaatacaaacccgacgaaattattaacttaaaaaataaaatataaacgatctacattttcatcgaatccatactacccattccgcgacctaattaaaattatctacctaaacc

SEQ ID NO: 2233 - DNA, 603 bp, Artificial Sequence
  chemically treated genomic DNA (Homo sapiens) CpG-island No: 2233
tttgtttaatacgcgggtcgtcgtattgcgagttgaggggagagtaggtatcgtcgattattttcggggtcgggtgttatgtacgattagaagttacgtcgattaagtttgtttcgttgttgcgaagtcgacgaggcggagtaggcgtgtagagtattatttcgtattcgttaggatgaggatgatatagttcgtagatagtagtcgcgtgcgatagtacgttcgtgtcgcgcggcggtggggcgagagaggttacgtcgcgtagttttagggcgggagtcggcgcgagtacgtcgcgtcgttcggtcgcggttgaggatttgttaggttttttcgtagtttatttacgcgtgcggaggaagcggagtacgcgtggagtcgtgtgagtgtttgcgtttgttcgagtgcgtacgacggagcgtacgtggagtttgcgtttattttacggatcgttgaggggggcgtttggaagttggagatgttgcggaaggtacgttcgtttgcggattcggttgaagaggggttcgggacggcgggttttgaggtgttattttttgagcgacggtatcgttcgtttttatattttttttttattaggttgta

SEQ ID NO: 2234 - DNA, 603 bp, Artificial Sequence
  chemically treated genomic DNA (Homo sapiens) CpG-island No: 2234
tacaacctaataaaaaaaaaatataaaaacgaacgataccgtcgctcaaaaaataacacctcaaaacccgccgtcccgaacccctcttcaaccgaatccgcaaacgaacgtaccttccgcaacatctccaacttccaaacgcccccctcaacgatccgtaaaataaacgcaaactccacgtacgctccgtcgtacgcactcgaacaaacgcaaacactcacacgactccacgcgtactccgcttcctccgcacgcgtaaataaactacgaaaaaacctaacaaatcctcaaccgcgaccgaacgacgcgacgtactcgcgccgactcccgccctaaaactacgcgacgtaacctctctcgccccaccgccgcgcgacacgaacgtactatcgcacgcgactactatctacgaactatatcatcctcatcctaacgaatacgaaataatactctacacgcctactccgcctcgtcgacttcgcaacaacgaaacaaacttaatcgacgtaacttctaatcgtacataacacccgaccccgaaaataatcgacgatacctactctcccctcaactcgcaatacgacgacccgcgtattaaacaaa

SEQ ID NO: 2235 - DNA, 603 bp, Artificial Sequence
  chemically treated genomic DNA (Homo sapiens) CpG-island No: 2235
tgtagtttggtgggggggaggtgtgggggcgggcgatgtcgtcgtttagggggtggtattttaaaattcgtcgtttcgggtttttttttagtcgagttcgtagacgggcgtatttttcgtaatatttttaatttttagacgttttttttagcggttcgtggggtgggcgtaggttttacgtgcgtttcgtcgtgcgtattcggataggcgtaggtatttatacggttttacgcgtgtttcgtttttttcgtacgcgtgagtagattgcgaggaggtttgataggtttttagtcgcggtcgagcgacgcggcgtgttcgcgtcggttttcgttttggggttgcgcgacgtggtttttttcgttttatcgtcgcgcggtacgggcgtgttgtcgtacgcggttgttatttacgagttatgttatttttattttgacgagtgcggggtggtgttttatacgtttgtttcgtttcgtcggtttcgtagtagcgaagtagatttgatcggcgtggtttttagtcgtgtatggtattcgatttcgaaggtagtcggcgatgtttgttttttttttagttcgtaatgcggcggttcgcgtgttggataag

SEQ ID NO: 2236 - DNA, 603 bp, Artificial Sequence
  chemically treated genomic DNA (Homo sapiens) CpG-island No: 2236
cttatccaacacgcgaaccgccgcattacgaactaaaaaaaaaacaaacatcgccgactaccttcgaaatcgaataccatacacgactaaaaaccacgccgatcaaatctacttcgctactacgaaaccgacgaaacgaaacaaacgtataaaacaccaccccgcactcgtcaaaataaaaataacataactcgtaaataacaaccgcgtacgacaacacgcccgtaccgcgcgacgataaaacgaaaaaaaccacgtcgcgcaaccccaaaacgaaaaccgacgcgaacacgccgcgtcgctcgaccgcgactaaaaacctatcaaacctcctcgcaatctactcacgcgtacgaaaaaaacgaaacacgcgtaaaaccgtataaatacctacgcctatccgaatacgcacgacgaaacgcacgtaaaacctacgcccaccccacgaaccgctaaaaaaaacgtctaaaaattaaaaatattacgaaaaatacgcccgtctacgaactcgactaaaaaaaaacccgaaacgacgaattttaaaataccaccccctaaacgacgacatcgcccgcccccacacctcccccccaccaaactaca

SEQ ID NO: 2237 - DNA, 1345 bp, Artificial Sequence
  chemically treated genomic DNA (Homo sapiens) CpG-island No: 2237
agagcgcgttcgttttttggttataggttacgttttgcgtttcggttatcgtacggattaggaaggttagcgagtagacgttgtagtatatggagaggaagatgatggggcgttcggggtattggaagcggtggggttttagtaagaaggtgagtatagtgaaggcggtggagaagaagtatagcgtcgattatacggttatttagattagcgcgaagtttttgtcgcgtcgggattagaatatttcgacgtcgggttcgtagcgcggtgcgtacgagcggtttttttttacgtattggaatttttcggggttttcgtaggtgttattgtcgttcgcgttcgggtttaggttttcgggagggcgcgcgggtcgcggcgttacgggtagtatgtttaggtttttgtggggtttcgcggggtcggtcgtggcgttttcgggcgtttttatgtatagcgcgtgcgggtcgttgcgcgtgggtagtcgggcgtagtcgagcgagttcggttagtcgaagttgaattgttttatgatgggcgcgtagcgtaggcgcgtttgttcgtatatgggtcggtaggcgggaatgggcgtcgagatttggtcggtgtatatgggcgcgtagagcgagtataggaagaagcgtaggtggttgtggtagtcgtattgtattagcggcgcgaatttcgttagttcggtagtcgtttcgttttgcgacgtgtggtttagtaggttgggtatgcgggttaggttgtagtcgatgtcgcggtatatggggatttttatcgtttggtacggcgtagtttcgcgttcgcgtttcgggtcgaagcggtcgatttttagtgtcgcgtcgttcgtcgttagtagttgttatagtagtagcgtttttcgtagaggcgttacggttatttcgggaggttcgggtcgaaggcgggagcgcggtttcggtttattcgggtttagcggtttcgcgtttcggtgtttgttcgttacgtcgcggggcgcgggttatcgttgagtcgtttacgtgtgttcgggcgttttgggtagcgagcgggtagtcgttcgagggataggagtcgtcgagttcgtttagtcgttatcgtcgttgttatcggagtcgtcgttgagttagagtcggcgtaatttttcggggtcgaggttattagttttcggggcggggtttcgggaggatacgtttagggatacgttttttattgggttttaaaggcgtcgcgtttttcggttacgcggagtacggggtggggtcgggtttggtgggtgttcgttcgtttgtttttcgtttatattcggttttttttttttttttgttgtttgggagaggttgcg

SEQ ID NO: 2238 - DNA, 1345 bp, Artificial Sequence
  chemically treated genomic DNA (Homo sapiens) CpG-island No: 2238
cgcaacctctcccaaacaacaaaaaaaaaaaaaaaaccgaatataaacgaaaaacaaacgaacgaacacccaccaaacccgaccccaccccgtactccgcgtaaccgaaaaacgcgacgcctttaaaacccaataaaaaacgtatccctaaacgtatcctcccgaaaccccgccccgaaaactaataacctcgaccccgaaaaattacgccgactctaactcaacgacgactccgataacaacgacgataacgactaaacgaactcgacgactcctatccctcgaacgactacccgctcgctacccaaaacgcccgaacacacgtaaacgactcaacgataacccgcgccccgcgacgtaacgaacaaacaccgaaacgcgaaaccgctaaacccgaataaaccgaaaccgcgctcccgccttcgacccgaacctcccgaaataaccgtaacgcctctacgaaaaacgctactactataacaactactaacgacgaacgacgcgacactaaaaatcgaccgcttcgacccgaaacgcgaacgcgaaactacgccgtaccaaacgataaaaatccccatataccgcgacatcgactacaacctaacccgcatacccaacctactaaaccacacgtcgcaaaacgaaacgactaccgaactaacgaaattcgcgccgctaatacaatacgactaccacaaccacctacgcttcttcctatactcgctctacgcgcccatatacaccgaccaaatctcgacgcccattcccgcctaccgacccatatacgaacaaacgcgcctacgctacgcgcccatcataaaacaattcaacttcgactaaccgaactcgctcgactacgcccgactacccacgcgcaacgacccgcacgcgctatacataaaaacgcccgaaaacgccacgaccgaccccgcgaaaccccacaaaaacctaaacatactacccgtaacgccgcgacccgcgcgccctcccgaaaacctaaacccgaacgcgaacgacaataacacctacgaaaaccccgaaaaattccaatacgtaaaaaaaaaccgctcgtacgcaccgcgctacgaacccgacgtcgaaatattctaatcccgacgcgacaaaaacttcgcgctaatctaaataaccgtataatcgacgctatacttcttctccaccgccttcactatactcaccttcttactaaaaccccaccgcttccaataccccgaacgccccatcatcttcctctccatatactacaacgtctactcgctaaccttcctaatccgtacgataaccgaaacgcaaaacgtaacctataaccaaaaaacgaacgcgctct

SEQ ID NO: 2239 - DNA, 1345 bp, Artificial Sequence
  chemically treated genomic DNA (Homo sapiens) CpG-island No: 2239
cgtagttttttttaggtagtaagggaagggaagaaatcgagtgtaagcggagggtaagcgggcggatatttattaggttcggttttatttcgtgtttcgcgtggtcgggagacgcggcgtttttaaagtttagtgggaggcgtgtttttgggcgtgttttttcggagtttcgtttcgggggttggtagtttcggtttcgggaggttgcgtcggttttggtttagcggcggtttcggtggtagcggcggtggcggttaggcgggttcggcggtttttgtttttcgggcggttgttcgttcgttgtttagggcgttcggatatacgtgggcggtttagcgatggttcgcgtttcgcgacgtggcgggtaggtatcggggcgcgggatcgttgagttcgagtgagtcggggtcgcgttttcgttttcggttcgggtttttcgggatggtcgtggcgtttttgcggggggcgttgttgttgtggtagttgttggcggcgggcggcgcggtattggagatcggtcgtttcgattcggagcgcgggcgcggggttgcgtcgtgttaggcggtggagatttttatgtgtcgcggtatcggttataatttgattcgtatgtttaatttgttgggttatacgtcgtagggcgaggcggttgtcgagttagcggagttcgcgtcgttggtgtagtacggttgttatagttatttgcgtttttttttgtgttcgttttacgcgtttatgtgtatcgattaggtttcgacgtttattttcgtttgtcggtttatgtgcgagtaggcgcgtttgcgttgcgcgtttattatggagtagtttaatttcggttggtcggattcgttcgattgcgttcggttgtttacgcgtaacgattcgtacgcgttgtgtatggaggcgttcgagaacgttacggtcggtttcgcggagttttataagggtttgggtatgttgttcgtggcgtcgcggttcgcgcgttttttcggagatttgggttcgggcgcgggcggtagtggtatttgcgagaatttcgagaagttttagtacgtggagaagagtcgttcgtgcgtatcgcgttgcgggttcggcgtcgaggtgttttggtttcggcgcgataaggatttcgcgttggtttggatggtcgtgtggtcggcgttgtgttttttttttatcgtttttattgtgtttatttttttgttggagttttatcgtttttagtatttcgagcgttttattatttttttttttatgtgttataacgtttattcgttggtttttttgattcgtgcggtggtcggagcgtagagcgtggtttgtgattaggaggcgggcgcgtttt

SEQ ID NO: 2240 - DNA, 1345 bp, Artificial Sequence
  chemically treated genomic DNA (Homo sapiens) CpG-island No: 2240
aaaacgcgcccgcctcctaatcacaaaccacgctctacgctccgaccaccgcacgaatcaaaaaaaccaacgaataaacgttataacacataaaaaaaaaaataataaaacgctcgaaatactaaaaacgataaaactccaacaaaaaaataaacacaataaaaacgataaaaaaaaaacacaacgccgaccacacgaccatccaaaccaacgcgaaatccttatcgcgccgaaaccaaaacacctcgacgccgaacccgcaacgcgatacgcacgaacgactcttctccacgtactaaaacttctcgaaattctcgcaaataccactaccgcccgcgcccgaacccaaatctccgaaaaaacgcgcgaaccgcgacgccacgaacaacatacccaaacccttataaaactccgcgaaaccgaccgtaacgttctcgaacgcctccatacacaacgcgtacgaatcgttacgcgtaaacaaccgaacgcaatcgaacgaatccgaccaaccgaaattaaactactccataataaacgcgcaacgcaaacgcgcctactcgcacataaaccgacaaacgaaaataaacgtcgaaacctaatcgatacacataaacgcgtaaaacgaacacaaaaaaaaacgcaaataactataacaaccgtactacaccaacgacgcgaactccgctaactcgacaaccgcctcgccctacgacgtataacccaacaaattaaacatacgaatcaaattataaccgataccgcgacacataaaaatctccaccgcctaacacgacgcaaccccgcgcccgcgctccgaatcgaaacgaccgatctccaataccgcgccgcccgccgccaacaactaccacaacaacaacgccccccgcaaaaacgccacgaccatcccgaaaaacccgaaccgaaaacgaaaacgcgaccccgactcactcgaactcaacgatcccgcgccccgatacctacccgccacgtcgcgaaacgcgaaccatcgctaaaccgcccacgtatatccgaacgccctaaacaacgaacgaacaaccgcccgaaaaacaaaaaccgccgaacccgcctaaccgccaccgccgctaccaccgaaaccgccgctaaaccaaaaccgacgcaacctcccgaaaccgaaactaccaacccccgaaacgaaactccgaaaaaacacgcccaaaaacacgcctcccactaaactttaaaaacgccgcgtctcccgaccacgcgaaacacgaaataaaaccgaacctaataaatatccgcccgcttaccctccgcttacactcgatttcttcccttcccttactacctaaaaaaaactacg

SEQ ID NO: 2241 - DNA, 589 bp, Artificial Sequence
  chemically treated genomic DNA (Homo sapiens) CpG-island No: 2241
gttgttgacgtttatgaaggagatcgtttcgtagcgcgtgggtcggtagtagggttggttgacgggtcgggagttcgggggcggtcgtagggtttcggcgtttagtaggttggttaggttgaggtcgtgtggagagcgcgcgcgcggtaggagtcgtgtagaagcgaaattattagttcgtcggagcggtggtttaggtcgagcgcgcgtatcggtattagttgcgagcgtagcggtacgtcgtcgttttcgttgttcgagcgcggttgttcgggtttttagttttgtcgcgttttttcggcgaaagagtagattgggggttatagcgtcggggttcggtttaaaaagttgcgtcgtcgtcgggtttttttattgtattacggttcgttttttttttgaatgagatttagttacgcgcgtgtttcgggttagttttcgttcgttttttcgtttttttattattcggtagttgggtcgcggggacgttaggataggcgggggttttatcgcggggggtagggttgcggggcgcggagtttagggaggtttttgcgacgttgtttagtagagttagagcggttagggtggg

SEQ ID NO: 2242 - DNA, 589 bp, Artificial Sequence
  chemically treated genomic DNA (Homo sapiens) CpG-island No: 2242
cccaccctaaccgctctaactctactaaacaacgtcgcaaaaacctccctaaactccgcgccccgcaaccctaccccccgcgataaaacccccgcctatcctaacgtccccgcgacccaactaccgaataataaaaaaacgaaaaaacgaacgaaaactaacccgaaacacgcgcgtaactaaatctcattcaaaaaaaaaacgaaccgtaatacaataaaaaaacccgacgacgacgcaactttttaaaccgaaccccgacgctataacccccaatctactctttcgccgaaaaaacgcgacaaaactaaaaacccgaacaaccgcgctcgaacaacgaaaacgacgacgtaccgctacgctcgcaactaataccgatacgcgcgctcgacctaaaccaccgctccgacgaactaataatttcgcttctacacgactcctaccgcgcgcgcgctctccacacgacctcaacctaaccaacctactaaacgccgaaaccctacgaccgcccccgaactcccgacccgtcaaccaaccctactaccgacccacgcgctacgaaacgatctccttcataaacgtcaacaac

SEQ ID NO: 2243 - DNA, 589 bp, Artificial Sequence
  chemically treated genomic DNA (Homo sapiens) CpG-island No: 2243
tttattttggtcgttttggttttgttgagtagcgtcgtagaggtttttttgggtttcgcgtttcgtagttttgtttttcgcgatagggttttcgtttgttttggcgttttcgcggtttaattgtcgggtagtgagagggcgagggggcgggcgggggttggttcgggatacgcgcgtgattgggttttatttaggggaagaacgggtcgtggtgtagtgaaagagttcggcggcggcgtagttttttgggtcgggtttcggcgttgtgatttttaatttgttttttcgtcggaggggcgcggtagggttgggggttcgggtagtcgcgttcgggtagcgggggcggcggcgtgtcgttgcgttcgtagttggtgtcggtgcgcgcgttcggtttgggttatcgtttcgacgagttggtggtttcgtttttgtacggtttttgtcgcgcgcgcgttttttatacgattttagtttggttagtttattgggcgtcggggttttgcgatcgttttcgggttttcggttcgttagttagttttgttgtcgatttacgcgttacgaagcggttttttttatggacgttaatagt

SEQ ID NO: 2244 - DNA, 589 bp, Artificial Sequence
  chemically treated genomic DNA (Homo sapiens) CpG-island No: 2244
actattaacgtccataaaaaaaaccgcttcgtaacgcgtaaatcgacaacaaaactaactaacgaaccgaaaacccgaaaacgatcgcaaaaccccgacgcccaataaactaaccaaactaaaatcgtataaaaaacgcgcgcgcgacaaaaaccgtacaaaaacgaaaccaccaactcgtcgaaacgataacccaaaccgaacgcgcgcaccgacaccaactacgaacgcaacgacacgccgccgcccccgctacccgaacgcgactacccgaacccccaaccctaccgcgcccctccgacgaaaaaacaaattaaaaatcacaacgccgaaacccgacccaaaaaactacgccgccgccgaactctttcactacaccacgacccgttcttcccctaaataaaacccaatcacgcgcgtatcccgaaccaacccccgcccgccccctcgccctctcactacccgacaattaaaccgcgaaaacgccaaaacaaacgaaaaccctatcgcgaaaaacaaaactacgaaacgcgaaacccaaaaaaacctctacgacgctactcaacaaaaccaaaacgaccaaaataaa

SEQ ID NO: 2245 - DNA, 549 bp, Artificial Sequence
  chemically treated genomic DNA (Homo sapiens) CpG-island No: 2245
gagcgttcggttgaatttcgcggcggtgtttaagtgataacgtagtagtttcgcgcgttttttttcgttttagtcgttattttcgagtaggatttagtgttatcgttagacgcgtaaggagttatttacgttttcgcgtcgcgtttttcgtttagttttggcgcgattgtttaggattttggatcgtcggtgtttttcgttttcgacgaagttattttttttggttgttttagttaggcggtttttgcgtcgtttttcgcgttcgcgcgtttgaggttcggattgcggcgcgcgttcgttagcgattttggcgaagcgaggttggtttcgcgtcggcgcgcgttttcgtcgttttcgtttttttcgtttttttttttcgcgtcgtgtttttgtttttttcggttttttttagcgttttttcgtttttttttttcgtattttttgcgggcgtttttcgttttttttttttttggttaatttttttttgttttgttgttgcgacggtagcgaatgggttttagtcgtcggcgtttcgagggattgggtggt

SEQ ID NO: 2246 - DNA, 549 bp, Artificial Sequence
  chemically treated genomic DNA (Homo sapiens) CpG-island No: 2246
accacccaatccctcgaaacgccgacgactaaaacccattcgctaccgtcgcaacaacaaaacaaaaaaaaattaaccaaaaaaaaaaaaaacgaaaaacgcccgcaaaaaatacgaaaaaaaaaaacgaaaaaacgctaaaaaaaaccgaaaaaaacaaaaacacgacgcgaaaaaaaaaaacgaaaaaaacgaaaacgacgaaaacgcgcgccgacgcgaaaccaacctcgcttcgccaaaatcgctaacgaacgcgcgccgcaatccgaacctcaaacgcgcgaacgcgaaaaacgacgcaaaaaccgcctaactaaaacaaccaaaaaaaataacttcgtcgaaaacgaaaaacaccgacgatccaaaatcctaaacaatcgcgccaaaactaaacgaaaaacgcgacgcgaaaacgtaaataactccttacgcgtctaacgataacactaaatcctactcgaaaataacgactaaaacgaaaaaaaacgcgcgaaactactacgttatcacttaaacaccgccgcgaaattcaaccgaacgctc

SEQ ID NO: 2247 - DNA, 549 bp, Artificial Sequence
  chemically treated genomic DNA (Homo sapiens) CpG-island No: 2247
gttatttagtttttcgaggcgtcggcggttggagtttattcgttgtcgtcgtagtagtagggtaagagggggttggttaggaggggaggaggcggaggacgttcgtagggagtgcgggggagggggacgggaggacgttaaggagagtcgggaggggtaaaagtacggcgcggggagggggagcggagagggcgggagcggcgggggcgcgcgtcggcgcggggttagtttcgtttcgttagggtcgttggcggacgcgcgtcgtagttcgagttttagacgcgcgggcgcgggggacggcgtaggggtcgtttggttggagtagttagaggggatagtttcgtcgagaacggaggatatcggcggtttagggttttgggtagtcgcgttagagttgagcggagggcgcggcgcgagaacgtaagtagttttttgcgcgtttggcggtgatattgggttttgttcgggggtgacggttggagcggaggaggacgcgcgaggttgttgcgttgttatttggatatcgtcgcggggtttagtcgagcgttt

SEQ ID NO: 2248 - DNA, 549 bp, Artificial Sequence
  chemically treated genomic DNA (Homo sapiens) CpG-island No: 2248
aaacgctcgactaaaccccgcgacgatatccaaataacaacgcaacaacctcgcgcgtcctcctccgctccaaccgtcacccccgaacaaaacccaatatcaccgccaaacgcgcaaaaaactacttacgttctcgcgccgcgccctccgctcaactctaacgcgactacccaaaaccctaaaccgccgatatcctccgttctcgacgaaactatcccctctaactactccaaccaaacgacccctacgccgtcccccgcgcccgcgcgtctaaaactcgaactacgacgcgcgtccgccaacgaccctaacgaaacgaaactaaccccgcgccgacgcgcgcccccgccgctcccgccctctccgctccccctccccgcgccgtacttttacccctcccgactctccttaacgtcctcccgtccccctcccccgcactccctacgaacgtcctccgcctcctcccctcctaaccaaccccctcttaccctactactacgacgacaacgaataaactccaaccgccgacgcctcgaaaaactaaataac

SEQ ID NO: 2249 - DNA, 625 bp, Artificial Sequence
  chemically treated genomic DNA (Homo sapiens) CpG-island No: 2249
acgattcggagcgtcggataagggtttagaacgattaattagttttttatcgtttcgtttttgttttttcgcggttatttatcgggatgtaggtcgtagttattagggttgtagcggcgattcgttcgttttcggtaatgacgtttattttaatcggtttgtattagttgagtttttaatataaatattggcgtagtagttaggtcgttatttatttagtttcgtttcgtttcgtttttagcggaagtgacgcgttagaagtttgggtttattcgcgggtcggggtgaggatttttcgtttcgtttaggtttttgtttttttgttaattttcgtttttttttcgtttcgagatatgcgtaatagagtatgacggagcgtaaggcgggaagtcgcgatagacgtgtgtgcgtgcgtgcgtgcgtgcgtgatgcgcgaggcgtggtttgttggtggggcgtgttgtgttttggttggttgtcgggtgtgagagcggtgggatttcgttttgtttttttgggcgggatttcggagtagtgttttggtttgtttgtttgcgggtcgttatttttttttagtagagataagttttttttttcgcgtttttgaagtttttgtttgcgttga

SEQ ID NO: 2250 - DNA, 625 bp, Artificial Sequence
  chemically treated genomic DNA (Homo sapiens) CpG-island No: 2250
tcaacgcaaacaaaaacttcaaaaacgcgaaaaaaaaaacttatctctactaaaaaaaaataacgacccgcaaacaaacaaaccaaaacactactccgaaatcccgcccaaaaaaacaaaacgaaatcccaccgctctcacacccgacaaccaaccaaaacacaacacgccccaccaacaaaccacgcctcgcgcatcacgcacgcacgcacgcacgcacacacgtctatcgcgacttcccgccttacgctccgtcatactctattacgcatatctcgaaacgaaaaaaaaacgaaaattaacaaaaaaacaaaaacctaaacgaaacgaaaaatcctcaccccgacccgcgaataaacccaaacttctaacgcgtcacttccgctaaaaacgaaacgaaacgaaactaaataaataacgacctaactactacgccaatatttatattaaaaactcaactaatacaaaccgattaaaataaacgtcattaccgaaaacgaacgaatcgccgctacaaccctaataactacgacctacatcccgataaataaccgcgaaaaaacaaaaacgaaacgataaaaaactaattaatcgttctaaacccttatccgacgctccgaatcgt

SEQ ID NO: 2251 - DNA, 625 bp, Artificial Sequence
  chemically treated genomic DNA (Homo sapiens) CpG-island No: 2251
ttagcgtaggtaggggttttagggacgcggagagggaggtttatttttgttgaaagggaatagcggttcgtaaataagtaaattaggatattgtttcgaggtttcgtttaggaaggtaaaacgaagttttatcgtttttatattcggtaattaattaaggtatagtacgttttattagtaagttacgtttcgcgtattacgtacgtacgtacgtacgtatatacgtttgtcgcggtttttcgttttgcgtttcgttatgttttattgcgtatatttcggggcgggggaggaacggagattgataaggaggtagaggtttgagcgaggcggaaaatttttatttcggttcgcgggtagatttaaatttttagcgcgttattttcgttgggggcggagcggggcggggttgagtgggtggcgatttagttgttgcgttagtgtttgtgttggaagtttagttgatgtaggtcggttggagtggacgttattgtcgggaacgagcgagtcgtcgttgtagttttagtgattgcggtttgtatttcggtaagtagtcgcgaggggataggggcgggacgataggaggttggttgatcgttttggatttttgttcggcgtttcgggtcgt

SEQ ID NO: 2252 - DNA, 625 bp, Artificial Sequence
  chemically treated genomic DNA (Homo sapiens) CpG-island No: 2252
acgacccgaaacgccgaacaaaaatccaaaacgatcaaccaacctcctatcgtcccgcccctatcccctcgcgactacttaccgaaatacaaaccgcaatcactaaaactacaacgacgactcgctcgttcccgacaataacgtccactccaaccgacctacatcaactaaacttccaacacaaacactaacgcaacaactaaatcgccacccactcaaccccgccccgctccgcccccaacgaaaataacgcgctaaaaatttaaatctacccgcgaaccgaaataaaaattttccgcctcgctcaaacctctacctccttatcaatctccgttcctcccccgccccgaaatatacgcaataaaacataacgaaacgcaaaacgaaaaaccgcgacaaacgtatatacgtacgtacgtacgtacgtaatacgcgaaacgtaacttactaataaaacgtactataccttaattaattaccgaatataaaaacgataaaacttcgttttaccttcctaaacgaaacctcgaaacaatatcctaatttacttatttacgaaccgctattccctttcaacaaaaataaacctccctctccgcgtccctaaaacccctacctacgctaa

SEQ ID NO: 2253 - DNA, 876 bp, Artificial Sequence
  chemically treated genomic DNA (Homo sapiens) CpG-island No: 2253
ggttgcggcggtcgcggtagtagtcgcggttgtcgcggttttggtgttcgattcgtttagttgcggcggttcgtttggttttagcgtttttttttttatttttagtagcgtcgtagtcgtcgtcgtcgtcgtcgtagtcgtcgtttttagttcgtttttcgttaacgattattttgttttttaggttttcggagttttcgggggtagcggcggcggcggcgggggcggcggcggcggttttttcgcgtattcgtaggacggtttttattagtcggtgtttatttttaaggtgtatatttttgtggacgggttgtagggtatttattcgcgggtgggtatggcgtattcgtacgagtcgtggtttaagttttcgtattcgggtttgggtgttgcgggcgaggtgggttcggtcggcgtttttagttggtgggacgtgggggtcggttggatcgacgtgtagaattcgaatagcgcggttgcgttgttcggttcgttgtattttgtcgtcggggggttttaaatttcgttgtattcgtcgttcggaggttataattcggattattcgggtttgagttattcggtttttagtagcggcgttttttcgtatttgtttagtttcgtcgggtagtattttatggacggttttaagttagtgttattcggtttttattcggattcggtttcgtcgtcgttggtcggcgcggggggttttatgttgagcgttgggttttcggcgtcgttggggggtttttcgcgttttttagttcgtcgttatttcggtcgcgttatttgcgattgttttaattgttaggaggtagagcggttgggttttgtcggggcgagtttgcggcgtaagggtttgtatagttgttatat

SEQ ID NO: 2254 - DNA, 876 bp, Artificial Sequence
  chemically treated genomic DNA (Homo sapiens) CpG-island No: 2254
atataacaactatacaaacccttacgccgcaaactcgccccgacaaaacccaaccgctctacctcctaacaattaaaacaatcgcaaataacgcgaccgaaataacgacgaactaaaaaacgcgaaaaaccccccaacgacgccgaaaacccaacgctcaacataaaaccccccgcgccgaccaacgacgacgaaaccgaatccgaataaaaaccgaataacactaacttaaaaccgtccataaaatactacccgacgaaactaaacaaatacgaaaaaacgccgctactaaaaaccgaataactcaaacccgaataatccgaattataacctccgaacgacgaatacaacgaaatttaaaaccccccgacgacaaaatacaacgaaccgaacaacgcaaccgcgctattcgaattctacacgtcgatccaaccgacccccacgtcccaccaactaaaaacgccgaccgaacccacctcgcccgcaacacccaaacccgaatacgaaaacttaaaccacgactcgtacgaatacgccatacccacccgcgaataaataccctacaacccgtccacaaaaatatacaccttaaaaataaacaccgactaataaaaaccgtcctacgaatacgcgaaaaaaccgccgccgccgcccccgccgccgccgccgctacccccgaaaactccgaaaacctaaaaaacaaaataatcgttaacgaaaaacgaactaaaaacgacgactacgacgacgacgacgacgactacgacgctactaaaaataaaaaaaaaaacgctaaaaccaaacgaaccgccgcaactaaacgaatcgaacaccaaaaccgcgacaaccgcgactactaccgcgaccgccgcaacc

SEQ ID NO: 2255 - DNA, 876 bp, Artificial Sequence
  chemically treated genomic DNA (Homo sapiens) CpG-island No: 2255
atgtggtagttgtgtaggtttttgcgtcgtaagttcgtttcggtagggtttagtcgttttgttttttggtagttggggtagtcgtaggtggcgcggtcggagtagcggcgagttgaggagcgcggggagttttttagcggcgtcgaaggtttagcgtttaatatggagtttttcgcgtcggttagcggcgacggggtcgagttcgggtaggagtcgggtagtattggtttgaagtcgtttatgaggtgttgttcggcggggttgagtaggtgcgaggaggcgtcgttgttgaaggtcgagtgatttaggttcgagtaattcgagttgtagttttcgagcggcgagtgtagcgaggtttggagtttttcggcggtagggtgtagcgagtcgggtagcgtagtcgcgttgttcgggttttgtacgtcgatttagtcggtttttacgttttattagttggaggcgtcggtcgagtttatttcgttcgtagtatttaggttcgggtgcgagggtttaaattacgattcgtacgggtgcgttatgtttattcgcgggtagatgttttgtagttcgtttatagaggtgtgtattttggagatgaatatcggttggtgggagtcgttttgcgagtgcgcggaggagtcgtcgtcgtcgttttcgtcgtcgtcgtcgttgttttcggaaatttcgggggtttggaaaatagagtagtcgttggcgaagggcgagttggaggcggcggttgcggcggcggcggcggcggttgcggcgttgttggaggtgagggagaaggcgttggagttaggcgagtcgtcgtagttgaacgagtcggatattagggtcgcggtagtcgcggttgttgtcgcggtcgtcgtagtt

SEQ ID NO: 2256 - DNA, 876 bp, Artificial Sequence
  chemically treated genomic DNA (Homo sapiens) CpG-island No: 2256
aactacgacgaccgcgacaacaaccgcgactaccgcgaccctaatatccgactcgttcaactacgacgactcgcctaactccaacgccttctccctcacctccaacaacgccgcaaccgccgccgccgccgccgcaaccgccgcctccaactcgcccttcgccaacgactactctattttccaaacccccgaaatttccgaaaacaacgacgacgacgacgaaaacgacgacgacgactcctccgcgcactcgcaaaacgactcccaccaaccgatattcatctccaaaatacacacctctataaacgaactacaaaacatctacccgcgaataaacataacgcacccgtacgaatcgtaatttaaaccctcgcacccgaacctaaatactacgaacgaaataaactcgaccgacgcctccaactaataaaacgtaaaaaccgactaaatcgacgtacaaaacccgaacaacgcgactacgctacccgactcgctacaccctaccgccgaaaaactccaaacctcgctacactcgccgctcgaaaactacaactcgaattactcgaacctaaatcactcgaccttcaacaacgacgcctcctcgcacctactcaaccccgccgaacaacacctcataaacgacttcaaaccaatactacccgactcctacccgaactcgaccccgtcgccgctaaccgacgcgaaaaactccatattaaacgctaaaccttcgacgccgctaaaaaactccccgcgctcctcaactcgccgctactccgaccgcgccacctacgactaccccaactaccaaaaaacaaaacgactaaaccctaccgaaacgaacttacgacgcaaaaacctacacaactaccacat

SEQ ID NO: 2257 - DNA, 618 bp, Artificial Sequence
  chemically treated genomic DNA (Homo sapiens) CpG-island No: 2257
tcggggagggtttcgaattggcgattcgtacggttcgtttgtacgtagtagcgaagagtgaggtggtggtttggggttttttcgcgagttttggtttcggttcgggttcgtcgtttttttcgggttgcgggtcggagtagtttatcgtcgcgtttatcgtatataaaggtatcgcggtcgttttcgttcgttgtacggatagcgagcgttattttgtgttttgttttcgttttgtagcgcgtttagcgcgggtaatgtcggttagattcgtttcgttagtttcgggtttttgattttgggtaaatttacggtgggaatgcgcggggagttttttttcgtttcgttcgtttgtgggtttttaaaagatattcgggtcggacggggtgagggatttttttgttttcgtttttttttttcgtttgttttgtagttttttcgtattagttcgttgttttgcgttattttagggtttcggagttcggggaatttgttttattttgttacggggtgtcgcgtttgatttttttgttcgtgttatcggaggttgttgcggcgtggatagatttagatttttttttttgaatttgtttagttttttttttgttttggtttacgatt

SEQ ID NO: 2258 - DNA, 618 bp, Artificial Sequence
  chemically treated genomic DNA (Homo sapiens) CpG-island No: 2258
aatcgtaaaccaaaacaaaaaaaaaactaaacaaattcaaaaaaaaaaatctaaatctatccacgccgcaacaacctccgataacacgaacaaaaaaatcaaacgcgacaccccgtaacaaaataaaacaaattccccgaactccgaaaccctaaaataacgcaaaacaacgaactaatacgaaaaaactacaaaacaaacgaaaaaaaaaaacgaaaacaaaaaaatccctcaccccgtccgacccgaatatcttttaaaaacccacaaacgaacgaaacgaaaaaaaactccccgcgcattcccaccgtaaatttacccaaaatcaaaaacccgaaactaacgaaacgaatctaaccgacattacccgcgctaaacgcgctacaaaacgaaaacaaaacacaaaataacgctcgctatccgtacaacgaacgaaaacgaccgcgatacctttatatacgataaacgcgacgataaactactccgacccgcaacccgaaaaaaacgacgaacccgaaccgaaaccaaaactcgcgaaaaaaccccaaaccaccacctcactcttcgctactacgtacaaacgaaccgtacgaatcgccaattcgaaaccctccccga

SEQ ID NO: 2259 - DNA, 618 bp, Artificial Sequence
  chemically treated genomic DNA (Homo sapiens) CpG-island No: 2259
agtcgtgggttaggatagagagaaagttgaataagtttaggaagaagaatttgagtttgtttacgtcgtagtagttttcggtggtacgggtagaaagattaagcgcggtatttcgtgataggatgggatagatttttcgggtttcgaggttttaggatggcgtagggtagcgggttggtgcgggaaaattatagagtaagcgagggagggaagcgaaggtaggggaattttttatttcgttcggttcgagtgttttttgagagtttataggcgagcggggcggggggaggtttttcgcgtatttttatcgtgggtttgtttaaggttagaggttcgggattggcggggcgggtttggtcggtattgttcgcgttgagcgcgttgtagaacgggagtagggtatagggtggcgttcgttgttcgtgtagcgggcggaggcggtcgcggtgtttttgtgtgcggtgggcgcggcgatgggttgtttcggttcgtagttcgaggggagcggcgggttcgggtcggggttagggttcgcggggagattttagattattattttatttttcgttgttacgtgtaagcggatcgtgcggatcgttagttcggaatttttttcgg

SEQ ID NO: 2260 - DNA, 618 bp, Artificial Sequence
  chemically treated genomic DNA (Homo sapiens) CpG-island No: 2260
ccgaaaaaaattccgaactaacgatccgcacgatccgcttacacgtaacaacgaaaaataaaataataatctaaaatctccccgcgaaccctaaccccgacccgaacccgccgctcccctcgaactacgaaccgaaacaacccatcgccgcgcccaccgcacacaaaaacaccgcgaccgcctccgcccgctacacgaacaacgaacgccaccctataccctactcccgttctacaacgcgctcaacgcgaacaataccgaccaaacccgccccgccaatcccgaacctctaaccttaaacaaacccacgataaaaatacgcgaaaaacctccccccgccccgctcgcctataaactctcaaaaaacactcgaaccgaacgaaataaaaaattcccctaccttcgcttccctccctcgcttactctataattttcccgcaccaacccgctaccctacgccatcctaaaacctcgaaacccgaaaaatctatcccatcctatcacgaaataccgcgcttaatctttctacccgtaccaccgaaaactactacgacgtaaacaaactcaaattcttcttcctaaacttattcaactttctctctatcctaacccacgact

SEQ ID NO: 2261 - DNA, 599 bp, Artificial Sequence
  chemically treated genomic DNA (Homo sapiens) CpG-island No: 2261
tttattttatagcggtcgtaacgtgtcgagagtcgtaagtaaagtgtcgtaaagtagaaggaaggcgggagtttcgattgtaaatattgaggaaagttaggtagtagaggtcgttatggcgaacgtttcgtgggtagaggtttgcgagaaattttaggcggcgttcgttttgtcgcgggtggaattgtataaaaattcggagaaggaattatataagtttaaatatagcgttcgggcgttattggaagaggttaaggcgttgttcggttttgcgtttgaggacgaggatgagcggtttgaggtcgaggatagttcgggtgtcggtgattacgttttggggttgtcggttgaggtggtggagttcgaggacgtcgtcgtttagcgagcggtgaggttggtagttatcgagttttatttcggggtgaattatatcgatacggaggagttgtcggcgggggaggagtatttggtgaaatgtttgcggttgttgcgtaggtatcggttttcgtacgattgtatttttttttgtatttaggcgtaggtgagagcgagttcggttaggtcggtttttgttggtaaatggcgagggatggggagga

SEQ ID NO: 2262 - DNA, 599 bp, Artificial Sequence
  chemically treated genomic DNA (Homo sapiens) CpG-island No: 2262
tcctccccatccctcgccatttaccaacaaaaaccgacctaaccgaactcgctctcacctacgcctaaatacaaaaaaaaatacaatcgtacgaaaaccgatacctacgcaacaaccgcaaacatttcaccaaatactcctcccccgccgacaactcctccgtatcgatataattcaccccgaaataaaactcgataactaccaacctcaccgctcgctaaacgacgacgtcctcgaactccaccacctcaaccgacaaccccaaaacgtaatcaccgacacccgaactatcctcgacctcaaaccgctcatcctcgtcctcaaacgcaaaaccgaacaacgccttaacctcttccaataacgcccgaacgctatatttaaacttatataattccttctccgaatttttatacaattccacccgcgacaaaacgaacgccgcctaaaatttctcgcaaacctctacccacgaaacgttcgccataacgacctctactacctaactttcctcaatatttacaatcgaaactcccgccttccttctactttacgacactttacttacgactctcgacacgttacgaccgctataaaataaa

SEQ ID NO: 2263 - DNA, 599 bp, Artificial Sequence
  chemically treated genomic DNA (Homo sapiens) CpG-island No: 2263
ttttttttatttttcgttatttgttaataggggtcggtttggtcgggttcgtttttatttgcgtttggatgtagagagagatgtagtcgtgcgagagtcggtatttgcgtagtagtcgtaggtattttattaggtgtttttttttcgtcgatagttttttcgtgtcgatgtggtttatttcgaggtggaattcgatgattgttagttttatcgttcgttgggcgacggcgttttcgggttttattattttagtcggtagttttagggcgtggttatcggtattcgggttgttttcggttttaggtcgtttattttcgtttttaggcgtagggtcgagtagcgttttgattttttttagtagcgttcgggcgttgtatttggatttgtatggtttttttttcggatttttatgtagttttattcgcgatagagcgagcgtcgtttggaatttttcgtagatttttgtttacggaacgttcgttatagcggtttttattgtttggttttttttaatgtttgtagtcgggattttcgttttttttttgttttgcgatattttatttacggttttcgatacgttgcggtcgttgtggaatggg

SEQ ID NO: 2264 - DNA, 599 bp, Artificial Sequence
  chemically treated genomic DNA (Homo sapiens) CpG-island No: 2264
cccattccacaacgaccgcaacgtatcgaaaaccgtaaataaaatatcgcaaaacaaaaaaaaaacgaaaatcccgactacaaacattaaaaaaaaccaaacaataaaaaccgctataacgaacgttccgtaaacaaaaatctacgaaaaattccaaacgacgctcgctctatcgcgaataaaactacataaaaatccgaaaaaaaaaccatacaaatccaaatacaacgcccgaacgctactaaaaaaaatcaaaacgctactcgaccctacgcctaaaaacgaaaataaacgacctaaaaccgaaaacaacccgaataccgataaccacgccctaaaactaccgactaaaataataaaacccgaaaacgccgtcgcccaacgaacgataaaactaacaatcatcgaattccacctcgaaataaaccacatcgacacgaaaaaactatcgacgaaaaaaaaacacctaataaaatacctacgactactacgcaaataccgactctcgcacgactacatctctctctacatccaaacgcaaataaaaacgaacccgaccaaaccgacccctattaacaaataacgaaaaataaaaaaaa

SEQ ID NO: 2265 - DNA, 779 bp, Artificial Sequence
  chemically treated genomic DNA (Homo sapiens) CpG-island No: 2265
cgagggtttgtcgggttttttcggtttaagttgtggaaaagtcgatttttaggtcgtcgcgggagattagttttaggggaagggcgacgcggaggagggtcggggtgggagttatgtttttcgttcgagcgtcgggttagacgcgtagtgtttaggttcgagggtttatttcgacgtagagagttaggcggtcgcggtgaattgaggcgttcggtaaatttcgagttttggggttcgattttatttatttcgtcgtcgtcgcgaaagatagtatttatcgttggtagttcggttgttttttgcgggtatttgggtagggtttaggtttatattattgaggcgttattatcgttttcgtcggtcgcgggggtgggggcgtggttattgggtcgtcgtttcgtttattcgagtcgcgcgtgtattttcggagtttcgcgtttttttttgtaaatttgcgtttttggtacggttcggttcggttacgttttttcgcggttcggttgggtcgttcggtagagaaatgaaagtgcgtggtttcgggggtggcggagtcgtttggagacggcggttgcggtttttatagttcggattttgtaggttatcgggtcggttgtttattttttcggggattattgtagaattgtggttgtgcgttcgtcggtttagttttttttttcgggtcgtcgtttgtttgtgatcgttatattgttttttttacggttttgtttttttatttgaaattggcgaggttttaggtttaagtcgtttttttgggtttt

SEQ ID NO: 2266 - DNA, 779 bp, Artificial Sequence
  chemically treated genomic DNA (Homo sapiens) CpG-island No: 2266
aaaacccaaaaaaacgacttaaacctaaaacctcgccaatttcaaataaaaaaacaaaaccgtaaaaaaaacaatataacgatcacaaacaaacgacgacccgaaaaaaaaaactaaaccgacgaacgcacaaccacaattctacaataatccccgaaaaaataaacaaccgacccgataacctacaaaatccgaactataaaaaccgcaaccgccgtctccaaacgactccgccacccccgaaaccacgcactttcatttctctaccgaacgacccaaccgaaccgcgaaaaaacgtaaccgaaccgaaccgtaccaaaaacgcaaatttacaaaaaaaaacgcgaaactccgaaaatacacgcgcgactcgaataaacgaaacgacgacccaataaccacgcccccacccccgcgaccgacgaaaacgataataacgcctcaataatataaacctaaaccctacccaaatacccgcaaaaaacaaccgaactaccaacgataaatactatctttcgcgacgacgacgaaataaataaaatcgaaccccaaaactcgaaatttaccgaacgcctcaattcaccgcgaccgcctaactctctacgtcgaaataaaccctcgaacctaaacactacgcgtctaacccgacgctcgaacgaaaaacataactcccaccccgaccctcctccgcgtcgcccttcccctaaaactaatctcccgcgacgacctaaaaatcgacttttccacaacttaaaccgaaaaaacccgacaaaccctcg

SEQ ID NO: 2267 - DNA, 779 bp, Artificial Sequence
  chemically treated genomic DNA (Homo sapiens) CpG-island No: 2267
ggaatttagggagacgatttgggtttgaagtttcgttaattttaggtgaggaaatagggtcgtggaggagataatgtggcgattataagtaagcggcggttcgaaggaggaggttagatcggcgggcgtatagttatagttttgtagtgattttcgggaaggtgggtagtcggttcggtgatttgtagggttcgagttgtagaagtcgtagtcgtcgtttttaggcgatttcgttattttcggaattacgtatttttatttttttgtcgggcgatttagtcgagtcgcgagggggcgtggtcgggtcgggtcgtattaagagcgtaaatttgtagggggaagcgcggggtttcgggaatgtacgcgcggttcgagtgggcggggcggcggtttaatggttacgtttttattttcgcggtcggcgaaggcggtggtagcgttttagtggtgtgggtttgagttttgtttaggtgttcgtagagagtagtcgggttgttagcggtgagtgttatttttcgcggcgacggcggggtgggtgaggtcgggttttaagattcggggtttgtcgggcgttttagtttatcgcggtcgtttggttttttgcgtcggggtgggttttcgggtttgggtattgcgcgtttggttcgacgttcgggcggaaggtatggtttttatttcggttttttttcgcgtcgttttttttttagagttgatttttcgcggcggtttgagggtcgatttttttatagtttgggtcgagagagttcggtaggttttcg

SEQ ID NO: 2268 - DNA, 779 bp, Artificial Sequence
  chemically treated genomic DNA (Homo sapiens) CpG-island No: 2268
cgaaaacctaccgaactctctcgacccaaactataaaaaaatcgaccctcaaaccgccgcgaaaaatcaactctaaaaaaaaaacgacgcgaaaaaaaaccgaaataaaaaccataccttccgcccgaacgtcgaaccaaacgcgcaatacccaaacccgaaaacccaccccgacgcaaaaaaccaaacgaccgcgataaactaaaacgcccgacaaaccccgaatcttaaaacccgacctcacccaccccgccgtcgccgcgaaaaataacactcaccgctaacaacccgactactctctacgaacacctaaacaaaactcaaacccacaccactaaaacgctaccaccgccttcgccgaccgcgaaaataaaaacgtaaccattaaaccgccgccccgcccactcgaaccgcgcgtacattcccgaaaccccgcgcttccccctacaaatttacgctcttaatacgacccgacccgaccacgccccctcgcgactcgactaaatcgcccgacaaaaaaataaaaatacgtaattccgaaaataacgaaatcgcctaaaaacgacgactacgacttctacaactcgaaccctacaaatcaccgaaccgactacccaccttcccgaaaatcactacaaaactataactatacgcccgccgatctaacctcctccttcgaaccgccgcttacttataatcgccacattatctcctccacgaccctatttcctcacctaaaattaacgaaacttcaaacccaaatcgtctccctaaattcc

SEQ ID NO: 2269 - DNA, 595 bp, Artificial Sequence
  chemically treated genomic DNA (Homo sapiens) CpG-island No: 2269
cgcgttcgtggggcgttaggttgtttcgttttttgtcgttttaagatttattttagtttgaggagaaattatagttttagaattaagtatatttttttcggcggttcggcgtacgagtcgcggggttcgggggtattgggtggaggttcggttattttcgtttcgcgttttacgtttcgggttttttttcgaggttagacgcgttcggattttttttatttcgaatttcgcgcgtgtttggtagggttttggacgcgcgggcgttgtagtagaggggtttggattttgttcgtcgcggtttcgttttcgttttcgttttcgttttttacgcgcgttcggttcgggaaacgtttatcgttgtagttagggcgagggtcgcggttcgcgagagtagttttcgtcgttcgtttagttttttttttaggttaggcgcgggttaggggcgtagtttgtcgtttttgtcgtcggggcgttcggttggggtcgtcgtttattttggcgattcgttagaattagtttttgttttatgataagatcgagattaggttggagtttcgggtgtcgagaaagtttcgtttgatgggttatttaagtt

SEQ ID NO: 2270 - DNA, 595 bp, Artificial Sequence
  chemically treated genomic DNA (Homo sapiens) CpG-island No: 2270
aacttaaataacccatcaaacgaaactttctcgacacccgaaactccaacctaatctcgatcttatcataaaacaaaaactaattctaacgaatcgccaaaataaacgacgaccccaaccgaacgccccgacgacaaaaacgacaaactacgcccctaacccgcgcctaacctaaaaaaaaaactaaacgaacgacgaaaactactctcgcgaaccgcgaccctcgccctaactacaacgataaacgtttcccgaaccgaacgcgcgtaaaaaacgaaaacgaaaacgaaaacgaaaccgcgacgaacaaaatccaaacccctctactacaacgcccgcgcgtccaaaaccctaccaaacacgcgcgaaattcgaaataaaaaaaatccgaacgcgtctaacctcgaaaaaaaacccgaaacgtaaaacgcgaaacgaaaataaccgaacctccacccaatacccccgaaccccgcgactcgtacgccgaaccgccgaaaaaaatatacttaattctaaaactataatttctcctcaaactaaaataaatcttaaaacgacaaaaaacgaaacaacctaacgccccacgaacgcg

SEQ ID NO: 2271 - DNA, 595 bp, Artificial Sequence
  chemically treated genomic DNA (Homo sapiens) CpG-island No: 2271
ggtttgggtggtttattaggcgaggttttttcggtattcgaggttttagtttgatttcggttttattatgaaataaaagttggttttggcgggtcgttagggtgggcggcggttttagtcgggcgtttcggcggtaagagcggtaggttgcgtttttggttcgcgtttagtttggggagagagttgggcgggcggcgggagttgttttcgcgggtcgcggttttcgttttggttgtaacggtaggcgtttttcgggtcggacgcgcgtggggggcgggggcgggggcgggggcgaggtcgcggcgagtaaagtttaggtttttttgttgtagcgttcgcgcgtttagagttttgttagatacgcgcgaggttcgaggtgagagaggttcgggcgcgtttggtttcgaagggagattcgggacgtggggcgcggggcgggagtggtcggatttttatttagtgttttcgggtttcgcgattcgtgcgtcgggtcgtcggagagggtgtatttggttttgaggttgtggtttttttttaggttgagatggattttgaggcggtaaagaacggaatagtttggcgttttacgagcgcg

SEQ ID NO: 2272 - DNA, 595 bp, Artificial Sequence
  chemically treated genomic DNA (Homo sapiens) CpG-island No: 2272
cgcgctcgtaaaacgccaaactattccgttctttaccgcctcaaaatccatctcaacctaaaaaaaaaccacaacctcaaaaccaaatacaccctctccgacgacccgacgcacgaatcgcgaaacccgaaaacactaaataaaaatccgaccactcccgccccgcgccccacgtcccgaatctcccttcgaaaccaaacgcgcccgaacctctctcacctcgaacctcgcgcgtatctaacaaaactctaaacgcgcgaacgctacaacaaaaaaacctaaactttactcgccgcgacctcgcccccgcccccgcccccgccccccacgcgcgtccgacccgaaaaacgcctaccgttacaaccaaaacgaaaaccgcgacccgcgaaaacaactcccgccgcccgcccaactctctccccaaactaaacgcgaaccaaaaacgcaacctaccgctcttaccgccgaaacgcccgactaaaaccgccgcccaccctaacgacccgccaaaaccaacttttatttcataataaaaccgaaatcaaactaaaacctcgaataccgaaaaaacctcgcctaataaaccacccaaacc

SEQ ID NO: 2273 - DNA, 826 bp, Artificial Sequence
  chemically treated genomic DNA (Homo sapiens) CpG-island No: 2273
tggagggttgcgaggggttcgggagttaggattttgcggtttcggttttgttagacgcgagcgaagcggcggcgggggcggggcgggggcgttttcggggttcgaagttgtttttcgaggcgcggcggcgaggatagcggttcggggtgcgttttttttgtttgttttcggtaggcgtcgcgttttcgcgcgtttatttggttttggagaataggaaggtaagtttgattaggttcgtaggtgaatagcgggatattttttttggcgacgttggtaatttgtagtcggtgttttaggatgtggagttttatcgttcgttcgcgtttcgttcgcggtagtttattcgttgggggacgagtcgcggttttcgtttttttcgcgttttgtcggtatcgatagtcggttcggggattcgggagttcggcgttaggcgcggggggcggcggcggtcggatcgggtcggataaaagggaggaggttcgttaagttgcgagggggagttacgggtcgagggaggtagcgtcggcggagtagcggcgcgcgggtgtcggcgcggggagtagttggtgttcgttgtaataaataatttgttatttaaacgtcggtttttattgcgtatgcgcggttcgcgcgcggtttgttaggatttgtagttcgtttgcggggttttttcggtgttgttgttgttgttgtcgtcgtcgggcggtcggagttatcggtagttcgatgtacgggaaatgtaggagagcgggtatttttaggattacggggaaggtcgaggggaggtacggggcgggtggagttagtttgagtttaggcgcgtttt

SEQ ID NO: 2274 - DNA, 826 bp, Artificial Sequence
  chemically treated genomic DNA (Homo sapiens) CpG-island No: 2274
aaaacgcgcctaaactcaaactaactccacccgccccgtacctcccctcgaccttccccgtaatcctaaaaatacccgctctcctacatttcccgtacatcgaactaccgataactccgaccgcccgacgacgacaacaacaacaacaacaccgaaaaaaccccgcaaacgaactacaaatcctaacaaaccgcgcgcgaaccgcgcatacgcaataaaaaccgacgtttaaataacaaattatttattacaacgaacaccaactactccccgcgccgacacccgcgcgccgctactccgccgacgctacctccctcgacccgtaactccccctcgcaacttaacgaacctcctcccttttatccgacccgatccgaccgccgccgccccccgcgcctaacgccgaactcccgaatccccgaaccgactatcgataccgacaaaacgcgaaaaaaacgaaaaccgcgactcgtcccccaacgaataaactaccgcgaacgaaacgcgaacgaacgataaaactccacatcctaaaacaccgactacaaattaccaacgtcgccaaaaaaaatatcccgctattcacctacgaacctaatcaaacttaccttcctattctccaaaaccaaataaacgcgcgaaaacgcgacgcctaccgaaaacaaacaaaaaaaacgcaccccgaaccgctatcctcgccgccgcgcctcgaaaaacaacttcgaaccccgaaaacgcccccgccccgcccccgccgccgcttcgctcgcgtctaacaaaaccgaaaccgcaaaatcctaactcccgaacccctcgcaaccctcca

SEQ ID NO: 2275 - DNA, 826 bp, Artificial Sequence
  chemically treated genomic DNA (Homo sapiens) CpG-island No: 2275
agggcgcgtttaggtttaggttggttttattcgtttcgtgttttttttcggtttttttcgtggttttgagggtgttcgtttttttgtatttttcgtgtatcgggttgtcggtagtttcggtcgttcggcggcggtagtagtagtagtagtatcgggagagtttcgtaggcggattataagttttggtaggtcgcgcgcggatcgcgtatgcgtagtggggatcggcgtttgagtggtaagttgtttgttatagcgaatattagttgtttttcgcgtcggtattcgcgcgtcgttgtttcgtcggcgttgtttttttcgattcgtggttttttttcgtaatttggcgggtttttttttttttgttcggttcggttcggtcgtcgtcgtttttcgcgtttggcgtcgagttttcgggttttcgggtcggttgtcggtgtcggtagggcgcggagggggcgggggtcgcggttcgttttttagcggatgagttgtcgcggacggggcgcgggcggacgatggaattttatattttggagtatcggttgtaagttgttagcgtcgttaaggagagtatttcgttgtttatttacgggtttgattaaatttgtttttttgttttttaagattaggtaagcgcgcggggacgcggcgtttgtcggggatagataaagggggcgtatttcgggtcgttgttttcgtcgtcgcgtttcggaagataatttcgggtttcgggagcgttttcgtttcgttttcgtcgtcgtttcgttcgcgtttgataaagtcggagtcgtagggttttggttttcggatttttcgtaatttttta

SEQ ID NO: 2276 - DNA, 826 bp, Artificial Sequence
  chemically treated genomic DNA (Homo sapiens) CpG-island No: 2276
taaaaaattacgaaaaatccgaaaaccaaaaccctacgactccgactttatcaaacgcgaacgaaacgacgacgaaaacgaaacgaaaacgctcccgaaacccgaaattatcttccgaaacgcgacgacgaaaacaacgacccgaaatacgccccctttatctatccccgacaaacgccgcgtccccgcgcgcttacctaatcttaaaaaacaaaaaaacaaatttaatcaaacccgtaaataaacaacgaaatactctccttaacgacgctaacaacttacaaccgatactccaaaatataaaattccatcgtccgcccgcgccccgtccgcgacaactcatccgctaaaaaacgaaccgcgacccccgccccctccgcgccctaccgacaccgacaaccgacccgaaaacccgaaaactcgacgccaaacgcgaaaaacgacgacgaccgaaccgaaccgaacaaaaaaaaaaaaacccgccaaattacgaaaaaaaaccacgaatcgaaaaaaacaacgccgacgaaacaacgacgcgcgaataccgacgcgaaaaacaactaatattcgctataacaaacaacttaccactcaaacgccgatccccactacgcatacgcgatccgcgcgcgacctaccaaaacttataatccgcctacgaaactctcccgatactactactactactaccgccgccgaacgaccgaaactaccgacaacccgatacacgaaaaatacaaaaaaacgaacaccctcaaaaccacgaaaaaaaccgaaaaaaaacacgaaacgaataaaaccaacctaaacctaaacgcgccct

SEQ ID NO: 2277 - DNA, 661 bp, Artificial Sequence
  chemically treated genomic DNA (Homo sapiens) CpG-island No: 2277
tatttaatgggtatcggatcgttggggcgttgaggatgtcgtttcggggtttttacgaggcggtttcgttacgcgtttcggttatgttttttttatttttagggaggttggacgtcgtggtttttaaagagggcgcgcgagaggggcgatcgcgagtttagtttatttcgagtttttagttcgttttaaggatgtaatatcggattcgtttcggggattgggaaagttttttttacggtttttataggcgtttcgttttttgggtttttaacggttgttttcgacgttgtgttttatttttttcgggcggggcggaaaaaatatttttcgtttttttttttcgtttagtggttttgttaaaggtcgagttcgtgacgttaaagagtttggattaattagagtatatcggattgcgtttttttcgaacgttagtagtagggttagaagggaggtagtcgtttttcgtcgtggtttggcgtggatttcgagcgttggtgtttggcggttttcgatcgttggtgtttggtacgcgttatttcgatgtattaggtaaagttttattacggggtcggcgttttttttcgtgtggagtttatttgtatgtattggttttttaatatgtacggtaggagcggcggtttagtattcggtattggttatt

SEQ ID NO: 2278 - DNA, 661 bp, Artificial Sequence
  chemically treated genomic DNA (Homo sapiens) CpG-island No: 2278
aataaccaataccgaatactaaaccgccgctcctaccgtacatattaaaaaaccaatacatacaaataaactccacacgaaaaaaaacgccgaccccgtaataaaactttacctaatacatcgaaataacgcgtaccaaacaccaacgatcgaaaaccgccaaacaccaacgctcgaaatccacgccaaaccacgacgaaaaacgactacctcccttctaaccctactactaacgttcgaaaaaaacgcaatccgatatactctaattaatccaaactctttaacgtcacgaactcgacctttaacaaaaccactaaacgaaaaaaaaaaacgaaaaatattttttccgccccgcccgaaaaaaataaaacacaacgtcgaaaacaaccgttaaaaacccaaaaaacgaaacgcctataaaaaccgtaaaaaaaactttcccaatccccgaaacgaatccgatattacatccttaaaacgaactaaaaactcgaaataaactaaactcgcgatcgcccctctcgcgcgccctctttaaaaaccacgacgtccaacctccctaaaaataaaaaaaacataaccgaaacgcgtaacgaaaccgcctcgtaaaaaccccgaaacgacatcctcaacgccccaacgatccgatacccattaaata

SEQ ID NO: 2279 - DNA, 661 bp, Artificial Sequence
  chemically treated genomic DNA (Homo sapiens) CpG-island No: 2279
agtggttagtgtcgagtgttgggtcgtcgtttttgtcgtgtatgttggggagttagtatatgtaggtgggttttatacggagaggggcgtcgatttcgtgatagggttttatttggtatatcggggtggcgcgtgttagatattaacggtcggaaatcgttagatattaacgttcggaatttacgttaggttacgacggagggcgattattttttttttgattttgttgttggcgttcggaaaaaacgtagttcggtgtgttttgattggtttaggttttttgacgttacggattcgatttttgatagagttattaggcgaaaaggagagacgggaagtatttttttcgtttcgttcggaaagggtggagtataacgtcgaaagtagtcgttgggagtttaggaggcggggcgtttgtgggagtcgtggagggaatttttttagttttcgaggcggattcggtgttgtatttttggagcgagttgagagttcgaggtgagttgggttcgcggtcgtttttttcgcgcgttttttttaagaattacggcgtttaatttttttggaaatggggggaatatggtcgaggcgcgtggcgaggtcgtttcgtggaggtttcggagcggtatttttagcgttttagcgattcggtgtttattaggtg

SEQ ID NO: 2280 - DNA, 661 bp, Artificial Sequence
  chemically treated genomic DNA (Homo sapiens) CpG-island No: 2280
cacctaataaacaccgaatcgctaaaacgctaaaaataccgctccgaaacctccacgaaacgacctcgccacgcgcctcgaccatattccccccatttccaaaaaaattaaacgccgtaattcttaaaaaaaacgcgcgaaaaaaacgaccgcgaacccaactcacctcgaactctcaactcgctccaaaaatacaacaccgaatccgcctcgaaaactaaaaaaattccctccacgactcccacaaacgccccgcctcctaaactcccaacgactactttcgacgttatactccaccctttccgaacgaaacgaaaaaaatacttcccgtctctccttttcgcctaataactctatcaaaaatcgaatccgtaacgtcaaaaaacctaaaccaatcaaaacacaccgaactacgttttttccgaacgccaacaacaaaatcaaaaaaaaaataatcgccctccgtcgtaacctaacgtaaattccgaacgttaatatctaacgatttccgaccgttaatatctaacacgcgccaccccgatataccaaataaaaccctatcacgaaatcgacgcccctctccgtataaaacccacctacatatactaactccccaacatacacgacaaaaacgacgacccaacactcgacactaaccact

SEQ ID NO: 2281 - DNA, 661 bp, Artificial Sequence
  chemically treated genomic DNA (Homo sapiens) CpG-island No: 2281
gatttcgtgatagggttttatttggtatatcggggtggcgcgtgttagatattaacggtcggaaatcgttagatattaacgttcggaatttacgttaggttacgacggagggcgattattttttttttgattttgttgttggcgttcggaaaaaacgtagttcggtgtgttttgattggtttaggttttttgacgttacggattcgatttttgatagagttattaggcgaaaaggagagacgggaagtatttttttcgtttcgttcggaaagggtggagtataacgtcgaaagtagtcgttgggagtttaggaggcggggcgtttgtgggagtcgtggagggaatttttttagttttcgaggcggattcggtgttgtatttttggagcgagttgagagttcgaggtgagttgggttcgcggtcgtttttttcgcgcgttttttttaagaattacggcgtttaatttttttggaaatggggggaatatggtcgaggcgcgtggcgaggcgtttcgtggagggttcggagcggtatttttagcgttttagcgattcggtgtttattaggtgcgttttgaagtcgaggtaagttttttcggggtgttgggttgcgggtaaagaattcggttttgtgaagagttgggttcggtttgttttaggtt

SEQ ID NO: 2282 - DNA, 661 bp, Artificial Sequence
  chemically treated genomic DNA (Homo sapiens) CpG-island No: 2282
aacctaaaacaaaccgaacccaactcttcacaaaaccgaattctttacccgcaacccaacaccccgaaaaaacttacctcgacttcaaaacgcacctaataaacaccgaatcgctaaaacgctaaaaataccgctccgaaccctccacgaaacgcctcgccacgcgcctcgaccatattccccccatttccaaaaaaattaaacgccgtaattcttaaaaaaaacgcgcgaaaaaaacgaccgcgaacccaactcacctcgaactctcaactcgctccaaaaatacaacaccgaatccgcctcgaaaactaaaaaaattccctccacgactcccacaaacgccccgcctcctaaactcccaacgactactttcgacgttatactccaccctttccgaacgaaacgaaaaaaatacttcccgtctctccttttcgcctaataactctatcaaaaatcgaatccgtaacgtcaaaaaacctaaaccaatcaaaacacaccgaactacgttttttccgaacgccaacaacaaaatcaaaaaaaaaataatcgccctccgtcgtaacctaacgtaaattccgaacgttaatatctaacgatttccgaccgttaatatctaacacgcgccaccccgatataccaaataaaaccctatcacgaaatc

SEQ ID NO: 2283 - DNA, 661 bp, Artificial Sequence
  chemically treated genomic DNA (Homo sapiens) CpG-island No: 2283
ggtttgagataggtcgaatttaattttttatagggtcgaattttttgttcgtagtttagtatttcgaaggagtttgtttcggttttaaggcgtatttaatgggtatcggatcgttggggcgttgaggatgtcgtttcgggttttttacgaggcgtttcgttacgcgtttcggttatgttttttttatttttagggaggttggacgtcgtggtttttaaagagggcgcgcgagaggggcgatcgcgagtttagtttatttcgagtttttagttcgttttaaggatgtaatatcggattcgtttcggggattgggaaagttttttttacggtttttataggcgtttcgttttttgggtttttaacggttgttttcgacgttgtgttttatttttttcgggcggggcggaaaaaatatttttcgtttttttttttcgtttagtggttttgttaaaggtcgagttcgtgacgttaaagagtttggattaattagagtatatcggattgcgtttttttcgaacgttagtagtagggttagaagggaggtagtcgtttttcgtcgtggtttggcgtggatttcgagcgttggtgtttggcggttttcgatcgttggtgtttggtacgcgttatttcgatgtattaggtaaagttttattacggggtt

SEQ ID NO: 2284 - DNA, 661 bp, Artificial Sequence
  chemically treated genomic DNA (Homo sapiens) CpG-island No: 2284
aaccccgtaataaaactttacctaatacatcgaaataacgcgtaccaaacaccaacgatcgaaaaccgccaaacaccaacgctcgaaatccacgccaaaccacgacgaaaaacgactacctcccttctaaccctactactaacgttcgaaaaaaacgcaatccgatatactctaattaatccaaactctttaacgtcacgaactcgacctttaacaaaaccactaaacgaaaaaaaaaaacgaaaaatattttttccgccccgcccgaaaaaaataaaacacaacgtcgaaaacaaccgttaaaaacccaaaaaacgaaacgcctataaaaaccgtaaaaaaaactttcccaatccccgaaacgaatccgatattacatccttaaaacgaactaaaaactcgaaataaactaaactcgcgatcgcccctctcgcgcgccctctttaaaaaccacgacgtccaacctccctaaaaataaaaaaaacataaccgaaacgcgtaacgaaacgcctcgtaaaaaacccgaaacgacatcctcaacgccccaacgatccgatacccattaaatacgccttaaaaccgaaacaaactccttcgaaatactaaactacgaacaaaaaattcgaccctataaaaaattaaattcgacctatctcaaacc

SEQ ID NO: 2285 - DNA, 716 bp, Artificial Sequence
  chemically treated genomic DNA (Homo sapiens) CpG-island No: 2285
tttttagtggcggcgggaggagtgaagttgtcggagtatagtttagcgtttcgtatatttttttcgtagggcggcgggtttaggtcgttgtcggggtcgatttaagtaatttggatttttttttatgtgttgtatttattttagggtcggcgtgttcgtcgtagttttcgtcgttgtttttttcgcgttttttgtcggaattgtagtaggagtacggtttaggtatagcgagagggagaatttcgtttcggttttgtttatattggtttcgcgttcgttaaatttcggtattttttaggcgttcgtacgttggggggttttggtcgcgtcggggagagtgggttttgggtttatattttcgtcgggattcggtgtcgaggtttaggaacgcgggttagatgcgtgggagaggaatcgcgcggtttcgtcgtagcgttgcggattatttttcggtttttttttaggtttttcgattcggattcgttgttttcgtcgtaagtcggttcgtttaggtcgcgttacgatcgaggtcgttaatttcgcgggttaaggcgtcgtattggttgcggagttttatttttagaggtgttagtttatttttcgtggggcggttaattttcgcggttgtacgttttttagttttttagtttttagtaattagtgtttatgcgatttacgtgggtaaagtatatttttgtagatagttttgtatttgg

SEQ ID NO: 2286 - DNA, 716 bp, Artificial Sequence
  chemically treated genomic DNA (Homo sapiens) CpG-island No: 2286
ccaaatacaaaactatctacaaaaatatactttacccacgtaaatcgcataaacactaattactaaaaactaaaaaactaaaaaacgtacaaccgcgaaaattaaccgccccacgaaaaataaactaacacctctaaaaataaaactccgcaaccaatacgacgccttaacccgcgaaattaacgacctcgatcgtaacgcgacctaaacgaaccgacttacgacgaaaacaacgaatccgaatcgaaaaacctaaaaaaaaaccgaaaaataatccgcaacgctacgacgaaaccgcgcgattcctctcccacgcatctaacccgcgttcctaaacctcgacaccgaatcccgacgaaaatataaacccaaaacccactctccccgacgcgaccaaaaccccccaacgtacgaacgcctaaaaaataccgaaatttaacgaacgcgaaaccaatataaacaaaaccgaaacgaaattctccctctcgctatacctaaaccgtactcctactacaattccgacaaaaaacgcgaaaaaaacaacgacgaaaactacgacgaacacgccgaccctaaaataaatacaacacataaaaaaaaatccaaattacttaaatcgaccccgacaacgacctaaacccgccgccctacgaaaaaaatatacgaaacgctaaactatactccgacaacttcactcctcccgccgccactaaaaa

SEQ ID NO: 2287 - DNA, 716 bp, Artificial Sequence
  chemically treated genomic DNA (Homo sapiens) CpG-island No: 2287
ttaggtgtaaggttatttgtagaaatgtgttttgtttacgtggatcgtatggatattaattattaagggttaaggagttgagaaacgtgtagtcgcggagattggtcgttttacggggaataagttggtatttttagaaataaagtttcgtagttaatgcggcgttttggttcgcgggattggcggtttcggtcgtgacgcgatttgggcgggtcgatttgcgacggaggtagcgggttcgggtcgggggatttgagaaggagtcgggaggtgattcgtagcgttgcgacgggatcgcgcgattttttttttacgtatttggttcgcgtttttgggtttcggtatcggatttcggcgggggtgtggatttagggtttatttttttcggcgcggttagggttttttagcgtgcgagcgtttaggggatgtcgaggtttggcgggcgcgggattaatatgggtagggtcgaggcgggattttttttttcgttgtgtttagatcgtatttttgttgtagtttcggtagagagcgcggggagagtagcggcgggagttgcggcgagtacgtcggttttggggtagatgtaatatatgagagggaatttaagttgtttgggtcggtttcggtagcgatttgaattcgtcgttttgcgggaggggtgtgcggagcgttgggttgtgtttcggtaattttatttttttcgtcgttattgggga

SEQ ID NO: 2288 - DNA, 716 bp, Artificial Sequence
  chemically treated genomic DNA (Homo sapiens) CpG-island No: 2288
tccccaataacgacgaaaaaaataaaattaccgaaacacaacccaacgctccgcacacccctcccgcaaaacgacgaattcaaatcgctaccgaaaccgacccaaacaacttaaattccctctcatatattacatctaccccaaaaccgacgtactcgccgcaactcccgccgctactctccccgcgctctctaccgaaactacaacaaaaatacgatctaaacacaacgaaaaaaaaaatcccgcctcgaccctacccatattaatcccgcgcccgccaaacctcgacatcccctaaacgctcgcacgctaaaaaaccctaaccgcgccgaaaaaaataaaccctaaatccacacccccgccgaaatccgataccgaaacccaaaaacgcgaaccaaatacgtaaaaaaaaaatcgcgcgatcccgtcgcaacgctacgaatcacctcccgactccttctcaaatcccccgacccgaacccgctacctccgtcgcaaatcgacccgcccaaatcgcgtcacgaccgaaaccgccaatcccgcgaaccaaaacgccgcattaactacgaaactttatttctaaaaataccaacttattccccgtaaaacgaccaatctccgcgactacacgtttctcaactccttaacccttaataattaatatccatacgatccacgtaaacaaaacacatttctacaaataaccttacacctaa

SEQ ID NO: 2289 - DNA, 684 bp, Artificial Sequence
  chemically treated genomic DNA (Homo sapiens) CpG-island No: 2289
cgcgtttattgcgtatttcgcgcgaattgattataaattatacggatttcgttttttcgttttaagtttcgttttagggaatttttttcgtttttagtttttttttcgggtcgttgagttttatttcgcgtcgttttttttttttagggttaaggagcggttttcgcgcgcgcggttcgttagtattttttcgttttcgggcgcgtacggtcggcgcggcggtttagaagggaagagttcgtcgcgtagtttcggttcgtattttcgtttttggagttttagtcgttcgttttttaaatttcgttcgcgttttgcggagaagcggttttatagttttagtcgttcgtcgtcgtttaagaagttttttagtcggtgagtgttcgttcggatcgggtcgacggggcgggcggcggggtggagcggtcgggtcgcgtcgtttatttatttcgcgtcggtttcgtagggataaggacggcgagggtcgcgtaaggtattttgaggtcgaggttattcgcgttcggcgtcgttttcgtagttattcgtttattcgtaagcggcgtcgggattcgttaagttttatggagtcgcggcgtattattaggtatggagggttttgggggggtcggtggcgtagggttggggtcgttgattcggattagggatagagatttcggttcggggatt

SEQ ID NO: 2290 - DNA, 684 bp, Artificial Sequence
  chemically treated genomic DNA (Homo sapiens) CpG-island No: 2290
aatccccgaaccgaaatctctatccctaatccgaatcaacgaccccaaccctacgccaccgacccccccaaaaccctccatacctaataatacgccgcgactccataaaacttaacgaatcccgacgccgcttacgaataaacgaataactacgaaaacgacgccgaacgcgaataacctcgacctcaaaataccttacgcgaccctcgccgtccttatccctacgaaaccgacgcgaaataaataaacgacgcgacccgaccgctccaccccgccgcccgccccgtcgacccgatccgaacgaacactcaccgactaaaaaacttcttaaacgacgacgaacgactaaaactataaaaccgcttctccgcaaaacgcgaacgaaatttaaaaaacgaacgactaaaactccaaaaacgaaaatacgaaccgaaactacgcgacgaactcttcccttctaaaccgccgcgccgaccgtacgcgcccgaaaacgaaaaaatactaacgaaccgcgcgcgcgaaaaccgctccttaaccctaaaaaaaaaaaacgacgcgaaataaaactcaacgacccgaaaaaaaaactaaaaacgaaaaaaattccctaaaacgaaacttaaaacgaaaaaacgaaatccgtataatttataatcaattcgcgcgaaatacgcaataaacgcg

SEQ ID NO: 2291 - DNA, 684 bp, Artificial Sequence
  chemically treated genomic DNA (Homo sapiens) CpG-island No: 2291
ggttttcgggtcgaggtttttgtttttgattcgggttagcggttttagttttgcgttatcggtttttttaagattttttatatttggtgatgcgtcgcggttttatgaagtttggcgagtttcggcgtcgtttgcggatgggcgagtagttgcgggagcggcgtcgggcgcgggtggtttcggttttagagtgttttgcgcggttttcgtcgtttttgtttttgcggggtcggcgcgaggtaagtgagcgacgcggttcggtcgttttatttcgtcgttcgtttcgtcggttcggttcgggcgggtatttatcggttgaggggttttttgggcgacggcgagcggttggggttgtggggtcgttttttcgtagagcgcgagcgagatttggagggcgagcggttggagttttaggagcgggggtgcgggtcggggttgcgcgacgagttttttttttttgggtcgtcgcgtcggtcgtgcgcgttcggggacggagaggtgttggcgggtcgcgcgcgcgggggtcgttttttggttttggaggagggagacggcgcgggatagggtttagcgattcggaaagggggttgggggcggggagggttttttggggcggggtttagggcggaggggcggggttcgtgtagtttgtggttagttcgcgcggagtgcgtagtgaacgcg

SEQ ID NO: 2292 - DNA, 684 bp, Artificial Sequence
  chemically treated genomic DNA (Homo sapiens) CpG-island No: 2292
cgcgttcactacgcactccgcgcgaactaaccacaaactacacgaaccccgcccctccgccctaaaccccgccccaaaaaaccctccccgcccccaaccccctttccgaatcgctaaaccctatcccgcgccgtctccctcctccaaaaccaaaaaacgacccccgcgcgcgcgacccgccaacacctctccgtccccgaacgcgcacgaccgacgcgacgacccaaaaaaaaaaaactcgtcgcgcaaccccgacccgcacccccgctcctaaaactccaaccgctcgccctccaaatctcgctcgcgctctacgaaaaaacgaccccacaaccccaaccgctcgccgtcgcccaaaaaacccctcaaccgataaatacccgcccgaaccgaaccgacgaaacgaacgacgaaataaaacgaccgaaccgcgtcgctcacttacctcgcgccgaccccgcaaaaacaaaaacgacgaaaaccgcgcaaaacactctaaaaccgaaaccacccgcgcccgacgccgctcccgcaactactcgcccatccgcaaacgacgccgaaactcgccaaacttcataaaaccgcgacgcatcaccaaatataaaaaatcttaaaaaaaccgataacgcaaaactaaaaccgctaacccgaatcaaaaacaaaaacctcgacccgaaaacc

SEQ ID NO: 2293 - DNA, 681 bp, Artificial Sequence
  chemically treated genomic DNA (Homo sapiens) CpG-island No: 2293
ggtagaagggcgtttttttcgttatttttttaatttttagacgttttttttagcggttcggggggtgggcgcgggttttacgtgcgcgtcgttcgtgtttattcggatagggtcgggttatttattcggtttttagcggcgtttcgtttttttcgtagcgtgagttcgttcgtagtagcgcgggtaggttttttagtcgcggtcgtagcgacgtcggcggttgttcgcgttcgggttttcgggcgttggggttgcggcgtagggggtcgtttgtcgttattatcgtcgtcgcggcggttagggtcgggttttcgtacggcggttgtattttgacggagtttacggttatttttatgttttgacggcgttgcggcgtcgggggtttttttttatcgcgttcgttttcgcgcgtcgttcgttttttcgttaggaagcgagaaggcgcgattgcggttcggcgtcgggcgcgttgttagtcgttgttttattggcgcgcgtagcgcgtcgcgcgagtttagcgtcgcgcgtttttttttttttttttttttttttttttttcgtttaggtgcgcgggtttcgtttcgtttcgttttttcgtttgcgaaagttgtttgggatttgtttttttcggattttttattcgggattcgggaggaagagggtattttgggtatcggttta

SEQ ID NO: 2294 - DNA, 681 bp, Artificial Sequence
  chemically treated genomic DNA (Homo sapiens) CpG-island No: 2294
taaaccgatacccaaaataccctcttcctcccgaatcccgaataaaaaatccgaaaaaaacaaatcccaaacaactttcgcaaacgaaaaaacgaaacgaaacgaaacccgcgcacctaaacgaaaaaaaaaaaaaaaaaaaaaaaaaaaaaaacgcgcgacgctaaactcgcgcgacgcgctacgcgcgccaataaaacaacgactaacaacgcgcccgacgccgaaccgcaatcgcgccttctcgcttcctaacgaaaaaacgaacgacgcgcgaaaacgaacgcgataaaaaaaaacccccgacgccgcaacgccgtcaaaacataaaaataaccgtaaactccgtcaaaatacaaccgccgtacgaaaacccgaccctaaccgccgcgacgacgataataacgacaaacgaccccctacgccgcaaccccaacgcccgaaaacccgaacgcgaacaaccgccgacgtcgctacgaccgcgactaaaaaacctacccgcgctactacgaacgaactcacgctacgaaaaaaacgaaacgccgctaaaaaccgaataaataacccgaccctatccgaataaacacgaacgacgcgcacgtaaaacccgcgcccaccccccgaaccgctaaaaaaaacgtctaaaaattaaaaaaataacgaaaaaaacgcccttctacc

SEQ ID NO: 2295 - DNA, 681 bp, Artificial Sequence
  chemically treated genomic DNA (Homo sapiens) CpG-island No: 2295
tgagtcggtgtttaaggtgttttttttttttcgggtttcgagtgggagattcgagggggataggttttaggtagttttcgtaggcgaaagggcggggcggggcggggttcgcgtatttgggcggggaggggaggagagaggaggggaggggaggcgcgcggcgttgagttcgcgcggcgcgttgcgcgcgttaatggggtagcggttggtagcgcgttcggcgtcgagtcgtagtcgcgttttttcgttttttggcgaaggagcggacggcgcgcggaggcgagcgcggtggagaggagttttcggcgtcgtagcgtcgttagggtatgaggatggtcgtgggtttcgttaagatgtagtcgtcgtgcgagagttcggttttggtcgtcgcggcggcggtggtggcggtagacggttttttgcgtcgtagttttagcgttcgggagttcgagcgcgagtagtcgtcggcgtcgttgcggtcgcggttgagggatttgttcgcgttgttgcgagcgggtttacgttgcggaggaagcggagcgtcgttgggggtcgggtgagtggttcggttttgttcgagtgggtacgggcggcgcgtacgtggagttcgcgtttatttttcgggtcgttgaggggggcgtttggaagttggggaggtggcggaagggacgtttttttgtt

SEQ ID NO: 2296 - DNA, 681 bp, Artificial Sequence
  chemically treated genomic DNA (Homo sapiens) CpG-island No: 2296
aacaaaaaaacgtcccttccgccacctccccaacttccaaacgcccccctcaacgacccgaaaaataaacgcgaactccacgtacgcgccgcccgtacccactcgaacaaaaccgaaccactcacccgacccccaacgacgctccgcttcctccgcaacgtaaacccgctcgcaacaacgcgaacaaatccctcaaccgcgaccgcaacgacgccgacgactactcgcgctcgaactcccgaacgctaaaactacgacgcaaaaaaccgtctaccgccaccaccgccgccgcgacgaccaaaaccgaactctcgcacgacgactacatcttaacgaaacccacgaccatcctcataccctaacgacgctacgacgccgaaaactcctctccaccgcgctcgcctccgcgcgccgtccgctccttcgccaaaaaacgaaaaaacgcgactacgactcgacgccgaacgcgctaccaaccgctaccccattaacgcgcgcaacgcgccgcgcgaactcaacgccgcgcgcctcccctcccctcctctctcctcccctccccgcccaaatacgcgaaccccgccccgccccgccctttcgcctacgaaaactacctaaaacctatccccctcgaatctcccactcgaaacccgaaaaaaaaaaaacaccttaaacaccgactca

SEQ ID NO: 2297 - DNA, 523 bp, Artificial Sequence
  chemically treated genomic DNA (Homo sapiens) CpG-island No: 2297
tcgttattatatatattgataatcgatgatattttttcgttttttttattttattatttttttatgaataaatacgattacgacgatattatttattttatatatatataatatttcgattaagattatagtatcgtttatattattatatagttatatatacgatttattatgttacgtttattatttataatagtaatatagatatcgtatattttaaggtacgcgttttttatttttattttttatgatttacgtatatatattatatatcgacggcgaggtattttatatatatattattaatatacgtatatataatttttttatattagttttattatttacgtatacgggcgagttattttttatttaattatagtatatttatattgtttgttttttttttttttatacgaagttcggcgtaaagatagttttatattttgtacgcgtgttttatatacggtttttatagtgtgtgatattttattatgatattatattaaatatttagtagtat

SEQ ID NO: 2298 - DNA, 523 bp, Artificial Sequence
  chemically treated genomic DNA (Homo sapiens) CpG-island No: 2298
atactactaaatatttaatataatatcataataaaatatcacacactataaaaaccgtatataaaacacgcgtacaaaatataaaactatctttacgccgaacttcgtataaaaaaaaaaaaaacaaacaatataaatatactataattaaataaaaaataactcgcccgtatacgtaaataataaaactaatataaaaaaattatatatacgtatattaataatatatatataaaatacctcgccgtcgatatataatatatatacgtaaatcataaaaaataaaaataaaaaacgcgtaccttaaaatatacgatatctatattactattataaataataaacgtaacataataaatcgtatatataactatataataatataaacgatactataatcttaatcgaaatattatatatatataaaataaataatatcgtcgtaatcgtatttattcataaaaaaataataaaataaaaaaaacgaaaaaatatcatcgattatcaatatatataataacga

SEQ ID NO: 2299 - DNA, 523 bp, Artificial Sequence
  chemically treated genomic DNA (Homo sapiens) CpG-island No: 2299
atgttgttaagtgtttgatgtgatattatgatgaggtgttatatattgtgaaggtcgtgtgtgaagtacgcgtgtagagtgtggagttgtttttgcgtcgagtttcgtgtgaagagagagaagatagataatgtagatgtgttgtgattaagtgggagatagttcgttcgtgtgcgtgggtagtgagattagtgtgggagggttgtgtgtgcgtgtgttgatggtgtgtgtatgaggtgtttcgtcgtcgatgtgtggtgtgtgtgcgtaggttatagaggataggagtaaagagcgcgtgttttgggatgtgcgatgtttgtgttgttgttgtaggtggtgagcgtagtatggtgggtcgtgtgtgtggttgtatggtagtgtagacgatgttgtgattttagtcgggatgttgtgtatgtgtggagtgggtggtgtcgtcgtggtcgtgtttgtttataggggagtggtgagatgagagagacgagagagtgttatcggttgttagtgtgtgtagtgacgg

SEQ ID NO: 2300 - DNA, 523 bp, Artificial Sequence
  chemically treated genomic DNA (Homo sapiens) CpG-island No: 2300
ccgtcactacacacactaacaaccgataacactctctcgtctctctcatctcaccactcccctataaacaaacacgaccacgacgacaccacccactccacacatacacaacatcccgactaaaatcacaacatcgtctacactaccatacaaccacacacacgacccaccatactacgctcaccacctacaacaacaacacaaacatcgcacatcccaaaacacgcgctctttactcctatcctctataacctacgcacacacaccacacatcgacgacgaaacacctcatacacacaccatcaacacacgcacacacaaccctcccacactaatctcactacccacgcacacgaacgaactatctcccacttaatcacaacacatctacattatctatcttctctctcttcacacgaaactcgacgcaaaaacaactccacactctacacgcgtacttcacacacgaccttcacaatatataacacctcatcataatatcacatcaaacacttaacaacat

SEQ ID NO: 2301 - DNA, 571 bp, Artificial Sequence
  chemically treated genomic DNA (Homo sapiens) CpG-island No: 2301
ttttacggatggggaagtatacgttttcgttgttcgggaaattttataatatttacgtgtgtgcgagttgttgcgtagattttaaggggggttcgcgaaaaaaggagtgtagaagatagtgatgtatgagatgtgtgggttgagttcgtggtcgtcggtcgcggcgcgttttatggtgtatagattaatgggggaatgtcgttcgcgtgttgggtgatagagattcgtcgagaggcggggtatttgtggtgtgagttgcgcgttgtgtgttgatgagcgagaaatagtgattagtgtggtgagggtgagtgtgtgttggtgaggagtgtgagagtgtgaggacgtgcggattagacgagttttagatagagatggtgagatgttgaagggtggagtgagtgtggttggtgttttagcgtcggaggtagtgtttgatgtgttcgtgaaagtacgtgttgtcgtgtggggcggtgatgcggtagagtggcgagagtgttgagagtaggtgcggatgaagagatttagtacgcgtgttaggttagtagtcgaatgtacgtgttagttcgtttta

SEQ ID NO: 2302 - DNA, 571 bp, Artificial Sequence
  chemically treated genomic DNA (Homo sapiens) CpG-island No: 2302
taaaacgaactaacacgtacattcgactactaacctaacacgcgtactaaatctcttcatccgcacctactctcaacactctcgccactctaccgcatcaccgccccacacgacaacacgtactttcacgaacacatcaaacactacctccgacgctaaaacaccaaccacactcactccacccttcaacatctcaccatctctatctaaaactcgtctaatccgcacgtcctcacactctcacactcctcaccaacacacactcaccctcaccacactaatcactatttctcgctcatcaacacacaacgcgcaactcacaccacaaataccccgcctctcgacgaatctctatcacccaacacgcgaacgacattcccccattaatctatacaccataaaacgcgccgcgaccgacgaccacgaactcaacccacacatctcatacatcactatcttctacactccttttttcgcgaaccccccttaaaatctacgcaacaactcgcacacacgtaaatattataaaatttcccgaacaacgaaaacgtatacttccccatccgtaaaa

SEQ ID NO: 2303 - DNA, 571 bp, Artificial Sequence
  chemically treated genomic DNA (Homo sapiens) CpG-island No: 2303
taagacgagttagtacgtatattcgattgttgatttgatacgcgtattaggtttttttattcgtatttatttttagtattttcgttattttatcgtattatcgttttatacgatagtacgtatttttacgaatatattaagtattgttttcgacgttgagatattagttatatttattttattttttagtattttattatttttatttagagttcgtttagttcgtacgtttttatatttttatattttttattaatatatatttatttttattatattgattattgtttttcgtttattaatatatagcgcgtaatttatattatagatatttcgtttttcgacgaatttttattatttagtacgcgggcggtatttttttattgatttatgtattataaaacgcgtcgcggtcggcggttacgagtttaatttatatattttatgtattattattttttatattttttttttcgcgggttttttttagagtttacgtaataattcgtatatacgtgggtgttgtgggatttttcgaatagcgaaggcgtatatttttttattcgtgaga

SEQ ID NO: 2304 - DNA, 571 bp, Artificial Sequence
  chemically treated genomic DNA (Homo sapiens) CpG-island No: 2304
tctcacgaataaaaaaatatacgccttcgctattcgaaaaatcccacaacacccacgtatatacgaattattacgtaaactctaaaaaaaacccgcgaaaaaaaaaatataaaaaataataatacataaaatatataaattaaactcgtaaccgccgaccgcgacgcgttttataatacataaatcaataaaaaaataccgcccgcgtactaaataataaaaattcgtcgaaaaacgaaatatctataatataaattacgcgctatatattaataaacgaaaaacaataatcaatataataaaaataaatatatattaataaaaaatataaaaatataaaaacgtacgaactaaacgaactctaaataaaaataataaaatactaaaaaataaaataaatataactaatatctcaacgtcgaaaacaatacttaatatattcgtaaaaatacgtactatcgtataaaacgataatacgataaaataacgaaaatactaaaaataaatacgaataaaaaaacctaatacgcgtatcaaatcaacaatcgaatatacgtactaactcgtctta

SEQ ID NO: 2305 - DNA, 724 bp, Artificial Sequence
  chemically treated genomic DNA (Homo sapiens) CpG-island No: 2305
gtagtcggcgcgttgaagtttgtatttcgtcgggggcgtcggggggcgagaagttgttggcgggaggttgttgatagtttcgttgagagggttgagtaggtttttttttaatagagtatagatggtttcgtgtggggtcgcgtcgtaggtgtcgttcgtttgtgcgcggcgcgtggcgagatagtagtttttttcggcgaggcggcgttgatgtggagtaagtgtgtggttttttttttcgttgtgtgtgatacgtttttgtttattacgagcgagagtatttacgagtcgcgtttgagttgtgtttttaaaagtggttgattcgtgagtgcgcgtgcgataggtaggtattacggttagtgttgttttttttcgaagtgtgtgtttagcggggttttgcggcgtaacgtttgcgttgagttgtgagtgtcgtgaagtacggacgtttggtcgtgtgtgatgtttttgatttgtggagacggagtagtttttgtgacgcgcgcgttgcgtcgagtatgatcgtcgtgtattgagcgtatgttcgttttatcgtttgtcgtgtttgtgtatgagttgtcgatgtgcgtcgaggtcgtacgtgtgtcgtagtcgtgtgagtttatcgcgtagtggttgttcgatcgttagatcgtgtttatcgtgttgttcgttgttgtgatgatgttaaagttcgatcgatcgtacgtgatacggtttatcgagg

SEQ ID NO: 2306 - DNA, 724 bp, Artificial Sequence
  chemically treated genomic DNA (Homo sapiens) CpG-island No: 2306
cctcgataaaccgtatcacgtacgatcgatcgaactttaacatcatcacaacaacgaacaacacgataaacacgatctaacgatcgaacaaccactacgcgataaactcacacgactacgacacacgtacgacctcgacgcacatcgacaactcatacacaaacacgacaaacgataaaacgaacatacgctcaatacacgacgatcatactcgacgcaacgcgcgcgtcacaaaaactactccgtctccacaaatcaaaaacatcacacacgaccaaacgtccgtacttcacgacactcacaactcaacgcaaacgttacgccgcaaaaccccgctaaacacacacttcgaaaaaaaacaacactaaccgtaatacctacctatcgcacgcgcactcacgaatcaaccacttttaaaaacacaactcaaacgcgactcgtaaatactctcgctcgtaataaacaaaaacgtatcacacacaacgaaaaaaaaaaccacacacttactccacatcaacgccgcctcgccgaaaaaaactactatctcgccacgcgccgcgcacaaacgaacgacacctacgacgcgaccccacacgaaaccatctatactctattaaaaaaaaacctactcaaccctctcaacgaaactatcaacaacctcccgccaacaacttctcgccccccgacgcccccgacgaaatacaaacttcaacgcgccgactac

SEQ ID NO: 2307 - DNA, 724 bp, Artificial Sequence
  chemically treated genomic DNA (Homo sapiens) CpG-island No: 2307
tttcgatgagtcgtattacgtgcgatcggtcgagttttagtattattataatagcgaatagtacggtagatacgatttgacggtcggataattattacgcgatgaatttatacgattgcgatatacgtgcggtttcgacgtatatcgataatttatatatagatacgatagacgatgagacgaatatgcgtttagtatacgacgattatattcgacgtagcgcgcgcgttataaaagttgtttcgtttttatagattagaagtattatatacgattaggcgttcgtgttttacgatatttataatttaacgtagacgttgcgtcgtagagtttcgttgagtatatatttcgagagagagtaatattaatcgtgatgtttatttatcgtacgcgtatttacgagttagttatttttagaaatatagtttaggcgcgattcgtgagtgttttcgttcgtggtagataagagcgtgttatatatagcgggagaaggggttatatatttgttttatattagcgtcgtttcgtcggagaggattattgtttcgttacgcgtcgcgtatagacgggcggtatttgcggcgcggttttatacggagttatttgtgttttattggaaggagatttgtttagtttttttagcggagttgttaataatttttcgttaatagtttttcgtttttcggcgttttcgacgaggtgtaggttttagcgcgtcgattgt

SEQ ID NO: 2308 - DNA, 724 bp, Artificial Sequence
  chemically treated genomic DNA (Homo sapiens) CpG-island No: 2308
acaatcgacgcgctaaaacctacacctcgtcgaaaacgccgaaaaacgaaaaactattaacgaaaaattattaacaactccgctaaaaaaactaaacaaatctccttccaataaaacacaaataactccgtataaaaccgcgccgcaaataccgcccgtctatacgcgacgcgtaacgaaacaataatcctctccgacgaaacgacgctaatataaaacaaatatataaccccttctcccgctatatataacacgctcttatctaccacgaacgaaaacactcacgaatcgcgcctaaactatatttctaaaaataactaactcgtaaatacgcgtacgataaataaacatcacgattaatattactctctctcgaaatatatactcaacgaaactctacgacgcaacgtctacgttaaattataaatatcgtaaaacacgaacgcctaatcgtatataatacttctaatctataaaaacgaaacaacttttataacgcgcgcgctacgtcgaatataatcgtcgtatactaaacgcatattcgtctcatcgtctatcgtatctatatataaattatcgatatacgtcgaaaccgcacgtatatcgcaatcgtataaattcatcgcgtaataattatccgaccgtcaaatcgtatctaccgtactattcgctattataataatactaaaactcgaccgatcgcacgtaatacgactcatcgaaa

SEQ ID NO: 2309 - DNA, 1372 bp, Artificial Sequence
  chemically treated genomic DNA (Homo sapiens) CpG-island No: 2309
gataaacgtatcgagaattcgcgagtacgattttagtagcgaacgttttcgcggtagtttgtgttcggtttatagttattttggttaaataattggagtttcgtatttcggaagtagcggcggtagttggagaaagtttttttttttattaatttcgagttcgggagagaatcgggagtcggcggaattattttttttcgggatagatttcggaggtgttagttatagtaacgtcgtttttaggtcggttttttatttaggttttatcgcgattttcgtcgtagaggtgtaggtatttaagtttcgcgttcgaaggggtttcgcgcgtttgcggttttagttttagtcggggtcgcgtcggggagcgcgtggggagcggcggtaagtagtatgggttagatacgttgtcgagtttcggttcgtttagtcgttcgtagttagagaggtaggagttcggtcgagcgtttttttcgcgcgggtcgggttgggggcggttagtagttttttcgatcgcggcgtcgtcgtcgtcgtttgtcggtttttttttttcgcgttcgtcgaagtttaggtgtcgaggggggcggggcgggttagggttttcgcgtggcgcgtcgcgtcgagtaatagggcgttttcggtcggttcggcgcgcggcgcgatcgttattcgagcggcgtgggggtttagttaatttatcggttcgtattttagtcgttttcgcgtcgtcgttgtcgtcgttttcggtcgtttttcgtcgtcgttgtttttttttagttataggcgtcgtcgagtagttttatttgtaaattcgtggttcgtagttgagaattggaaatgcgttttttattgtttttcgttttttttttttttttttttttttttcgttttttattttgttttagtttcggtcgttttcgtcgttgttttcgcgcgcgtagttagtcgcgttttagtcgttttttttttttttttttttttttttttttttttttagtcgtcgtcgtcgtcgtcgtttgggcgcgtttttagtcggtttcgcgcgtgcgtcggacgtcggggagcgcgcgttcgggcgcgaggaggtgttatcgttttcggaaagtcgggtttcgtttttttcgtcgcggttgggcgtttaggtggagtttttttttagtttttgagcgtttagattgattgcgttttgcgttcggtcggttcgttttaggggtttcggatttgcgttcgcgagagagggttggtcggatttagttttcgtcgggttttttgggtcgaagtcgtagttgtttgttagtatttacgggtgggtaagatatttttcggggtataaaataggtttcgttttgatttttttgagagttttatatttaag

SEQ ID NO: 2310 - DNA, 1372 bp, Artificial Sequence
  chemically treated genomic DNA (Homo sapiens) CpG-island No: 2310
cttaaatataaaactctcaaaaaaatcaaaacgaaacctattttataccccgaaaaatatcttacccacccgtaaatactaacaaacaactacgacttcgacccaaaaaacccgacgaaaactaaatccgaccaaccctctctcgcgaacgcaaatccgaaacccctaaaacgaaccgaccgaacgcaaaacgcaatcaatctaaacgctcaaaaactaaaaaaaaactccacctaaacgcccaaccgcgacgaaaaaaacgaaacccgactttccgaaaacgataacacctcctcgcgcccgaacgcgcgctccccgacgtccgacgcacgcgcgaaaccgactaaaaacgcgcccaaacgacgacgacgacgacgactaaaaaaaaaaaaaaaaaaaaaaaaaaaaaaaaaaaacgactaaaacgcgactaactacgcgcgcgaaaacaacgacgaaaacgaccgaaactaaaacaaaataaaaaacgaaaaaaaaaaaaaaaaaaaaaaaaaacgaaaaacaataaaaaacgcatttccaattctcaactacgaaccacgaatttacaaataaaactactcgacgacgcctataactaaaaaaaaacaacgacgacgaaaaacgaccgaaaacgacgacaacgacgacgcgaaaacgactaaaatacgaaccgataaattaactaaacccccacgccgctcgaataacgatcgcgccgcgcgccgaaccgaccgaaaacgccctattactcgacgcgacgcgccacgcgaaaaccctaacccgccccgcccccctcgacacctaaacttcgacgaacgcgaaaaaaaaaaaccgacaaacgacgacgacgacgccgcgatcgaaaaaactactaaccgcccccaacccgacccgcgcgaaaaaaacgctcgaccgaactcctacctctctaactacgaacgactaaacgaaccgaaactcgacaacgtatctaacccatactacttaccgccgctccccacgcgctccccgacgcgaccccgactaaaactaaaaccgcaaacgcgcgaaaccccttcgaacgcgaaacttaaatacctacacctctacgacgaaaatcgcgataaaacctaaataaaaaaccgacctaaaaacgacgttactataactaacacctccgaaatctatcccgaaaaaaaataattccgccgactcccgattctctcccgaactcgaaattaataaaaaaaaaaactttctccaactaccgccgctacttccgaaatacgaaactccaattatttaaccaaaataactataaaccgaacacaaactaccgcgaaaacgttcgctactaaaatcgtactcgcgaattctcgatacgtttatc

SEQ ID NO: 2311 - DNA, 1372 bp, Artificial Sequence
  chemically treated genomic DNA (Homo sapiens) CpG-island No: 2311
tttgaatgtaaaatttttagaaaggttagggcggagtttgttttatgtttcgaggagtattttgtttattcgtaaatgttgatagatagttgcgatttcggtttaggagattcggcggggattgggttcgattagttttttttcgcgggcgtaggttcgggatttttgaagcgagtcggtcgggcgtagagcgtagttagtttgggcgtttagaagttgggagggggttttatttgggcgtttagtcgcggcgggaggggcggggttcggtttttcggaggcggtggtattttttcgcgttcgagcgcgcgtttttcgacgttcggcgtacgcgcgaggtcggttgggagcgcgtttaagcggcggcggcggcggcggttggaggaggaggaggaggaggaggaggaggaggagggcggttgaggcgcggttggttgcgcgcgcggaggtagcggcgggggcgatcggagttggggtagagtggggagcgagggagggggaggagagagagggaggcggagggtagtgagagacgtatttttagtttttaattacgagttacgagtttgtagatggggttgttcggcggcgtttgtggttgagggagagtagcggcggcggggagcgatcgggagcggcggtagcggcggcgcggaggcggttgaggtgcgagtcggtgagttaattggatttttacgtcgttcgggtaacggtcgcgtcgcgcgtcgggtcggtcgggggcgttttgttgttcggcgcggcgcgttacgcggggattttggttcgtttcgtttttttcggtatttgggtttcggcgggcgcggggaagagggatcggtaggcggcggcggcggcgtcgcggtcggggaggttgttggtcgtttttagttcggttcgcgcggaaggggcgttcggtcgggtttttgtttttttggttgcgggcggttgggcgggtcggagttcggtaacgtgtttggtttatgttgtttgtcgtcgttttttacgcgtttttcggcgcggtttcgattggggttagggtcgtagacgcgcggggttttttcgggcgcggggtttgggtgtttatatttttgcggcgggagtcgcggtggagtttgaatggagagtcggtttgggggcggcgttgttgtgattgatattttcggggtttgtttcgagagggggtgatttcgtcggttttcggttttttttcgagttcggagttggtaggggaggaggttttttttaattatcgtcgttattttcgaggtacgagattttagttgtttggttaaagtggttgtgggtcgagtataggttgtcgcgggggcgttcgttgttgagatcgtgttcgcggattttcggtacgtttgtt

SEQ ID NO: 2312 - DNA, 1372 bp, Artificial Sequence
  chemically treated genomic DNA (Homo sapiens) CpG-island No: 2312
aacaaacgtaccgaaaatccgcgaacacgatctcaacaacgaacgcccccgcgacaacctatactcgacccacaaccactttaaccaaacaactaaaatctcgtacctcgaaaataacgacgataattaaaaaaaacctcctcccctaccaactccgaactcgaaaaaaaaccgaaaaccgacgaaatcaccccctctcgaaacaaaccccgaaaatatcaatcacaacaacgccgcccccaaaccgactctccattcaaactccaccgcgactcccgccgcaaaaatataaacacccaaaccccgcgcccgaaaaaaccccgcgcgtctacgaccctaaccccaatcgaaaccgcgccgaaaaacgcgtaaaaaacgacgacaaacaacataaaccaaacacgttaccgaactccgacccgcccaaccgcccgcaaccaaaaaaacaaaaacccgaccgaacgccccttccgcgcgaaccgaactaaaaacgaccaacaacctccccgaccgcgacgccgccgccgccgcctaccgatccctcttccccgcgcccgccgaaacccaaataccgaaaaaaacgaaacgaaccaaaatccccgcgtaacgcgccgcgccgaacaacaaaacgcccccgaccgacccgacgcgcgacgcgaccgttacccgaacgacgtaaaaatccaattaactcaccgactcgcacctcaaccgcctccgcgccgccgctaccgccgctcccgatcgctccccgccgccgctactctccctcaaccacaaacgccgccgaacaaccccatctacaaactcgtaactcgtaattaaaaactaaaaatacgtctctcactaccctccgcctccctctctctcctccccctccctcgctccccactctaccccaactccgatcgcccccgccgctacctccgcgcgcgcaaccaaccgcgcctcaaccgccctcctcctcctcctcctcctcctcctcctcctccaaccgccgccgccgccgccgcttaaacgcgctcccaaccgacctcgcgcgtacgccgaacgtcgaaaaacgcgcgctcgaacgcgaaaaaataccaccgcctccgaaaaaccgaaccccgcccctcccgccgcgactaaacgcccaaataaaaccccctcccaacttctaaacgcccaaactaactacgctctacgcccgaccgactcgcttcaaaaatcccgaacctacgcccgcgaaaaaaaactaatcgaacccaatccccgccgaatctcctaaaccgaaatcgcaactatctatcaacatttacgaataaacaaaatactcctcgaaacataaaacaaactccgccctaacctttctaaaaattttacattcaaa

SEQ ID NO: 2313 - DNA, 900 bp, Artificial Sequence
  chemically treated genomic DNA (Homo sapiens) CpG-island No: 2313
cgacgagcgcggaggatcgggaggttttcgggtttgcgtgggtaaggttttgggtttttatcgggtacggtttatgcgtttcggggataggggtggttgtgcggtgtcgcggcggtcggcggggttttttttttagtaggggtggggacgttgagttacggatttgttatcgttttgtattttttcgagttttcgggggttaaagtaaaagcgaaagcgaatgcgattggcggggcggtaggttttagagtagcgttcgttattttttttcggtttgggtagcgttcgttcggggagtttagcggtgttttgtggagttgtcgttatggtttcgcggcgggcgcgcggttgtcggattttcggtttttcggcgttgttattgttgttgttgtttcggtcgtcggcgacgcggggtagggagttgggagtaggggcgttcgggcgggatttggaagggggtcgggacgtggagttggagggaatcgggcgttttattttttcgggtcgtgcgggggcgtcggtgttttcgggagcgcggtgcgcgtaggtttaggtcggggaggggacgcggcgtcgggtaggagggatacgtgtcgggagtcggggtcgtagggagagcgtcgtcgttgcgttcgggttatttacgtaagggagcgggcggtttggttggggttttcgaggtcgaggttaggagtagttttgagaagttcgttttggttacgggagcgcggagtcggcggcgtttagtagtttggagatacgggcgagtgcgttttttttaggcgtttggattgtagggcgggtgttgtatagtacgcggttttcggaggggttcgggagaaattatttttttcgatttttaggtaaaagtaaattatgttagtgggagttgggagggtg

SEQ ID NO: 2314 - DNA, 900 bp, Artificial Sequence
  chemically treated genomic DNA (Homo sapiens) CpG-island No: 2314
caccctcccaactcccactaacataatttacttttacctaaaaatcgaaaaaaataatttctcccgaacccctccgaaaaccgcgtactatacaacacccgccctacaatccaaacgcctaaaaaaaacgcactcgcccgtatctccaaactactaaacgccgccgactccgcgctcccgtaaccaaaacgaacttctcaaaactactcctaacctcgacctcgaaaaccccaaccaaaccgcccgctcccttacgtaaataacccgaacgcaacgacgacgctctccctacgaccccgactcccgacacgtatccctcctacccgacgccgcgtcccctccccgacctaaacctacgcgcaccgcgctcccgaaaacaccgacgcccccgcacgacccgaaaaaataaaacgcccgattccctccaactccacgtcccgacccccttccaaatcccgcccgaacgcccctactcccaactccctaccccgcgtcgccgacgaccgaaacaacaacaacaataacaacgccgaaaaaccgaaaatccgacaaccgcgcgcccgccgcgaaaccataacgacaactccacaaaacaccgctaaactccccgaacgaacgctacccaaaccgaaaaaaaataacgaacgctactctaaaacctaccgccccgccaatcgcattcgctttcgcttttactttaacccccgaaaactcgaaaaaatacaaaacgataacaaatccgtaactcaacgtccccacccctactaaaaaaaaaaccccgccgaccgccgcgacaccgcacaaccacccctatccccgaaacgcataaaccgtacccgataaaaacccaaaaccttacccacgcaaacccgaaaacctcccgatcctccgcgctcgtcg

SEQ ID NO: 2315 - DNA, 900 bp, Artificial Sequence
  chemically treated genomic DNA (Homo sapiens) CpG-island No: 2315
tatttttttagtttttattgatataatttatttttgtttgggagtcgggaggagtagtttttttcggattttttcgaggatcgcgtgttatgtaatattcgttttgtagtttaggcgtttgggagaagcgtattcgttcgtgtttttaaattgttggacgtcgtcggtttcgcgttttcgtggttaaaacgggttttttagaattgtttttgatttcggtttcggagattttagttaggtcgttcgtttttttacgtgggtgattcgggcgtagcggcggcgttttttttgcgatttcggttttcggtacgtgttttttttgttcggcgtcgcgtttttttttcggtttgggtttgcgcgtatcgcgttttcgagggtatcgacgttttcgtacggttcggggagatggggcgttcggttttttttagttttacgtttcggtttttttttaagtttcgttcgggcgtttttgtttttagttttttatttcgcgtcgtcggcggtcggagtagtagtagtagtagtagcgtcgggagatcgagggttcggtagtcgcgcgttcgtcgcggggttatggcggtagttttataggatatcgttggatttttcgggcgagcgttgtttaggtcggggggaggtggcgagcgttgttttgggatttgtcgtttcgttagtcgtattcgttttcgtttttgttttggttttcgagggttcggagaggtgtaaagcggtgatagattcgtgatttagcgtttttatttttgttggggaaggagtttcgtcggtcgtcgcggtatcgtatagttatttttgttttcgggacgtatgggtcgtgttcggtggggatttaggattttatttacgtaagttcgggagtttttcggtttttcgcgttcgtcg

SEQ ID NO: 2316 - DNA, 900 bp, Artificial Sequence
  chemically treated genomic DNA (Homo sapiens) CpG-island No: 2316
cgacgaacgcgaaaaaccgaaaaactcccgaacttacgtaaataaaatcctaaatccccaccgaacacgacccatacgtcccgaaaacaaaaataactatacgataccgcgacgaccgacgaaactccttccccaacaaaaataaaaacgctaaatcacgaatctatcaccgctttacacctctccgaaccctcgaaaaccaaaacaaaaacgaaaacgaatacgactaacgaaacgacaaatcccaaaacaacgctcgccacctccccccgacctaaacaacgctcgcccgaaaaatccaacgatatcctataaaactaccgccataaccccgcgacgaacgcgcgactaccgaaccctcgatctcccgacgctactactactactactactccgaccgccgacgacgcgaaataaaaaactaaaaacaaaaacgcccgaacgaaacttaaaaaaaaaccgaaacgtaaaactaaaaaaaaccgaacgccccatctccccgaaccgtacgaaaacgtcgataccctcgaaaacgcgatacgcgcaaacccaaaccgaaaaaaaaacgcgacgccgaacaaaaaaaacacgtaccgaaaaccgaaatcgcaaaaaaaacgccgccgctacgcccgaatcacccacgtaaaaaaacgaacgacctaactaaaatctccgaaaccgaaatcaaaaacaattctaaaaaacccgttttaaccacgaaaacgcgaaaccgacgacgtccaacaatttaaaaacacgaacgaatacgcttctcccaaacgcctaaactacaaaacgaatattacataacacgcgatcctcgaaaaaatccgaaaaaaactactcctcccgactcccaaacaaaaataaattatatcaataaaaactaaaaaaata

SEQ ID NO: 2317 - DNA, 581 bp, Artificial Sequence
  chemically treated genomic DNA (Homo sapiens) CpG-island No: 2317
aggcgtcgcgggttttcgggttgggttatcgttcgggtcgggtcgggttgcgcggggaggcgtcgggcgggatatcgtgcggtcgggtagggagaagtcgagggcgagtgggatttttcgtttttttacgtaatttgtttcgcgcgtttcgaattcggtagaatcgttttttacgttttcggttttgttttcggtagagtcgtttttttaaattttcggtttagttcgtaggcgggttgtttttttatagtttcggtttgtttcgcgtgggagaagtcgcggtttcgggtacggggcggtttttttttagggacggagcggttcgggatgagtacggaggggtttggggattcgagagcgttggcgttcgtcgttttggagttgtagcggttcgtacgtgattcgggattgaatacgtaagggagtggggcgcgtcgttatatcgtaaagttttaaagtggagggttcgggagggcgcgtatagtttcgttcggcgtcgtgtagggtggtttttgaggtagttaggtttaagcgtgatttgtttcgtacgcgtttttagggtcgttttagtttttagtttt

SEQ ID NO: 2318 - DNA, 581 bp, Artificial Sequence
  chemically treated genomic DNA (Homo sapiens) CpG-island No: 2318
aaaactaaaaactaaaacgaccctaaaaacgcgtacgaaacaaatcacgcttaaacctaactacctcaaaaaccaccctacacgacgccgaacgaaactatacgcgccctcccgaaccctccactttaaaactttacgatataacgacgcgccccactcccttacgtattcaatcccgaatcacgtacgaaccgctacaactccaaaacgacgaacgccaacgctctcgaatccccaaacccctccgtactcatcccgaaccgctccgtccctaaaaaaaaaccgccccgtacccgaaaccgcgacttctcccacgcgaaacaaaccgaaactataaaaaaacaacccgcctacgaactaaaccgaaaatttaaaaaaacgactctaccgaaaacaaaaccgaaaacgtaaaaaacgattctaccgaattcgaaacgcgcgaaacaaattacgtaaaaaaacgaaaaatcccactcgccctcgacttctccctacccgaccgcacgatatcccgcccgacgcctccccgcgcaacccgacccgacccgaacgataacccaacccgaaaacccgcgacgcct

SEQ ID NO: 2319 - DNA, 581 bp, Artificial Sequence
  chemically treated genomic DNA (Homo sapiens) CpG-island No: 2319
ggggttggaggttggggcggttttgaggacgcgtgcggggtaggttacgtttgggtttggttgttttaggagttattttgtacggcgtcgggcgaggttgtgcgcgttttttcggattttttattttggggttttgcggtgtagcggcgcgttttatttttttacgtgtttagtttcgaattacgtacgggtcgttgtagttttaggacggcggacgttagcgttttcggatttttaggttttttcgtgtttatttcggatcgtttcgtttttgaggaaaaatcgtttcgtgttcggaatcgcggttttttttacgcggggtaggtcggggttgtgagggggtagttcgtttgcggattaggtcgggggtttgaggaggcggttttgtcggggataaagtcgggggcgtgaggggcggttttgtcgggttcggggcgcgcggggtaagttgcgtgaagaggcggaaagttttattcgttttcggtttttttttgttcggtcgtacggtgtttcgttcggcgttttttcgcgtagttcggttcgattcgggcgatggtttagttcggggattcgcggcgttt

SEQ ID NO: 2320 - DNA, 581 bp, Artificial Sequence
  chemically treated genomic DNA (Homo sapiens) CpG-island No: 2320
aaacgccgcgaatccccgaactaaaccatcgcccgaatcgaaccgaactacgcgaaaaaacgccgaacgaaacaccgtacgaccgaacaaaaaaaaaccgaaaacgaataaaactttccgcctcttcacgcaacttaccccgcgcgccccgaacccgacaaaaccgcccctcacgcccccgactttatccccgacaaaaccgcctcctcaaacccccgacctaatccgcaaacgaactaccccctcacaaccccgacctaccccgcgtaaaaaaaaccgcgattccgaacacgaaacgatttttcctcaaaaacgaaacgatccgaaataaacacgaaaaaacctaaaaatccgaaaacgctaacgtccgccgtcctaaaactacaacgacccgtacgtaattcgaaactaaacacgtaaaaaaataaaacgcgccgctacaccgcaaaaccccaaaataaaaaatccgaaaaaacgcgcacaacctcgcccgacgccgtacaaaataactcctaaaacaaccaaacccaaacgtaacctaccccgcacgcgtcctcaaaaccgccccaacctccaacccc

SEQ ID NO: 2321 - DNA, 831 bp, Artificial Sequence
  chemically treated genomic DNA (Homo sapiens) CpG-island No: 2321
tcgttttcgtttttcgatcgtcgttgtttcgcggggattcggggagttcgaaggaattttgggaaagtttttcgtttcgtttcggttcgagcggaagcgcggatggggcgtggttcggtagttgtggtcgcgtttttatcgattgcgtatttcgattggcgttagtggtcgttcgttagtacgtttttttcggtttcgcgtttcgattggtcgcgggggtcgttagttcggtttcggcggcgggcgtttttcggggttgcggcggggcggagttcgcggaggaagtcggcgggcgtttcgggttttaggtttcggttagaggaggagttcgttgtcgggggacgttgggttgagcggtcggcggcgcgggttcggcggcggcggtagcggggttcgggttcggagcgttatagtgcgtgaggtcgtagacgtggtagggagtgtgggaggggtttcgtcgtgtggaaaatttaattttcggggttttgcgcggggggttcgggttcggggtggggtagcgggggtttcgggggcgcgaggttgggttcgggtaagcgcgggcgtgggggttcggtcgttcgggtcgtgggtaggtggagggcgcggcgggggtgcgcgggggaggttagggcgtttattgaattcggtcgggagcggttttcgcgttgtttttcgaggttaggaaggcgtagcgtgtgggttttcggggttgaaggggtaagcgcggggacgtggtttcggttgttaggaggttaggttttttcgtttattttgacgttttgattttgggtaagttatttttcgttgttttttgtttttgtgttatcggta

SEQ ID NO: 2322 - DNA, 831 bp, Artificial Sequence
  chemically treated genomic DNA (Homo sapiens) CpG-island No: 2322
taccgataacacaaaaacaaaaaacaacgaaaaataacttacccaaaatcaaaacgtcaaaataaacgaaaaaacctaacctcctaacaaccgaaaccacgtccccgcgcttaccccttcaaccccgaaaacccacacgctacgccttcctaacctcgaaaaacaacgcgaaaaccgctcccgaccgaattcaataaacgccctaacctcccccgcgcacccccgccgcgccctccacctacccacgacccgaacgaccgaacccccacgcccgcgcttacccgaacccaacctcgcgcccccgaaacccccgctaccccaccccgaacccgaaccccccgcgcaaaaccccgaaaattaaattttccacacgacgaaacccctcccacactccctaccacgtctacgacctcacgcactataacgctccgaacccgaaccccgctaccgccgccgccgaacccgcgccgccgaccgctcaacccaacgtcccccgacaacgaactcctcctctaaccgaaacctaaaacccgaaacgcccgccgacttcctccgcgaactccgccccgccgcaaccccgaaaaacgcccgccgccgaaaccgaactaacgacccccgcgaccaatcgaaacgcgaaaccgaaaaaaacgtactaacgaacgaccactaacgccaatcgaaatacgcaatcgataaaaacgcgaccacaactaccgaaccacgccccatccgcgcttccgctcgaaccgaaacgaaacgaaaaactttcccaaaattccttcgaactccccgaatccccgcgaaacaacgacgatcgaaaaacgaaaacga

SEQ ID NO: 2323 - DNA, 831 bp, Artificial Sequence
  chemically treated genomic DNA (Homo sapiens) CpG-island No: 2323
tatcgatgatataggggtagagggtagcgaaaaatgatttgtttaaggttaaaacgttagagtagacgggaaagtttggttttttagtagtcgaggttacgttttcgcgtttgtttttttagtttcgaggatttatacgttgcgtttttttggtttcggggggtagcgcgggggtcgttttcgatcgagtttagtgagcgttttggtttttttcgcgtattttcgtcgcgttttttatttgtttacggttcggacggtcgagtttttacgttcgcgtttgttcgagtttagtttcgcgttttcggggttttcgttgttttatttcgggttcggatttttcgcgtaggatttcggaggttaagttttttatacggcggagttttttttatattttttgttacgtttgcggttttacgtattgtggcgtttcggattcggatttcgttgtcgtcgtcgtcgggttcgcgtcgtcggtcgtttagtttagcgtttttcggtagcgagttttttttttggtcgggatttggagttcgagacgttcgtcgatttttttcgcgagtttcgtttcgtcgtagtttcgggaagcgttcgtcgtcggagtcggattgacggttttcgcgattaatcgggacgcgagatcggagggggcgtgttgacggacggttattaacgttaatcgaaatgcgtaatcggtgggggcgcggttatagttatcgggttacgttttattcgcgttttcgttcgggtcggggcggagcgggaaatttttttagagttttttcgagtttttcgagttttcgcggagtagcggcggtcgaggggcggggacgg

SEQ ID NO: 2324 - DNA, 831 bp, Artificial Sequence
  chemically treated genomic DNA (Homo sapiens) CpG-island No: 2324
ccgtccccgcccctcgaccgccgctactccgcgaaaactcgaaaaactcgaaaaaactctaaaaaaatttcccgctccgccccgacccgaacgaaaacgcgaataaaacgtaacccgataactataaccgcgcccccaccgattacgcatttcgattaacgttaataaccgtccgtcaacacgccccctccgatctcgcgtcccgattaatcgcgaaaaccgtcaatccgactccgacgacgaacgcttcccgaaactacgacgaaacgaaactcgcgaaaaaaatcgacgaacgtctcgaactccaaatcccgaccaaaaaaaaaactcgctaccgaaaaacgctaaactaaacgaccgacgacgcgaacccgacgacgacgacaacgaaatccgaatccgaaacgccacaatacgtaaaaccgcaaacgtaacaaaaaatataaaaaaaactccgccgtataaaaaacttaacctccgaaatcctacgcgaaaaatccgaacccgaaataaaacaacgaaaaccccgaaaacgcgaaactaaactcgaacaaacgcgaacgtaaaaactcgaccgtccgaaccgtaaacaaataaaaaacgcgacgaaaatacgcgaaaaaaaccaaaacgctcactaaactcgatcgaaaacgacccccgcgctaccccccgaaaccaaaaaaacgcaacgtataaatcctcgaaactaaaaaaacaaacgcgaaaacgtaacctcgactactaaaaaaccaaactttcccgtctactctaacgttttaaccttaaacaaatcatttttcgctaccctctacccctatatcatcgata

SEQ ID NO: 2325 - DNA, 629 bp, Artificial Sequence
  chemically treated genomic DNA (Homo sapiens) CpG-island No: 2325
tggtgcgaaagtcgtagaatagaagtgtggacgatttgtagaggatgggacgtcgattgtgagagagggtggagatgcgtggttgagagaagaggttgcggagaggggtcggagcgttagagtcgtggtgcgcggtggagaaggagttgagtgtagaggtagagacgggtgggagagattgttgagggcgagggagacgtgttttggcgtgtcgcggagtggtgaggaggtaggggtataaaaaggatgtttgtagaagaggcgtttgtgaaagatagagggatgtggggtgagagcgatgggagggatgtgggggggatggtggaagagttgttatgtggtaagttgtgggaggatatggttgggcgtaggcgcggggatgggagtagttagtagttggtgttgagcgggatgaagagagggaggagatgagggtgaagtggtagcggcgagagtgtttggtgggggagcggaggagtgcgagtgggcggcggaggagaggaggatgaaggggaaggggatcgagagaggattggtggagtagagaggacgagagatacgaagagaggatggcgaggagtggatagggagggaagagacgagggcgtaggggagaggagcgagttagg

SEQ ID NO: 2326 - DNA, 629 bp, Artificial Sequence
  chemically treated genomic DNA (Homo sapiens) CpG-island No: 2326
cctaactcgctcctctcccctacgccctcgtctcttccctccctatccactcctcgccatcctctcttcgtatctctcgtcctctctactccaccaatcctctctcgatccccttccccttcatcctcctctcctccgccgcccactcgcactcctccgctcccccaccaaacactctcgccgctaccacttcaccctcatctcctccctctcttcatcccgctcaacaccaactactaactactcccatccccgcgcctacgcccaaccatatcctcccacaacttaccacataacaactcttccaccatcccccccacatccctcccatcgctctcaccccacatccctctatctttcacaaacgcctcttctacaaacatcctttttatacccctacctcctcaccactccgcgacacgccaaaacacgtctccctcgccctcaacaatctctcccacccgtctctacctctacactcaactccttctccaccgcgcaccacgactctaacgctccgacccctctccgcaacctcttctctcaaccacgcatctccaccctctctcacaatcgacgtcccatcctctacaaatcgtccacacttctattctacgactttcgcacca

SEQ ID NO: 2327 - DNA, 629 bp, Artificial Sequence
  chemically treated genomic DNA (Homo sapiens) CpG-island No: 2327
tttagttcgttttttttttttgcgttttcgttttttttttttttatttatttttcgttatttttttttcgtgtttttcgttttttttattttattagttttttttcgattttttttttttttatttttttttttttcgtcgtttattcgtattttttcgtttttttattaggtattttcgtcgttgttattttatttttattttttttttttttttatttcgtttaatattagttattgattgtttttattttcgcgtttacgtttagttatgtttttttataatttattatataataatttttttattattttttttatattttttttatcgtttttattttatatttttttgttttttataaacgttttttttataaatattttttttgtatttttatttttttattatttcgcggtacgttaaaatacgtttttttcgtttttaatagttttttttattcgtttttgtttttatatttagttttttttttatcgcgtattacgattttaacgtttcgattttttttcgtagtttttttttttaattacgtatttttatttttttttataatcggcgttttattttttataagtcgtttatatttttgttttgcggttttcgtatta

SEQ ID NO: 2328 - DNA, 629 bp, Artificial Sequence
  chemically treated genomic DNA (Homo sapiens) CpG-island No: 2328
taatacgaaaaccgcaaaacaaaaatataaacgacttataaaaaataaaacgccgattataaaaaaaaataaaaatacgtaattaaaaaaaaaaactacgaaaaaaaatcgaaacgttaaaatcgtaatacgcgataaaaaaaaaactaaatataaaaacaaaaacgaataaaaaaaactattaaaaacgaaaaaaacgtattttaacgtaccgcgaaataataaaaaaataaaaatacaaaaaaaatatttataaaaaaaacgtttataaaaaacaaaaaaatataaaataaaaacgataaaaaaaatataaaaaaaataataaaaaaattattatataataaattataaaaaaacataactaaacgtaaacgcgaaaataaaaacaatcaataactaatattaaacgaaataaaaaaaaaaaaaaaataaaaataaaataacaacgacgaaaatacctaataaaaaaacgaaaaaatacgaataaacgacgaaaaaaaaaaaaataaaaaaaaaaaaaatcgaaaaaaaactaataaaataaaaaaaacgaaaaacacgaaaaaaaaataacgaaaaataaataaaaaaaaaaaaaacgaaaacgcaaaaaaaaaaaacgaactaaa

SEQ ID NO: 2329 - DNA, 515 bp, Artificial Sequence
  chemically treated genomic DNA (Homo sapiens) CpG-island No: 2329
cgtatagcgacggtcggcgttaggtcgtcgaggatatatacgggttaggtttaggtttcgtcgttttttcgttttcgttattatttttcgttcggtttttttggttttagcgtcgtcggtttcggggtttacgttcgggggtttcggttcgagtttttattcggttcgcgtgaattttgggtcgtatagttttcgttcgtttaggtgttggttcgggtagttagcgtttagtttcgtagattcggtgattttcgtttattagaggttaaagtttgggaacgagagtaagcgatgatttgaagaggcgtaggaagttagggtagtgcggaggtggcgcgtatgtgtaagtacgtacgcgcgaatacgtacgtagggagaggtgtatacgcgtaggagtgtatcggaagttcgtttttcgggatatttattatcggttttaggataagtaacggattttattttttatgagtttatgcgttttttaagtttaggggtcgttttaaatgtttttattt

SEQ ID NO: 2330 - DNA, 515 bp, Artificial Sequence
  chemically treated genomic DNA (Homo sapiens) CpG-island No: 2330
aaataaaaacatttaaaacgacccctaaacttaaaaaacgcataaactcataaaaaataaaatccgttacttatcctaaaaccgataataaatatcccgaaaaacgaacttccgatacactcctacgcgtatacacctctccctacgtacgtattcgcgcgtacgtacttacacatacgcgccacctccgcactaccctaacttcctacgcctcttcaaatcatcgcttactctcgttcccaaactttaacctctaataaacgaaaatcaccgaatctacgaaactaaacgctaactacccgaaccaacacctaaacgaacgaaaactatacgacccaaaattcacgcgaaccgaataaaaactcgaaccgaaacccccgaacgtaaaccccgaaaccgacgacgctaaaaccaaaaaaaccgaacgaaaaataataacgaaaacgaaaaaacgacgaaacctaaacctaacccgtatatatcctcgacgacctaacgccgaccgtcgctatacg

SEQ ID NO: 2331 - DNA, 515 bp, Artificial Sequence
  chemically treated genomic DNA (Homo sapiens) CpG-island No: 2331
gggtagagatatttaagacggtttttaaatttggggagcgtataggtttatgggaaatagagttcgttatttgttttgggatcggtggtgggtgtttcgggaggcggattttcggtgtatttttgcgcgtgtgtatttttttttgcgtgcgtgttcgcgcgtgcgtgtttgtatatgcgcgttattttcgtattgttttggttttttgcgtttttttaggttatcgtttgttttcgtttttaggttttggtttttagtggacgagaattatcgagtttgcggggttggacgttgattgttcgggttagtatttaggcgggcgggagttgtgcggtttagggtttacgcgggtcgggtagaggttcgagtcgggattttcgagcgtgaatttcggagtcggcggcgttggggttagaggggtcgggcgggaggtggtggcggaggcgaaggggcgacgggatttgggtttggttcgtgtgtgttttcggcggtttggcgtcggtcgtcgttgtacg

SEQ ID NO: 2332 - DNA, 515 bp, Artificial Sequence
  chemically treated genomic DNA (Homo sapiens) CpG-island No: 2332
cgtacaacgacgaccgacgccaaaccgccgaaaacacacacgaaccaaacccaaatcccgtcgccccttcgcctccgccaccacctcccgcccgacccctctaaccccaacgccgccgactccgaaattcacgctcgaaaatcccgactcgaacctctacccgacccgcgtaaaccctaaaccgcacaactcccgcccgcctaaatactaacccgaacaatcaacgtccaaccccgcaaactcgataattctcgtccactaaaaaccaaaacctaaaaacgaaaacaaacgataacctaaaaaaacgcaaaaaaccaaaacaatacgaaaataacgcgcatatacaaacacgcacgcgcgaacacgcacgcaaaaaaaaatacacacgcgcaaaaatacaccgaaaatccgcctcccgaaacacccaccaccgatcccaaaacaaataacgaactctatttcccataaacctatacgctccccaaatttaaaaaccgtcttaaatatctctaccc

SEQ ID NO: 2333 - DNA, 785 bp, Artificial Sequence
  chemically treated genomic DNA (Homo sapiens) CpG-island No: 2333
gagtaggcgtatttttgttattgagtcgagttttcggagttcgcgtcgcgtcgtcggttattatgaagcgtagcgttttttcgcgttgaatgtttattagttttattttggtagttagcgttcgcgatagtttaggcgtcgcgtttatttgtcgcggggttcggcggtgcgcggggtagttgtcgcgtcgggttcgggcgaggcgcgtcggtgttatatgtcgcgtacgtcgtttattacgtataggtttatgttgcgtagcgagaagtttttgcgaacgcgggttttggtggtcgcgtgcgtggatacgtttttcgagtttcgcgagtggtcgtaggcgtcgttttgagtgtagaggtgttcgcgagtttcggttttatggtttttgcgtttacggtcgcgtttcgagtcgtcggtttagttattagtacgcggcgtattttttcgtcgaagacgtttaggaagttggcggcgaagtggcgggagaaggaggcgtcggcgtcgggcgtgtcgtaagttgggttgtttcgtaggaaacggtagaatttgtgcgtaaagtttacggcggtcgtttgcgtatgtagttcgtagaattgtcgttagttcgggatcgggatcgggattgggatcggggcggttgcggcggggttagggtcggtattatttatggttttcgttttatcgtagttatttgcggtttcgggcgagaagagcgcgtagtgatttttaggtttgtgattaatgcgtttatttgttttttttttttagtttttttaggatttttt

SEQ ID NO: 2334 - DNA, 785 bp, Artificial Sequence
  chemically treated genomic DNA (Homo sapiens) CpG-island No: 2334
aaaaaatcctaaaaaaactaaaaaaaaaaaacaaataaacgcattaatcacaaacctaaaaatcactacgcgctcttctcgcccgaaaccgcaaataactacgataaaacgaaaaccataaataataccgaccctaaccccgccgcaaccgccccgatcccaatcccgatcccgatcccgaactaacgacaattctacgaactacatacgcaaacgaccgccgtaaactttacgcacaaattctaccgtttcctacgaaacaacccaacttacgacacgcccgacgccgacgcctccttctcccgccacttcgccgccaacttcctaaacgtcttcgacgaaaaaatacgccgcgtactaataactaaaccgacgactcgaaacgcgaccgtaaacgcaaaaaccataaaaccgaaactcgcgaacacctctacactcaaaacgacgcctacgaccactcgcgaaactcgaaaaacgtatccacgcacgcgaccaccaaaacccgcgttcgcaaaaacttctcgctacgcaacataaacctatacgtaataaacgacgtacgcgacatataacaccgacgcgcctcgcccgaacccgacgcgacaactaccccgcgcaccgccgaaccccgcgacaaataaacgcgacgcctaaactatcgcgaacgctaactaccaaaataaaactaataaacattcaacgcgaaaaaacgctacgcttcataataaccgacgacgcgacgcgaactccgaaaactcgactcaataacaaaaatacgcctactc

SEQ ID NO: 2335 - DNA, 785 bp, Artificial Sequence
  chemically treated genomic DNA (Homo sapiens) CpG-island No: 2335
agagagttttaggggagttggaaggaggggataggtgggcgtattgattataggtttgaaagttattgcgcgtttttttcgttcgaagtcgtaggtggttgcgatgggacggaagttatgaatggtgtcggttttggtttcgtcgtagtcgtttcggttttagtttcggtttcggtttcggattggcggtagttttgcgagttgtatgcgtaggcggtcgtcgtggattttgcgtataagttttgtcgttttttgcgggataatttagtttacgatacgttcgacgtcggcgtttttttttttcgttatttcgtcgttaattttttggacgttttcggcgaggaggtgcgtcgcgtgttggtggttgggtcgacgattcggggcgcggtcgtgagcgtagaggttatggagtcggagttcgcggatatttttgtatttaaggcggcgtttacggttattcgcggagttcggaggacgtgtttacgtacgcggttattaaggttcgcgttcgtaagggtttttcgttgcgtaatatgagtttgtgcgtggtggacggcgtgcgcgatatgtggtatcggcgcgtttcgttcgagttcgacgcggtagttgtttcgcgtatcgtcgagtttcgcgataagtggacgcggcgtttgagttgtcgcggacgttggttgttaaggtggagttggtggatatttaacgcgagggggcgttgcgttttatggtggtcgacgacgcggcgcgggtttcgggggttcggtttagtggtagaagtgcgtttgttt

SEQ ID NO: 2336 - DNA, 785 bp, Artificial Sequence
  chemically treated genomic DNA (Homo sapiens) CpG-island No: 2336
aaacaaacgcacttctaccactaaaccgaacccccgaaacccgcgccgcgtcgtcgaccaccataaaacgcaacgccccctcgcgttaaatatccaccaactccaccttaacaaccaacgtccgcgacaactcaaacgccgcgtccacttatcgcgaaactcgacgatacgcgaaacaactaccgcgtcgaactcgaacgaaacgcgccgataccacatatcgcgcacgccgtccaccacgcacaaactcatattacgcaacgaaaaacccttacgaacgcgaaccttaataaccgcgtacgtaaacacgtcctccgaactccgcgaataaccgtaaacgccgccttaaatacaaaaatatccgcgaactccgactccataacctctacgctcacgaccgcgccccgaatcgtcgacccaaccaccaacacgcgacgcacctcctcgccgaaaacgtccaaaaaattaacgacgaaataacgaaaaaaaaaaacgccgacgtcgaacgtatcgtaaactaaattatcccgcaaaaaacgacaaaacttatacgcaaaatccacgacgaccgcctacgcatacaactcgcaaaactaccgccaatccgaaaccgaaaccgaaactaaaaccgaaacgactacgacgaaaccaaaaccgacaccattcataacttccgtcccatcgcaaccacctacgacttcgaacgaaaaaaacgcgcaataactttcaaacctataatcaatacgcccacctatcccctccttccaactcccctaaaactctct

SEQ ID NO: 2337 - DNA, 1129 bp, Artificial Sequence
  chemically treated genomic DNA (Homo sapiens) CpG-island No: 2337
gcggtttttcgtttcgttcgggatggggatcggggagtagattttagtcgggggcgttttttttttttcgcgcgttttttttttttttattcgcgtatataaagacgatacgcgcggattaaggcgcgtgcggtcgttttttttcgggtagcggtgcgtatatagcgtacgttttcggggatagataggggtttcgggggaaggattagggagcgaggaattgggtataaggaggttatatttataggcgcgtagttgcggtcgagcgggttggggcgtcggttgagcgttgttcggatcgcggtcgggtttttcgggttcggtggtttatggttcgcggcggattgggttttttttttcgtttatcgtttcgaaggtttttgcgttttcgcggtttcggcgcgtttttcgcgcggttttttggtagtcgagtcgcgcgttttaagtttagtttaagtaaggtttttcgtcggagacgcgcgtttcgtttcgtttcgttttcgttttcgtcgcgagtttcgattcgttttttttcgcgcgttttgtttcgttttttttcgtttttatttcgcgtttagttttttttcggttattcgcggagttcgagcggcgcggtggtcggtgtttgttggtttttcgtagttgcggtgtcgagattgttcggttttggggttcggagagaggggttaggagtcggtttcgagtcgttttatttgggcgggggtttttatgtcgtcgagtcggtttaggttaggcgcgggatttttattttttttcgtggaggttatttttcgagttcgcggtggtggtggtttcgggagcgcggagcgtggggtcgggggaatgttttgcgtggcgggtgtatgggacgcggacgttttcgaagcgtttttcgttgacgggtgtttcgcgggagtcgtcgttgtggttagatttttcgtagtagggataatgggagtttggaggaggtttggatgtcgtaacggaggaagtcgacgtttggtttttataaatttcgagggcgttattacgtttttttttgtagtttttcggtgcgggaaatcgttttcgggttatagggcgggacggttttttgagcgtagtgtttttattatttagttttcgttgt

SEQ ID NO: 2338 - DNA, 1129 bp, Artificial Sequence
  chemically treated genomic DNA (Homo sapiens) CpG-island No: 2338
acaacgaaaactaaataataaaaacactacgctcaaaaaaccgtcccgccctataacccgaaaacgatttcccgcaccgaaaaactacaaaaaaaaacgtaataacgccctcgaaatttataaaaaccaaacgtcgacttcctccgttacgacatccaaacctcctccaaactcccattatccctactacgaaaaatctaaccacaacgacgactcccgcgaaacacccgtcaacgaaaaacgcttcgaaaacgtccgcgtcccatacacccgccacgcaaaacattcccccgaccccacgctccgcgctcccgaaaccaccaccaccgcgaactcgaaaaataacctccacgaaaaaaaataaaaatcccgcgcctaacctaaaccgactcgacgacataaaaacccccgcccaaataaaacgactcgaaaccgactcctaacccctctctccgaaccccaaaaccgaacaatctcgacaccgcaactacgaaaaaccaacaaacaccgaccaccgcgccgctcgaactccgcgaataaccgaaaaaaaactaaacgcgaaataaaaacgaaaaaaaacgaaacaaaacgcgcgaaaaaaaacgaatcgaaactcgcgacgaaaacgaaaacgaaacgaaacgaaacgcgcgtctccgacgaaaaaccttacttaaactaaacttaaaacgcgcgactcgactaccaaaaaaccgcgcgaaaaacgcgccgaaaccgcgaaaacgcaaaaaccttcgaaacgataaacgaaaaaaaaaacccaatccgccgcgaaccataaaccaccgaacccgaaaaacccgaccgcgatccgaacaacgctcaaccgacgccccaacccgctcgaccgcaactacgcgcctataaatataacctccttatacccaattcctcgctccctaatccttcccccgaaacccctatctatccccgaaaacgtacgctatatacgcaccgctacccgaaaaaaaacgaccgcacgcgccttaatccgcgcgtatcgtctttatatacgcgaataaaaaaaaaaaaaacgcgcgaaaaaaaaaaaacgcccccgactaaaatctactccccgatccccatcccgaacgaaacgaaaaaccgc

SEQ ID NO: 2339 - DNA, 1129 bp, Artificial Sequence
  chemically treated genomic DNA (Homo sapiens) CpG-island No: 2339
atagcgaaggttgggtggtgggggtattgcgtttagggggtcgtttcgttttgtggttcgggggcgatttttcgtatcggagggttgtagggaggggcgtggtggcgttttcgagatttatgagaattaggcgtcgatttttttcgttgcgatatttaggttttttttaggtttttattgtttttgttgcggagagtttggttatagcggcggttttcgcgaagtattcgttagcgaggggcgtttcgagggcgttcgcgttttatatattcgttacgtaggatattttttcggttttacgtttcgcgttttcggggttattattatcgcgggttcgaggggtggtttttacgaggaggagtgggagtttcgcgtttggtttgggtcggttcggcgatatggggattttcgtttagatggggcgattcggagtcggtttttaattttttttttcgggttttaggatcgggtagtttcggtatcgtagttgcggggagttagtaagtatcggttatcgcgtcgttcgggtttcgcggatggtcgggggggggttgagcgcgaagtgggggcgggagggggcggggtaggacgcgcgagggggggcgggtcggggttcgcggcgggggcgggggcggggcggggcgggacgcgcgttttcggcggggggttttgtttgggttgggtttggagcgcgcgattcggttgttagagagtcgcgcgggggacgcgtcgggatcgcgagagcgtaggagttttcgaggcggtgaacgagggagggagtttagttcgtcgcgggttatgagttatcgggttcggggagttcggtcgcggttcgggtagcgtttagtcggcgttttagttcgttcggtcgtagttgcgcgtttgtaggtatggtttttttatatttagtttttcgttttttggtttttttttcgggatttttgtttgttttcggggacgtgcgttgtgtgcgtatcgttgttcgaaggagagcggtcgtacgcgttttggttcgcgcgtgtcgtttttgtgtgcgcgggtgggagggaggagggcgcgcgagggaggggaggcgttttcggttgggatttgtttttcgatttttatttcgggcggggcggggagtcgt

SEQ ID NO: 2340 - DNA, 1129 bp, Artificial Sequence
  chemically treated genomic DNA (Homo sapiens) CpG-island No: 2340
acgactccccgccccgcccgaaataaaaatcgaaaaacaaatcccaaccgaaaacgcctcccctccctcgcgcgccctcctccctcccacccgcgcacacaaaaacgacacgcgcgaaccaaaacgcgtacgaccgctctccttcgaacaacgatacgcacacaacgcacgtccccgaaaacaaacaaaaatcccgaaaaaaaaaccaaaaaacgaaaaactaaatataaaaaaaccatacctacaaacgcgcaactacgaccgaacgaactaaaacgccgactaaacgctacccgaaccgcgaccgaactccccgaacccgataactcataacccgcgacgaactaaactccctccctcgttcaccgcctcgaaaactcctacgctctcgcgatcccgacgcgtcccccgcgcgactctctaacaaccgaatcgcgcgctccaaacccaacccaaacaaaaccccccgccgaaaacgcgcgtcccgccccgccccgcccccgcccccgccgcgaaccccgacccgccccccctcgcgcgtcctaccccgccccctcccgcccccacttcgcgctcaacccccccccgaccatccgcgaaacccgaacgacgcgataaccgatacttactaactccccgcaactacgataccgaaactacccgatcctaaaacccgaaaaaaaaaattaaaaaccgactccgaatcgccccatctaaacgaaaatccccatatcgccgaaccgacccaaaccaaacgcgaaactcccactcctcctcgtaaaaaccacccctcgaacccgcgataataataaccccgaaaacgcgaaacgtaaaaccgaaaaaatatcctacgtaacgaatatataaaacgcgaacgccctcgaaacgcccctcgctaacgaatacttcgcgaaaaccgccgctataaccaaactctccgcaacaaaaacaataaaaacctaaaaaaaacctaaatatcgcaacgaaaaaaatcgacgcctaattctcataaatctcgaaaacgccaccacgcccctccctacaaccctccgatacgaaaaatcgcccccgaaccacaaaacgaaacgaccccctaaacgcaatacccccaccacccaaccttcgctat

SEQ ID NO: 2341 - DNA, 982 bp, Artificial Sequence
  chemically treated genomic DNA (Homo sapiens) CpG-island No: 2341
tgcgtaaagcggtttaggggtttaggtcgcgggttgggtttgggtcgcggggttggtggaggtcgtaggtcgcgcgggtcgtagagtgggtttgggtcgcggttttggatttgggtttcgggtcggtgtaggtcgcggatcgtggagggggtttgggttgcgggtttaggttcggttcggggtcggtgtaggtcgcggttaagtttaggttacggtgttcgtagcgtttgtttcgttcgatttcgtttaggtttttgcggtttagtttggttgttcgttttagggtcgcggttttttagaatttttattcgataggtttttttcggttggcggttttttttaggcggtggatgatgttgtttaagttcgcggttttttttttgcgtagggggttgtcgcgcgagtttcgggcgttcgcggtttcggggaggtcgaaaaggttttgtagcgagttgggtttgcggggggcgttgttgttgttgttgttgttgggcggcggcgcggagttcggggttcggggttttttttcggcgcggcggcggttgaggtagcggcgttttcgggggtcgcgggcgcggcggtggcggtcgcggaggcggggttgggtaggggtcgggttttttacggggtttttttcgtggtcgtcgtcgcgggcgtcgttcgggttcggggttttcgagggcggcggtttcgtttgtttcgtcggtcgcggtattttttttcgttcggtttttttttgagatttgggtttttcggtgtcggcgttgtttgggtttttagtggtttttacgtcgtcgtagttgtcgtttttcgagttgggcgtcgttcggtcgttgcgggtcgagggtgagtcgttggcgttcgtttggttttgattttcggtttgaatttttttaatgaatagttttttgcggattcgagatttataagataataagcggcggggacgtgaggggggtgttgttggggaaagggtttttgg

SEQ ID NO: 2342 - DNA, 982 bp, Artificial Sequence
  chemically treated genomic DNA (Homo sapiens) CpG-island No: 2342
ccaaaaaccctttccccaacaacacccccctcacgtccccgccgcttattatcttataaatctcgaatccgcaaaaaactattcattaaaaaaattcaaaccgaaaatcaaaaccaaacgaacgccaacgactcaccctcgacccgcaacgaccgaacgacgcccaactcgaaaaacgacaactacgacgacgtaaaaaccactaaaaacccaaacaacgccgacaccgaaaaacccaaatctcaaaaaaaaaccgaacgaaaaaaaataccgcgaccgacgaaacaaacgaaaccgccgccctcgaaaaccccgaacccgaacgacgcccgcgacgacgaccacgaaaaaaaccccgtaaaaaacccgacccctacccaaccccgcctccgcgaccgccaccgccgcgcccgcgacccccgaaaacgccgctacctcaaccgccgccgcgccgaaaaaaaaccccgaaccccgaactccgcgccgccgcccaacaacaacaacaacaacaacgccccccgcaaacccaactcgctacaaaaccttttcgacctccccgaaaccgcgaacgcccgaaactcgcgcgacaaccccctacgcaaaaaaaaaaccgcgaacttaaacaacatcatccaccgcctaaaaaaaaccgccaaccgaaaaaaacctatcgaataaaaattctaaaaaaccgcgaccctaaaacgaacaaccaaactaaaccgcaaaaacctaaacgaaatcgaacgaaacaaacgctacgaacaccgtaacctaaacttaaccgcgacctacaccgaccccgaaccgaacctaaacccgcaacccaaaccccctccacgatccgcgacctacaccgacccgaaacccaaatccaaaaccgcgacccaaacccactctacgacccgcgcgacctacgacctccaccaaccccgcgacccaaacccaacccgcgacctaaacccctaaaccgctttacgca

SEQ ID NO: 2343 - DNA, 982 bp, Artificial Sequence
  chemically treated genomic DNA (Homo sapiens) CpG-island No: 2343
ttagaggttttttttttagtagtattttttttacgttttcgtcgtttgttgttttgtaggtttcggattcgtagagaattgtttattgaggaaatttaggtcgggagttagggttaggcgggcgttagcgatttattttcggttcgtagcggtcgggcggcgtttagttcggagggcgatagttgcgacggcgtggaggttattgagggtttaggtagcgtcgatatcgaggagtttaagttttagggagaggtcgagcgggaggaggtgtcgcggtcggcggagtagacggagtcgtcgttttcggggatttcgggttcggacgacgttcgcgacgacgattacgagggaggtttcgtggaaggttcggtttttgtttagtttcgttttcgcgatcgttatcgtcgcgttcgcggttttcgaggacgtcgttattttagtcgtcgtcgcgtcgggggagggtttcgggtttcgagtttcgcgtcgtcgtttagtaatagtagtagtagtagcgtttttcgtaggtttagttcgttgtagagttttttcggttttttcgaggtcgcgggcgttcgggattcgcgcgataattttttgcgtaagaagaaggtcgcgaatttgaatagtattatttatcgtttggagaaggtcgttagtcgggaggaatttatcgaatgggagttttgaggggtcgcggttttggggcgggtagttaggttgggtcgtaagggtttggacggggtcggacggggtaggcgttgcggatatcgtggtttgggtttggtcgcggtttgtatcgatttcgggtcggatttgagttcgtagtttagattttttttacggttcgcggtttgtatcgattcgaggtttagatttaaggtcgcggtttagatttattttgcggttcgcgcgatttgcggtttttattaatttcgcggtttagatttagttcgcggtttggatttttggatcgttttgcgta

SEQ ID NO: 2344 - DNA, 982 bp, Artificial Sequence
  chemically treated genomic DNA (Homo sapiens) CpG-island No: 2344
tacgcaaaacgatccaaaaatccaaaccgcgaactaaatctaaaccgcgaaattaataaaaaccgcaaatcgcgcgaaccgcaaaataaatctaaaccgcgaccttaaatctaaacctcgaatcgatacaaaccgcgaaccgtaaaaaaaatctaaactacgaactcaaatccgacccgaaatcgatacaaaccgcgaccaaacccaaaccacgatatccgcaacgcctaccccgtccgaccccgtccaaacccttacgacccaacctaactacccgccccaaaaccgcgacccctcaaaactcccattcgataaattcctcccgactaacgaccttctccaaacgataaataatactattcaaattcgcgaccttcttcttacgcaaaaaattatcgcgcgaatcccgaacgcccgcgacctcgaaaaaaccgaaaaaactctacaacgaactaaacctacgaaaaacgctactactactactattactaaacgacgacgcgaaactcgaaacccgaaaccctcccccgacgcgacgacgactaaaataacgacgtcctcgaaaaccgcgaacgcgacgataacgatcgcgaaaacgaaactaaacaaaaaccgaaccttccacgaaacctccctcgtaatcgtcgtcgcgaacgtcgtccgaacccgaaatccccgaaaacgacgactccgtctactccgccgaccgcgacacctcctcccgctcgacctctccctaaaacttaaactcctcgatatcgacgctacctaaaccctcaataacctccacgccgtcgcaactatcgccctccgaactaaacgccgcccgaccgctacgaaccgaaaataaatcgctaacgcccgcctaaccctaactcccgacctaaatttcctcaataaacaattctctacgaatccgaaacctacaaaacaacaaacgacgaaaacgtaaaaaaaatactactaaaaaaaaaacctctaa

SEQ ID NO: 2345 - DNA, 535 bp, Artificial Sequence
  chemically treated genomic DNA (Homo sapiens) CpG-island No: 2345
tttcgtagttttgtaattttaatcgttaggcgattcgtttttcgaaacgtattaagggtcgagttttgtttttcgagatgttttatttttaggtttcgtttttcgagatattttattttcgggttttgtttttcgagacgttttaataatttagtttcgtttttcgagacgcgttaattttagattttgtttttcgaggcgttttaataattaggttcggcgggtggagatgttttaattttaggtttcgtttttcgagcgttataatagtcgggttttattttttgaggtgttttaacggttaggtttcgttttgaaggcgttgtaataattaggtttcgtttttaggcgttttaacggttaggtttagtcgtttgaggttttttaacggttaggtcgcgttttcgcgtgcgtgcgcggttcggtagagtcgtgcgggcgttcgcgtatttattagttgaggtggtagtggttttattaatatggagttttcgtagatgtcggagtttatggggttgtcggtgttgtttgggtt

SEQ ID NO: 2346 - DNA, 535 bp, Artificial Sequence
  chemically treated genomic DNA (Homo sapiens) CpG-island No: 2346
aacccaaacaacaccgacaaccccataaactccgacatctacgaaaactccatattaataaaaccactaccacctcaactaataaatacgcgaacgcccgcacgactctaccgaaccgcgcacgcacgcgaaaacgcgacctaaccgttaaaaaacctcaaacgactaaacctaaccgttaaaacgcctaaaaacgaaacctaattattacaacgccttcaaaacgaaacctaaccgttaaaacacctcaaaaaataaaacccgactattataacgctcgaaaaacgaaacctaaaattaaaacatctccacccgccgaacctaattattaaaacgcctcgaaaaacaaaatctaaaattaacgcgtctcgaaaaacgaaactaaattattaaaacgtctcgaaaaacaaaacccgaaaataaaatatctcgaaaaacgaaacctaaaaataaaacatctcgaaaaacaaaactcgacccttaatacgtttcgaaaaacgaatcgcctaacgattaaaattacaaaactacgaaa

SEQ ID NO: 2347 - DNA, 535 bp, Artificial Sequence
  chemically treated genomic DNA (Homo sapiens) CpG-island No: 2347
agtttaagtaatatcgatagttttatgagtttcgatatttgcgagagttttatgttggtggaattattgttattttagttagtgagtacgcgggcgttcgtacggttttgtcgggtcgcgtacgtacgcgggggcgcggtttggtcgttggggagttttaagcggttgggtttggtcgttagagcgtttgggggcggagtttggttgttataacgtttttagggcggggtttggtcgttaaagtattttaaggggtggggttcggttgttgtggcgttcgaggggcggggtttggagttagagtatttttattcgtcgagtttagttattagagcgtttcgagaggtagagtttggagttagcgcgtttcgaggggcggggttgggttgttagagcgtttcgaggggtagaattcggaggtagagtgtttcgaggggcggggtttggaagtagaatatttcgaggggtagggttcgatttttggtgcgtttcgaggggcgggtcgtttggcggttgagattgtagggttgcggag

SEQ ID NO: 2348 - DNA, 535 bp, Artificial Sequence
  chemically treated genomic DNA (Homo sapiens) CpG-island No: 2348
ctccgcaaccctacaatctcaaccgccaaacgacccgcccctcgaaacgcaccaaaaatcgaaccctacccctcgaaatattctacttccaaaccccgcccctcgaaacactctacctccgaattctacccctcgaaacgctctaacaacccaaccccgcccctcgaaacgcgctaactccaaactctacctctcgaaacgctctaataactaaactcgacgaataaaaatactctaactccaaaccccgcccctcgaacgccacaacaaccgaaccccaccccttaaaatactttaacgaccaaaccccgccctaaaaacgttataacaaccaaactccgcccccaaacgctctaacgaccaaacccaaccgcttaaaactccccaacgaccaaaccgcgcccccgcgtacgtacgcgacccgacaaaaccgtacgaacgcccgcgtactcactaactaaaataacaataattccaccaacataaaactctcgcaaatatcgaaactcataaaactatcgatattacttaaact

SEQ ID NO: 2349 - DNA, 768 bp, Artificial Sequence
  chemically treated genomic DNA (Homo sapiens) CpG-island No: 2349
tataagtacgtgcgtttaattcgtttcgtatttcggttcgggtagggggtttaggggattttcggggtatttaggagggacgtttcgggcggggcgcgtaggcgcgttgaggtcgtgagttttaaggggcgggcgggtgcgcgcgttttttcgcgtacgcgcgtacggagggggcgacggtcgttgtgacgttgcggcggcggcgggcgggcggcggcgcgtgaggcgcgcgattttcggtgttttgggagtagtgtttcggttttcgtcgttttcgtcgtcgttatgtcgggtcggtcggttcgggcggagattcgtagtcgggttaaggacgatattaagaaggtgatggcggttatcgagaaagtgcggaaatggtgaggggtcggagtttagggggttggcgggggtcgcggatttaggttttgaggagcgtgggattggcgggttaggtgggagtcgatcggtcggcgttgggggaggggggtgcgggagaaggcgggaggagggcgtcgttggcgtcggcgtgaggttagagggcgcgtcggtcgcggttaattagcggttttttcggttcgcgggttcgtttatttgttgcggttgttgtcgcgcgtcgtttgggaggggatttcggttttcggttcggattggagttgtttggcgtcggtgttcgcgttcggtttagttcggggttcgtttttttttttttttgggtagtggtttcgtttgcgtttttaggtttttttttgataatagcgagtagttttg

SEQ ID NO: 2350 - DNA, 768 bp, Artificial Sequence
  chemically treated genomic DNA (Homo sapiens) CpG-island No: 2350
caaaactactcgctattatcaaaaaaaaacctaaaaacgcaaacgaaaccactacccaaaaaaaaaaaaaaacgaaccccgaactaaaccgaacgcgaacaccgacgccaaacaactccaatccgaaccgaaaaccgaaatcccctcccaaacgacgcgcgacaacaaccgcaacaaataaacgaacccgcgaaccgaaaaaaccgctaattaaccgcgaccgacgcgccctctaacctcacgccgacgccaacgacgccctcctcccgccttctcccgcacccccctcccccaacgccgaccgatcgactcccacctaacccgccaatcccacgctcctcaaaacctaaatccgcgacccccgccaaccccctaaactccgacccctcaccatttccgcactttctcgataaccgccatcaccttcttaatatcgtccttaacccgactacgaatctccgcccgaaccgaccgacccgacataacgacgacgaaaacgacgaaaaccgaaacactactcccaaaacaccgaaaatcgcgcgcctcacgcgccgccgcccgcccgccgccgccgcaacgtcacaacgaccgtcgccccctccgtacgcgcgtacgcgaaaaaacgcgcgcacccgcccgccccttaaaactcacgacctcaacgcgcctacgcgccccgcccgaaacgtccctcctaaataccccgaaaatcccctaaaccccctacccgaaccgaaatacgaaacgaattaaacgcacgtacttata

SEQ ID NO: 2351 - DNA, 768 bp, Artificial Sequence
  chemically treated genomic DNA (Homo sapiens) CpG-island No: 2351
tagggttattcgttattattaagaggaagtttggaaacgtaggcggggttattgtttaggaagaggggagggcgggtttcgggttgggtcgggcgcgggtatcgacgttaggtagttttagttcgggtcggaagtcggaatttttttttaggcggcgcgcggtagtagtcgtagtaggtgggcgggttcgcgagtcgggaggatcgttgattggtcgcggtcggcgcgttttttgattttacgtcgacgttagcggcgtttttttttcgttttttttcgtattttttttttttagcgtcggtcggtcggtttttatttgattcgttagttttacgttttttagggtttggattcgcgattttcgttagttttttaagtttcggttttttattattttcgtattttttcgatggtcgttattatttttttgatgtcgtttttggttcggttgcgggttttcgttcggatcgatcggttcgatatggcggcggcgggagcggcgggggtcggggtattgtttttaagatatcggggatcgcgcgttttacgcgtcgtcgttcgttcgtcgtcgtcgtagcgttatagcggtcgtcgtttttttcgtgcgcgcgtgcgcgagaaagcgcgcgtattcgttcgttttttggggtttacggttttagcgcgtttgcgcgtttcgttcggggcgttttttttgagtgtttcgggagttttttgagttttttattcgggtcggggtgcgaggcgggttgggcgtacgtgtttgtg

SEQ ID NO: 2352 - DNA, 768 bp, Artificial Sequence
  chemically treated genomic DNA (Homo sapiens) CpG-island No: 2352
cacaaacacgtacgcccaacccgcctcgcaccccgacccgaataaaaaactcaaaaaactcccgaaacactcaaaaaaaacgccccgaacgaaacgcgcaaacgcgctaaaaccgtaaaccccaaaaaacgaacgaatacgcgcgctttctcgcgcacgcgcgcacgaaaaaaacgacgaccgctataacgctacgacgacgacgaacgaacgacgacgcgtaaaacgcgcgatccccgatatcttaaaaacaataccccgacccccgccgctcccgccgccgccatatcgaaccgatcgatccgaacgaaaacccgcaaccgaaccaaaaacgacatcaaaaaaataataacgaccatcgaaaaaatacgaaaataataaaaaaccgaaacttaaaaaactaacgaaaatcgcgaatccaaaccctaaaaaacgtaaaactaacgaatcaaataaaaaccgaccgaccgacgctaaaaaaaaaaaatacgaaaaaaaacgaaaaaaaaacgccgctaacgtcgacgtaaaatcaaaaaacgcgccgaccgcgaccaatcaacgatcctcccgactcgcgaacccgcccacctactacgactactaccgcgcgccgcctaaaaaaaaattccgacttccgacccgaactaaaactacctaacgtcgatacccgcgcccgacccaacccgaaacccgccctcccctcttcctaaacaataaccccgcctacgtttccaaacttcctcttaataataacgaataacccta

SEQ ID NO: 2353 - DNA, 1283 bp, Artificial Sequence
  chemically treated genomic DNA (Homo sapiens) CpG-island No: 2353
tattttcgggcgtggtcgagtacggcgtttttaagaagggggaggcgtttaagaggaaagataaagtttttggtcgcgcgtttatttttttttttcggcgtattatacggatagtggtgttcggatgtcggtgtcgtcgtcggtgatagatggcgtagtatttgtatatgcgaggggttttttcggtttgatttttttgagttttcgttttttttatttttcgttgttttttatttttaattttgtcgtcggaggttcgtacgtttattacgggcgtttatataacgtgattttttatttttttagattgttttttagtgcgttgtaatttaattacgcgataggggtaggggggcgggatttaggcgcggagcggtagttttttcgagttaataggttgtgagcgttgattagtttttcgtttattggagtattcgttatcggcgttacgggggagtaagttagtgtgtgcgttggtcgggttcgggggaggaggggaatttttcgttattttttaataatttttttcggtgttgttgaggaggagtcgtgattgtcggtcgtcgggattcgaagcggaggtcggcggggggttgttgggaggcgcggcggtgtgcgcgggagttttgcgtcgtggcgtttcgttttatgattgtcgcgcggtcgcgtcggcggtgagggagtcggagttcgcgtcgtttttttatttttttttttttttattttattttcgggcgtttggcgttcgtttcgggtcgcggggtttagtgttgcgtcgcggggtcggttttagtagtcgttagtttttatcgtcgtcgtcgcgatggcgtcgtttttgggtcgtaagtttttttcgttggtgaagtcgttgttcggagaggagtcgttttttattatttcgtatatttaggaggtttttcgtattcgggagtatttttttttagtcgcgcgggtcgggttgggtcgggttgggtcggggtagggtttggggttcgcgagattaggttagtcgcgtattttcggttcggggtagttgttagcgcgtttcggtcgttcgcgggtttggaggttgagttttagtttgcgttcgtcgatttttttaggggattcggcggggggcgcgtatcggttttggaaggagaagggttcgtttcggtcgttttcggggtttcgtattttgtttcggggtttcgtcggcgaggagcgtattttttatttttattatttttttcgggttggttttaggttttgaggattcgagagggaggaggaggcgtggggag

SEQ ID NO: 2354 - DNA, 1283 bp, Artificial Sequence
  chemically treated genomic DNA (Homo sapiens) CpG-island No: 2354
ctccccacgcctcctcctccctctcgaatcctcaaaacctaaaaccaacccgaaaaaaataataaaaataaaaaatacgctcctcgccgacgaaaccccgaaacaaaatacgaaaccccgaaaacgaccgaaacgaacccttctccttccaaaaccgatacgcgccccccgccgaatcccctaaaaaaatcgacgaacgcaaactaaaactcaacctccaaacccgcgaacgaccgaaacgcgctaacaactaccccgaaccgaaaatacgcgactaacctaatctcgcgaaccccaaaccctaccccgacccaacccgacccaacccgacccgcgcgactaaaaaaaaatactcccgaatacgaaaaacctcctaaatatacgaaataataaaaaacgactcctctccgaacaacgacttcaccaacgaaaaaaacttacgacccaaaaacgacgccatcgcgacgacgacgataaaaactaacgactactaaaaccgaccccgcgacgcaacactaaaccccgcgacccgaaacgaacgccaaacgcccgaaaataaaataaaaaaaaaaaaaaataaaaaaacgacgcgaactccgactccctcaccgccgacgcgaccgcgcgacaatcataaaacgaaacgccacgacgcaaaactcccgcgcacaccgccgcgcctcccaacaaccccccgccgacctccgcttcgaatcccgacgaccgacaatcacgactcctcctcaacaacaccgaaaaaaattattaaaaaataacgaaaaattcccctcctcccccgaacccgaccaacgcacacactaacttactcccccgtaacgccgataacgaatactccaataaacgaaaaactaatcaacgctcacaacctattaactcgaaaaaactaccgctccgcgcctaaatcccgcccccctacccctatcgcgtaattaaattacaacgcactaaaaaacaatctaaaaaaataaaaaatcacgttatataaacgcccgtaataaacgtacgaacctccgacgacaaaattaaaaataaaaaacaacgaaaaataaaaaaaacgaaaactcaaaaaaatcaaaccgaaaaaacccctcgcatatacaaatactacgccatctatcaccgacgacgacaccgacatccgaacaccactatccgtataatacgccgaaaaaaaaaaataaacgcgcgaccaaaaactttatctttcctcttaaacgcctcccccttcttaaaaacgccgtactcgaccacgcccgaaaata

SEQ ID NO: 2355 - DNA, 1283 bp, Artificial Sequence
  chemically treated genomic DNA (Homo sapiens) CpG-island No: 2355
ttttttacgtttttttttttttttcgggtttttaaggtttaaagttaattcggggaaggtaatggggatgggggatgcgtttttcgtcggcgaggtttcgggataaagtgcggggtttcgggggcggtcgaagcgggtttttttttttttagggtcggtgcgcgtttttcgtcggattttttggaaggatcggcgggcgtaggttgagatttagtttttaggttcgcgagcggtcggggcgcgttgatagttgtttcgggtcggggatgcgcggttgatttggtttcgcgagttttaggttttatttcggtttagttcggtttagttcggttcgcgcggttggaaaaggatattttcgggtgcggaaggttttttgagtgtgcgggatggtgaagagcggttttttttcgggtaacggttttattagcgggaagggtttgcggtttaggagcggcgttatcgcggcggcggcggtggggattggcggttgttggggtcggtttcgcggcgtagtattaggtttcgcggttcggagcgagcgttaggcgttcgggggtggggtgggggaagggaggggtgagagggcggcgcgaatttcggtttttttatcgtcggcgcggtcgcgcgatagttatggagcggaacgttacggcgtagagttttcgcgtatatcgtcgcgttttttagtagtttttcgtcgattttcgtttcgggtttcggcggtcggtagttacgatttttttttagtagtatcggaggaaattattgaaaaatggcgggagattttttttttttttcgggttcggttaacgtatatattaatttgttttttcgtggcgtcggtggcgaatgttttaataggcggagagttggttagcgtttatagtttattggttcggaggagttgtcgtttcgcgtttgggtttcgtttttttgtttttgtcgcgtagttgggttgtagcgtattagagggtagtttgaagaggtgaaaggttacgttatgtaagcgttcgtgataggcgtgcgggttttcgacggtagagttaaaagtgggggatagcgggggatggagaggacgagaatttaaagaggttaagtcggagaagtttttcgtatatatagatattgcgttatttgttatcgacggcgatatcgatattcgggtattattgttcgtgtggtgcgtcggagggggagggtgagcgcgcggttaggggttttgtttttttttttgggcgtttttttttttttaaaggcgtcgtgttcggttacgttcggggatg

SEQ ID NO: 2356 - DNA, 1283 bp, Artificial Sequence
  chemically treated genomic DNA (Homo sapiens) CpG-island No: 2356
catccccgaacgtaaccgaacacgacgcctttaaaaaaaaaaaaacgcccaaaaaaaaaaacaaaacccctaaccgcgcgctcaccctccccctccgacgcaccacacgaacaataatacccgaatatcgatatcgccgtcgataacaaataacgcaatatctatatatacgaaaaacttctccgacttaacctctttaaattctcgtcctctccatcccccgctatcccccacttttaactctaccgtcgaaaacccgcacgcctatcacgaacgcttacataacgtaacctttcacctcttcaaactaccctctaatacgctacaacccaactacgcgacaaaaacaaaaaaacgaaacccaaacgcgaaacgacaactcctccgaaccaataaactataaacgctaaccaactctccgcctattaaaacattcgccaccgacgccacgaaaaaacaaattaatatatacgttaaccgaacccgaaaaaaaaaaaaaatctcccgccatttttcaataatttcctccgatactactaaaaaaaaatcgtaactaccgaccgccgaaacccgaaacgaaaatcgacgaaaaactactaaaaaacgcgacgatatacgcgaaaactctacgccgtaacgttccgctccataactatcgcgcgaccgcgccgacgataaaaaaaccgaaattcgcgccgccctctcacccctcccttcccccaccccacccccgaacgcctaacgctcgctccgaaccgcgaaacctaatactacgccgcgaaaccgaccccaacaaccgccaatccccaccgccgccgccgcgataacgccgctcctaaaccgcaaacccttcccgctaataaaaccgttacccgaaaaaaaaccgctcttcaccatcccgcacactcaaaaaaccttccgcacccgaaaatatccttttccaaccgcgcgaaccgaactaaaccgaactaaaccgaaataaaacctaaaactcgcgaaaccaaatcaaccgcgcatccccgacccgaaacaactatcaacgcgccccgaccgctcgcgaacctaaaaactaaatctcaacctacgcccgccgatccttccaaaaaatccgacgaaaaacgcgcaccgaccctaaaaaaaaaaaaacccgcttcgaccgcccccgaaaccccgcactttatcccgaaacctcgccgacgaaaaacgcatcccccatccccattaccttccccgaattaactttaaaccttaaaaacccgaaaaaaaaaaaaaaacgtaaaaaa

SEQ ID NO: 2357 - DNA, 510 bp, Artificial Sequence
  chemically treated genomic DNA (Homo sapiens) CpG-island No: 2357
taggacgacggggcggaggaggggatcgacgagattagagtagttcggtggcgaggaagggtaggcggggttggcgcgttggtcgggttcggaggcgggttcgggcggtcgtggggcggggcggggcggagcggcggcggttgagttgttggttgagattttggggcggaaacggagtggggcggttggggaggcgaggggcgggtcggggcggagatcgggaggtttttttttaggtcgtatttggtcgagtcgattgattcgttggcgaattaagtagatgttgggcgttatattgcgtgcgtcgcgtttttttttttgcggtttagtttttggtattcggtttttttttgcgtacgcgtgtacgcgtgcgttcgttgggttcgcgtcgcgttttcggattcgcgcgattgcgaagagttttgattcgggggcgtttacgttcgtttttgcgtagtttgggggcgttggttttagagatatttttatttgatttcgagtttattatag

SEQ ID NO: 2358 - DNA, 510 bp, Artificial Sequence
  chemically treated genomic DNA (Homo sapiens) CpG-island No: 2358
ctataataaactcgaaatcaaataaaaatatctctaaaaccaacgcccccaaactacgcaaaaacgaacgtaaacgcccccgaatcaaaactcttcgcaatcgcgcgaatccgaaaacgcgacgcgaacccaacgaacgcacgcgtacacgcgtacgcaaaaaaaaaccgaataccaaaaactaaaccgcaaaaaaaaaaacgcgacgcacgcaatataacgcccaacatctacttaattcgccaacgaatcaatcgactcgaccaaatacgacctaaaaaaaaacctcccgatctccgccccgacccgcccctcgcctccccaaccgccccactccgtttccgccccaaaatctcaaccaacaactcaaccgccgccgctccgccccgccccgccccacgaccgcccgaacccgcctccgaacccgaccaacgcgccaaccccgcctacccttcctcgccaccgaactactctaatctcgtcgatcccctcctccgccccgtcgtccta

SEQ ID NO: 2359 - DNA, 510 bp, Artificial Sequence
  chemically treated genomic DNA (Homo sapiens) CpG-island No: 2359
ttgtggtgagttcggggttaagtgagggtgtttttgaggttagcgtttttaagttgcgtaggagcgggcgtgggcgttttcgggttagggtttttcgtagtcgcgcgggttcggaagcgcggcgcgggtttaacgagcgtacgcgtatacgcgtgcgtaggggaagatcgagtgttaggggttgaatcgtagggaagggggcgcggcgtacgtagtatggcgtttaatatttatttggttcgttagcggattagtcgattcggttaggtgcggtttgaggagaagtttttcggttttcgtttcggttcgtttttcgtttttttagtcgttttatttcgttttcgttttagagttttagttagtagtttaatcgtcgtcgtttcgtttcgtttcgttttacggtcgttcgggttcgttttcgagttcggttagcgcgttagtttcgtttgttttttttcgttatcgggttgttttggtttcgtcggttttttttttcgtttcgtcgttttg

SEQ ID NO: 2360 - DNA, 510 bp, Artificial Sequence
  chemically treated genomic DNA (Homo sapiens) CpG-island No: 2360
caaaacgacgaaacgaaaaaaaaaaccgacgaaaccaaaacaacccgataacgaaaaaaaacaaacgaaactaacgcgctaaccgaactcgaaaacgaacccgaacgaccgtaaaacgaaacgaaacgaaacgacgacgattaaactactaactaaaactctaaaacgaaaacgaaataaaacgactaaaaaaacgaaaaacgaaccgaaacgaaaaccgaaaaacttctcctcaaaccgcacctaaccgaatcgactaatccgctaacgaaccaaataaatattaaacgccatactacgtacgccgcgcccccttccctacgattcaacccctaacactcgatcttcccctacgcacgcgtatacgcgtacgctcgttaaacccgcgccgcgcttccgaacccgcgcgactacgaaaaaccctaacccgaaaacgcccacgcccgctcctacgcaacttaaaaacgctaacctcaaaaacaccctcacttaaccccgaactcaccacaa

SEQ ID NO: 2361 - DNA, 655 bp, Artificial Sequence
  chemically treated genomic DNA (Homo sapiens) CpG-island No: 2361
gtaatttttttttaggtaggttttaagttgttttttcgggtgttcgggttgtgtacgttgttttttcgtcgtcggttcgagtcgcgatcgtcgcgcgtttgggggtttcggcggttttcggtgatttgcggcgtcgggttttttttttgcgttttttcggggtttttgttttttttgtagggttcgttatggagcgcgcggcgggtgcgttcggagatgttttttcgggtcgggttttcgaaagtagagtttcgggggttcgttgggatcgtggtatgtcgggcggtggttcgcgcgcggagatttcggcgtcgcggggggatcgtgtcggggtttttcggttcgcgttcgagtcgtcgtcgtgtttaaggggcgagtgtttgtttgttatttttcgttcggaggagcggcgtatttttagggttcgtttcgtacgtgttagttcggcgttcgcggcgtcgggatagtttcgggattttgttaggtggatgttgtgcgtagtcggagttaggttgaaggtgagcggcgtgtgggttagaagtttcgaggttgtaggcgcggagggaattcgggatgtcggggggtgttcggggtttcgcggtttagaatgttttagggcggtttggtgttttgggaggggataggagggtttttt

SEQ ID NO: 2362 - DNA, 655 bp, Artificial Sequence
  chemically treated genomic DNA (Homo sapiens) CpG-island No: 2362
aaaaaaccctcctatcccctcccaaaacaccaaaccgccctaaaacattctaaaccgcgaaaccccgaacaccccccgacatcccgaattccctccgcgcctacaacctcgaaacttctaacccacacgccgctcaccttcaacctaactccgactacgcacaacatccacctaacaaaatcccgaaactatcccgacgccgcgaacgccgaactaacacgtacgaaacgaaccctaaaaatacgccgctcctccgaacgaaaaataacaaacaaacactcgccccttaaacacgacgacgactcgaacgcgaaccgaaaaaccccgacacgatccccccgcgacgccgaaatctccgcgcgcgaaccaccgcccgacataccacgatcccaacgaacccccgaaactctactttcgaaaacccgacccgaaaaaacatctccgaacgcacccgccgcgcgctccataacgaaccctacaaaaaaaacaaaaaccccgaaaaaacgcaaaaaaaaaacccgacgccgcaaatcaccgaaaaccgccgaaacccccaaacgcgcgacgatcgcgactcgaaccgacgacgaaaaaacaacgtacacaacccgaacacccgaaaaaacaacttaaaacctacctaaaaaaaaattac

SEQ ID NO: 2363 - DNA, 655 bp, Artificial Sequence
  chemically treated genomic DNA (Homo sapiens) CpG-island No: 2363
gaggaatttttttatttttttttagagtattaggtcgttttagagtattttaagtcgcgggatttcgggtatttttcgatatttcgggtttttttcgcgtttgtaatttcgggatttttggtttatacgtcgtttatttttaatttggtttcggttacgtataatatttatttggtagagtttcggggttgtttcggcgtcgcgggcgtcgagttggtacgtgcggggcggattttaagggtgcgtcgttttttcgggcggggggtggtaggtaggtattcgttttttgggtacggcggcgattcgggcgcgggtcggggagtttcggtacggttttttcgcggcgtcgggattttcgcgcgcggattatcgttcggtatgttacggttttaacgggttttcggggttttgttttcgagaattcggttcgagaaggtattttcgagcgtattcgtcgcgcgttttatggcgggttttgtagagagggtagaagtttcgaggggacgtaaggaagggattcggcgtcgtaggttatcgggggtcgtcggagtttttaggcgcgcggcgatcgcggttcggatcggcggcggggaggtagcgtatatagttcgggtattcgggggaatagtttggggtttgtttaggggaaagttgt

SEQ ID NO: 2364 - DNA, 655 bp, Artificial Sequence
  chemically treated genomic DNA (Homo sapiens) CpG-island No: 2364
acaactttcccctaaacaaaccccaaactattcccccgaatacccgaactatatacgctacctccccgccgccgatccgaaccgcgatcgccgcgcgcctaaaaactccgacgacccccgataacctacgacgccgaatcccttccttacgtcccctcgaaacttctaccctctctacaaaacccgccataaaacgcgcgacgaatacgctcgaaaataccttctcgaaccgaattctcgaaaacaaaaccccgaaaacccgttaaaaccgtaacataccgaacgataatccgcgcgcgaaaatcccgacgccgcgaaaaaaccgtaccgaaactccccgacccgcgcccgaatcgccgccgtacccaaaaaacgaatacctacctaccaccccccgcccgaaaaaacgacgcacccttaaaatccgccccgcacgtaccaactcgacgcccgcgacgccgaaacaaccccgaaactctaccaaataaatattatacgtaaccgaaaccaaattaaaaataaacgacgtataaaccaaaaatcccgaaattacaaacgcgaaaaaaacccgaaatatcgaaaaatacccgaaatcccgcgacttaaaatactctaaaacgacctaatactctaaaaaaaaataaaaaaattcctc

SEQ ID NO: 2365 - DNA, 504 bp, Artificial Sequence
  chemically treated genomic DNA (Homo sapiens) CpG-island No: 2365
atgtatagcgcggttaaattggattcgatagtatcggaaacggcgatttttatttggggcgttgcggatatacgagtcgaggttgttttttaggaagtaaataaaaaaaggggggaaaagggggggaaagaaagaaagagaaaaaggagggcgagtggcgagtaggggtttcggtcgttatttatacgtttcgaagcgtgttcgtttttcgcgcggggttttcggtcgtcgttttcggttatcggttgtttttcggtggtttaggtttcggatttcgcggtcggttcggcgcggcgtatcgttttttaggtgcgtatttcgttttcgtcgtcgacgtcgttattaagggcgggttgtttttcggaacgttttttttttgagggtttggggaagggaggtcgttcggtcgtagcgggaggtggtttttcgggatattcggcgtttcgaggcgaggtattttcgaatttcgatttttgttggtaggattagaggtgtgagggtggg

SEQ ID NO: 2366 - DNA, 504 bp, Artificial Sequence
  chemically treated genomic DNA (Homo sapiens) CpG-island No: 2366
cccaccctcacacctctaatcctaccaacaaaaatcgaaattcgaaaatacctcgcctcgaaacgccgaatatcccgaaaaaccacctcccgctacgaccgaacgacctcccttccccaaaccctcaaaaaaaaaacgttccgaaaaacaacccgcccttaataacgacgtcgacgacgaaaacgaaatacgcacctaaaaaacgatacgccgcgccgaaccgaccgcgaaatccgaaacctaaaccaccgaaaaacaaccgataaccgaaaacgacgaccgaaaaccccgcgcgaaaaacgaacacgcttcgaaacgtataaataacgaccgaaacccctactcgccactcgccctcctttttctctttctttctttcccccccttttcccccctttttttatttacttcctaaaaaacaacctcgactcgtatatccgcaacgccccaaataaaaatcgccgtttccgatactatcgaatccaatttaaccgcgctatacat

SEQ ID NO: 2367 - DNA, 504 bp, Artificial Sequence
  chemically treated genomic DNA (Homo sapiens) CpG-island No: 2367
tttatttttatatttttggttttgttagtagggatcggggttcgggggtgtttcgtttcggggcgtcgggtgtttcggggggttatttttcgttgcggtcgggcggttttttttttttaggtttttaggaggaggacgtttcgaaaggtaattcgtttttaatggcggcgtcggcggcgggggcggggtacgtatttgaagggcggtgcgtcgcgtcgggtcggtcgcggagttcgaagtttgggttatcggggagtagtcgatggtcgagggcggcggtcgagagtttcgcgcgggggacgagtacgtttcggggcgtgtgggtggcggtcgaagtttttgttcgttattcgtttttttttttttttttttttttttttttttttttttttttttttttttgtttgttttttggaaggtagtttcgattcgtgtgttcgtagcgttttaagtgggagtcgtcgttttcggtgttgtcgaatttaatttagtcgcgttgtgtat

SEQ ID NO: 2368 - DNA, 504 bp, Artificial Sequence
  chemically treated genomic DNA (Homo sapiens) CpG-island No: 2368
atacacaacgcgactaaattaaattcgacaacaccgaaaacgacgactcccacttaaaacgctacgaacacacgaatcgaaactaccttccaaaaaacaaacaaaaaaaaaaaaaaaaaaaaaaaaaaaaaaaaaaaaaaaaaaaaaaaaacgaataacgaacaaaaacttcgaccgccacccacacgccccgaaacgtactcgtcccccgcgcgaaactctcgaccgccgccctcgaccatcgactactccccgataacccaaacttcgaactccgcgaccgacccgacgcgacgcaccgcccttcaaatacgtaccccgcccccgccgccgacgccgccattaaaaacgaattacctttcgaaacgtcctcctcctaaaaacctaaaaaaaaaaaaccgcccgaccgcaacgaaaaataaccccccgaaacacccgacgccccgaaacgaaacacccccgaaccccgatccctactaacaaaaccaaaaatataaaaataaa

SEQ ID NO: 2369 - DNA, 617 bp, Artificial Sequence
  chemically treated genomic DNA (Homo sapiens) CpG-island No: 2369
gcgttgggcgatagggacgcggggagagagcgataagttggaagtaagggttgtttgtaaaattttcggttttttagcggtaattttgcgggaaagattatttttttttcggtttcgcgtcgggtttattttcgtgtgtttcgatttttgcgttttaggtttgggcggcgtcgttgtatttcggttgtcgggcgcgttgtagttttcgttttttcgtacgcggcgttcgttcgttcgcgttgttttttttcggtaggcgggcggtttcggcgggcgggcgggcgcggattgtaggtgtttttttgttgtttttggcggtcgcgggcgcgcgagttttatcgagtcggtttcgggagttcgagcgttcgtttttttttcgttttttttttttttttttttcgtcgttttttttttatttcgtttttttttttttttttttttttttagaatatttaatgtcggaacgtttcgaagatgacgtcggagcgttttcgaatttcgtgtttttcggttgttgttgtcgaaggaatagggaaaaagtaataagaaggaagagtaatggcgatattggatcgtaaagtgtttagttcggaggcgtttttgggtaaattttggtt

SEQ ID NO: 2370 - DNA, 617 bp, Artificial Sequence
  chemically treated genomic DNA (Homo sapiens) CpG-island No: 2370
aaccaaaatttacccaaaaacgcctccgaactaaacactttacgatccaatatcgccattactcttccttcttattactttttccctattccttcgacaacaacaaccgaaaaacacgaaattcgaaaacgctccgacgtcatcttcgaaacgttccgacattaaatattctaaaaaaaaaaaaaaaaaaaaaaaaacgaaataaaaaaaaaacgacgaaaaaaaaaaaaaaaaaaaacgaaaaaaaaacgaacgctcgaactcccgaaaccgactcgataaaactcgcgcgcccgcgaccgccaaaaacaacaaaaaaacacctacaatccgcgcccgcccgcccgccgaaaccgcccgcctaccgaaaaaaaacaacgcgaacgaacgaacgccgcgtacgaaaaaacgaaaactacaacgcgcccgacaaccgaaatacaacgacgccgcccaaacctaaaacgcaaaaatcgaaacacacgaaaataaacccgacgcgaaaccgaaaaaaaaataatctttcccgcaaaattaccgctaaaaaaccgaaaattttacaaacaacccttacttccaacttatcgctctctccccgcgtccctatcgcccaacgc

SEQ ID NO: 2371 - DNA, 617 bp, Artificial Sequence
  chemically treated genomic DNA (Homo sapiens) CpG-island No: 2371
gattagggtttgtttagaaacgttttcggattgggtattttgcgatttagtgtcgttattgttttttttttttgttgttttttttttgttttttcggtagtagtagtcgagagatacgggattcgagaacgtttcgacgttattttcggaacgtttcgatattgagtgttttgaaagggggagggagggaggaagggcgggatgggaggagggcggcggaggaggaggggagagggagcggaggaggggcgggcgttcgggttttcggagtcggttcggtggggttcgcgcgttcgcggtcgttaggggtagtagagaggtatttgtagttcgcgttcgttcgttcgtcggggtcgttcgtttgtcggggaggggtagcgcggacgggcgagcgtcgcgtgcgggagagcgaaggttgtagcgcgttcggtagtcgggatgtagcggcgtcgtttaagtttggggcgtaggggtcggggtatacggggataggttcgacgcggggtcgaaggaagggtggtttttttcgtagagttgtcgttggaggatcgaaagttttgtaggtagtttttgtttttagtttgtcgtttttttttcgcgtttttgtcgtttaacgt

SEQ ID NO: 2372 - DNA, 617 bp, Artificial Sequence
  chemically treated genomic DNA (Homo sapiens) CpG-island No: 2372
acgttaaacgacaaaaacgcgaaaaaaaaacgacaaactaaaaacaaaaactacctacaaaactttcgatcctccaacgacaactctacgaaaaaaaccacccttccttcgaccccgcgtcgaacctatccccgtataccccgacccctacgccccaaacttaaacgacgccgctacatcccgactaccgaacgcgctacaaccttcgctctcccgcacgcgacgctcgcccgtccgcgctacccctccccgacaaacgaacgaccccgacgaacgaacgaacgcgaactacaaatacctctctactacccctaacgaccgcgaacgcgcgaaccccaccgaaccgactccgaaaacccgaacgcccgcccctcctccgctccctctcccctcctcctccgccgccctcctcccatcccgcccttcctccctccctccccctttcaaaacactcaatatcgaaacgttccgaaaataacgtcgaaacgttctcgaatcccgtatctctcgactactactaccgaaaaaacaaaaaaaaaacaacaaaaaaaaaaaacaataacgacactaaatcgcaaaatacccaatccgaaaacgtttctaaacaaaccctaatc

SEQ ID NO: 2373 - DNA, 1314 bp, Artificial Sequence
  chemically treated genomic DNA (Homo sapiens) CpG-island No: 2373
gcgagtttacgcgggatatttttcggtttatagttttatcggttttttttacgcggtattttttaattcgggagtttacgcgggttatttttcggtttatcgtttcgtttgtttttacgcggtaggttttttatagacggacgtttttttaattcggattcgtttaggagttttagtcgttttacgatggtttttagaggtcgggcgggattatttttggtggatcgcggttttagcgtttttttcgtttgggtttttcgtttcgggtttcgggtttcgtcgtttattcggagaggtttatttttgttttacgcgtttaggtcgttttacgtttttattttcggtttttcgttcgttcgtcgcgtttttatcggtttcgttcggttttcgtagtcgtaagtagtagtcgttagattcgcgtcggcgtcgtttgtttttaattgttcgtcggtagttttcgcgtagcgcgtttcgttttgatttcgttttcgcgacgcggacgcgtagtcgattggtttgcggggcgttagggcggagttttttcgtttcgcggtttgaaagcgtaagatcgagttttgattggtgaacggacggagaaggggcgggagtaggtaggtagttgcgtaggatataaatttgtgtagcgttcggttcgttgggcggggcgtcggtttgttgagcgaggtaatgttttaggcgaagttaaggttcgttgggcggggttagattttgggcggggagtcggttcgttgggtggggttaggttttgggcggggagtcggttcgttgggcggggttaggttttgggcggggagtcggttcgttgggcggggttaggttttgggcggggagtcggttcgttgggcggggttaggttttgggcggggagtcggttcgttgggcggggttaggttttgggcggggagtcggttcgttgggcggggttaggttttgggcggggagtcggttcgttgggcggggttaggttttgggcggggagtcggttcgttgggcggggttaggttttgggcggggagtcggttcgttgggcggggttaggttttgggcggggagtcggttcgttgggcggggttaggttttgggcggggagtcggttcgttgggcggggttaggttttgggcgaggtttaggttcgttgggcgcggataggtgttgggcgaggtttaggtttgttgggcgcggataggtgttgggcgaggtttaggtttgttgggcgcggataggtgttgggcgaggtttggttcgttgggcggggataggttttggttcgggttttgtcggttgtttttgtat

SEQ ID NO: 2374 - DNA, 1314 bp, Artificial Sequence
  chemically treated genomic DNA (Homo sapiens) CpG-island No: 2374
atacaaaaacaaccgacaaaacccgaaccaaaacctatccccgcccaacgaaccaaacctcgcccaacacctatccgcgcccaacaaacctaaacctcgcccaacacctatccgcgcccaacaaacctaaacctcgcccaacacctatccgcgcccaacgaacctaaacctcgcccaaaacctaaccccgcccaacgaaccgactccccgcccaaaacctaaccccgcccaacgaaccgactccccgcccaaaacctaaccccgcccaacgaaccgactccccgcccaaaacctaaccccgcccaacgaaccgactccccgcccaaaacctaaccccgcccaacgaaccgactccccgcccaaaacctaaccccgcccaacgaaccgactccccgcccaaaacctaaccccgcccaacgaaccgactccccgcccaaaacctaaccccgcccaacgaaccgactccccgcccaaaacctaaccccgcccaacgaaccgactccccgcccaaaacctaaccccgcccaacgaaccgactccccgcccaaaacctaaccccacccaacgaaccgactccccgcccaaaatctaaccccgcccaacgaaccttaacttcgcctaaaacattacctcgctcaacaaaccgacgccccgcccaacgaaccgaacgctacacaaatttatatcctacgcaactacctacctactcccgccccttctccgtccgttcaccaatcaaaactcgatcttacgctttcaaaccgcgaaacgaaaaaactccgccctaacgccccgcaaaccaatcgactacgcgtccgcgtcgcgaaaacgaaatcaaaacgaaacgcgctacgcgaaaactaccgacgaacaattaaaaacaaacgacgccgacgcgaatctaacgactactacttacgactacgaaaaccgaacgaaaccgataaaaacgcgacgaacgaacgaaaaaccgaaaataaaaacgtaaaacgacctaaacgcgtaaaacaaaaataaacctctccgaataaacgacgaaacccgaaacccgaaacgaaaaacccaaacgaaaaaaacgctaaaaccgcgatccaccaaaaataatcccgcccgacctctaaaaaccatcgtaaaacgactaaaactcctaaacgaatccgaattaaaaaaacgtccgtctataaaaaacctaccgcgtaaaaacaaacgaaacgataaaccgaaaaataacccgcgtaaactcccgaattaaaaaataccgcgtaaaaaaaaccgataaaactataaaccgaaaaatatcccgcgtaaactcgc

SEQ ID NO: 2375 - DNA, 1314 bp, Artificial Sequence
  chemically treated genomic DNA (Homo sapiens) CpG-island No: 2375
gtgtaaggatagtcggtaaggttcgggttaagatttattttcgtttagcgagttaggtttcgtttagtatttattcgcgtttagtaagtttaggtttcgtttagtatttattcgcgtttagtaagtttaggtttcgtttagtatttattcgcgtttagcgagtttagatttcgtttaagatttagtttcgtttagcgagtcgatttttcgtttaggatttagtttcgtttagcgagtcgatttttcgtttaggatttagtttcgtttagcgagtcgatttttcgtttaggatttagtttcgtttagcgagtcgatttttcgtttaggatttagtttcgtttagcgagtcgatttttcgtttaggatttagtttcgtttagcgagtcgatttttcgtttaggatttagtttcgtttagcgagtcgatttttcgtttaggatttagtttcgtttagcgagtcgatttttcgtttaggatttagtttcgtttagcgagtcgatttttcgtttaggatttagtttcgtttagcgagtcgatttttcgtttaggatttagttttatttaacgagtcgatttttcgtttaagatttagtttcgtttagcgagttttggtttcgtttaggatattgtttcgtttagtaagtcgacgtttcgtttaacgagtcgagcgttgtatagatttatattttacgtagttgtttgtttgttttcgtttttttttcgttcgtttattaattagaattcgattttgcgtttttaggtcgcgggacgggaaggtttcgttttggcgtttcgtaggttaatcgattgcgcgttcgcgtcgcgggggcggggttagggcggggcgcgttgcgcgggggttgtcggcgggtagttgggagtaggcgacgtcgacgcgagtttggcggttgttgtttgcgattgcggaggtcgggcgaggtcggtgaggacgcggcgggcgagcgagaggtcgagggtgaggacgtgaagcggtttgggcgcgtggggtaggggtgggttttttcgggtgggcggcgaagttcgaggttcgaggcgagaggtttaggcggggggggcgttgaggtcgcggtttattagagatggtttcgttcggtttttgaaggttatcgtgaggcggttggagtttttaggcgggttcgggttagaggagcgttcgtttgtagggagtttgtcgcgtgggggtaggcggggcggtgggtcggggagtggttcgcgtggattttcgggttgaggggtgtcgcgtggaggaggtcggtggggttgtagatcggggagtgtttcgcgtggattcgt

SEQ ID NO: 2376 - DNA, 1314 bp, Artificial Sequence
  chemically treated genomic DNA (Homo sapiens) CpG-island No: 2376
acgaatccacgcgaaacactccccgatctacaaccccaccgacctcctccacgcgacacccctcaacccgaaaatccacgcgaaccactccccgacccaccgccccgcctacccccacgcgacaaactccctacaaacgaacgctcctctaacccgaacccgcctaaaaactccaaccgcctcacgataaccttcaaaaaccgaacgaaaccatctctaataaaccgcgacctcaacgccccccccgcctaaacctctcgcctcgaacctcgaacttcgccgcccacccgaaaaaacccacccctaccccacgcgcccaaaccgcttcacgtcctcaccctcgacctctcgctcgcccgccgcgtcctcaccgacctcgcccgacctccgcaatcgcaaacaacaaccgccaaactcgcgtcgacgtcgcctactcccaactacccgccgacaacccccgcgcaacgcgccccgccctaaccccgcccccgcgacgcgaacgcgcaatcgattaacctacgaaacgccaaaacgaaaccttcccgtcccgcgacctaaaaacgcaaaatcgaattctaattaataaacgaacgaaaaaaaaacgaaaacaaacaaacaactacgtaaaatataaatctatacaacgctcgactcgttaaacgaaacgtcgacttactaaacgaaacaatatcctaaacgaaaccaaaactcgctaaacgaaactaaatcttaaacgaaaaatcgactcgttaaataaaactaaatcctaaacgaaaaatcgactcgctaaacgaaactaaatcctaaacgaaaaatcgactcgctaaacgaaactaaatcctaaacgaaaaatcgactcgctaaacgaaactaaatcctaaacgaaaaatcgactcgctaaacgaaactaaatcctaaacgaaaaatcgactcgctaaacgaaactaaatcctaaacgaaaaatcgactcgctaaacgaaactaaatcctaaacgaaaaatcgactcgctaaacgaaactaaatcctaaacgaaaaatcgactcgctaaacgaaactaaatcctaaacgaaaaatcgactcgctaaacgaaactaaatcctaaacgaaaaatcgactcgctaaacgaaactaaatcttaaacgaaatctaaactcgctaaacgcgaataaatactaaacgaaacctaaacttactaaacgcgaataaatactaaacgaaacctaaacttactaaacgcgaataaatactaaacgaaacctaactcgctaaacgaaaataaatcttaacccgaaccttaccgactatccttacac

SEQ ID NO: 2377 - DNA, 556 bp, Artificial Sequence
  chemically treated genomic DNA (Homo sapiens) CpG-island No: 2377
aatacggggttgagggtggggatgtacggggaggggagcgagagattgtgagtgagtttgaagagtagttattgaggggtgtggagtgataggatggacgaaggacggtttatcggatagatacgggggtgaatggagatgcgcgaggtggatcgatggttggtagagagtttcgtgaggtggtcgtggatgggtgagtgagagtggaggataaaagcgtcggtcggtacgagttagtagagtgcggagagcggtagttcggatgtgtcgtaggagagagatagttgtagcgtagcgtacgagaagtattcgtgtgtgggtgtatacggaggttatacgagagcgtgcgagagtgtgtgattgagcgagagaggtgagagtacgcgtcgagagtaaggtaagtgtagtgatcgcgtgcgagcgtagttttacggtcgagtttagtgtagtagagcggggattgcgtttgatgaatgtgatagcgcgttagaagtgggagcgaaaaagtgaagagagagaagttagattatgggtaagtattcgttattggcgtata

SEQ ID NO: 2378 - DNA, 556 bp, Artificial Sequence
  chemically treated genomic DNA (Homo sapiens) CpG-island No: 2378
tatacgccaataacgaatacttacccataatctaacttctctctcttcactttttcgctcccacttctaacgcgctatcacattcatcaaacgcaatccccgctctactacactaaactcgaccgtaaaactacgctcgcacgcgatcactacacttaccttactctcgacgcgtactctcacctctctcgctcaatcacacactctcgcacgctctcgtataacctccgtatacacccacacacgaatacttctcgtacgctacgctacaactatctctctcctacgacacatccgaactaccgctctccgcactctactaactcgtaccgaccgacgcttttatcctccactctcactcacccatccacgaccacctcacgaaactctctaccaaccatcgatccacctcgcgcatctccattcacccccgtatctatccgataaaccgtccttcgtccatcctatcactccacacccctcaataactactcttcaaactcactcacaatctctcgctcccctccccgtacatccccaccctcaaccccgtatt

SEQ ID NO: 2379 - DNA, 556 bp, Artificial Sequence
  chemically treated genomic DNA (Homo sapiens) CpG-island No: 2379
tatgcgttaatagcggatatttatttatggtttaatttttttttttttattttttcgtttttatttttggcgcgttattatatttattaggcgtagttttcgttttattgtattgaattcgatcgtgagattacgttcgtacgcggttattatatttgttttgttttcggcgcgtatttttatttttttcgtttaattatatattttcgtacgttttcgtgtgattttcgtgtatatttatatacgagtatttttcgtgcgttacgttgtagttattttttttttgcgatatattcgagttgtcgtttttcgtattttattaattcgtatcgatcggcgtttttattttttatttttatttatttatttacggttattttacgggattttttattagttatcggtttatttcgcgtatttttatttattttcgtgtttgttcggtggatcgtttttcgtttattttgttattttatattttttaatggttgttttttaagtttatttataatttttcgttttttttttcgtatatttttatttttaatttcgtgtt

SEQ ID NO: 2380 - DNA, 556 bp, Artificial Sequence
  chemically treated genomic DNA (Homo sapiens) CpG-island No: 2380
aacacgaaattaaaaataaaaatatacgaaaaaaaaaacgaaaaattataaataaacttaaaaaacaaccattaaaaaatataaaataacaaaataaacgaaaaacgatccaccgaacaaacacgaaaataaataaaaatacgcgaaataaaccgataactaataaaaaatcccgtaaaataaccgtaaataaataaataaaaataaaaaataaaaacgccgatcgatacgaattaataaaatacgaaaaacgacaactcgaatatatcgcaaaaaaaaaataactacaacgtaacgcacgaaaaatactcgtatataaatatacacgaaaatcacacgaaaacgtacgaaaatatataattaaacgaaaaaaataaaaatacgcgccgaaaacaaaacaaatataataaccgcgtacgaacgtaatctcacgatcgaattcaatacaataaaacgaaaactacgcctaataaatataataacgcgccaaaaataaaaacgaaaaaataaaaaaaaaaaaattaaaccataaataaatatccgctattaacgcata

SEQ ID NO: 2381 - DNA, 1141 bp, Artificial Sequence
  chemically treated genomic DNA (Homo sapiens) CpG-island No: 2381
gaggttcggtcgtttaggttttatttggagaagaaaattttcgtaatttggttgggggaggggggatgcgggtataggttgtgttttttacgtcgcgtagacgtagaggttatttttgggtcggagagttttcgtggagtggtattttagcgtttttcgtacgtcggggtcgttttgtcgggttgacgggggttttttcgggtggtcgtcggcggcgggtttcgagttagatcgggaagcggggagtagtttttagttcgcgagcgcggggtcggggtagattggaggtcgggcgggtttcgtcgagggtggggcggggtcgggcgtacgggggcggatttcggcgcgttttcggtcgttcggtggtttcggggtcgcggcggtttttttgtcgggtcgcgtcggacgattggtttcgggcggcggtttcggcggtttgtggacggacgggtgggtcgaggtataggttttacggtcgtcgtttttcgtttttgttcgcgtagagttcgcgttatggtcgtttcgtcgggttcgggtagcgttaattcgcggaagtttagtgagaagatcgcgttgtatacgtagagataggtcgaggagacgcgggttttcgagtagtttatgatcgattttattttgtcgcgggtgagggttcgggtcggcgcgggcgggggcggttacggtcgcgggcgggattcgcgcggcgggtgagaggttgcggggttaaggcgatggcggggtcgggcgggggtcgcgttcgggaatcggcggttgggagggggatcggagcggtcgcggtttcggcgttttttcgtttggcgatattcgttagtcgttcgcgatttcgggttgaggtgggagggtcgttcggtttcgtgtgcgggaagatgggtaggggtgaagttcgtggaggcgggcggtcgtgcgagggcggtttgagggggaggaggacgaggagtttcgagaggaaatcgtaaatagttcggaggtcggtcgggtggcgcggcgcggtttttggtcgtttcgaatattttttattatcgagttttgttgttttgtcggcgtggaaggtcgcgggtattttagggttttacgcgttcgtggggggagttttgtgtataagtttatttagggttcggtt

SEQ ID NO: 2382 - DNA, 1141 bp, Artificial Sequence
  chemically treated genomic DNA (Homo sapiens) CpG-island No: 2382
aaccgaaccctaaataaacttatacacaaaactccccccacgaacgcgtaaaaccctaaaatacccgcgaccttccacgccgacaaaacaacaaaactcgataataaaaaatattcgaaacgaccaaaaaccgcgccgcgccacccgaccgacctccgaactatttacgatttcctctcgaaactcctcgtcctcctccccctcaaaccgccctcgcacgaccgcccgcctccacgaacttcacccctacccatcttcccgcacacgaaaccgaacgaccctcccacctcaacccgaaatcgcgaacgactaacgaatatcgccaaacgaaaaaacgccgaaaccgcgaccgctccgatccccctcccaaccgccgattcccgaacgcgacccccgcccgaccccgccatcgccttaaccccgcaacctctcacccgccgcgcgaatcccgcccgcgaccgtaaccgcccccgcccgcgccgacccgaaccctcacccgcgacaaaataaaatcgatcataaactactcgaaaacccgcgtctcctcgacctatctctacgtatacaacgcgatcttctcactaaacttccgcgaattaacgctacccgaacccgacgaaacgaccataacgcgaactctacgcgaacaaaaacgaaaaacgacgaccgtaaaacctatacctcgacccacccgtccgtccacaaaccgccgaaaccgccgcccgaaaccaatcgtccgacgcgacccgacaaaaaaaccgccgcgaccccgaaaccaccgaacgaccgaaaacgcgccgaaatccgcccccgtacgcccgaccccgccccaccctcgacgaaacccgcccgacctccaatctaccccgaccccgcgctcgcgaactaaaaactactccccgcttcccgatctaactcgaaacccgccgccgacgaccacccgaaaaaacccccgtcaacccgacaaaacgaccccgacgtacgaaaaacgctaaaataccactccacgaaaactctccgacccaaaaataacctctacgtctacgcgacgtaaaaaacacaacctatacccgcatcccccctcccccaaccaaattacgaaaattttcttctccaaataaaacctaaacgaccgaacctc

SEQ ID NO: 2383 - DNA, 1141 bp, Artificial Sequence
  chemically treated genomic DNA (Homo sapiens) CpG-island No: 2383
ggtcgggttttggatggatttgtgtatagagttttttttacgagcgcgtgggattttggggtgttcgcggttttttacgtcggtagaatagtagggttcgatggtgggggatgttcggagcgattagaagtcgcgtcgcgttattcggtcggttttcgagttgtttgcgattttttttcggggtttttcgttttttttttttttaggtcgttttcgtacggtcgttcgtttttacgggttttatttttgtttattttttcgtatacggggtcgggcgatttttttattttagttcgggatcgcgaacggttagcgggtgtcgttaggcggggaaacgtcgaggtcgcggtcgtttcggttttttttttagtcgtcggttttcgggcgcggttttcgttcggtttcgttatcgttttggtttcgtaattttttattcgtcgcgcgggtttcgttcgcggtcgtggtcgttttcgttcgcgtcggttcgggtttttattcgcgatagggtgaggtcggttatgagttgttcgaaggttcgcgttttttcggtttgtttttgcgtgtgtagcgcgatttttttattgaattttcgcgggttggcgttgttcgagttcggcgaggcggttatggcgcggattttgcgcgggtagaagcgggagacggcggtcgtggggtttgtatttcggtttattcgttcgtttataggtcgtcggggtcgtcgttcgaagttagtcgttcggcgcgattcggtagaggagtcgtcgcggtttcggagttatcgagcggtcgggagcgcgtcgaggttcgttttcgtgcgttcggtttcgttttattttcggcggggttcgttcggtttttagtttgtttcggtttcgcgttcgcgggttgagggttgtttttcgtttttcggtttggttcgggattcgtcgtcggcggttattcggagggattttcgttagttcgataaagcggtttcggcgtacggggaacgttggggtgttattttacggagatttttcgatttagggatggtttttgcgtttacgcgacgtggagaatatagtttgtgttcgtatttttttttttttagttaaattacgaagatttttttttttaggtggaatttgggcgatcggatttt

SEQ ID NO: 2384 - DNA, 1141 bp, Artificial Sequence
  chemically treated genomic DNA (Homo sapiens) CpG-island No: 2384
aaaatccgatcgcccaaattccacctaaaaaaaaaaatcttcgtaatttaactaaaaaaaaaaaaatacgaacacaaactatattctccacgtcgcgtaaacgcaaaaaccatccctaaatcgaaaaatctccgtaaaataacaccccaacgttccccgtacgccgaaaccgctttatcgaactaacgaaaatccctccgaataaccgccgacgacgaatcccgaaccaaaccgaaaaacgaaaaacaaccctcaacccgcgaacgcgaaaccgaaacaaactaaaaaccgaacgaaccccgccgaaaataaaacgaaaccgaacgcacgaaaacgaacctcgacgcgctcccgaccgctcgataactccgaaaccgcgacgactcctctaccgaatcgcgccgaacgactaacttcgaacgacgaccccgacgacctataaacgaacgaataaaccgaaatacaaaccccacgaccgccgtctcccgcttctacccgcgcaaaatccgcgccataaccgcctcgccgaactcgaacaacgccaacccgcgaaaattcaataaaaaaatcgcgctacacacgcaaaaacaaaccgaaaaaacgcgaaccttcgaacaactcataaccgacctcaccctatcgcgaataaaaacccgaaccgacgcgaacgaaaacgaccacgaccgcgaacgaaacccgcgcgacgaataaaaaattacgaaaccaaaacgataacgaaaccgaacgaaaaccgcgcccgaaaaccgacgactaaaaaaaaaaccgaaacgaccgcgacctcgacgtttccccgcctaacgacacccgctaaccgttcgcgatcccgaactaaaataaaaaaatcgcccgaccccgtatacgaaaaaataaacaaaaataaaacccgtaaaaacgaacgaccgtacgaaaacgacctaaaaaaaaaaaaaacgaaaaaccccgaaaaaaaatcgcaaacaactcgaaaaccgaccgaataacgcgacgcgacttctaatcgctccgaacatcccccaccatcgaaccctactattctaccgacgtaaaaaaccgcgaacaccccaaaatcccacgcgctcgtaaaaaaaactctatacacaaatccatccaaaacccgacc

SEQ ID NO: 2385 - DNA, 804 bp, Artificial Sequence
  chemically treated genomic DNA (Homo sapiens) CpG-island No: 2385
gaagttaggatcgtgtcgcgttatcgttaggatatggagttattgtcgttatcgtttcgcgacgtagatttgacggttttcgacggttttttttgtttttttgttataacggacgatttttatgacgattcgtgtttcgatttttcggatttgcgttttttcgaagatttggattcgcgtttgatgtacgtgggcgcgtttttgaaattcgaagagtattcgtattttttcgcggcggtgtattcggtttcgggcgtacgtgaggacgagtatgtgcgcgcgtttagcgggtattattaggcgggtcgttgtttattgtgggtttgtaaggcgtgtaagcgtaagattattaacgtcgatcgtcgtaaggtcgttattatgcgcgagcggcgtcgtttgagtaaagtaaatgaggtttttgagatatttaagcgttgtacgtcgagtaatttaaattagcggttgtttaaggtggagattttgcgtaacgttattcgttatatcgagggtttgtaggttttgttgcgcgattaggacgtcgcgttttttggcgtcgtagtcgttttttatgcgtcgggttcgttgttttcgggtcgcggcggcgagtattatagcggcgatttcgacgcgtttagttcgcgttttaattgtttcgacggtatggtaaggtcgggattttaggaagtgaggaagttagggcggcgttcgggatattagggacgcgttttcgagggcggggagttggttttgcgggaggtttgggttaggatttttttcgagagagaggatttttttgttttgggt

SEQ ID NO: 2386 - DNA, 804 bp, Artificial Sequence
  chemically treated genomic DNA (Homo sapiens) CpG-island No: 2386
acccaaaacaaaaaaatcctctctctcgaaaaaaatcctaacccaaacctcccgcaaaaccaactccccgccctcgaaaacgcgtccctaatatcccgaacgccgccctaacttcctcacttcctaaaatcccgaccttaccataccgtcgaaacaattaaaacgcgaactaaacgcgtcgaaatcgccgctataatactcgccgccgcgacccgaaaacaacgaacccgacgcataaaaaacgactacgacgccaaaaaacgcgacgtcctaatcgcgcaacaaaacctacaaaccctcgatataacgaataacgttacgcaaaatctccaccttaaacaaccgctaatttaaattactcgacgtacaacgcttaaatatctcaaaaacctcatttactttactcaaacgacgccgctcgcgcataataacgaccttacgacgatcgacgttaataatcttacgcttacacgccttacaaacccacaataaacaacgacccgcctaataatacccgctaaacgcgcgcacatactcgtcctcacgtacgcccgaaaccgaatacaccgccgcgaaaaaatacgaatactcttcgaatttcaaaaacgcgcccacgtacatcaaacgcgaatccaaatcttcgaaaaaacgcaaatccgaaaaatcgaaacacgaatcgtcataaaaatcgtccgttataacaaaaaaacaaaaaaaaccgtcgaaaaccgtcaaatctacgtcgcgaaacgataacgacaataactccatatcctaacgataacgcgacacgatcctaacttc

SEQ ID NO: 2387 - DNA, 804 bp, Artificial Sequence
  chemically treated genomic DNA (Homo sapiens) CpG-island No: 2387
gtttaggataagggggttttttttttcgggaaggattttggtttaaatttttcgtaaggttagtttttcgttttcggaaacgcgtttttgatatttcgagcgtcgttttaatttttttattttttggggtttcggttttattatgtcgtcggagtagttggagcgcgggttggacgcgtcggagtcgtcgttgtagtgttcgtcgtcgcggttcgggggtagcgggttcggcgtatagaaggcggttgcggcgttagggggcgcggcgttttggtcgcgtagtagagtttgtaggttttcgatatagcggatggcgttgcgtaggatttttattttgggtaatcgttggtttggattgttcgacgtgtagcgtttgagtgttttaaaggttttatttattttgtttaggcggcgtcgttcgcgtatggtggcggttttgcggcggtcggcgttggtggttttgcgtttgtacgttttgtaggtttatagtaggtagcggttcgtttggtggtgttcgttgggcgcgcgtatatgttcgtttttacgtgcgttcggggtcgggtgtatcgtcgcggggaagtgcgagtgtttttcgggttttaggagcgcgtttacgtgtattaggcgcgggtttaggttttcgaagaagcgtaggttcggggagtcgaaatacgggtcgttatagaagtcgttcgttgtggtaaaggagtagagagagtcgtcgggggtcgttaggtttacgtcgcggagcggtggcgatagtagttttatattttggcggtggcgcggtacggttttggtttt

SEQ ID NO: 2388 - DNA, 804 bp, Artificial Sequence
  chemically treated genomic DNA (Homo sapiens) CpG-island No: 2388
aaaaccaaaaccgtaccgcgccaccgccaaaatataaaactactatcgccaccgctccgcgacgtaaacctaacgacccccgacgactctctctactcctttaccacaacgaacgacttctataacgacccgtatttcgactccccgaacctacgcttcttcgaaaacctaaacccgcgcctaatacacgtaaacgcgctcctaaaacccgaaaaacactcgcacttccccgcgacgatacacccgaccccgaacgcacgtaaaaacgaacatatacgcgcgcccaacgaacaccaccaaacgaaccgctacctactataaacctacaaaacgtacaaacgcaaaaccaccaacgccgaccgccgcaaaaccgccaccatacgcgaacgacgccgcctaaacaaaataaataaaacctttaaaacactcaaacgctacacgtcgaacaatccaaaccaacgattacccaaaataaaaatcctacgcaacgccatccgctatatcgaaaacctacaaactctactacgcgaccaaaacgccgcgccccctaacgccgcaaccgccttctatacgccgaacccgctacccccgaaccgcgacgacgaacactacaacgacgactccgacgcgtccaacccgcgctccaactactccgacgacataataaaaccgaaaccccaaaaaataaaaaaattaaaacgacgctcgaaatatcaaaaacgcgtttccgaaaacgaaaaactaaccttacgaaaaatttaaaccaaaatccttcccgaaaaaaaaaacccccttatcctaaac

SEQ ID NO: 2389 - DNA, 951 bp, Artificial Sequence
  chemically treated genomic DNA (Homo sapiens) CpG-island No: 2389
tggcgtttttcgagggcggatcgtgggcgggtttttcgggagtagtaggagtcgcgcggggcgggcgtttttagcgtcgaggttgagggaggtcgggttcggtgcggggttaggaggggggcgcggaattagggttttttaggatttagcgcggcgttttttttcgggggcgagtgcggttgcgcgcgtcgtgtgttcgtgttcggagagcggcgggttggacgcggatcgcgcgaacgagtaggcgacgggcgagtagtaagcggagtagtagttcgggcggtagtagcgtcgcggcggcggcggtagcggtcgtttcgcgtttcgttttatcggtttcgttggttttatttcgtcgcgttcggattcgttattttcgtattttcgttcgattttcgtagttttcgtttcggtcggtagcgtttatcgtttgttcgaagcgaggagcggagtgcggggcgtagaggtatcggagttagtgttcgtcggtttcgtaaattaaatttagttaggagaattttcgtttggtttcgtgtagtatcgcgacgtcgaggaggttttggataatttcggcggcgtttttttggataatagcgtcgacgacgcggacgtcgacggtattggcgattcgggcgacggcgaggacgagttggatatgattaaacgattggcgtttagtgattttacggatggtcggtttggcggtttttggcgtcgttgataatcgcgtattttggcgtttttcgaggattcgtattcgtttcgttacgtacgggtaaatgataatttatttattagaagagcggggttggaaggtagcgttttgtgttttttcgtaggtaggaatggatcggagaattagcgtttagggagtttaaaatcgaaagggggtgtgtttatatgtgtgtacgtattaaggtaatatatgaagtgtgttcgtcgggttttggt

SEQ ID NO: 2390 - DNA, 951 bp, Artificial Sequence
  chemically treated genomic DNA (Homo sapiens) CpG-island No: 2390
accaaaacccgacgaacacacttcatatattaccttaatacgtacacacatataaacacaccccctttcgattttaaactccctaaacgctaattctccgatccattcctacctacgaaaaaacacaaaacgctaccttccaaccccgctcttctaataaataaattatcatttacccgtacgtaacgaaacgaatacgaatcctcgaaaaacgccaaaatacgcgattatcaacgacgccaaaaaccgccaaaccgaccatccgtaaaatcactaaacgccaatcgtttaatcatatccaactcgtcctcgccgtcgcccgaatcgccaataccgtcgacgtccgcgtcgtcgacgctattatccaaaaaaacgccgccgaaattatccaaaacctcctcgacgtcgcgatactacacgaaaccaaacgaaaattctcctaactaaatttaatttacgaaaccgacgaacactaactccgatacctctacgccccgcactccgctcctcgcttcgaacaaacgataaacgctaccgaccgaaacgaaaactacgaaaatcgaacgaaaatacgaaaataacgaatccgaacgcgacgaaataaaaccaacgaaaccgataaaacgaaacgcgaaacgaccgctaccgccgccgccgcgacgctactaccgcccgaactactactccgcttactactcgcccgtcgcctactcgttcgcgcgatccgcgtccaacccgccgctctccgaacacgaacacacgacgcgcgcaaccgcactcgcccccgaaaaaaaacgccgcgctaaatcctaaaaaaccctaattccgcgcccccctcctaaccccgcaccgaacccgacctccctcaacctcgacgctaaaaacgcccgccccgcgcgactcctactactcccgaaaaacccgcccacgatccgccctcgaaaaacgcca

SEQ ID NO: 2391 - DNA, 951 bp, Artificial Sequence
  chemically treated genomic DNA (Homo sapiens) CpG-island No: 2391
attagaattcggcggatatattttatatgttattttggtacgtgtatatatgtgaatatattttttttcgattttgaattttttaggcgttagtttttcggtttatttttgtttgcggggaggtataggacgttgttttttagtttcgtttttttgatgggtaaattgttatttattcgtgcgtagcgggacgagtacgggttttcgaagagcgttaagatgcgcggttgttagcggcgttaaaagtcgttagatcggttattcgtggagttattgagcgttagtcgtttggttatgtttagttcgttttcgtcgtcgttcgagtcgttagtgtcgtcggcgttcgcgtcgtcggcgttgttgtttagaggagcgtcgtcgaagttgtttagagttttttcggcgtcgcggtgttgtacggggttaggcgggggtttttttggttgggtttgatttgcggggtcggcgggtattggtttcggtgtttttgcgtttcgtatttcgtttttcgtttcgggtaggcggtgggcgttgtcggtcgagacgggggttgcggaggtcgggcggggatgcgggggtggcgggttcgggcgcggcgaggtgaggttagcgaggtcggtgaggcgaggcgcggagcggtcgttgtcgtcgtcgtcgcgacgttgttgtcgttcgggttgttgtttcgtttgttgttcgttcgtcgtttgttcgttcgcgcggttcgcgtttagttcgtcgtttttcggatacgggtatacggcgcgcgtagtcgtattcgttttcggaggaaggcgtcgcgttgggttttaaaaagttttgatttcgcgttttttttttagtttcgtatcgagttcggttttttttaatttcggcgttgggggcgttcgtttcgcgcggtttttgttgttttcgggggattcgtttacggttcgttttcggggaacgtta

SEQ ID NO: 2392 - DNA, 951 bp, Artificial Sequence
  chemically treated genomic DNA (Homo sapiens) CpG-island No: 2392
taacgttccccgaaaacgaaccgtaaacgaatcccccgaaaacaacaaaaaccgcgcgaaacgaacgcccccaacgccgaaattaaaaaaaaccgaactcgatacgaaactaaaaaaaaaacgcgaaatcaaaactttttaaaacccaacgcgacgccttcctccgaaaacgaatacgactacgcgcgccgtatacccgtatccgaaaaacgacgaactaaacgcgaaccgcgcgaacgaacaaacgacgaacgaacaacaaacgaaacaacaacccgaacgacaacaacgtcgcgacgacgacgacaacgaccgctccgcgcctcgcctcaccgacctcgctaacctcacctcgccgcgcccgaacccgccacccccgcatccccgcccgacctccgcaacccccgtctcgaccgacaacgcccaccgcctacccgaaacgaaaaacgaaatacgaaacgcaaaaacaccgaaaccaatacccgccgaccccgcaaatcaaacccaaccaaaaaaacccccgcctaaccccgtacaacaccgcgacgccgaaaaaactctaaacaacttcgacgacgctcctctaaacaacaacgccgacgacgcgaacgccgacgacactaacgactcgaacgacgacgaaaacgaactaaacataaccaaacgactaacgctcaataactccacgaataaccgatctaacgacttttaacgccgctaacaaccgcgcatcttaacgctcttcgaaaacccgtactcgtcccgctacgcacgaataaataacaatttacccatcaaaaaaacgaaactaaaaaacaacgtcctatacctccccgcaaacaaaaataaaccgaaaaactaacgcctaaaaaattcaaaatcgaaaaaaaatatattcacatatatacacgtaccaaaataacatataaaatatatccgccgaattctaat

SEQ ID NO: 2393 - DNA, 585 bp, Artificial Sequence
  chemically treated genomic DNA (Homo sapiens) CpG-island No: 2393
ggttttatttagagtttttttagagtcgcgttgcgtttcgttcgtacgtaaatttcgtttttttgcgtttttttattcgtagcgtttaggattttagaaagggtttgtttcgcgcgaatttttagtcgttgggatttatttggttattaggtttatagatttcgtagtcgttgagagttagagaagagttcggagagcgttatggttcggggacgtcggggtcgggaagcgtcgtggttcgggaggacgttgttttcgtagtagcgcgagggaggggtaggatcggggcggttgtttcgcgggttcggaacgggaattggttgcgattatagtcgtagtcgcgtttttttgttggcgcgtttaagagtttgtcggttgttgggagaggtcgtcgaagggcgggggcggttaaggtagggttttacggtgttgttattcgttcgggtttggcgcgggggggcgagagaagttgcgcgtagagggacgttcggtgcgagagggtgagtttttggttatcgcgtagggtcgagtggataggtttaagttcgtttagaggtgatatatttgggaatttgtggtgttatt

SEQ ID NO: 2394 - DNA, 585 bp, Artificial Sequence
  chemically treated genomic DNA (Homo sapiens) CpG-island No: 2394
aataacaccacaaattcccaaatatatcacctctaaacgaacttaaacctatccactcgaccctacgcgataaccaaaaactcaccctctcgcaccgaacgtccctctacgcgcaacttctctcgcccccccgcgccaaacccgaacgaataacaacaccgtaaaaccctaccttaaccgcccccgcccttcgacgacctctcccaacaaccgacaaactcttaaacgcgccaacaaaaaaacgcgactacgactataatcgcaaccaattcccgttccgaacccgcgaaacaaccgccccgatcctacccctccctcgcgctactacgaaaacaacgtcctcccgaaccacgacgcttcccgaccccgacgtccccgaaccataacgctctccgaactcttctctaactctcaacgactacgaaatctataaacctaataaccaaataaatcccaacgactaaaaattcgcgcgaaacaaaccctttctaaaatcctaaacgctacgaataaaaaaacgcaaaaaaacgaaatttacgtacgaacgaaacgcaacgcgactctaaaaaaactctaaataaaacc

SEQ ID NO: 2395 - DNA, 585 bp, Artificial Sequence
  chemically treated genomic DNA (Homo sapiens) CpG-island No: 2395
gatggtattataaatttttaagtgtgttatttttgggcgaatttgggtttgtttattcggttttgcgcggtggttaggggtttattttttcgtatcgggcgtttttttgcgcgtagtttttttcgttttttcgcgttagattcgggcgaatggtagtatcgtgggattttgttttgatcgttttcgtttttcggcggttttttttagtagtcggtaggtttttgggcgcgttaatagaggggcgcggttgcggttgtagtcgtagttagttttcgtttcgggttcgcgaggtagtcgtttcggttttgtttttttttcgcgttattgcgggagtagcgttttttcgggttacggcgtttttcggtttcggcgttttcggattatggcgtttttcgggtttttttttagtttttagcggttgcgaagtttgtaaatttggtggttaagtaagttttagcgattggggattcgcgcggggtaggttttttttgaggttttgggcgttgcgagtgaggaggcgtagggaggcgggatttgcgtgcgggcggaacgtagcgcggttttggaggagttttgggtggaatt

SEQ ID NO: 2396 - DNA, 585 bp, Artificial Sequence
  chemically treated genomic DNA (Homo sapiens) CpG-island No: 2396
aattccacccaaaactcctccaaaaccgcgctacgttccgcccgcacgcaaatcccgcctccctacgcctcctcactcgcaacgcccaaaacctcaaaaaaaacctaccccgcgcgaatccccaatcgctaaaacttacttaaccaccaaatttacaaacttcgcaaccgctaaaaactaaaaaaaaacccgaaaaacgccataatccgaaaacgccgaaaccgaaaaacgccgtaacccgaaaaaacgctactcccgcaataacgcgaaaaaaaaacaaaaccgaaacgactacctcgcgaacccgaaacgaaaactaactacgactacaaccgcaaccgcgcccctctattaacgcgcccaaaaacctaccgactactaaaaaaaaccgccgaaaaacgaaaacgatcaaaacaaaatcccacgatactaccattcgcccgaatctaacgcgaaaaaacgaaaaaaactacgcgcaaaaaaacgcccgatacgaaaaaataaacccctaaccaccgcgcaaaaccgaataaacaaacccaaattcgcccaaaaataacacacttaaaaatttataataccatc

SEQ ID NO: 2397 - DNA, 597 bp, Artificial Sequence
  chemically treated genomic DNA (Homo sapiens) CpG-island No: 2397
agagcgacgaggtgagggaagaaaaaaggggcgggtaagagagagttgggaattttaaagcgttaattgcgtgcgcggcgtacgcgtatttgggatcggcggagggtgttgggtttttaggttttacgtttgagggttgtcgtttgtttttcggttcggtcgggaatagcgagggttttcgttgttttgtcgtcgggttttgcgtcgttttattgttttttcggttgagtatttattattcgattgtttcgtttttttatggtgttggatcgagcgtatagtagtacgtcgagggaaatcgggtcggagagattgtcgaagagggtttgtcgtaggtttttttgtcgtttttttatttcgtttagagagcggtattacgcggattcgacggtcgcgttttgttatagcgttttttatttttgtggaggataggtcggttttagagatcgttgtagttggcggagcgtttgtaggagttcggtcgtttattaggtatttaagagtaggcgacgttgcgtttttgtatcggagttttattaaggtagttcgttttagtttggttttggattgttttgtttttttttatttttttttttt

SEQ ID NO: 2398 - DNA, 597 bp, Artificial Sequence
  chemically treated genomic DNA (Homo sapiens) CpG-island No: 2398
aaaaaaaaaaaataaaaaaaaacaaaacaatccaaaaccaaactaaaacgaactaccttaataaaactccgatacaaaaacgcaacgtcgcctactcttaaatacctaataaacgaccgaactcctacaaacgctccgccaactacaacgatctctaaaaccgacctatcctccacaaaaataaaaaacgctataacaaaacgcgaccgtcgaatccgcgtaataccgctctctaaacgaaataaaaaaacgacaaaaaaacctacgacaaaccctcttcgacaatctctccgacccgatttccctcgacgtactactatacgctcgatccaacaccataaaaaaacgaaacaatcgaataataaatactcaaccgaaaaaacaataaaacgacgcaaaacccgacgacaaaacaacgaaaaccctcgctattcccgaccgaaccgaaaaacaaacgacaaccctcaaacgtaaaacctaaaaacccaacaccctccgccgatcccaaatacgcgtacgccgcgcacgcaattaacgctttaaaattcccaactctctcttacccgccccttttttcttccctcacctcgtcgctct

SEQ ID NO: 2399 - DNA, 597 bp, Artificial Sequence
  chemically treated genomic DNA (Homo sapiens) CpG-island No: 2399
aaaaaaaaagaatggaagaaagtaaaataatttaaggttaaattgaagcgagttgttttggtggggtttcggtgtagaagcgtagcgtcgtttgtttttgggtgtttaatgaacgatcggatttttgtaggcgtttcgttaattgtagcgatttttggagtcggtttgttttttatagagatagggggcgttgtagtagagcgcggtcgtcgagttcgcgtggtgtcgttttttaggcggagtggggaggcggtaagaggatttgcggtaggtttttttcggtagttttttcggttcggtttttttcggcgtgttattgtgcgttcgatttagtattatggggaagcgggataatcgggtggtgagtatttagtcgggaaaatagtggggcgacgtagggttcggcggtaggatagcgagaattttcgttgttttcggtcgggtcggagggtaagcggtagtttttagacgtggggtttggagatttagtatttttcgtcgattttagatgcgcgtgcgtcgcgtacgtagttggcgttttagggtttttagtttttttttgttcgttttttttttttttttttatttcgtcgtttt

SEQ ID NO: 2400 - DNA, 597 bp, Artificial Sequence
  chemically treated genomic DNA (Homo sapiens) CpG-island No: 2400
aaaacgacgaaataaaaaaaaaaaaaaaaaacgaacaaaaaaaaactaaaaaccctaaaacgccaactacgtacgcgacgcacgcgcatctaaaatcgacgaaaaatactaaatctccaaaccccacgtctaaaaactaccgcttaccctccgacccgaccgaaaacaacgaaaattctcgctatcctaccgccgaaccctacgtcgccccactattttcccgactaaatactcaccacccgattatcccgcttccccataatactaaatcgaacgcacaataacacgccgaaaaaaaccgaaccgaaaaaactaccgaaaaaaacctaccgcaaatcctcttaccgcctccccactccgcctaaaaaacgacaccacgcgaactcgacgaccgcgctctactacaacgccccctatctctataaaaaacaaaccgactccaaaaatcgctacaattaacgaaacgcctacaaaaatccgatcgttcattaaacacccaaaaacaaacgacgctacgcttctacaccgaaaccccaccaaaacaactcgcttcaatttaaccttaaattattttactttcttccattcttttttttt

SEQ ID NO: 2401 - DNA, 581 bp, Artificial Sequence
  chemically treated genomic DNA (Homo sapiens) CpG-island No: 2401
aggaggcggcggcggcggcggcggcggcggcggagggcggggagggagcgcgcgcgtggttcgcggcgttcgggtttttttttagttttcgatttcggttcgcgacgcgtcgttttttagtcgtcgtcgttcgtttcgtagttgggatttatttcgggtttggggattcggcgggcgggagaagcgggggttttcggcgcggtttggaaggagcgagaaagtaaaagtaaggcgagtagtattttaagtttttttaatttcgttttttgcggcggtaggcgttttgttgtttagcgcgtttttttcgagttcgagagtggttgaaagaaaagggattgggcgggggtcggggcggaggaagagagagtgcgagggagcgaggagagttcggtaatatttgttaaaatttgggggaggaggagcgcggggaggaggaggaagaggaggagagaagggaaggagggagcgcgcgggaggggagcgcggagtcgagggataatttttttatttcgtgagtagtgtaggcggtgttaggtcggggcggggggtttttttatttagtacggggtattaggtcggga

SEQ ID NO: 2402 - DNA, 581 bp, Artificial Sequence
  chemically treated genomic DNA (Homo sapiens) CpG-island No: 2402
tcccgacctaataccccgtactaaataaaaaaaccccccgccccgacctaacaccgcctacactactcacgaaataaaaaaattatccctcgactccgcgctcccctcccgcgcgctccctccttcccttctctcctcctcttcctcctcctccccgcgctcctcctcccccaaattttaacaaatattaccgaactctcctcgctccctcgcactctctcttcctccgccccgacccccgcccaatcccttttctttcaaccactctcgaactcgaaaaaaacgcgctaaacaacaaaacgcctaccgccgcaaaaaacgaaattaaaaaaacttaaaatactactcgccttacttttactttctcgctccttccaaaccgcgccgaaaacccccgcttctcccgcccgccgaatccccaaacccgaaataaatcccaactacgaaacgaacgacgacgactaaaaaacgacgcgtcgcgaaccgaaatcgaaaactaaaaaaaaacccgaacgccgcgaaccacgcgcgcgctccctccccgccctccgccgccgccgccgccgccgccgccgcctcct

SEQ ID NO: 2403 - DNA, 581 bp, Artificial Sequence
  chemically treated genomic DNA (Homo sapiens) CpG-island No: 2403
tttcggtttggtgtttcgtgttgggtggagaagtttttcgtttcgatttggtatcgtttgtattatttacggggtggaaaagttgtttttcggtttcgcgtttttttttcgcgcgttttttttttttttttttttttttttttttttttttttttcgcgtttttttttttttaagttttaatagatgttgtcggatttttttcgttttttcgtatttttttttttttcgtttcggttttcgtttagtttttttttttttagttattttcgggttcggaggggacgcgttgagtagtaggacgtttgtcgtcgtagggggcgaagttgggaaaatttggagtgttgttcgttttatttttgttttttcgttttttttaggtcgcgtcgggagttttcgtttttttcgttcgtcgggtttttaagttcggagtgggttttagttgcgaggcgggcggcggcggttgggaggcggcgcgtcgcgggtcggggtcgggggttgggggggagttcgggcgtcgcgagttacgcgcgcgtttttttttcgtttttcgtcgtcgtcgtcgtcgtcgtcgtcgtttttt

SEQ ID NO: 2404 - DNA, 581 bp, Artificial Sequence
  chemically treated genomic DNA (Homo sapiens) CpG-island No: 2404
aaaaaacgacgacgacgacgacgacgacgacgaaaaacgaaaaaaaaacgcgcgcgtaactcgcgacgcccgaactcccccccaacccccgaccccgacccgcgacgcgccgcctcccaaccgccgccgcccgcctcgcaactaaaacccactccgaacttaaaaacccgacgaacgaaaaaaacgaaaactcccgacgcgacctaaaaaaaacgaaaaaacaaaaataaaacgaacaacactccaaattttcccaacttcgccccctacgacgacaaacgtcctactactcaacgcgtcccctccgaacccgaaaataactaaaaaaaaaaaaactaaacgaaaaccgaaacgaaaaaaaaaaaaatacgaaaaaacgaaaaaaatccgacaacatctattaaaacttaaaaaaaaaaaaacgcgaaaaaaaaaaaaaaaaaaaaaaaaaaaaaaaaaaaaaaaacgcgcgaaaaaaaaacgcgaaaccgaaaaacaacttttccaccccgtaaataatacaaacgataccaaatcgaaacgaaaaacttctccacccaacacgaaacaccaaaccgaaa

SEQ ID NO: 2405 - DNA, 931 bp, Artificial Sequence
  chemically treated genomic DNA (Homo sapiens) CpG-island No: 2405
acgattttcgaaattgatgtcggagttgtacgagcgggagggagcgggtaggggtagcgttatcggcgcgttcgtatattcgtattcgcgtatattcgtcgtttttatttattcgcgtcgttttttcgtttttttcgcgcgtttcgcggtcgttcgcgtcgtattatgttcgcggcgggcgtatttcgcgtttagttcggtcgttcgcggtagtcgtagtcgttcgcggtcgcgcggagcggggagtcgttagtttgcgtttcgttcgcgggtttatgggaagttcggggatttgatagtcgttgtcgtcgtaggtacgtttcgttcgaagttttttgtttcgcggatttcgtagttcgtttttgcggtcgcgttcgcgttttcggggttagaggtggtttttagcgtggggacgggatggagtgaaaatggttgttaaaaggcgtttagatttagagagtcgtcggtgaggcgttcgagtaaggtttgtattcgttttttttttttggaaggtttttttcgaagagttcgattcgcggatcggtcggagacggattggagaattttatttttcggaggggggacgaagtttgtcgtagtggtggcggcgtttttcgttttcgtttttatttaaagggtttagaagaatttcgcgagtttcgtacgcgtttggtttttttttttgcgcggtggcgttttacggttcgggtttcgggcgcgtacggcgttcgggatgggcggaaggaggcgggaggtatggtgggtgcgcgcggggattttcgtcgcgggggtcgtcgtcgttggggtttttttagttcgggttatgtttcggagggcgggggtgtggtgtgagcggatggagagaggcgcgttttcgtcgttatagaggaaaagtgaaagttgtattatttgtatatgatttgggattttt

SEQ ID NO: 2406 - DNA, 931 bp, Artificial Sequence
  chemically treated genomic DNA (Homo sapiens) CpG-island No: 2406
aaaaatcccaaatcatatacaaataatacaactttcacttttcctctataacgacgaaaacgcgcctctctccatccgctcacaccacacccccgccctccgaaacataacccgaactaaaaaaaccccaacgacgacgacccccgcgacgaaaatccccgcgcgcacccaccatacctcccgcctccttccgcccatcccgaacgccgtacgcgcccgaaacccgaaccgtaaaacgccaccgcgcaaaaaaaaaaaccaaacgcgtacgaaactcgcgaaattcttctaaaccctttaaataaaaacgaaaacgaaaaacgccgccaccactacgacaaacttcgtcccccctccgaaaaataaaattctccaatccgtctccgaccgatccgcgaatcgaactcttcgaaaaaaaccttccaaaaaaaaaaaacgaatacaaaccttactcgaacgcctcaccgacgactctctaaatctaaacgccttttaacaaccattttcactccatcccgtccccacgctaaaaaccacctctaaccccgaaaacgcgaacgcgaccgcaaaaacgaactacgaaatccgcgaaacaaaaaacttcgaacgaaacgtacctacgacgacaacgactatcaaatccccgaacttcccataaacccgcgaacgaaacgcaaactaacgactccccgctccgcgcgaccgcgaacgactacgactaccgcgaacgaccgaactaaacgcgaaatacgcccgccgcgaacataatacgacgcgaacgaccgcgaaacgcgcgaaaaaaacgaaaaaacgacgcgaataaataaaaacgacgaatatacgcgaatacgaatatacgaacgcgccgataacgctacccctacccgctccctcccgctcgtacaactccgacatcaatttcgaaaatcgt

SEQ ID NO: 2407 - DNA, 931 bp, Artificial Sequence
  chemically treated genomic DNA (Homo sapiens) CpG-island No: 2407
gagaattttaaattatatatagatggtataatttttattttttttttatgacgacgaaggcgcgtttttttttattcgtttatattatattttcgtttttcgaagtatagttcgggttggagaagttttagcggcggcggttttcgcggcggaggttttcgcgcgtatttattatgtttttcgttttttttcgtttatttcgagcgtcgtgcgcgttcgaagttcgagtcgtagagcgttatcgcgtaaaggaaggagttaggcgcgtgcggggttcgcggagtttttttgaattttttggatgggggcggaggcgaggggcgtcgttattattgcggtaaatttcgtttttttttcgggaggtgaaattttttaattcgttttcggtcggttcgcgggtcggatttttcggaaaggattttttaggaggagggagcgaatgtaagttttgttcggacgttttatcggcggttttttaaatttgggcgttttttgatagttatttttattttatttcgtttttacgttggggattatttttggtttcggaggcgcgggcgcggtcgtaggagcgggttgcggggttcgcgaaataaagaatttcgagcgggacgtatttgcggcggtagcggttgttaagttttcgaattttttatagattcgcggacggggcgtaggttggcggtttttcgtttcgcgcggtcgcgggcggttacggttatcgcgagcggtcgggttgggcgcggggtgcgttcgtcgcgggtatggtgcggcgcgggcggtcgcggggcgcgcggggaaggcgggagagcggcgcgggtgagtgggagcggcgggtgtgcgcgagtgcgagtgtgcgagcgcgtcggtggcgttgtttttgttcgttttttttcgttcgtgtagtttcggtattagtttcggggatcgt

SEQ ID NO: 2408 - DNA, 931 bp, Artificial Sequence
  chemically treated genomic DNA (Homo sapiens) CpG-island No: 2408
acgatccccgaaactaataccgaaactacacgaacgaaaaaaaacgaacaaaaacaacgccaccgacgcgctcgcacactcgcactcgcgcacacccgccgctcccactcacccgcgccgctctcccgccttccccgcgcgccccgcgaccgcccgcgccgcaccatacccgcgacgaacgcaccccgcgcccaacccgaccgctcgcgataaccgtaaccgcccgcgaccgcgcgaaacgaaaaaccgccaacctacgccccgtccgcgaatctataaaaaattcgaaaacttaacaaccgctaccgccgcaaatacgtcccgctcgaaattctttatttcgcgaaccccgcaacccgctcctacgaccgcgcccgcgcctccgaaaccaaaaataatccccaacgtaaaaacgaaataaaataaaaataactatcaaaaaacgcccaaatttaaaaaaccgccgataaaacgtccgaacaaaacttacattcgctccctcctcctaaaaaatcctttccgaaaaatccgacccgcgaaccgaccgaaaacgaattaaaaaatttcacctcccgaaaaaaaaacgaaatttaccgcaataataacgacgcccctcgcctccgcccccatccaaaaaattcaaaaaaactccgcgaaccccgcacgcgcctaactccttcctttacgcgataacgctctacgactcgaacttcgaacgcgcacgacgctcgaaataaacgaaaaaaaacgaaaaacataataaatacgcgcgaaaacctccgccgcgaaaaccgccgccgctaaaacttctccaacccgaactatacttcgaaaaacgaaaatataatataaacgaataaaaaaaaacgcgccttcgtcgtcataaaaaaaaaataaaaattataccatctatatataatttaaaattctc

SEQ ID NO: 2409 - DNA, 661 bp, Artificial Sequence
  chemically treated genomic DNA (Homo sapiens) CpG-island No: 2409
gttgatcgtgtttagtaggaaggatagttcgatcgagaggtcgtttagtatggagaagagtagttcgaaggttacgttttcggattcggcgtttagcgttaggaagtattaggatttcgggtattgtacggtgtagcgatttacgtttagtaggggtagtaggtttagcgttagcgcggtcgtttatattagttttacggtggtttaggcgcggcgttgcgaggcgatcgtcgggcgcgagaagggtcgggtgatatttaggtagcgttttgaggttatggcggtttttagtagtagcggggataggtcgaagaagattatgacgacgtttatgaagcgatagagacggtagttagggtttacggcgtgttattcgaagagcgcggcgtgttgggatattacgatggtatcggttattagtagttttaggaagtcggtgaggacgaggtcgtagaggaaggtgaggaaggaggagcgcgtgtgcgaatttttttgtcgcgcgttcgttagtacgtttagggttagtaggttggaggttaggtttattacgtagaaggaggcggcgaattagggcgaggcgattagtcgttttttttttagggtaatgtttgtgggtcggaaatagggttttagggaattgtcgttgggttatatggtttcg

SEQ ID NO: 2410 - DNA, 661 bp, Artificial Sequence
  chemically treated genomic DNA (Homo sapiens) CpG-island No: 2410
cgaaaccatataacccaacgacaattccctaaaaccctatttccgacccacaaacattaccctaaaaaaaaaacgactaatcgcctcgccctaattcgccgcctccttctacgtaataaacctaacctccaacctactaaccctaaacgtactaacgaacgcgcgacaaaaaaattcgcacacgcgctcctccttcctcaccttcctctacgacctcgtcctcaccgacttcctaaaactactaataaccgataccatcgtaatatcccaacacgccgcgctcttcgaataacacgccgtaaaccctaactaccgtctctatcgcttcataaacgtcgtcataatcttcttcgacctatccccgctactactaaaaaccgccataacctcaaaacgctacctaaatatcacccgacccttctcgcgcccgacgatcgcctcgcaacgccgcgcctaaaccaccgtaaaactaatataaacgaccgcgctaacgctaaacctactacccctactaaacgtaaatcgctacaccgtacaatacccgaaatcctaatacttcctaacgctaaacgccgaatccgaaaacgtaaccttcgaactactcttctccatactaaacgacctctcgatcgaactatccttcctactaaacacgatcaac

SEQ ID NO: 2411 - DNA, 661 bp, Artificial Sequence
  chemically treated genomic DNA (Homo sapiens) CpG-island No: 2411
cggagttatgtggtttaacggtagttttttggggttttgttttcggtttataaatattattttggaggagagacggttgatcgtttcgttttggttcgtcgtttttttttgcgtggtgggtttggtttttaatttgttggttttgagcgtgttggcgggcgcgcggtaggggggttcgtatacgcgtttttttttttttatttttttttgcggtttcgtttttatcgattttttggggttgttggtgatcggtattatcgtggtgttttagtacgtcgcgtttttcgagtggtacgtcgtggattttggttgtcgtttttgtcgttttatgggcgtcgttatgatttttttcggtttgttttcgttgttgttgggggtcgttatggttttagagcgttatttgggtattattcggtttttttcgcgttcggcggtcgtttcgtagcgtcgcgtttgggttatcgtggggttggtgtgggcggtcgcgttggcgttgggtttgttgtttttgttgggcgtgggtcgttatatcgtgtaatattcggggttttggtgttttttgacgttgggcgtcgagttcggggacgtggttttcgggttgtttttttttatgttgggcggtttttcggtcgggttgttttttttgttgaatacggttagt

SEQ ID NO: 2412 - DNA, 661 bp, Artificial Sequence
  chemically treated genomic DNA (Homo sapiens) CpG-island No: 2412
actaaccgtattcaacaaaaaaaacaacccgaccgaaaaaccgcccaacataaaaaaaaacaacccgaaaaccacgtccccgaactcgacgcccaacgtcaaaaaacaccaaaaccccgaatattacacgatataacgacccacgcccaacaaaaacaacaaacccaacgccaacgcgaccgcccacaccaaccccacgataacccaaacgcgacgctacgaaacgaccgccgaacgcgaaaaaaaccgaataatacccaaataacgctctaaaaccataacgacccccaacaacaacgaaaacaaaccgaaaaaaatcataacgacgcccataaaacgacaaaaacgacaaccaaaatccacgacgtaccactcgaaaaacgcgacgtactaaaacaccacgataataccgatcaccaacaaccccaaaaaatcgataaaaacgaaaccgcaaaaaaaaataaaaaaaaaaaaacgcgtatacgaacccccctaccgcgcgcccgccaacacgctcaaaaccaacaaattaaaaaccaaacccaccacgcaaaaaaaaacgacgaaccaaaacgaaacgatcaaccgtctctcctccaaaataatatttataaaccgaaaacaaaaccccaaaaaactaccgttaaaccacataactccg

SEQ ID NO: 2413 - DNA, 589 bp, Artificial Sequence
  chemically treated genomic DNA (Homo sapiens) CpG-island No: 2413
tatcgtcgatagcggtagcgtttgaagtgaaattatagttggaagatgtcgttggtaaattggtagcggaagtcgtggcggtgcgagtatttttattcgcggttgacgattttgaaagcgatgttttcgtagggcggtttcgcgtggaagcgtaggatggcgaaatttttgttgtcggcgtaggtttttaggaagtattcgggcgtggagcgtttgtcgatgaggtcggggtagaagatgttgaatttgtatttttgtacgattttgggcggtgggttgttaaagtcgtagtgcgtttggttgtatttgttttattcgaagttcgtgtgtacgcggttgaagaagcgcggtttgcgtggtcggtatttgtcggtttataggtaggttttgtcggtgagtggtatttttacgttgaattgcgtttcgttttggtttatgttttttttggttcgtcggaagaagatgttttcggcgttttcgttggcgttttttgcgggcgggacggcgtttattcgggtttcggtttttttttgggttttggttttttttttagtttttttggtaggggcggtcgttggtgtttttcgta

SEQ ID NO: 2414 - DNA, 589 bp, Artificial Sequence
  chemically treated genomic DNA (Homo sapiens) CpG-island No: 2414
tacgaaaaacaccaacgaccgcccctaccaaaaaaactaaaaaaaaaaccaaaacccaaaaaaaaaccgaaacccgaataaacgccgtcccgcccgcaaaaaacgccaacgaaaacgccgaaaacatcttcttccgacgaaccaaaaaaaacataaaccaaaacgaaacgcaattcaacgtaaaaataccactcaccgacaaaacctacctataaaccgacaaataccgaccacgcaaaccgcgcttcttcaaccgcgtacacacgaacttcgaataaaacaaatacaaccaaacgcactacgactttaacaacccaccgcccaaaatcgtacaaaaatacaaattcaacatcttctaccccgacctcatcgacaaacgctccacgcccgaatacttcctaaaaacctacgccgacaacaaaaatttcgccatcctacgcttccacgcgaaaccgccctacgaaaacatcgctttcaaaatcgtcaaccgcgaataaaaatactcgcaccgccacgacttccgctaccaatttaccaacgacatcttccaactataatttcacttcaaacgctaccgctatcgacgata

SEQ ID NO: 2415 - DNA, 589 bp, Artificial Sequence
  chemically treated genomic DNA (Homo sapiens) CpG-island No: 2415
tgcgggaggtattagcggtcgtttttgttagagaggttaggagggaggttaggatttagggggaggtcgaggttcgggtgaacgtcgtttcgttcgtaggagacgttagcgagagcgtcgaggatattttttttcggcgggttaaggagggtatgggttaggacgaggcgtagtttagcgtggagatgttatttatcggtaaggtttatttgtgggtcgataagtatcggttacgtaagtcgcgtttttttaatcgcgtgtatacgggtttcgagtggaataagtataattagacgtattacgattttgataatttatcgtttaagatcgtgtagggatataagtttaatattttttatttcgattttatcgataagcgttttacgttcgagtattttttggaggtttgcgtcgataataaggatttcgttattttgcgtttttacgcggggtcgttttacgaggatatcgtttttaagatcgttaatcgcgagtgggaatattcgtatcgttacggttttcgttgttagtttgttaacggtattttttagttgtggttttattttaagcgttatcgttatcggcggtg

SEQ ID NO: 2416 - DNA, 589 bp, Artificial Sequence
  chemically treated genomic DNA (Homo sapiens) CpG-island No: 2416
caccgccgataacgataacgcttaaaataaaaccacaactaaaaaataccgttaacaaactaacaacgaaaaccgtaacgatacgaatattcccactcgcgattaacgatcttaaaaacgatatcctcgtaaaacgaccccgcgtaaaaacgcaaaataacgaaatccttattatcgacgcaaacctccaaaaaatactcgaacgtaaaacgcttatcgataaaatcgaaataaaaaatattaaacttatatccctacacgatcttaaacgataaattatcaaaatcgtaatacgtctaattatacttattccactcgaaacccgtatacacgcgattaaaaaaacgcgacttacgtaaccgatacttatcgacccacaaataaaccttaccgataaataacatctccacgctaaactacgcctcgtcctaacccataccctccttaacccgccgaaaaaaaatatcctcgacgctctcgctaacgtctcctacgaacgaaacgacgttcacccgaacctcgacctccccctaaatcctaacctccctcctaacctctctaacaaaaacgaccgctaatacctcccgca

SEQ ID NO: 2417 - DNA, 1038 bp, Artificial Sequence
  chemically treated genomic DNA (Homo sapiens) CpG-island No: 2417
ggcgcgcggcggttcgagagattttattttggggttttaacgttttgggtttttttagttcgaggtttttatttacgtttcggcgatttttttattcgtagtagttagcgttggaagaaaggaacgcgtcggcggttttaggttttcggtttcggttttttttagttcggggttttttcgtttcggttttcggttatattgattcgaaagaggcgcgtagtggtcgcggagcgtagggcggtttagtttagcgcgtcgagcgttagtagtagtagttcgggcggcgttaggtgcgcgtgtttagttaggtcgcgacgcgttagtttttagtcgtagttcgtgtagtttcgcgtcgtcgttagcgcgttgttttagtcgcgttgtattagttgcgcgtagttcggtatgggttcgggtttcgtcggtttcgtcgcgggtttcgtcgtcgttatatcgttcgttcgttcgtcgtgttcgtcgtttgcgttcgttcgcggtagtcgacggagtcgcgcgtttcgcgttacgcgtcgtagttgggtcgggggcgcgcgggcgggagagcggagggcggaggggcgggatcggcgtaagtttcgtttcgttgggggcgcggttggggggcggttagcggggacgcggggcgttttggaggcgggttcgcgtttttgttcgttttttagtagagaaatttaggcgcgggggtcggagttgggggttcgttggatttggatttcgagagatttcgcgtatcgtcgtgtcgcgtttttatgtttgtttcgcgcgtttttcgtttttttattttatcgcgtcgtgttcgtgacggggggtacgggggatattagtaggtagttttttcgattggcgattttcgtttttttcggttttttagtacgttacgtcgttttcgttttatcgtttcggttcgtttcgattttatcgtttttggagttttcgtttttttttaaggattcgaggtttggtacgttttggtatagttttgggattatttcgtggttttttcgtatttaggaggcg

SEQ ID NO: 2418 - DNA, 1038 bp, Artificial Sequence
  chemically treated genomic DNA (Homo sapiens) CpG-island No: 2418
cgcctcctaaatacgaaaaaaccacgaaataatcccaaaactataccaaaacgtaccaaacctcgaatccttaaaaaaaaacgaaaactccaaaaacgataaaatcgaaacgaaccgaaacgataaaacgaaaacgacgtaacgtactaaaaaaccgaaaaaaacgaaaatcgccaatcgaaaaaactacctactaatatcccccgtaccccccgtcacgaacacgacgcgataaaataaaaaaacgaaaaacgcgcgaaacaaacataaaaacgcgacacgacgatacgcgaaatctctcgaaatccaaatccaacgaacccccaactccgacccccgcgcctaaatttctctactaaaaaacgaacaaaaacgcgaacccgcctccaaaacgccccgcgtccccgctaaccgccccccaaccgcgcccccaacgaaacgaaacttacgccgatcccgcccctccgccctccgctctcccgcccgcgcgcccccgacccaactacgacgcgtaacgcgaaacgcgcgactccgtcgactaccgcgaacgaacgcaaacgacgaacacgacgaacgaacgaacgatataacgacgacgaaacccgcgacgaaaccgacgaaacccgaacccataccgaactacgcgcaactaatacaacgcgactaaaacaacgcgctaacgacgacgcgaaactacacgaactacgactaaaaactaacgcgtcgcgacctaactaaacacgcgcacctaacgccgcccgaactactactactaacgctcgacgcgctaaactaaaccgccctacgctccgcgaccactacgcgcctctttcgaatcaatataaccgaaaaccgaaacgaaaaaaccccgaactaaaaaaaaccgaaaccgaaaacctaaaaccgccgacgcgttcctttcttccaacgctaactactacgaataaaaaaatcgccgaaacgtaaataaaaacctcgaactaaaaaaacccaaaacgttaaaaccccaaaataaaatctctcgaaccgccgcgcgcc

SEQ ID NO: 2419 - DNA, 1038 bp, Artificial Sequence
  chemically treated genomic DNA (Homo sapiens) CpG-island No: 2419
cgttttttgaatgcgggagggttacgggatggttttaagattgtgttaaggcgtgttaggtttcgggtttttgagaaggagcgagggttttaagaacggtgaggtcggagcgggtcggggcgatggagcgggagcggcgtggcgtgttggagggtcgggagaagcgggggtcgttagtcgaggggattgtttgttagtgtttttcgtgtttttcgttacgggtacggcgcggtggggtgggggagcggggggcgcgcggggtaggtatgggggcgcgatacggcggtgcgcggggtttttcggggtttaggtttaacgggtttttagtttcggttttcgcgtttgggtttttttgttgggaaacgggtaggggcgcgggttcgtttttagggcgtttcgcgttttcgttggtcgttttttagtcgcgtttttagcggggcggagtttgcgtcggtttcgttttttcgtttttcgttttttcgttcgcgcgttttcggtttagttgcggcgcgtgacgcggggcgcgcggtttcgtcggttatcgcgggcgggcgtaggcgacgggtacggcgggcgagcgggcggtatggcggcggcggggttcgcggcggggtcgacggggttcgagtttatgtcgagttacgcgtagttagtgtagcgcggttggggtagcgcgttggcggcggcgcggggttgtacggattgcggttgggggttggcgcgtcgcggtttggttgagtacgcgtatttggcgtcgttcgagttgttgttgttggcgttcggcgcgttgggttggatcgttttgcgtttcgcggttattgcgcgtttttttcgggttagtgtggtcgggggtcgggacgaggggatttcggattgggggaagtcgggatcggggatttggggtcgtcggcgcgttttttttttttagcgttggttgttgcggatgaaggggtcgtcggaacgtgggtgggggtttcgggttggagaggtttaggacgttggagttttaggataaggtttttcgggtcgtcgcgcgtt

SEQ ID NO: 2420 - DNA, 1038 bp, Artificial Sequence
  chemically treated genomic DNA (Homo sapiens) CpG-island No: 2420
aacgcgcgacgacccgaaaaaccttatcctaaaactccaacgtcctaaacctctccaacccgaaacccccacccacgttccgacgaccccttcatccgcaacaaccaacgctaaaaaaaaaaaacgcgccgacgaccccaaatccccgatcccgacttcccccaatccgaaatcccctcgtcccgacccccgaccacactaacccgaaaaaaacgcgcaataaccgcgaaacgcaaaacgatccaacccaacgcgccgaacgccaacaacaacaactcgaacgacgccaaatacgcgtactcaaccaaaccgcgacgcgccaacccccaaccgcaatccgtacaaccccgcgccgccgccaacgcgctaccccaaccgcgctacactaactacgcgtaactcgacataaactcgaaccccgtcgaccccgccgcgaaccccgccgccgccataccgcccgctcgcccgccgtacccgtcgcctacgcccgcccgcgataaccgacgaaaccgcgcgccccgcgtcacgcgccgcaactaaaccgaaaacgcgcgaacgaaaaaacgaaaaacgaaaaaacgaaaccgacgcaaactccgccccgctaaaaacgcgactaaaaaacgaccaacgaaaacgcgaaacgccctaaaaacgaacccgcgcccctacccgtttcccaacaaaaaaacccaaacgcgaaaaccgaaactaaaaacccgttaaacctaaaccccgaaaaaccccgcgcaccgccgtatcgcgcccccatacctaccccgcgcgccccccgctcccccaccccaccgcgccgtacccgtaacgaaaaacacgaaaaacactaacaaacaatcccctcgactaacgacccccgcttctcccgaccctccaacacgccacgccgctcccgctccatcgccccgacccgctccgacctcaccgttcttaaaaccctcgctccttctcaaaaacccgaaacctaacacgccttaacacaatcttaaaaccatcccgtaaccctcccgcattcaaaaaacg

SEQ ID NO: 2421 - DNA, 578 bp, Artificial Sequence
  chemically treated genomic DNA (Homo sapiens) CpG-island No: 2421
tttaagtcgattttcggtcggcgcgtttcgttttagaaggttttggtataggcgggcggtgtcgggcgttagtttttgcgggcgtgggtcggttagggcgcgtgggtttggggattcggggttacggtcgttacgtgagtttattttcgaggcggtagcgtggtcggtattcgttcgttggtttggttcggcgagcgtgggcggcgaacgggttttcgtcggatgtacgttggtgggatttagggttagagggcgtcgtcggggaaggttatttagacgcgcggttcgtcgggtttttacgcggtcgtttttgtattttcgttcgtaagttcgggtcgtttttcgtcgttagtcgtaggcgtttttggattttcggtttcgcgttttttagtttagatttgttcggtattcgtttgtgcggttttttttgttcgttcgtttattagttaggttcgcgtcggtcgttcgcgattttttttcgcggtcgggttgtcggggtttttcgttcgttttttttttagcgttttttttttagttttttaggggtttggttttcgtcgtttagggcgtaaggaagt

SEQ ID NO: 2422 - DNA, 578 bp, Artificial Sequence
  chemically treated genomic DNA (Homo sapiens) CpG-island No: 2422
acttccttacgccctaaacgacgaaaaccaaacccctaaaaaactaaaaaaaaaacgctaaaaaaaaaacgaacgaaaaaccccgacaacccgaccgcgaaaaaaaatcgcgaacgaccgacgcgaacctaactaataaacgaacgaacaaaaaaaaccgcacaaacgaataccgaacaaatctaaactaaaaaacgcgaaaccgaaaatccaaaaacgcctacgactaacgacgaaaaacgacccgaacttacgaacgaaaatacaaaaacgaccgcgtaaaaacccgacgaaccgcgcgtctaaataaccttccccgacgacgccctctaaccctaaatcccaccaacgtacatccgacgaaaacccgttcgccgcccacgctcgccgaaccaaaccaacgaacgaataccgaccacgctaccgcctcgaaaataaactcacgtaacgaccgtaaccccgaatccccaaacccacgcgccctaaccgacccacgcccgcaaaaactaacgcccgacaccgcccgcctataccaaaaccttctaaaacgaaacgcgccgaccgaaaatcgacttaaa

SEQ ID NO: 2423 - DNA, 578 bp, Artificial Sequence
  chemically treated genomic DNA (Homo sapiens) CpG-island No: 2423
gtttttttgcgttttggacggcgggggttaggtttttggggagttgagagggaggcgttgagggaggagcgggcgaggggtttcggtagttcggtcgcggggagggatcgcgagcggtcggcgcgggtttggttggtgagcgggcgggtagagaaggtcgtataggcgggtgtcgaataggtttgggttggggagcgcgaggtcgagggtttagagacgtttgcggttggcggcgagaggcggttcgggtttgcgggcggaagtgtaagggcggtcgcgtggaggttcggcgggtcgcgcgtttaggtgatttttttcggcggcgttttttggttttggattttattagcgtgtattcggcggggattcgttcgtcgtttacgttcgtcggattaggttagcgggcgggtgtcggttacgttgtcgtttcggggatgagtttacgtgacgatcgtggtttcgagtttttaggtttacgcgttttggtcggtttacgttcgtagaagttggcgttcggtatcgttcgtttgtgttagagttttttagagcggaacgcgtcggtcgagagtcgatttagg

SEQ ID NO: 2424 - DNA, 578 bp, Artificial Sequence
  chemically treated genomic DNA (Homo sapiens) CpG-island No: 2424
cctaaatcgactctcgaccgacgcgttccgctctaaaaaactctaacacaaacgaacgataccgaacgccaacttctacgaacgtaaaccgaccaaaacgcgtaaacctaaaaactcgaaaccacgatcgtcacgtaaactcatccccgaaacgacaacgtaaccgacacccgcccgctaacctaatccgacgaacgtaaacgacgaacgaatccccgccgaatacacgctaataaaatccaaaaccaaaaaacgccgccgaaaaaaatcacctaaacgcgcgacccgccgaacctccacgcgaccgcccttacacttccgcccgcaaacccgaaccgcctctcgccgccaaccgcaaacgtctctaaaccctcgacctcgcgctccccaacccaaacctattcgacacccgcctatacgaccttctctacccgcccgctcaccaaccaaacccgcgccgaccgctcgcgatccctccccgcgaccgaactaccgaaacccctcgcccgctcctccctcaacgcctccctctcaactccccaaaaacctaacccccgccgtccaaaacgcaaaaaaac

SEQ ID NO: 2425 - DNA, 581 bp, Artificial Sequence
  chemically treated genomic DNA (Homo sapiens) CpG-island No: 2425
gtggcggcgggttcggaggcggttacggcgggggttgcgacgcggaggtagggagtcgagttagggagcggagtcgagcgagcggttgggttaagggcggggcggcgcggacggcggcggcgcggattcgtttttttttttgcgcgttcggttcggcgcgtttcgtttttaggtttcgttcgggatagcgtttaggtcgggttagggtttttatttcgttagcgagtcgcgtttttattttttcgggtttcgttgtttcggtagtagatataggagtttgcgggcgtgttgcgggcgcgcgggaggatttgcgtgagtcggggtacggggaggcgtcggattgacgtgtgtatcgtgtgtgcgtgcgtagggatacgcgggtttttgttggaaatttcggttttagtggtagcgttcgggaagggggaggaggtttttcgattttttgagttgtggttcggaggtttttgcgttaatggaagacgcgcggggtttttgggttttttgtttggttttcgcgttgttagatttttcgggagttgatgtggtcggcgttggatttaagtttcgtttgggtggat

SEQ ID NO: 2426 - DNA, 581 bp, Artificial Sequence
  chemically treated genomic DNA (Homo sapiens) CpG-island No: 2426
atccacccaaacgaaacttaaatccaacgccgaccacatcaactcccgaaaaatctaacaacgcgaaaaccaaacaaaaaacccaaaaaccccgcgcgtcttccattaacgcaaaaacctccgaaccacaactcaaaaaatcgaaaaacctcctcccccttcccgaacgctaccactaaaaccgaaatttccaacaaaaacccgcgtatccctacgcacgcacacacgatacacacgtcaatccgacgcctccccgtaccccgactcacgcaaatcctcccgcgcgcccgcaacacgcccgcaaactcctatatctactaccgaaacaacgaaacccgaaaaaataaaaacgcgactcgctaacgaaataaaaaccctaacccgacctaaacgctatcccgaacgaaacctaaaaacgaaacgcgccgaaccgaacgcgcaaaaaaaaaaacgaatccgcgccgccgccgtccgcgccgccccgcccttaacccaaccgctcgctcgactccgctccctaactcgactccctacctccgcgtcgcaacccccgccgtaaccgcctccgaacccgccgccac

SEQ ID NO: 2427 - DNA, 581 bp, Artificial Sequence
  chemically treated genomic DNA (Homo sapiens) CpG-island No: 2427
gtttatttaggcgaggtttgggtttagcgtcggttatattaattttcgggggatttagtagcgcggaggttaagtaggaggtttaggagtttcgcgcgttttttattagcgtagggattttcgggttatagtttagagaatcggaaggtttttttttttttttcgagcgttgttattggggtcgaggtttttagtaagaattcgcgtgtttttgcgtacgtatatacggtgtatacgttagttcggcgttttttcgtgtttcgatttacgtaggttttttcgcgcgttcgtaatacgttcgtaggtttttgtgtttgttgtcggggtagcggggttcggaagggtaagaacgcggttcgttagcgggatggggattttggttcggtttggacgttgtttcgggcggggtttgggggcggagcgcgtcgggtcgggcgcgtaggaggggaggcgggttcgcgtcgtcgtcgttcgcgtcgtttcgtttttggtttagtcgttcgttcggtttcgttttttggttcggttttttgttttcgcgtcgtagttttcgtcgtagtcgttttcgagttcgtcgttat

SEQ ID NO: 2428 - DNA, 581 bp, Artificial Sequence
  chemically treated genomic DNA (Homo sapiens) CpG-island No: 2428
ataacgacgaactcgaaaacgactacgacgaaaactacgacgcgaaaacaaaaaaccgaaccaaaaaacgaaaccgaacgaacgactaaaccaaaaacgaaacgacgcgaacgacgacgacgcgaacccgcctcccctcctacgcgcccgacccgacgcgctccgcccccaaaccccgcccgaaacaacgtccaaaccgaaccaaaatccccatcccgctaacgaaccgcgttcttacccttccgaaccccgctaccccgacaacaaacacaaaaacctacgaacgtattacgaacgcgcgaaaaaacctacgtaaatcgaaacacgaaaaaacgccgaactaacgtatacaccgtatatacgtacgcaaaaacacgcgaattcttactaaaaacctcgaccccaataacaacgctcgaaaaaaaaaaaaaaaccttccgattctctaaactataacccgaaaatccctacgctaataaaaaacgcgcgaaactcctaaacctcctacttaacctccgcgctactaaatcccccgaaaattaatataaccgacgctaaacccaaacctcgcctaaataaac

SEQ ID NO: 2429 - DNA, 1437 bp, Artificial Sequence
  chemically treated genomic DNA (Homo sapiens) CpG-island No: 2429
gtcggagtacgcggttatttaggtcgaatttcgattcggattcggtacgcggtttcggcgagggcgggcgggagtgttttttttcgggatagtcggattttcgtcgatttttgggcggcggggagggttttaggttcggttttttcgggttttcgtacgcgatgcgcggtttttgtagttgtttcgtgtttcgagacgcgttcgaggtttcggatttttaagcggttatcgcgtcgttagtttcgttgtttagggatatttcggttttagtttttcgcgcgtttattttttcggttttacgcgcgttagttattcgcgtttttcgtcgttttcgggtttcgttcgttcggtttatcgcggtttagttcgtttcggagttcggttttatttattcgcgcgcggtggtggcgggatttcgggttcggttttcggagcggcgcggcgcggttcgggtttatgcgtttagcggtagcgcggcgggcgggattcggcgggggcgcggttcggggcggtttttatttcggcggttgcggttcggcggttcggaggcggacgcggggtaggtcgcgggggcgtcgtaggggtttagtcgttagtttttattcgttcgtttcgcgtggacgcggtttcgggtcgatttcggtcggttttggcggcggtagcggttacgatcgtttttcgagttagagttcgagttagagcgtcgaagtttaggttcgagcgttttcgtcggcggcgttcggaagtgcgggggcggggtcggggcgcggggacgaggtgagagcgcggggcggggttttaatacggggcggggtcggtagcgcggggacgaggtaaagggtgtggggcggggttttaggcgcggggcggggttgaaagcgcgaggataaagtgaggagcgtggggcggggtcgatagcgaggggataggtgaggagcgcggggcggggtcggggcgtgggcggggtcggaagcgagaagacgaggtgaagagttcggggcggggtttcgggcgtggggcggggattagggagtaaggcggggttcgtttcgagtagaagaggtaaagagcgtggggcggggttttcggcgcggggcggggtcggaagcgagaagacgagttgagaaatatgggtcggggtttttgtatggtcgggagagggcgtggttagtgtttgtcgggggcggggcgtgtcgggggcgcggtcgcgtcgttttttcgaggggcggtgcggaagcggagttcgggaggttttggttttttagagagcggagtgggagaggcggcgttgtaggtttttggaatggtcgcggtcgtggggagtattgggcggattgcgcgtttcgaagggcgtacgtggggcgtagtttttttttgtcgttagtatatcggagggtagttagggggttgtaggtttcggggttttttgtttagtcg

SEQ ID NO: 2430 - DNA, 1437 bp, Artificial Sequence
  chemically treated genomic DNA (Homo sapiens) CpG-island No: 2430
cgactaaacaaaaaaccccgaaacctacaaccccctaactaccctccgatatactaacgacaaaaaaaaactacgccccacgtacgcccttcgaaacgcgcaatccgcccaatactccccacgaccgcgaccattccaaaaacctacaacgccgcctctcccactccgctctctaaaaaaccaaaacctcccgaactccgcttccgcaccgcccctcgaaaaaacgacgcgaccgcgcccccgacacgccccgcccccgacaaacactaaccacgccctctcccgaccatacaaaaaccccgacccatatttctcaactcgtcttctcgcttccgaccccgccccgcgccgaaaaccccgccccacgctctttacctcttctactcgaaacgaaccccgccttactccctaatccccgccccacgcccgaaaccccgccccgaactcttcacctcgtcttctcgcttccgaccccgcccacgccccgaccccgccccgcgctcctcacctatcccctcgctatcgaccccgccccacgctcctcactttatcctcgcgctttcaaccccgccccgcgcctaaaaccccgccccacaccctttacctcgtccccgcgctaccgaccccgccccgtattaaaaccccgccccgcgctctcacctcgtccccgcgccccgaccccgcccccgcacttccgaacgccgccgacgaaaacgctcgaacctaaacttcgacgctctaactcgaactctaactcgaaaaacgatcgtaaccgctaccgccgccaaaaccgaccgaaatcgacccgaaaccgcgtccacgcgaaacgaacgaataaaaactaacgactaaacccctacgacgcccccgcgacctaccccgcgtccgcctccgaaccgccgaaccgcaaccgccgaaataaaaaccgccccgaaccgcgcccccgccgaatcccgcccgccgcgctaccgctaaacgcataaacccgaaccgcgccgcgccgctccgaaaaccgaacccgaaatcccgccaccaccgcgcgcgaataaataaaaccgaactccgaaacgaactaaaccgcgataaaccgaacgaacgaaacccgaaaacgacgaaaaacgcgaataactaacgcgcgtaaaaccgaaaaaataaacgcgcgaaaaactaaaaccgaaatatccctaaacaacgaaactaacgacgcgataaccgcttaaaaatccgaaacctcgaacgcgtctcgaaacacgaaacaactacaaaaaccgcgcatcgcgtacgaaaacccgaaaaaaccgaacctaaaaccctccccgccgcccaaaaatcgacgaaaatccgactatcccgaaaaaaaacactcccgcccgccctcgccgaaaccgcgtaccgaatccgaatcgaaattcgacctaaataaccgcgtactccgac

SEQ ID NO: 2431 - DNA, 1437 bp, Artificial Sequence
  chemically treated genomic DNA (Homo sapiens) CpG-island No: 2431
cggttgggtagggagtttcgaggtttgtagttttttgattgtttttcgatgtattggcggtagaaaagggttgcgttttacgtgcgtttttcggggcgcgtagttcgtttagtgttttttacggtcgcggttattttaaggatttgtaacgtcgttttttttatttcgttttttgggaagttaaagtttttcgggtttcgttttcgtatcgtttttcgggaagacggcgcgatcgcgttttcggtacgtttcgttttcggtaggtattgattacgttttttttcggttatgtagagatttcggtttatgttttttaattcgttttttcgttttcggtttcgtttcgcgtcggaggtttcgttttacgttttttattttttttgttcgaggcgggtttcgttttattttttggttttcgttttacgttcgaggtttcgtttcgagttttttatttcgttttttcgttttcggtttcgtttacgtttcggtttcgtttcgcgttttttatttgttttttcgttgtcggtttcgttttacgttttttattttattttcgcgtttttagtttcgtttcgcgtttgaagtttcgttttatattttttatttcgttttcgcgttgtcggtttcgtttcgtgttgaggtttcgtttcgcgtttttatttcgttttcgcgtttcggtttcgttttcgtattttcggacgtcgtcggcgggggcgttcgggtttgggtttcggcgttttggttcgggttttggttcgggaggcgatcgtggtcgttgtcgtcgttagagtcggtcggagtcggttcggagtcgcgtttacgcggagcgggcgggtgggagttggcggttgggtttttgcggcgttttcgcggtttgtttcgcgttcgttttcgggtcgtcgagtcgtagtcgtcgagatgggggtcgtttcgggtcgcgttttcgtcgggtttcgttcgtcgcgttgtcgttgagcgtatgggttcggatcgcgtcgcgtcgtttcgggagtcgggttcggggtttcgttattatcgcgcgcgggtgagtagggtcgggtttcggggcgggttaggtcgcggtaggtcgggcgggcgggattcggaagcggcggggggcgcgggtggttgacgcgcgtgggatcgagggggtgggcgcgcggggagttggggtcggggtgtttttgggtagcgggattggcggcgcggtggtcgtttggaggttcgaggtttcgggcgcgtttcggggtacggagtagttgtaggggtcgcgtatcgcgtgcgggggttcgggagagtcgggtttggagtttttttcgtcgtttagaagtcggcgggagttcggttgtttcggaggaggatattttcgttcgttttcgtcgaggtcgcgtgtcgggttcgggtcggggttcggtttgagtagtcgcgtgtttcggt

SEQ ID NO: 2432 - DNA, 1437 bp, Artificial Sequence
  chemically treated genomic DNA (Homo sapiens) CpG-island No: 2432
accgaaacacgcgactactcaaaccgaaccccgacccgaacccgacacgcgacctcgacgaaaacgaacgaaaatatcctcctccgaaacaaccgaactcccgccgacttctaaacgacgaaaaaaactccaaacccgactctcccgaacccccgcacgcgatacgcgacccctacaactactccgtaccccgaaacgcgcccgaaacctcgaacctccaaacgaccaccgcgccgccaatcccgctacccaaaaacaccccgaccccaactccccgcgcgcccaccccctcgatcccacgcgcgtcaaccacccgcgccccccgccgcttccgaatcccgcccgcccgacctaccgcgacctaacccgccccgaaacccgaccctactcacccgcgcgcgataataacgaaaccccgaacccgactcccgaaacgacgcgacgcgatccgaacccatacgctcaacgacaacgcgacgaacgaaacccgacgaaaacgcgacccgaaacgacccccatctcgacgactacgactcgacgacccgaaaacgaacgcgaaacaaaccgcgaaaacgccgcaaaaacccaaccgccaactcccacccgcccgctccgcgtaaacgcgactccgaaccgactccgaccgactctaacgacgacaacgaccacgatcgcctcccgaaccaaaacccgaaccaaaacgccgaaacccaaacccgaacgcccccgccgacgacgtccgaaaatacgaaaacgaaaccgaaacgcgaaaacgaaataaaaacgcgaaacgaaacctcaacacgaaacgaaaccgacaacgcgaaaacgaaataaaaaatataaaacgaaacttcaaacgcgaaacgaaactaaaaacgcgaaaataaaataaaaaacgtaaaacgaaaccgacaacgaaaaaacaaataaaaaacgcgaaacgaaaccgaaacgtaaacgaaaccgaaaacgaaaaaacgaaataaaaaactcgaaacgaaacctcgaacgtaaaacgaaaaccaaaaaataaaacgaaacccgcctcgaacaaaaaaaataaaaaacgtaaaacgaaacctccgacgcgaaacgaaaccgaaaacgaaaaaacgaattaaaaaacataaaccgaaatctctacataaccgaaaaaaaacgtaatcaatacctaccgaaaacgaaacgtaccgaaaacgcgatcgcgccgtcttcccgaaaaacgatacgaaaacgaaacccgaaaaactttaacttcccaaaaaacgaaataaaaaaaacgacgttacaaatccttaaaataaccgcgaccgtaaaaaacactaaacgaactacgcgccccgaaaaacgcacgtaaaacgcaacccttttctaccgccaatacatcgaaaaacaatcaaaaaactacaaacctcgaaactccctacccaaccg

SEQ ID NO: 2433 - DNA, 894 bp, Artificial Sequence
  chemically treated genomic DNA (Homo sapiens) CpG-island No: 2433
ttttagcgcgatttttataaattgttttgattttttaacgttttttcgttggcgtttattgggttaggcgtttacgttatcgttgcgcgtcgggcggcggcgatttttcgttttttgattttgacgttagagcggcgtcggtttcggcggttgaggaaagtaggaggaggtggcggcggcgggaagatgtaagttggggcggaattcgattgtattcgtgtttcgggggttgttcggtaggttcggtaggacgtttcgtgaagtcggtttattttttagtttcgtagtgcggcggtggtttggtagcgcggtgcgggtttcgagaagaaagagtgtggttcggggcgggcggagtgggaggtgtcgaggtcgtggttcggaagtggtcggggtcgttgcggacggaagggcgtttgtgtttcgttcgttcggcggtggtttagttaggttcgcgggatttagattagcggggagcgcggttttcgtttttggggttttttcgtcgggtcggagatttaagtttttaacgttaggttttgttttggaagcgttcgcggttcggcgtttggacgggggagttgtgagtgaacgcggacgggtagcggcgaggtcggcgtgtcgggtcggtgtcggcgggcgcggagtttttttgtgggatgcggtggaaggtcggtcgatttttttttcggagttattaatttaaacgtgtatttcgcgaacgtttttcggattttcgtgtgtaattatcggcgttaggtcgtggggatacggtttattatggatcgagtacggtggtcgagtttagtttgatgggttattttagaggggcggatacgggaaggttaagtttgttggaggagaaacgtggagtaggttttttgttttgatttcgta

SEQ ID NO: 2434 - DNA, 894 bp, Artificial Sequence
  chemically treated genomic DNA (Homo sapiens) CpG-island No: 2434
tacgaaatcaaaacaaaaaacctactccacgtttctcctccaacaaacttaaccttcccgtatccgcccctctaaaataacccatcaaactaaactcgaccaccgtactcgatccataataaaccgtatccccacgacctaacgccgataattacacacgaaaatccgaaaaacgttcgcgaaatacacgtttaaattaataactccgaaaaaaaaatcgaccgaccttccaccgcatcccacaaaaaaactccgcgcccgccgacaccgacccgacacgccgacctcgccgctacccgtccgcgttcactcacaactcccccgtccaaacgccgaaccgcgaacgcttccaaaacaaaacctaacgttaaaaacttaaatctccgacccgacgaaaaaaccccaaaaacgaaaaccgcgctccccgctaatctaaatcccgcgaacctaactaaaccaccgccgaacgaacgaaacacaaacgcccttccgtccgcaacgaccccgaccacttccgaaccacgacctcgacacctcccactccgcccgccccgaaccacactctttcttctcgaaacccgcaccgcgctaccaaaccaccgccgcactacgaaactaaaaaataaaccgacttcacgaaacgtcctaccgaacctaccgaacaacccccgaaacacgaatacaatcgaattccgccccaacttacatcttcccgccgccgccacctcctcctactttcctcaaccgccgaaaccgacgccgctctaacgtcaaaatcaaaaaacgaaaaatcgccgccgcccgacgcgcaacgataacgtaaacgcctaacccaataaacgccaacgaaaaaacgttaaaaaatcaaaacaatttataaaaatcgcgctaaaa

SEQ ID NO: 2435 - DNA, 894 bp, Artificial Sequence
  chemically treated genomic DNA (Homo sapiens) CpG-island No: 2435
tgcggaattaagataaaaagtttattttacgttttttttttaataaatttaattttttcgtattcgtttttttggggtaatttattaaattgagttcggttatcgtgttcggtttatagtgggtcgtatttttacggtttagcgtcgataattgtatacgggagttcgggaaacgttcgcggagtatacgtttgaattaatgatttcgaaggggggatcggtcgattttttatcgtattttataaagaaatttcgcgttcgtcgatatcggttcgatacgtcgatttcgtcgttattcgttcgcgtttatttataattttttcgtttaggcgtcgggtcgcgagcgtttttagggtagggtttggcgttgggggtttgggttttcggttcggcgggagggttttaagggcggaggtcgcgtttttcgttggtttgagtttcgcgggtttggttgggttatcgtcgagcggacgaagtataggcgttttttcgttcgtagcggtttcgattattttcgggttacggtttcgatattttttatttcgttcgtttcgggttatatttttttttttcggagttcgtatcgcgttgttaggttatcgtcgtattgcggggttgaggagtggatcggttttacgaggcgttttgtcgggtttgtcgggtagttttcgaaatacggatgtagtcggatttcgttttaatttatattttttcgtcgtcgttatttttttttgttttttttagtcgtcgaggtcggcgtcgttttgacgttagagttaaggagcgggaagtcgtcgtcgttcggcgcgtagcgatgacgtaaacgtttggtttaatgggcgttagcgaggaagcgttaaagagttaaggtagtttgtgggagtcgcgttgggg

SEQ ID NO: 2436 - DNA, 894 bp, Artificial Sequence
  chemically treated genomic DNA (Homo sapiens) CpG-island No: 2436
ccccaacgcgactcccacaaactaccttaactctttaacgcttcctcgctaacgcccattaaaccaaacgtttacgtcatcgctacgcgccgaacgacgacgacttcccgctccttaactctaacgtcaaaacgacgccgacctcgacgactaaaaaaaacaaaaaaaaataacgacgacgaaaaaatataaattaaaacgaaatccgactacatccgtatttcgaaaactacccgacaaacccgacaaaacgcctcgtaaaaccgatccactcctcaaccccgcaatacgacgataacctaacaacgcgatacgaactccgaaaaaaaaaaatataacccgaaacgaacgaaataaaaaatatcgaaaccgtaacccgaaaataatcgaaaccgctacgaacgaaaaaacgcctatacttcgtccgctcgacgataacccaaccaaacccgcgaaactcaaaccaacgaaaaacgcgacctccgcccttaaaaccctcccgccgaaccgaaaacccaaacccccaacgccaaaccctaccctaaaaacgctcgcgacccgacgcctaaacgaaaaaattataaataaacgcgaacgaataacgacgaaatcgacgtatcgaaccgatatcgacgaacgcgaaatttctttataaaatacgataaaaaatcgaccgatccccccttcgaaatcattaattcaaacgtatactccgcgaacgtttcccgaactcccgtatacaattatcgacgctaaaccgtaaaaatacgacccactataaaccgaacacgataaccgaactcaatttaataaattaccccaaaaaaacgaatacgaaaaaattaaatttattaaaaaaaaaacgtaaaataaactttttatcttaattccgca

SEQ ID NO: 2437 - DNA, 560 bp, Artificial Sequence
  chemically treated genomic DNA (Homo sapiens) CpG-island No: 2437
gcggcgagcggttgtttcggtcggtaggtggaggcgttgattagtttttgggaacggggcgggatttagttgggggggtttcgttttttttttaggaggcgagtttagttcgcgatttttatttcgcgcgttgcggttaagatggcgttggtggtttttgtgcgagtttcggcgcgcgttttgtttcgcgcgggtgcgaaattcggggtgggtagggatcgggtcggggtcggggttaggatcgggaattaacgggtttttttacgttgatttcgtaggggttcggttttcgggcgcggttttcgggcggacggagcgggcggtcggcggcggagacggcgcgcggcgtttcgggagttagcgggtgttggtggagtcggacgcgggcgtaggtgagcggggcggcgtcgagggagggcgggcgtggggttaggattcgcgggggttcgcgttcgcggggtgttgtcggagaattacgtttgtcgacgttcggtttgtgtttagaatttaagtttcgaaatagaattttgtcgttttatttgggttcgttcgttatgaga

SEQ ID NO: 2438 - DNA, 560 bp, Artificial Sequence
  chemically treated genomic DNA (Homo sapiens) CpG-island No: 2438
tctcataacgaacgaacccaaataaaacgacaaaattctatttcgaaacttaaattctaaacacaaaccgaacgtcgacaaacgtaattctccgacaacaccccgcgaacgcgaacccccgcgaatcctaaccccacgcccgccctccctcgacgccgccccgctcacctacgcccgcgtccgactccaccaacacccgctaactcccgaaacgccgcgcgccgtctccgccgccgaccgcccgctccgtccgcccgaaaaccgcgcccgaaaaccgaacccctacgaaatcaacgtaaaaaaacccgttaattcccgatcctaaccccgaccccgacccgatccctacccaccccgaatttcgcacccgcgcgaaacaaaacgcgcgccgaaactcgcacaaaaaccaccaacgccatcttaaccgcaacgcgcgaaataaaaatcgcgaactaaactcgcctcctaaaaaaaaaacgaaacccccccaactaaatcccgccccgttcccaaaaactaatcaacgcctccacctaccgaccgaaacaaccgctcgccgc

SEQ ID NO: 2439 - DNA, 560 bp, Artificial Sequence
  chemically treated genomic DNA (Homo sapiens) CpG-island No: 2439
ttttatgacgaacgaatttaggtagagcggtaaggttttgtttcgaaatttgggttttaaatataaatcgagcgtcgatagacgtggtttttcgatagtatttcgcgagcgcggattttcgcgggttttgattttacgttcgttttttttcggcgtcgtttcgtttatttgcgttcgcgttcggttttattagtattcgttggttttcgaagcgtcgcgcgtcgttttcgtcgtcggtcgttcgtttcgttcgttcgaaggtcgcgttcgggagtcgggtttttgcgaagttagcgtgggggagttcgttagttttcggttttggtttcggtttcggttcgatttttgtttatttcgggtttcgtattcgcgcggagtagaacgcgcgtcgggattcgtatagaagttattagcgttattttgatcgtaacgcgcgggataaaggtcgcgggttgagttcgttttttggggagggggcggagtttttttaattaggtttcgtttcgtttttagaggttggttaacgtttttatttatcggtcgaaatagtcgttcgtcgt

SEQ ID NO: 2440 - DNA, 560 bp, Artificial Sequence
  chemically treated genomic DNA (Homo sapiens) CpG-island No: 2440
acgacgaacgactatttcgaccgataaataaaaacgttaaccaacctctaaaaacgaaacgaaacctaattaaaaaaactccgccccctccccaaaaaacgaactcaacccgcgacctttatcccgcgcgttacgatcaaaataacgctaataacttctatacgaatcccgacgcgcgttctactccgcgcgaatacgaaacccgaaataaacaaaaatcgaaccgaaaccgaaaccaaaaccgaaaactaacgaactcccccacgctaacttcgcaaaaacccgactcccgaacgcgaccttcgaacgaacgaaacgaacgaccgacgacgaaaacgacgcgcgacgcttcgaaaaccaacgaatactaataaaaccgaacgcgaacgcaaataaacgaaacgacgccgaaaaaaaacgaacgtaaaatcaaaacccgcgaaaatccgcgctcgcgaaatactatcgaaaaaccacgtctatcgacgctcgatttatatttaaaacccaaatttcgaaacaaaaccttaccgctctacctaaattcgttcgtcataaaa

SEQ ID NO: 2441 - DNA, 696 bp, Artificial Sequence
  chemically treated genomic DNA (Homo sapiens) CpG-island No: 2441
attacgttcggttgtagattatttttacggttatttattttgttattcgttatttttttcgtcgaatttgttgcgtaggcgtattttcgtttttttcgtgtcgattgtttcggttatttttacggagggcgaaggtattttcggagtatttttggaaagggggaggtgtttttttagtggttaagtacgttttttttagatatttttacgtgattttttttcgtcgagttttaggttgcgtgtgagcgtatttacgatcggggcgcgatgattttattcgtgcgcgagtgcgcgcggcgtatgttcggcgtgtcggtttttaggcgtttgatgagtttatagttgggcggtggtgttagcggtttcgttggcgttcgtgggtttttttcggatttatatacggaaatacgtaattattcggggatttagacgttcgtttatacgtattatttttgggcgggttgtgcggtttaggttttttttcgggatcggttcgtgtttcgtttcgtgtttcgtttcgtatttgtgcggcgttagttggtttcgtagtttgcggcgtagagaggttgggtttgtaggcgtagtagttttagaggtcgcgttgggttgagagtgcgggtcggtagaggttggcggggagtagtcggggttatgttgggtaaggattatatgttggttattattttggttaattgt

SEQ ID NO: 2442 - DNA, 696 bp, Artificial Sequence
  chemically treated genomic DNA (Homo sapiens) CpG-island No: 2442
acaattaaccaaaataataaccaacatataatccttacccaacataaccccgactactccccgccaacctctaccgacccgcactctcaacccaacgcgacctctaaaactactacgcctacaaacccaacctctctacgccgcaaactacgaaaccaactaacgccgcacaaatacgaaacgaaacacgaaacgaaacacgaaccgatcccgaaaaaaaacctaaaccgcacaacccgcccaaaaataatacgtataaacgaacgtctaaatccccgaataattacgtatttccgtatataaatccgaaaaaaacccacgaacgccaacgaaaccgctaacaccaccgcccaactataaactcatcaaacgcctaaaaaccgacacgccgaacatacgccgcgcgcactcgcgcacgaataaaatcatcgcgccccgatcgtaaatacgctcacacgcaacctaaaactcgacgaaaaaaaatcacgtaaaaatatctaaaaaaaacgtacttaaccactaaaaaaacacctccccctttccaaaaatactccgaaaataccttcgccctccgtaaaaataaccgaaacaatcgacacgaaaaaaacgaaaatacgcctacgcaacaaattcgacgaaaaaaataacgaataacaaaataaataaccgtaaaaataatctacaaccgaacgtaat

SEQ ID NO: 2443 - DNA, 696 bp, Artificial Sequence
  chemically treated genomic DNA (Homo sapiens) CpG-island No: 2443
gtagttgattagaatgatggttagtatgtaatttttgtttagtataatttcggttgtttttcgttagtttttgtcggttcgtatttttagtttagcgcgatttttggagttattgcgtttgtaagtttagtttttttgcgtcgtaggttgcggggttagttggcgtcgtataaatacggggcgggatacggggcgggatacgggtcggtttcgggggagggtttgagtcgtatagttcgtttaggggtggtgcgtgtaaacgggcgtttggattttcgaatggttgcgtgttttcgtgtgtgggttcgggggaggtttacgaacgttagcgaaatcgttgatattatcgtttaattatgaatttattaggcgtttgaagatcgatacgtcgaatatgcgtcgcgcgtattcgcgtacgagtgagattatcgcgtttcggtcgtgagtgcgtttatacgtagtttgagattcgacgggagggggttacgtggaagtatttgagagaggcgtatttggttattaggaaagtatttttttttttttaaaaatgtttcggaagtgttttcgtttttcgtaaagatggtcggggtagtcggtacgagggaggcggggatgcgtttgcgtaataagttcggcggggaagatggcggatgataaggtgagtggtcgtgggggtgatttgtagtcgggcgtggt

SEQ ID NO: 2444 - DNA, 696 bp, Artificial Sequence
  chemically treated genomic DNA (Homo sapiens) CpG-island No: 2444
accacgcccgactacaaatcacccccacgaccactcaccttatcatccgccatcttccccgccgaacttattacgcaaacgcatccccgcctccctcgtaccgactaccccgaccatctttacgaaaaacgaaaacacttccgaaacatttttaaaaaaaaaaaaatactttcctaataaccaaatacgcctctctcaaatacttccacgtaaccccctcccgtcgaatctcaaactacgtataaacgcactcacgaccgaaacgcgataatctcactcgtacgcgaatacgcgcgacgcatattcgacgtatcgatcttcaaacgcctaataaattcataattaaacgataatatcaacgatttcgctaacgttcgtaaacctcccccgaacccacacacgaaaacacgcaaccattcgaaaatccaaacgcccgtttacacgcaccacccctaaacgaactatacgactcaaaccctcccccgaaaccgacccgtatcccgccccgtatcccgccccgtatttatacgacgccaactaaccccgcaacctacgacgcaaaaaaactaaacttacaaacgcaataactccaaaaatcgcgctaaactaaaaatacgaaccgacaaaaactaacgaaaaacaaccgaaattatactaaacaaaaattacatactaaccatcattctaatcaactac

SEQ ID NO: 2445 - DNA, 814 bp, Artificial Sequence
  chemically treated genomic DNA (Homo sapiens) CpG-island No: 2445
tcgcgtttttgcgtatttttcggtattcggcgtaggtcgtcggttagggtatatacgcgttttcgtttgttcgtcggttcgtaaggttcgggttgcggcggtcgcgggcgcgggaggcggaggcgtaggcgtcgggtttcgtggtagttcggtttagtttcgtttcgttttatttttcggttttttttttcgtttagtcgtgttttttcgtcgagtttcgtcgttagtttcgtgttttgttcggttcgtacgtcgttcgttatcgcggtttttcgggcgggaaggttgcgtcggttttcgttaagggggaggcgttatttcgtttcggggcggttgttttgttgggatttttgggtcggttataaagttttttttcgttgattcggagggacgggagtcgggtgcgcgacggcggttttttatttttgtatttagtcgttcgtttcgttttttttttttttttttttgttttttttttttttttatttttcgagggttcgtatatttcgcgggcgggaaggtgtcgttttcggggcggataaaggggtaggtcgggcgggaggggttgtagtcggtacgcgcggtcgcgggagggttcgtttcgtttcgggtcgtcgatttgatatttgttgggtagtttgcgcggtttggggcgaaggttagcgggcggcggggtgggaagcgttagcgtaggggcgtgtgttcgggagggggtcgcggataggttaggcggtttgggatttattttattcgggtaatagtgatttattgtttcgttagcgtttttttttaggttttaattggattttaaaga

SEQ ID NO: 2446 - DNA, 814 bp, Artificial Sequence
  chemically treated genomic DNA (Homo sapiens) CpG-island No: 2446
tctttaaaatccaattaaaacctaaaaaaaaacgctaacgaaacaataaatcactattacccgaataaaataaatcccaaaccgcctaacctatccgcgaccccctcccgaacacacgcccctacgctaacgcttcccaccccgccgcccgctaaccttcgccccaaaccgcgcaaactacccaacaaatatcaaatcgacgacccgaaacgaaacgaaccctcccgcgaccgcgcgtaccgactacaacccctcccgcccgacctacccctttatccgccccgaaaacgacaccttcccgcccgcgaaatatacgaaccctcgaaaaataaaaaaaaaaaaaaaacaaaaaaaaaaaaaaaaaaaacgaaacgaacgactaaatacaaaaataaaaaaccgccgtcgcgcacccgactcccgtccctccgaatcaacgaaaaaaaactttataaccgacccaaaaatcccaacaaaacaaccgccccgaaacgaaataacgcctcccccttaacgaaaaccgacgcaaccttcccgcccgaaaaaccgcgataacgaacgacgtacgaaccgaacaaaacacgaaactaacgacgaaactcgacgaaaaaacacgactaaacgaaaaaaaaaaccgaaaaataaaacgaaacgaaactaaaccgaactaccacgaaacccgacgcctacgcctccgcctcccgcgcccgcgaccgccgcaacccgaaccttacgaaccgacgaacaaacgaaaacgcgtatataccctaaccgacgacctacgccgaataccgaaaaatacgcaaaaacgcga

SEQ ID NO: 2447 - DNA, 814 bp, Artificial Sequence
  chemically treated genomic DNA (Homo sapiens) CpG-island No: 2447
tttttaaagtttagttaagatttgaaaggggacgttagcgaagtagtaggttattattgttcgggtggggtgggttttaagtcgtttgatttgttcgcgattttttttcgaatatacgtttttgcgttggcgttttttatttcgtcgttcgttggttttcgttttaggtcgcgtaggttgtttagtaggtgttaggtcggcggttcggggcgaggcgggttttttcgcggtcgcgcgtgtcggttatagtttttttcgttcggtttgtttttttgttcgtttcgagggcggtattttttcgttcgcggggtgtgcgagttttcggggggtgggagaggaggagggatagggagggaaggaggaggagcggggcgggcggttgagtgtaggggtggggagtcgtcgtcgcgtattcgattttcgttttttcgggttagcggagaggggttttgtgatcggtttaggagttttagtaagataatcgtttcggggcggggtggcgttttttttttggcgggagtcggcgtagttttttcgttcggggagtcgcggtggcgagcggcgtacgggtcgggtagagtacggagttggcggcggagttcggcgggagagtacggttaagcggaggggagggtcggagggtggggcggggcggggttgggtcgggttgttacggagttcggcgtttgcgttttcgtttttcgcgttcgcggtcgtcgtagttcgggttttgcgggtcggcgagtaggcggggacgcgtgtgtgttttggtcggcgatttgcgtcgggtgtcgggaggtgcgtagaggcgcgg

SEQ ID NO: 2448 - DNA, 814 bp, Artificial Sequence
  chemically treated genomic DNA (Homo sapiens) CpG-island No: 2448
ccgcgcctctacgcacctcccgacacccgacgcaaatcgccgaccaaaacacacacgcgtccccgcctactcgccgacccgcaaaacccgaactacgacgaccgcgaacgcgaaaaacgaaaacgcaaacgccgaactccgtaacaacccgacccaaccccgccccgccccaccctccgaccctcccctccgcttaaccgtactctcccgccgaactccgccgccaactccgtactctacccgacccgtacgccgctcgccaccgcgactccccgaacgaaaaaactacgccgactcccgccaaaaaaaaaacgccaccccgccccgaaacgattatcttactaaaactcctaaaccgatcacaaaacccctctccgctaacccgaaaaaacgaaaatcgaatacgcgacgacgactccccacccctacactcaaccgcccgccccgctcctcctccttccctccctatccctcctcctctcccaccccccgaaaactcgcacaccccgcgaacgaaaaaataccgccctcgaaacgaacaaaaaaacaaaccgaacgaaaaaaactataaccgacacgcgcgaccgcgaaaaaacccgcctcgccccgaaccgccgacctaacacctactaaacaacctacgcgacctaaaacgaaaaccaacgaacgacgaaataaaaaacgccaacgcaaaaacgtatattcgaaaaaaaatcgcgaacaaatcaaacgacttaaaacccaccccacccgaacaataataacctactacttcgctaacgtcccctttcaaatcttaactaaactttaaaaa

SEQ ID NO: 2449 - DNA, 623 bp, Artificial Sequence
  chemically treated genomic DNA (Homo sapiens) CpG-island No: 2449
ttttcgttgcgtttaggtttcgggtgttgcggcgggcgtatttttaggtagggagaggggtggtcgtcgttttcgaagttcgttttttgtcgggatgtttggaggaagtggtttttgggtttgaattcggtgagcgcggtttcgtttttttttcgttaatttttcgttttcgaggagcgttcgttttttattaggggttaggtttttttcgggacgtttcgcgatttcgggtcgcgggtttttggaatttatgggggtacggtttattttcggacgtttttttttcgtttttagttttaatttcggcgttttcgtagcggttgtatgtgtagttggagggagcgggttaaagtttggtaggacgcgtttttaatttcgttattttttgtattattcgcgataggattaagaggattttgcgtaggcgtagagcggaggtcgaggtggcggtgacgtagggtttagcgttttttgaagggttaaagtttaattcgagcgtaggcgtagagcggaggtcgaggtggtcgcggggcggggtagaagggtttttgtggggtttagatagttttttcgcgtaggtgtagaagttaggttgcggtgttggagtggcgggttgcgggttt

SEQ ID NO: 2450 - DNA, 623 bp, Artificial Sequence
  chemically treated genomic DNA (Homo sapiens) CpG-island No: 2450
aaacccgcaacccgccactccaacaccgcaacctaacttctacacctacgcgaaaaaactatctaaaccccacaaaaacccttctaccccgccccgcgaccacctcgacctccgctctacgcctacgctcgaattaaactttaacccttcaaaaaacgctaaaccctacgtcaccgccacctcgacctccgctctacgcctacgcaaaatcctcttaatcctatcgcgaataatacaaaaaataacgaaattaaaaacgcgtcctaccaaactttaacccgctccctccaactacacatacaaccgctacgaaaacgccgaaattaaaactaaaaacgaaaaaaaaacgtccgaaaataaaccgtacccccataaattccaaaaacccgcgacccgaaatcgcgaaacgtcccgaaaaaaacctaacccctaataaaaaacgaacgctcctcgaaaacgaaaaattaacgaaaaaaaaacgaaaccgcgctcaccgaattcaaacccaaaaaccacttcctccaaacatcccgacaaaaaacgaacttcgaaaacgacgaccacccctctccctacctaaaaatacgcccgccgcaacacccgaaacctaaacgcaacgaaaa

SEQ ID NO: 2451 - DNA, 623 bp, Artificial Sequence
  chemically treated genomic DNA (Homo sapiens) CpG-island No: 2451
gggttcgtaattcgttattttagtatcgtagtttggtttttgtatttgcgcgaggaaattatttgggttttataggagtttttttgtttcgtttcgcggttatttcggttttcgttttgcgtttgcgttcggattgagttttgattttttagggagcgttgggttttgcgttatcgttatttcggttttcgttttgcgtttgcgtaggatttttttggttttatcgcgagtggtgtagagaatggcgggattgggagcgcgttttgttaggttttgattcgttttttttaattgtatatgtagtcgttgcggggacgtcggggttggggttgggggcggggaaggagcgttcgggagtgggtcgtgtttttatggattttagaaattcgcggttcggagtcgcggggcgtttcgagggagatttggtttttggtgggaggcgggcgtttttcgagggcggggagttggcgggaagaggacgaggtcgcgtttatcggatttagatttagaaattattttttttaggtatttcggtaagaaacgggtttcggagacggcggttatttttttttttgtttaggagtgcgttcgtcgtagtattcggggtttgaacgtaacgggag

SEQ ID NO: 2452 - DNA, 623 bp, Artificial Sequence
  chemically treated genomic DNA (Homo sapiens) CpG-island No: 2452
ctcccgttacgttcaaaccccgaatactacgacgaacgcactcctaaacaaaaaaaaaaataaccgccgtctccgaaacccgtttcttaccgaaatacctaaaaaaaataatttctaaatctaaatccgataaacgcgacctcgtcctcttcccgccaactccccgccctcgaaaaacgcccgcctcccaccaaaaaccaaatctccctcgaaacgccccgcgactccgaaccgcgaatttctaaaatccataaaaacacgacccactcccgaacgctccttccccgcccccaaccccaaccccgacgtccccgcaacgactacatatacaattaaaaaaaacgaatcaaaacctaacaaaacgcgctcccaatcccgccattctctacaccactcgcgataaaaccaaaaaaatcctacgcaaacgcaaaacgaaaaccgaaataacgataacgcaaaacccaacgctccctaaaaaatcaaaactcaatccgaacgcaaacgcaaaacgaaaaccgaaataaccgcgaaacgaaacaaaaaaactcctataaaacccaaataatttcctcgcgcaaatacaaaaaccaaactacgatactaaaataacgaattacgaaccc

SEQ ID NO: 2453 - DNA, 1890 bp, Artificial Sequence
  chemically treated genomic DNA (Homo sapiens) CpG-island No: 2453
cgttcgttgtttttcgggtacggtttgttttagcgggcgcgggcgggcgtagtggttagggacgtcgaagttttaagtttggtcgatttcggtttgtttggtgttcgagtggggtcggggcgggcggagagcgaggttgcgggaggtagcggtggtaggagcgggtgggcgggggcgttgacgttagattcgggttcgggcgtcggcggtcgtttttttgttatattttggtggtcgcgttcgtagtcgggtcgggtcgtgcgtcgcgtagtttggtagtttcgcgcgtagttatcggggagcgggcgggagttatgtagcggttttgagtattaggggtcggcgttgaggagcgcgcgcggcgggagggtagtcgagtatggagttgagtttggagagtttggggggtttgtatagcgtggtttacgcgtaggcgggcgagttgttgagttcgggttacgcgcgttcggcggcggcgtagtatcgcggtttggtggcgttcgggcgttcgggtttggtggtcggtatggcgagtttgttggacggcggcggcggcggcggcggtgggggcgtcgggggcgcgggcggcgcgggtagcgcgggcggcggcgcggattttcgcggggaattggcgggttcgttgtattcggtaatgggtatggtttgcgaggcgtcgggtttgggcggtatttatacgacgtttacgtttttgtagtatttgtcgtcgttcgcggtcgtggtcgataagttttattagtacgcggcggtcgcggtcgtggtcggggcgtacggcggttatttttacgcgtattcgtattcggcggtcgcgtcgttttcgttattttcgtcgtagcgtttggcggttagcgtgagcggtagttttatttttatgcgcgacgagcgggcggcgttcgttttcgtgggttatttttacggattttacggtaaggagttgttcgttatggggtcgtcgttgtcgtcgttgtttaacgcgttgtcgttcgcgttgtacggcgtttcgtagttttcgtcgtcgttattattttcgtcgttggtcgtttacggttcgttaggttatttggttggggataagttgttgtcgttcgtcgttttcgagtcgtacgtcgcgttgttgggacgcgcggaggacgtattggttcgcgggttgttcggaggcggcggcggtataggtagcggcggagcgggtagcgggagcgtcgcggggttgttggcgtcgttgggcgggttggcggcggtcggggcgtacgggtcgtacgggggaggcggcggtttcggcgggagcggcggcggttttagcgcgggcgtagcggtcgaggagattaatattaaggaggtggcgtagcgtattacggcggagttgaagcgttatagtatttcgtaggtaattttcgcgtagcggattttgtgtcgtttttagggtacgtttttcgatttgttgcgtaattttaagtcgtggagtaagtttaaattcggtcgcgagatttttcgtaggatgtggaagtggttgtaggagttagagttttagcgtatgtcggcgttgcgtttggtaggtaggagcgtggcgcgtagggttagattttgggggcgtcggttttggattttcgagtatttagcggggcggcggtcgatgttcggggttagcgttttaagtttcgttcgtgcgtttcggtagttcgggattttttattaggaagttagatcgcgattcgcgtcgttgttcgtttgtatcgttgttaaaagggagaaagggattgtgtcgttttttcgtttttcggtcgtcgtttttgtttttttcgggagcgcgtaggggttttttagtttttgttagattgttgggaggtttcgagtttttttttaagtagtttttag

SEQ ID NO: 2454 - DNA, 1890 bp, Artificial Sequence
  chemically treated genomic DNA (Homo sapiens) CpG-island No: 2454
ctaaaaactacttaaaaaaaaactcgaaacctcccaacaatctaacaaaaactaaaaaacccctacgcgctcccgaaaaaaacaaaaacgacgaccgaaaaacgaaaaaacgacacaatccctttctcccttttaacaacgatacaaacgaacaacgacgcgaatcgcgatctaacttcctaataaaaaatcccgaactaccgaaacgcacgaacgaaacttaaaacgctaaccccgaacatcgaccgccgccccgctaaatactcgaaaatccaaaaccgacgcccccaaaatctaaccctacgcgccacgctcctacctaccaaacgcaacgccgacatacgctaaaactctaactcctacaaccacttccacatcctacgaaaaatctcgcgaccgaatttaaacttactccacgacttaaaattacgcaacaaatcgaaaaacgtaccctaaaaacgacacaaaatccgctacgcgaaaattacctacgaaatactataacgcttcaactccgccgtaatacgctacgccacctccttaatattaatctcctcgaccgctacgcccgcgctaaaaccgccgccgctcccgccgaaaccgccgcctcccccgtacgacccgtacgccccgaccgccgccaacccgcccaacgacgccaacaaccccgcgacgctcccgctacccgctccgccgctacctataccgccgccgcctccgaacaacccgcgaaccaatacgtcctccgcgcgtcccaacaacgcgacgtacgactcgaaaacgacgaacgacaacaacttatccccaaccaaataacctaacgaaccgtaaacgaccaacgacgaaaataataacgacgacgaaaactacgaaacgccgtacaacgcgaacgacaacgcgttaaacaacgacgacaacgacgaccccataacgaacaactccttaccgtaaaatccgtaaaaataacccacgaaaacgaacgccgcccgctcgtcgcgcataaaaataaaactaccgctcacgctaaccgccaaacgctacgacgaaaataacgaaaacgacgcgaccgccgaatacgaatacgcgtaaaaataaccgccgtacgccccgaccacgaccgcgaccgccgcgtactaataaaacttatcgaccacgaccgcgaacgacgacaaatactacaaaaacgtaaacgtcgtataaataccgcccaaacccgacgcctcgcaaaccatacccattaccgaatacaacgaacccgccaattccccgcgaaaatccgcgccgccgcccgcgctacccgcgccgcccgcgcccccgacgcccccaccgccgccgccgccgccgccgtccaacaaactcgccataccgaccaccaaacccgaacgcccgaacgccaccaaaccgcgatactacgccgccgccgaacgcgcgtaacccgaactcaacaactcgcccgcctacgcgtaaaccacgctatacaaaccccccaaactctccaaactcaactccatactcgactaccctcccgccgcgcgcgctcctcaacgccgacccctaatactcaaaaccgctacataactcccgcccgctccccgataactacgcgcgaaactaccaaactacgcgacgcacgacccgacccgactacgaacgcgaccaccaaaatataacaaaaaaacgaccgccgacgcccgaacccgaatctaacgtcaacgcccccgcccacccgctcctaccaccgctacctcccgcaacctcgctctccgcccgccccgaccccactcgaacaccaaacaaaccgaaatcgaccaaacttaaaacttcgacgtccctaaccactacgcccgcccgcgcccgctaaaacaaaccgtacccgaaaaacaacgaacg

SEQ ID NO: 2455 - DNA, 1890 bp, Artificial Sequence
  chemically treated genomic DNA (Homo sapiens) CpG-island No: 2455
ttgagggttgtttggggagaggttcggagttttttagtagtttaataaggattagagaatttttacgcgttttcgaaaggggtagaagcggcgatcggggggcggggaggcggtataattttttttttttttttggtaacggtataaacgggtagcggcgcggatcgcggtttagttttttgatagggggtttcgggttgtcggggcgtacgggcggggtttggggcgttggtttcgggtatcggtcgtcgtttcgttaggtgttcgggagtttagagtcggcgtttttagggtttggttttgcgcgttacgtttttatttgttaagcgtagcgtcgatatgcgttggaattttggtttttgtagttatttttatattttgcggaaggtttcgcggtcggatttgagtttgttttacggtttggggttgcgtagtaggtcggagagcgtgttttgagagcgatataggattcgttgcgcgaagattgtttgcgggatgttgtagcgttttagtttcgtcgtgatgcgttgcgttatttttttggtgttgattttttcggtcgttgcgttcgcgttggggtcgtcgtcgttttcgtcggggtcgtcgtttttttcgtgcggttcgtgcgtttcggtcgtcgttagttcgtttagcggcgttagtagtttcgcggcgttttcgttgttcgtttcgtcgttgtttgtgtcgtcgtcgttttcgggtagttcgcgggttagtgcgtttttcgcgcgttttagtagcgcggcgtgcggttcgaaggcggcgggcggtagtagtttgtttttagttaggtggtttggcgggtcgtaggcggttagcggcgggggtggtggcggcggcgggggttgcggggcgtcgtgtagcgcgggcggtagcgcgttgggtagcggcgatagcggcgattttatggcgggtagttttttgtcgtagggttcgtagaggtggtttacggaggcgagcgtcgttcgttcgtcgcgtatgagggtgaagttgtcgtttacgttggtcgttagacgttgcggcgggggtggcgggggcggcgcggtcgtcgggtgcgggtgcgcgtggggatggtcgtcgtgcgtttcggttacggtcgcggtcgtcgcgtgttggtggaatttgtcggttacggtcgcgagcggcggtaggtgttgtaggggcgtgagcgtcgtgtaggtgtcgtttaggttcggcgtttcgtaggttatgtttattgtcgggtgtagcgggttcgttagtttttcgcggaagttcgcgtcgtcgttcgcgttgttcgcgtcgttcgcgttttcggcgtttttatcgtcgtcgtcgtcgtcgtcgtttagtaggttcgttatgtcggttattaggttcgggcgttcgggcgttattaggtcgcggtgttgcgtcgtcgtcgagcgcgcgtggttcgggtttagtagttcgttcgtttgcgcgtgggttacgttgtgtaggttttttaggttttttaggtttagttttatgttcggttgttttttcgtcgcgcgcgttttttagcgtcggtttttagtgtttaaggtcgttgtatgattttcgttcgtttttcggtggttgcgcgcgaggttgttaggttgcgcggcgtacggttcggttcggttgcgagcgcggttattaggatgtggtaggggagcggtcgtcggcgttcgggttcgggtttgacgttagcgttttcgtttattcgtttttgttatcgttgtttttcgtagtttcgtttttcgttcgtttcggttttattcgagtattaagtaggtcgaagtcggttagatttggggtttcggcgtttttggttattgcgttcgttcgcgttcgttggggtaggtcgtattcgggggatagcgggcg

SEQ ID NO: 2456 - DNA, 1890 bp, Artificial Sequence
  chemically treated genomic DNA (Homo sapiens) CpG-island No: 2456
cgcccgctatcccccgaatacgacctaccccaacgaacgcgaacgaacgcaataaccaaaaacgccgaaaccccaaatctaaccgacttcgacctacttaatactcgaataaaaccgaaacgaacgaaaaacgaaactacgaaaaacaacgataacaaaaacgaataaacgaaaacgctaacgtcaaacccgaacccgaacgccgacgaccgctcccctaccacatcctaataaccgcgctcgcaaccgaaccgaaccgtacgccgcgcaacctaacaacctcgcgcgcaaccaccgaaaaacgaacgaaaatcatacaacgaccttaaacactaaaaaccgacgctaaaaaacgcgcgcgacgaaaaaacaaccgaacataaaactaaacctaaaaaacctaaaaaacctacacaacgtaacccacgcgcaaacgaacgaactactaaacccgaaccacgcgcgctcgacgacgacgcaacaccgcgacctaataacgcccgaacgcccgaacctaataaccgacataacgaacctactaaacgacgacgacgacgacgacgataaaaacgccgaaaacgcgaacgacgcgaacaacgcgaacgacgacgcgaacttccgcgaaaaactaacgaacccgctacacccgacaataaacataacctacgaaacgccgaacctaaacgacacctacacgacgctcacgcccctacaacacctaccgccgctcgcgaccgtaaccgacaaattccaccaacacgcgacgaccgcgaccgtaaccgaaacgcacgacgaccatccccacgcgcacccgcacccgacgaccgcgccgcccccgccacccccgccgcaacgtctaacgaccaacgtaaacgacaacttcaccctcatacgcgacgaacgaacgacgctcgcctccgtaaaccacctctacgaaccctacgacaaaaaactacccgccataaaatcgccgctatcgccgctacccaacgcgctaccgcccgcgctacacgacgccccgcaacccccgccgccgccaccacccccgccgctaaccgcctacgacccgccaaaccacctaactaaaaacaaactactaccgcccgccgccttcgaaccgcacgccgcgctactaaaacgcgcgaaaaacgcactaacccgcgaactacccgaaaacgacgacgacacaaacaacgacgaaacgaacaacgaaaacgccgcgaaactactaacgccgctaaacgaactaacgacgaccgaaacgcacgaaccgcacgaaaaaaacgacgaccccgacgaaaacgacgacgaccccaacgcgaacgcaacgaccgaaaaaatcaacaccaaaaaaataacgcaacgcatcacgacgaaactaaaacgctacaacatcccgcaaacaatcttcgcgcaacgaatcctatatcgctctcaaaacacgctctccgacctactacgcaaccccaaaccgtaaaacaaactcaaatccgaccgcgaaaccttccgcaaaatataaaaataactacaaaaaccaaaattccaacgcatatcgacgctacgcttaacaaataaaaacgtaacgcgcaaaaccaaaccctaaaaacgccgactctaaactcccgaacacctaacgaaacgacgaccgatacccgaaaccaacgccccaaaccccgcccgtacgccccgacaacccgaaaccccctatcaaaaaactaaaccgcgatccgcgccgctacccgtttataccgttaccaaaaaaaaaaaaaaaattataccgcctccccgccccccgatcgccgcttctacccctttcgaaaacgcgtaaaaattctctaatccttattaaactactaaaaaactccgaacctctccccaaacaaccctcaa

SEQ ID NO: 2457 - DNA, 865 bp, Artificial Sequence
  chemically treated genomic DNA (Homo sapiens) CpG-island No: 2457
ggaatcggaggggtgagcgtagtttttggtatttcgagtttttcgtagggcgttggggcgttgaggatgataaattcggattacgttgttcgtttgttttttgtcgggttcgttgtttacgtcgtggtttcgtcgcgcggtttcgcggtcgcggggtttacgtcgttaattttgcgtatttgtcgcgttttaggtgttttgggggtcgcgtttatattatcggatttcgtttggggcgtaagaggtggcgggggcgagggtcgcggggttattaggtttcggtttaggtttttagtttcggtcgttgcgtaaatgaaaagcggttaagtggcggtaaatcgcggcggttagggggagacggtcggatgcgtttttatttttatttaatacggcgacgttttaacgttggtgttcggaaagggaattttgttttcgtttcgttttcgtattattttaatttcgtagtagaggattcgtcgttttttttatttcggtatttttatttttcgtttcgcgagtatcgcgggtttttttaggttttttttaaggagaattttgcgtttcgggtttttcgtcgcgtttgttcggttcggggcgggttacgcgttttcgtaggtgtcgagtgttttgtcgggcgtcggggttaggatagagacggggatagggagggagaaagattcgtaggtgtagacggagagggagggggagacggggagatggagagagagggaggggtcgcgagataaaattagagagtggggagggagagatcgggagcgggagaaatagacggggagaagagaaaaagaagtttagaaaggaatagaggtgaaggagagacgaaaagagaggtagagagattaaa

SEQ ID NO: 2458 - DNA, 865 bp, Artificial Sequence
  chemically treated genomic DNA (Homo sapiens) CpG-island No: 2458
tttaatctctctacctctcttttcgtctctccttcacctctattcctttctaaacttctttttctcttctccccgtctatttctcccgctcccgatctctccctccccactctctaattttatctcgcgacccctccctctctctccatctccccgtctccccctccctctccgtctacacctacgaatctttctccctccctatccccgtctctatcctaaccccgacgcccgacaaaacactcgacacctacgaaaacgcgtaacccgccccgaaccgaacaaacgcgacgaaaaacccgaaacgcaaaattctccttaaaaaaaacctaaaaaaacccgcgatactcgcgaaacgaaaaataaaaataccgaaataaaaaaaacgacgaatcctctactacgaaattaaaataatacgaaaacgaaacgaaaacaaaattccctttccgaacaccaacgttaaaacgtcgccgtattaaataaaaataaaaacgcatccgaccgtctccccctaaccgccgcgatttaccgccacttaaccgcttttcatttacgcaacgaccgaaactaaaaacctaaaccgaaacctaataaccccgcgaccctcgcccccgccacctcttacgccccaaacgaaatccgataatataaacgcgacccccaaaacacctaaaacgcgacaaatacgcaaaattaacgacgtaaaccccgcgaccgcgaaaccgcgcgacgaaaccacgacgtaaacaacgaacccgacaaaaaacaaacgaacaacgtaatccgaatttatcatcctcaacgccccaacgccctacgaaaaactcgaaataccaaaaactacgctcacccctccgattcc

SEQ ID NO: 2459 - DNA, 865 bp, Artificial Sequence
  chemically treated genomic DNA (Homo sapiens) CpG-island No: 2459
tttggtttttttgttttttttttcgttttttttttatttttgtttttttttgggtttttttttttttttttttcgtttgtttttttcgttttcggtttttttttttttattttttggttttgtttcgcgatttttttttttttttttattttttcgttttttttttttttttcgtttgtatttgcgggtttttttttttttttgttttcgtttttgttttggtttcggcgttcggtaggatattcggtatttgcggaaacgcgtggttcgtttcgagtcgggtaagcgcgacgggagattcggggcgtaaagttttttttggaggaggtttggggaggttcgcggtgttcgcggagcggggaatggggatgtcggagtagaaagggcggcgagttttttgttgcggggttgaaatggtgcgggggcggggcgggggtagagtttttttttcgagtattagcgttggggcgtcgtcgtgttaggtggagatggggacgtattcggtcgtttttttttaatcgtcgcgatttgtcgttatttaatcgttttttatttgcgtagcgatcggaattaaaggtttgggtcggagtttagtgatttcgcggttttcgttttcgttattttttacgttttaggcggagttcggtggtgtagacgcggtttttagggtatttgagacgcgataggtgcgtaaggttgacggcgtgaatttcgcggtcgcggggtcgcgcggcggggttacggcgtgggtagcggattcggtagagagtaggcgggtagcgtggttcgggtttattatttttaacgttttagcgttttgcgggaggttcggggtgttaggagttgcgtttattttttcggtttt

SEQ ID NO: 2460 - DNA, 865 bp, Artificial Sequence
  chemically treated genomic DNA (Homo sapiens) CpG-island No: 2460
aaaaccgaaaaaataaacgcaactcctaacaccccgaacctcccgcaaaacgctaaaacgttaaaaataataaacccgaaccacgctacccgcctactctctaccgaatccgctacccacgccgtaaccccgccgcgcgaccccgcgaccgcgaaattcacgccgtcaaccttacgcacctatcgcgtctcaaataccctaaaaaccgcgtctacaccaccgaactccgcctaaaacgtaaaaaataacgaaaacgaaaaccgcgaaatcactaaactccgacccaaacctttaattccgatcgctacgcaaataaaaaacgattaaataacgacaaatcgcgacgattaaaaaaaaacgaccgaatacgtccccatctccacctaacacgacgacgccccaacgctaatactcgaaaaaaaaactctacccccgccccgcccccgcaccatttcaaccccgcaacaaaaaactcgccgccctttctactccgacatccccattccccgctccgcgaacaccgcgaacctccccaaacctcctccaaaaaaaactttacgccccgaatctcccgtcgcgcttacccgactcgaaacgaaccacgcgtttccgcaaataccgaatatcctaccgaacgccgaaaccaaaacaaaaacgaaaacaaaaaaaaaaaaaaacccgcaaatacaaacgaaaaaaaaaaaaaaaacgaaaaaataaaaaaaaaaaaaaaaatcgcgaaacaaaaccaaaaaataaaaaaaaaaaaaccgaaaacgaaaaaaacaaacgaaaaaaaaaaaaaaaaaaacccaaaaaaaaacaaaaataaaaaaaaaacgaaaaaaaaaacaaaaaaaccaaa

SEQ ID NO: 2461 - DNA, 572 bp, Artificial Sequence
  chemically treated genomic DNA (Homo sapiens) CpG-island No: 2461
tgtcgcggattaagttttgtagatttttgtcgaatatgcggtcgatgttgttttttattattttgagggttatcgcggcggtttacgggtttttgtttcgggaggttcgcggttgggcgtcgtgagggggttcggggttcgtgtttgtcgttcgcggagcgtcgcgttgtcggtcgttgcggcggggtaagtttttaggttagggcggcggcggggtttaaggatcgcggtagaggcggcgattcgttcggtaggtgtcgcgatttcgtttcgggttttttgtaaatggcggataagatggcggcgggttagttgacgacgagcgttcggttttagtcgagtcggtttcggaagtttcgttttttagaaagtttcgtttcgttattttttcggtagggagacgttgcgtttttttgacgacgataggtagtttaatggaaatgtggtattttttttttttgcgcgcggtttcgtttttttcggttttaaaatttgcgtttttattggttagtggttttcggaatttcgttttttttttagttttgagttttagttacgttttttagaggttg

SEQ ID NO: 2462 - DNA, 572 bp, Artificial Sequence
  chemically treated genomic DNA (Homo sapiens) CpG-island No: 2462
caacctctaaaaaacgtaactaaaactcaaaactaaaaaaaaaacgaaattccgaaaaccactaaccaataaaaacgcaaattttaaaaccgaaaaaaacgaaaccgcgcgcaaaaaaaaaaaataccacatttccattaaactacctatcgtcgtcaaaaaaacgcaacgtctccctaccgaaaaaataacgaaacgaaactttctaaaaaacgaaacttccgaaaccgactcgactaaaaccgaacgctcgtcgtcaactaacccgccgccatcttatccgccatttacaaaaaacccgaaacgaaatcgcgacacctaccgaacgaatcgccgcctctaccgcgatccttaaaccccgccgccgccctaacctaaaaacttaccccgccgcaacgaccgacaacgcgacgctccgcgaacgacaaacacgaaccccgaaccccctcacgacgcccaaccgcgaacctcccgaaacaaaaacccgtaaaccgccgcgataaccctcaaaataataaaaaacaacatcgaccgcatattcgacaaaaatctacaaaacttaatccgcgaca

SEQ ID NO: 2463 - DNA, 572 bp, Artificial Sequence
  chemically treated genomic DNA (Homo sapiens) CpG-island No: 2463
tagtttttaaggggcgtggttagggtttagaattaggaagaaggcggagtttcggaggttattgattaatgagagcgtaagttttggggtcggaaaaggcggggtcgcgcgtaggagaaagaggtgttatatttttattggattatttgtcgtcgttagggaaacgtagcgtttttttgtcggggaggtggcggggcggggttttttgggaggcggggttttcggggtcggttcggttgggatcgggcgttcgtcgttagttgattcgtcgttattttgttcgttatttgtaaggggttcggagcgggatcgcggtatttgtcgagcgggtcgtcgtttttgtcgcggtttttggatttcgtcgtcgttttggtttgggagtttgtttcgtcgtagcggtcggtagcgcggcgtttcgcgggcggtaggtacgggtttcgggtttttttacggcgtttagtcgcgggtttttcgaggtaaaagttcgtgggtcgtcgcgatggtttttaagatggtgaagggtagtatcgatcgtatgttcgataagaatttgtaggatttggttcgcggta

SEQ ID NO: 2464 - DNA, 572 bp, Artificial Sequence
  chemically treated genomic DNA (Homo sapiens) CpG-island No: 2464
taccgcgaaccaaatcctacaaattcttatcgaacatacgatcgatactacccttcaccatcttaaaaaccatcgcgacgacccacgaacttttacctcgaaaaacccgcgactaaacgccgtaaaaaaacccgaaacccgtacctaccgcccgcgaaacgccgcgctaccgaccgctacgacgaaacaaactcccaaaccaaaacgacgacgaaatccaaaaaccgcgacaaaaacgacgacccgctcgacaaataccgcgatcccgctccgaaccccttacaaataacgaacaaaataacgacgaatcaactaacgacgaacgcccgatcccaaccgaaccgaccccgaaaaccccgcctcccaaaaaaccccgccccgccacctccccgacaaaaaaacgctacgtttccctaacgacgacaaataatccaataaaaatataacacctctttctcctacgcgcgaccccgccttttccgaccccaaaacttacgctctcattaatcaataacctccgaaactccgccttcttcctaattctaaaccctaaccacgccccttaaaaacta

SEQ ID NO: 2465 - DNA, 1066 bp, Artificial Sequence
  chemically treated genomic DNA (Homo sapiens) CpG-island No: 2465
tgttcggcgttttttttttgggacgggattcgaattcgttattcgacgggttcgtttatagggttttttcgggttttcgtttcgggtcggcgagtgggggaaggggtcggtcgagggtaatcgaggacgtgcgtgcgtacgttcgtgcgtgcgtggattcgggcgggcgggcgagtttacggggcggggcgtcgagggggtggcgcgcgcgggtcggttcgttgggcggcgggtacgcgtcggcgttttcgtttcgggtttttttagcgcgcggggcgagtggtttcgttcggttttcggtttattgtgttcgttttacgtcggtttaagatggcggaggcgttggaggtttcgggtttgtgattataaagagggagtcgggggtcgggtcggatcggagcgcggcggcggcggcggcggcggtcgaggtcgaggttaggttttttttttttagtttttcgtttttttttttcgttcgttttttttcgtttatcggcggtttcgttttttttttaatcgttcgtttagtatggtgcggcggtcgcgcgcgcggatatgggggagaagttggagttgagattgaagtcgttcgtgggggttgagttcgtcgtttattcgtggtcgttgtcggtttacgtgagtgtcgttttttatcgtttttatttttcggttttttttttttcgtcgtttttggggatattttaaatttttttaagtcgcgtttatcggttttttttgcggaacggagattttggattttattgtcgttgttttattttcgttgtttttcggtcgagggtttcgcggttgtttttcgtagggtgggagtttcgcgcgtttggggtgggagcgggagtcggcgttttcgagttttatcgcggtgtcgttgttttcgtcgggttgtttcgggcgcggaacggaaggggtaattcgtgtcggtcgcgttttgattggaagttcgttcgttcgtttcgttcgttttcggcgttgttagtgtgttcgtcgttttatttttttttttgagggtatttttttttgttttttttttttttttttttaaaaattg

SEQ ID NO: 2466 - DNA, 1066 bp, Artificial Sequence
  chemically treated genomic DNA (Homo sapiens) CpG-island No: 2466
caatttttaaaaaaaaaaaaaaaaaaaacaaaaaaaaataccctcaaaaaaaaaaataaaacgacgaacacactaacaacgccgaaaacgaacgaaacgaacgaacgaacttccaatcaaaacgcgaccgacacgaattaccccttccgttccgcgcccgaaacaacccgacgaaaacaacgacaccgcgataaaactcgaaaacgccgactcccgctcccaccccaaacgcgcgaaactcccaccctacgaaaaacaaccgcgaaaccctcgaccgaaaaacaacgaaaataaaacaacgacaataaaatccaaaatctccgttccgcaaaaaaaaccgataaacgcgacttaaaaaaatttaaaatatccccaaaaacgacgaaaaaaaaaaaaccgaaaaataaaaacgataaaaaacgacactcacgtaaaccgacaacgaccacgaataaacgacgaactcaacccccacgaacgacttcaatctcaactccaacttctcccccatatccgcgcgcgcgaccgccgcaccatactaaacgaacgattaaaaaaaaaacgaaaccgccgataaacgaaaaaaaacgaacgaaaaaaaaaaacgaaaaactaaaaaaaaaaaacctaacctcgacctcgaccgccgccgccgccgccgccgcgctccgatccgacccgacccccgactccctctttataatcacaaacccgaaacctccaacgcctccgccatcttaaaccgacgtaaaacgaacacaataaaccgaaaaccgaacgaaaccactcgccccgcgcgctaaaaaaacccgaaacgaaaacgccgacgcgtacccgccgcccaacgaaccgacccgcgcgcgccaccccctcgacgccccgccccgtaaactcgcccgcccgcccgaatccacgcacgcacgaacgtacgcacgcacgtcctcgattaccctcgaccgaccccttcccccactcgccgacccgaaacgaaaacccgaaaaaaccctataaacgaacccgtcgaataacgaattcgaatcccgtcccaaaaaaaaaacgccgaaca

SEQ ID NO: 2467 - DNA, 1066 bp, Artificial Sequence
  chemically treated genomic DNA (Homo sapiens) CpG-island No: 2467
taatttttaaaaagaagagaagaggagataggaaaggatgtttttaaaaagaaaaataaggcggcggatatattgatagcgtcgggaacgagcggggcgggcgggcgggtttttagttaaaacgcggtcggtacgagttatttttttcgtttcgcgttcgggatagttcggcgggggtaacggtatcgcggtagggttcgggggcgtcggttttcgtttttattttaggcgcgcggggtttttattttgcgggaaatagtcgcggggttttcggtcgggaagtaacgggggtggagtagcgatagtggagtttagggttttcgtttcgtaggggggatcggtgagcgcggtttgggggggtttggggtgtttttaggggcggcggaggaggggaggtcgggaggtagggacggtggagggcggtatttacgtagatcggtagcggttacgggtagacggcgggtttagtttttacgggcgattttagttttagttttagttttttttttatgttcgcgcgcgcggtcgtcgtattatgttaggcgggcggttgggggaggggcggggtcgtcggtgggcggaggagggcgggcgggagggaggggcgggaggttgaggggagggggtttggtttcggtttcggtcgtcgtcgtcgtcgtcgtcgcgtttcggttcggttcggttttcgattttttttttgtagttataggttcggggtttttagcgttttcgttattttgggtcggcgtgaagcgagtataatgagtcgggggtcgggcggaattattcgtttcgcgcgttaggggagttcggagcgaagacgtcggcgcgtgttcgtcgtttagcgggtcgattcgcgcgcgttattttttcggcgtttcgtttcgtggattcgttcgttcgttcgaatttacgtacgtacgaacgtacgtacgtacgttttcggttgttttcggtcgatttttttttttattcgtcggttcgaagcggggattcggggagattttgtgggcgggttcgtcggatagcgggttcgaatttcgttttaggaggaggacgtcggata

SEQ ID NO: 2468 - DNA, 1066 bp, Artificial Sequence
  chemically treated genomic DNA (Homo sapiens) CpG-island No: 2468
tatccgacgtcctcctcctaaaacgaaattcgaacccgctatccgacgaacccgcccacaaaatctccccgaatccccgcttcgaaccgacgaataaaaaaaaaaatcgaccgaaaacaaccgaaaacgtacgtacgtacgttcgtacgtacgtaaattcgaacgaacgaacgaatccacgaaacgaaacgccgaaaaaataacgcgcgcgaatcgacccgctaaacgacgaacacgcgccgacgtcttcgctccgaactcccctaacgcgcgaaacgaataattccgcccgacccccgactcattatactcgcttcacgccgacccaaaataacgaaaacgctaaaaaccccgaacctataactacaaaaaaaaaatcgaaaaccgaaccgaaccgaaacgcgacgacgacgacgacgacgaccgaaaccgaaaccaaaccccctcccctcaacctcccgcccctccctcccgcccgccctcctccgcccaccgacgaccccgcccctcccccaaccgcccgcctaacataatacgacgaccgcgcgcgcgaacataaaaaaaaaactaaaactaaaactaaaatcgcccgtaaaaactaaacccgccgtctacccgtaaccgctaccgatctacgtaaataccgccctccaccgtccctacctcccgacctcccctcctccgccgcccctaaaaacaccccaaacccccccaaaccgcgctcaccgatcccccctacgaaacgaaaaccctaaactccactatcgctactccacccccgttacttcccgaccgaaaaccccgcgactatttcccgcaaaataaaaaccccgcgcgcctaaaataaaaacgaaaaccgacgcccccgaaccctaccgcgataccgttacccccgccgaactatcccgaacgcgaaacgaaaaaaataactcgtaccgaccgcgttttaactaaaaacccgcccgcccgccccgctcgttcccgacgctatcaatatatccgccgccttatttttctttttaaaaacatcctttcctatctcctcttctcttctttttaaaaatta

SEQ ID NO: 2469 - DNA, 581 bp, Artificial Sequence
  chemically treated genomic DNA (Homo sapiens) CpG-island No: 2469
gcgcggggtaatttttttcggttgaggatggggtcgcgggttgggggttttgggcggtagggtcgtagggtgtaggtgaggggtttttaggtttgcgggcgcgttttacgtcgggtttcggtacggttatttatttgggcggtttcgtcgcggatacggcgcgggttgcggcgcgggggtcgttcggagtcgatacgagtagtcgtcgtcgtcgtcgtcgtcgtcgtcgtcgtttttcgggtttcgtcgtgcgcgtcgtcgtcgcgcgtaatcgttcgtcggttttttcggcgcgtttggcgggggcgcgcgggggttgcgttgggtcgcgtgcgcggcggttggggtcgtaggtgtgagaggttacgtgggcgtaggtgcggggatattgggagcgcgggtgtagaattttttcgtgcgtatttcgggcgtttcgtgttcgaggattttttgtttttacggtttgggtgagtttgcggagacggtcgtgtcgtgtaataaacgtaggggtattttaagtgtagtaggttgtttcgtgtggaattttttggaagttattatcgttttttttgtttttcgtt

SEQ ID NO: 2470 - DNA, 581 bp, Artificial Sequence
  chemically treated genomic DNA (Homo sapiens) CpG-island No: 2470
aacgaaaaacaaaaaaaacgataataacttccaaaaaattccacacgaaacaacctactacacttaaaatacccctacgtttattacacgacacgaccgtctccgcaaactcacccaaaccgtaaaaacaaaaaatcctcgaacacgaaacgcccgaaatacgcacgaaaaaattctacacccgcgctcccaatatccccgcacctacgcccacgtaacctctcacacctacgaccccaaccgccgcgcacgcgacccaacgcaacccccgcgcgcccccgccaaacgcgccgaaaaaaccgacgaacgattacgcgcgacgacgacgcgcacgacgaaacccgaaaaacgacgacgacgacgacgacgacgacgacgactactcgtatcgactccgaacgacccccgcgccgcaacccgcgccgtatccgcgacgaaaccgcccaaataaataaccgtaccgaaacccgacgtaaaacgcgcccgcaaacctaaaaacccctcacctacaccctacgaccctaccgcccaaaacccccaacccgcgaccccatcctcaaccgaaaaaaattaccccgcgc

SEQ ID NO: 2471 - DNA, 581 bp, Artificial Sequence
  chemically treated genomic DNA (Homo sapiens) CpG-island No: 2471
gacggggggtagaggaggcgatggtagtttttagaaggttttatacggaataatttgttgtatttggggtgtttttgcgtttattgtacggtacggtcgttttcgtaggtttatttaggtcgtggggataggaggttttcggatacgaagcgttcgggatgcgtacggaggggttttgtattcgcgtttttagtgttttcgtatttgcgtttacgtggttttttatatttgcggttttagtcgtcgcgtacgcggtttagcgtagttttcgcgcgttttcgttaggcgcgtcgaggagatcggcgggcggttgcgcgcggcggcggcgcgtacggcggagttcgggaggcggcggcggcggcggcggcggcggcggcggttgttcgtgtcggtttcgggcggttttcgcgtcgtagttcgcgtcgtgttcgcggcggagtcgtttaggtgagtggtcgtgtcggggttcggcgtggggcgcgttcgtagatttggggattttttatttgtattttgcgattttgtcgtttaaagtttttaattcgcgattttatttttagtcgggggaaattgtttcgcgt

SEQ ID NO: 2472 - DNA, 581 bp, Artificial Sequence
  chemically treated genomic DNA (Homo sapiens) CpG-island No: 2472
acgcgaaacaatttcccccgactaaaaataaaatcgcgaattaaaaactttaaacgacaaaatcgcaaaatacaaataaaaaatccccaaatctacgaacgcgccccacgccgaaccccgacacgaccactcacctaaacgactccgccgcgaacacgacgcgaactacgacgcgaaaaccgcccgaaaccgacacgaacaaccgccgccgccgccgccgccgccgccgccgcctcccgaactccgccgtacgcgccgccgccgcgcgcaaccgcccgccgatctcctcgacgcgcctaacgaaaacgcgcgaaaactacgctaaaccgcgtacgcgacgactaaaaccgcaaatataaaaaaccacgtaaacgcaaatacgaaaacactaaaaacgcgaatacaaaacccctccgtacgcatcccgaacgcttcgtatccgaaaacctcctatccccacgacctaaataaacctacgaaaacgaccgtaccgtacaataaacgcaaaaacaccccaaatacaacaaattattccgtataaaaccttctaaaaactaccatcgcctcctctaccccccgtc

SEQ ID NO: 2473 - DNA, 610 bp, Artificial Sequence
  chemically treated genomic DNA (Homo sapiens) CpG-island No: 2473
atttggagcgcggttcgagttttacgtttttcggttttagatttcgtcgcgcgtttatcgttattttgtcgcgtcgtgtggtttttcgtaggtatcgtttcgcgttttttgattttttttacgcgtatgcgcggcgtatgcgtggttcggggtttcggggcgttgttgggaaatatttgtcgttggttgcggcgggtatcggtcgatatggcggtagcggtggcggttgcgttggcgcggtttttggcggtttttttgtttttcgcggtttaggtgagcgcggtatcggtttcgacggtatcgcgggttgcggtttttcggtttttttgttttcgggttacgcgtaggaacgatttcgttcggttcgttttgggggtttagtttcggggattcgtcgttttcgcgttgtcggtcggcggtgtcggggttcggtcgtgattttgcgggtttgttttcggtttttttttttttttcgtttcggaggtttttcgtcgttgtagcgttatttattttttatcgggtttgaaatttgtgttttttttatttttcggttttgttttttcgtttcggggtttttagttgtcgtcggggacgttttttttcggttttg

SEQ ID NO: 2474 - DNA, 610 bp, Artificial Sequence
  chemically treated genomic DNA (Homo sapiens) CpG-island No: 2474
caaaaccgaaaaaaaacgtccccgacgacaactaaaaaccccgaaacgaaaaaacaaaaccgaaaaataaaaaaaacacaaatttcaaacccgataaaaaataaataacgctacaacgacgaaaaacctccgaaacgaaaaaaaaaaaaaaaccgaaaacaaacccgcaaaatcacgaccgaaccccgacaccgccgaccgacaacgcgaaaacgacgaatccccgaaactaaacccccaaaacgaaccgaacgaaatcgttcctacgcgtaacccgaaaacaaaaaaaccgaaaaaccgcaacccgcgataccgtcgaaaccgataccgcgctcacctaaaccgcgaaaaacaaaaaaaccgccaaaaaccgcgccaacgcaaccgccaccgctaccgccatatcgaccgatacccgccgcaaccaacgacaaatatttcccaacaacgccccgaaaccccgaaccacgcatacgccgcgcatacgcgtaaaaaaaatcaaaaaacgcgaaacgatacctacgaaaaaccacacgacgcgacaaaataacgataaacgcgcgacgaaatctaaaaccgaaaaacgtaaaactcgaaccgcgctccaaat

SEQ ID NO: 2475 - DNA, 610 bp, Artificial Sequence
  chemically treated genomic DNA (Homo sapiens) CpG-island No: 2475
tagagtcggagagaggcgttttcggcggtaattggagatttcgaaacggagaagtagaatcggaggatggagggggtataaattttagattcggtgggaagtgagtggcgttgtagcggcggagggttttcgaggcggggaaaggagaggagtcggggatagattcgtaaggttacggtcgagtttcggtatcgtcggtcgataacgcggggacggcggattttcgaggttggatttttaagacgggtcgagcggggtcgtttttgcgcgtagttcggggatagagaggtcgaagggtcgtagttcgcggtgtcgtcgggatcggtgtcgcgtttatttgggtcgcgaggagtagaaaggtcgttaaaagtcgcgttagcgtagtcgttatcgttgtcgttatgtcggtcggtgttcgtcgtaattaacggtagatgttttttagtaacgtttcgagatttcgggttacgtatgcgtcgcgtatgcgcgtgggggaggttaaagggcgcggggcggtgtttgcgaagagttatacggcgcgataagatggcggtgagcgcgcggcggaatttggagtcggggggcgtggagttcgggtcgcgttttaggt

SEQ ID NO: 2476 - DNA, 610 bp, Artificial Sequence
  chemically treated genomic DNA (Homo sapiens) CpG-island No: 2476
acctaaaacgcgacccgaactccacgccccccgactccaaattccgccgcgcgctcaccgccatcttatcgcgccgtataactcttcgcaaacaccgccccgcgccctttaacctcccccacgcgcatacgcgacgcatacgtaacccgaaatctcgaaacgttactaaaaaacatctaccgttaattacgacgaacaccgaccgacataacgacaacgataacgactacgctaacgcgacttttaacgacctttctactcctcgcgacccaaataaacgcgacaccgatcccgacgacaccgcgaactacgacccttcgacctctctatccccgaactacgcgcaaaaacgaccccgctcgacccgtcttaaaaatccaacctcgaaaatccgccgtccccgcgttatcgaccgacgataccgaaactcgaccgtaaccttacgaatctatccccgactcctctcctttccccgcctcgaaaaccctccgccgctacaacgccactcacttcccaccgaatctaaaatttataccccctccatcctccgattctacttctccgtttcgaaatctccaattaccgccgaaaacgcctctctccgactcta

SEQ ID NO: 2477 - DNA, 772 bp, Artificial Sequence
  chemically treated genomic DNA (Homo sapiens) CpG-island No: 2477
gggtttgaatcggggcgaatattttcgttttttgatttcgatttttttgagttagaagggatttttcgatttttcgatttgtgtttatattaaggcggtggttttaagacgacgcgggggttttggtgcgtatttacgtgtagtcggatgcgttgggtgagtttttatattcggtagatgtaagggaaaaattgtattatttagaaggtattgttttttgcgtcggtcgcggattttgggttattgacgatttaggataggagagttttttgcgggttagggcggcggaggcgggattttcgttttttcgtgtgacgttattttcgtgggtcggtttggttttgaaatagtgtggggtttagagcgttgggtgggcgcgttttgcggtttgagtagggacgggtagtgaagcggttacgtttttttttcgcgttttggcgggagtttgacgtttcgttttttttttaacgaggtgttttatcggcgttcgtcgaggtttaggttttcgtagtcgtttttcgtttttttagtttcgacgttgcgttttgggttttgtgcgtatttttttcgggggaaaattgaggttcggagtgcgaaagttagtcgaggtcgtttcgtttaggatagagaagggttgtggtcggttgattcgcggtattttcgggatggcggcggcgtggatggtttcggcgtaggtgagtggacgaggtttcggttttgttgttgttgtgttatttttagaggtttcgtgggtaggttggaagttaagata

SEQ ID NO: 2478 - DNA, 772 bp, Artificial Sequence
  chemically treated genomic DNA (Homo sapiens) CpG-island No: 2478
tatcttaacttccaacctacccacgaaacctctaaaaataacacaacaacaacaaaaccgaaacctcgtccactcacctacgccgaaaccatccacgccgccgccatcccgaaaataccgcgaatcaaccgaccacaacccttctctatcctaaacgaaacgacctcgactaactttcgcactccgaacctcaattttcccccgaaaaaaatacgcacaaaacccaaaacgcaacgtcgaaactaaaaaaacgaaaaacgactacgaaaacctaaacctcgacgaacgccgataaaacacctcgttaaaaaaaaaacgaaacgtcaaactcccgccaaaacgcgaaaaaaaaacgtaaccgcttcactacccgtccctactcaaaccgcaaaacgcgcccacccaacgctctaaaccccacactatttcaaaaccaaaccgacccacgaaaataacgtcacacgaaaaaacgaaaatcccgcctccgccgccctaacccgcaaaaaactctcctatcctaaatcgtcaataacccaaaatccgcgaccgacgcaaaaaacaataccttctaaataatacaatttttcccttacatctaccgaatataaaaactcacccaacgcatccgactacacgtaaatacgcaccaaaacccccgcgtcgtcttaaaaccaccgccttaatataaacacaaatcgaaaaatcgaaaaatcccttctaactcaaaaaaatcgaaatcaaaaaacgaaaatattcgccccgattcaaaccc

SEQ ID NO: 2479 - DNA, 772 bp, Artificial Sequence
  chemically treated genomic DNA (Homo sapiens) CpG-island No: 2479
tgttttggtttttagtttgtttacgaggtttttagaaatagtatagtagtagtaaggtcgaaatttcgtttatttatttgcgtcggagttatttacgtcgtcgttatttcgggaatgtcgcggattagtcgattatagtttttttttgttttgggcggggcgatttcggttgattttcgtatttcgagttttagttttttttcgaaaaaaatgcgtataaggtttaaggcgtagcgtcggggttgaggagacggagggcggttgcggaggtttaggtttcggcgggcgtcggtgggatatttcgttaggggagaagcggggcgttaggttttcgttaagacgcgaagaaggggcgtaatcgttttattattcgtttttgtttaggtcgtagaacgcgtttatttagcgttttaggttttatattgttttagggttaaatcggtttacggagatgacgttatacgaagaagcggaagtttcgttttcgtcgttttggttcgtagaaaatttttttgttttgggtcgttaatggtttagagttcgcggtcgacgtaaggggtagtgttttttgggtaatgtagttttttttttatatttatcgggtgtgggaatttatttagcgtattcgattgtacgtaagtgcgtattagaattttcgcgtcgttttagggttatcgttttagtataggtataagtcggagggtcgaaaggttttttttagtttaggaaaatcgaggttaggaggcggggatattcgtttcgatttagattt

SEQ ID NO: 2480 - DNA, 772 bp, Artificial Sequence
  chemically treated genomic DNA (Homo sapiens) CpG-island No: 2480
aaatctaaatcgaaacgaatatccccgcctcctaacctcgattttcctaaactaaaaaaaacctttcgaccctccgacttatacctatactaaaacgataaccctaaaacgacgcgaaaattctaatacgcacttacgtacaatcgaatacgctaaataaattcccacacccgataaatataaaaaaaaaactacattacccaaaaaacactaccccttacgtcgaccgcgaactctaaaccattaacgacccaaaacaaaaaaattttctacgaaccaaaacgacgaaaacgaaacttccgcttcttcgtataacgtcatctccgtaaaccgatttaaccctaaaacaatataaaacctaaaacgctaaataaacgcgttctacgacctaaacaaaaacgaataataaaacgattacgccccttcttcgcgtcttaacgaaaacctaacgccccgcttctcccctaacgaaatatcccaccgacgcccgccgaaacctaaacctccgcaaccgccctccgtctcctcaaccccgacgctacgccttaaaccttatacgcatttttttcgaaaaaaaactaaaactcgaaatacgaaaatcaaccgaaatcgccccgcccaaaacaaaaaaaaactataatcgactaatccgcgacattcccgaaataacgacgacgtaaataactccgacgcaaataaataaacgaaatttcgaccttactactactatactatttctaaaaacctcgtaaacaaactaaaaaccaaaaca

SEQ ID NO: 2481 - DNA, 833 bp, Artificial Sequence
  chemically treated genomic DNA (Homo sapiens) CpG-island No: 2481
gtcgcgtgcgcgttttcgttatcgcgtttgggtcgagtcgagcgggatcgagcggggtcgaacggagtcgagcggagtcgagtttggtcgggtcgagttcgttatatttttataatttcgggcggtttcgtttcggttttcggttgcgcgtttttttttttacgtcggcgtaattaaattcgcgggtttttcgttttcgtttcgtttcgtttttttcgcgttcgtcgacgtttcgtttaggtcgttagtttcgtttttatggtgggcgcgtttggtcgtcggttttttttattggtcgtatcgtttgttcgtcgcgggttgcgtttttagtttgttaggttgttcggcgttgtcgttcggttgcggcggttgcggttggcggtggttgcggcggcggcgcgggttgagtgcggtcgcgcgggagttcgcggttggcgcggttcgagcggggattcggcggttcgttaggcggcggtcgaggcggggcgggtcggttcggggtcgagggtcggtggtcgaggtcggagggtcgcggcgggcggcggtcgaggcggtttcggttagggtcgggtcgggggtcggggggcggcggcgggtaggcggtcgcgtcggtcggggtcgggacgatgattttggagtttatgatggcgtgttgtttgagcgatgaggtgaaggagtttaagcggattaacgtcgagatcgagaagtagttgcggcgggataagcgcgacgttcggcgcgagtttaagttgttgttgttcggtgagtgcggttttcgggtttgtcggttgcgggttttgttttgtttgtgtttgttttgtttgttcgggtcg

SEQ ID NO: 2482 - DNA, 833 bp, Artificial Sequence
  chemically treated genomic DNA (Homo sapiens) CpG-island No: 2482
cgacccgaacaaacaaaacaaacacaaacaaaacaaaacccgcaaccgacaaacccgaaaaccgcactcaccgaacaacaacaacttaaactcgcgccgaacgtcgcgcttatcccgccgcaactacttctcgatctcgacgttaatccgcttaaactccttcacctcatcgctcaaacaacacgccatcataaactccaaaatcatcgtcccgaccccgaccgacgcgaccgcctacccgccgccgccccccgacccccgacccgaccctaaccgaaaccgcctcgaccgccgcccgccgcgaccctccgacctcgaccaccgaccctcgaccccgaaccgacccgccccgcctcgaccgccgcctaacgaaccgccgaatccccgctcgaaccgcgccaaccgcgaactcccgcgcgaccgcactcaacccgcgccgccgccgcaaccaccgccaaccgcaaccgccgcaaccgaacgacaacgccgaacaacctaacaaactaaaaacgcaacccgcgacgaacaaacgatacgaccaataaaaaaaaccgacgaccaaacgcgcccaccataaaaacgaaactaacgacctaaacgaaacgtcgacgaacgcgaaaaaaacgaaacgaaacgaaaacgaaaaacccgcgaatttaattacgccgacgtaaaaaaaaaaacgcgcaaccgaaaaccgaaacgaaaccgcccgaaattataaaaatataacgaactcgacccgaccaaactcgactccgctcgactccgttcgaccccgctcgatcccgctcgactcgacccaaacgcgataacgaaaacgcgcacgcgac

SEQ ID NO: 2483 - DNA, 833 bp, Artificial Sequence
  chemically treated genomic DNA (Homo sapiens) CpG-island No: 2483
cgattcggataggtagggtaggtataggtagggtagggttcgtagtcggtaggttcgggggtcgtatttatcgagtagtagtagtttgagttcgcgtcgggcgtcgcgtttgtttcgtcgtagttgtttttcgatttcggcgttgattcgtttggatttttttattttatcgtttaggtaatacgttattatggattttagagttatcgtttcggtttcggtcgacgcggtcgtttgttcgtcgtcgtttttcggttttcggttcggttttggtcggagtcgtttcggtcgtcgttcgtcgcggtttttcggtttcggttatcggttttcggtttcgggtcggttcgtttcgtttcggtcgtcgtttggcgagtcgtcgggttttcgttcgggtcgcgttagtcgcggattttcgcgcggtcgtatttagttcgcgtcgtcgtcgtagttatcgttaatcgtagtcgtcgtaatcgagcgatagcgtcggataatttagtaggttgggagcgtagttcgcgacgggtagacggtgcggttaatgggaggggtcggcggttaagcgcgtttattatgggggcgggattagcggtttgggcggggcgtcggcgggcgcgaaaggggcggggcggggcgagggcggggggttcgcgggtttggttgcgtcgacgtgggaagggggacgcgtagtcgggagtcggggcggggtcgttcgggattgtgggaatgtggcggattcggttcggttaggttcggtttcgttcggtttcgttcggtttcgttcggtttcgttcggttcggtttaggcgcggtggcggaggcgcgtacgcggt

SEQ ID NO: 2484 - DNA, 833 bp, Artificial Sequence
  chemically treated genomic DNA (Homo sapiens) CpG-island No: 2484
accgcgtacgcgcctccgccaccgcgcctaaaccgaaccgaacgaaaccgaacgaaaccgaacgaaaccgaacgaaaccgaacctaaccgaaccgaatccgccacattcccacaatcccgaacgaccccgccccgactcccgactacgcgtcccccttcccacgtcgacgcaaccaaacccgcgaaccccccgccctcgccccgccccgcccctttcgcgcccgccgacgccccgcccaaaccgctaatcccgcccccataataaacgcgcttaaccgccgacccctcccattaaccgcaccgtctacccgtcgcgaactacgctcccaacctactaaattatccgacgctatcgctcgattacgacgactacgattaacgataactacgacgacgacgcgaactaaatacgaccgcgcgaaaatccgcgactaacgcgacccgaacgaaaacccgacgactcgccaaacgacgaccgaaacgaaacgaaccgacccgaaaccgaaaaccgataaccgaaaccgaaaaaccgcgacgaacgacgaccgaaacgactccgaccaaaaccgaaccgaaaaccgaaaaacgacgacgaacaaacgaccgcgtcgaccgaaaccgaaacgataactctaaaatccataataacgtattacctaaacgataaaataaaaaaatccaaacgaatcaacgccgaaatcgaaaaacaactacgacgaaacaaacgcgacgcccgacgcgaactcaaactactactactcgataaatacgacccccgaacctaccgactacgaaccctaccctacctatacctaccctacctatccgaatcg

SEQ ID NO: 2485 - DNA, 505 bp, Artificial Sequence
  chemically treated genomic DNA (Homo sapiens) CpG-island No: 2485
ttgttgagcggtaaggtcgttaaggttcgggatcgcgaggtcgattttaagaatggttataatttttttatttttgcggcggtcgtgtttttcggaagtttttttagcggtttcggtttggtttcggcggcgtttttcgtaggcggcgcggcgtttttcgtttagacgtatcggttttttttgggttttttttcgtcgggatcgtagttcgcgttcggttttatgtttttgtaggttaatttcggtttcgtggtcggttttttcgtgttgtagtcgttgtttagttttgtgtcggtcgtcgtaggtttggtgtacgtgtcgttcgttgttattagattgattaattcgtacgttatgggtagttttttcggggtggtaggcggtatagttggaggtaggtagggcggtcgttcgttcgtttttcgtttcggttttcgtcggaggtttttttttttgtaggttttttttcgtatttttttgtagtaggagttgagttgtaggtttt

SEQ ID NO: 2486 - DNA, 505 bp, Artificial Sequence
  chemically treated genomic DNA (Homo sapiens) CpG-island No: 2486
aaaacctacaactcaactcctactacaaaaaaatacgaaaaaaaacctacaaaaaaaaaaacctccgacgaaaaccgaaacgaaaaacgaacgaacgaccgccctacctacctccaactataccgcctaccaccccgaaaaaactacccataacgtacgaattaatcaatctaataacaacgaacgacacgtacaccaaacctacgacgaccgacacaaaactaaacaacgactacaacacgaaaaaaccgaccacgaaaccgaaattaacctacaaaaacataaaaccgaacgcgaactacgatcccgacgaaaaaaaacccaaaaaaaaccgatacgtctaaacgaaaaacgccgcgccgcctacgaaaaacgccgccgaaaccaaaccgaaaccgctaaaaaaacttccgaaaaacacgaccgccgcaaaaataaaaaaattataaccattcttaaaatcgacctcgcgatcccgaaccttaacgaccttaccgctcaacaa

SEQ ID NO: 2487 - DNA, 505 bp, Artificial Sequence
  chemically treated genomic DNA (Homo sapiens) CpG-island No: 2487
gggatttgtagtttagtttttgttgtaagagagtgcggaagggaatttgtaaaggaaggggttttcggcgggggtcggggcggggggcggacggacggtcgttttgtttatttttaattgtgtcgtttgttatttcggaaaagttgtttatggcgtgcgagttggttagtttggtggtagcggacgatacgtgtattaggtttgcggcggtcggtatagagttgaatagcgattgtagtacggaggagtcggttacggagtcgaggttggtttgtagggatatggggtcgagcgcgaattgcggtttcggcgggaaggggtttaggaaggatcggtgcgtttgggcggaggacgtcgcgtcgtttgcggaggacgtcgtcggggttaggtcggggtcgttgaggaggttttcgggaggtacggtcgtcgtagagatgaagaggttgtggttatttttgaggtcgatttcgcggtttcgggttttggcggttttgtcgtttagtag

SEQ ID NO: 2488 - DNA, 505 bp, Artificial Sequence
  chemically treated genomic DNA (Homo sapiens) CpG-island No: 2488
ctactaaacgacaaaaccgccaaaacccgaaaccgcgaaatcgacctcaaaaataaccacaacctcttcatctctacgacgaccgtacctcccgaaaacctcctcaacgaccccgacctaaccccgacgacgtcctccgcaaacgacgcgacgtcctccgcccaaacgcaccgatccttcctaaaccccttcccgccgaaaccgcaattcgcgctcgaccccatatccctacaaaccaacctcgactccgtaaccgactcctccgtactacaatcgctattcaactctataccgaccgccgcaaacctaatacacgtatcgtccgctaccaccaaactaaccaactcgcacgccataaacaacttttccgaaataacaaacgacacaattaaaaataaacaaaacgaccgtccgtccgccccccgccccgacccccgccgaaaaccccttcctttacaaattcccttccgcactctcttacaacaaaaactaaactacaaatccc

SEQ ID NO: 2489 - DNA, 673 bp, Artificial Sequence
  chemically treated genomic DNA (Homo sapiens) CpG-island No: 2489
ggggggtcggagggcggagggcgggttattacgagtttggtcgagtcgttgtttgtgtttggtgttcgtatacgtttggcggcgtcgtttcgtttttttttttgtgagtttgcggttgttgttttgcgtttgtttggatgttgtcgtttgttgaagttgcgttttttttttttatttgtaggtgtttttaattacgcggtgtttttcgtttttgtttattcgtttggagttcgtgtcggtcgcggggttgtatgtggtagcgttatattgggttcgagttcgttgtaggcggcggttagcgtttcggttttttttttttaggtttcggtttcggttgagattcggtcgtttttttcgttttcgttttcgtttttttcgttgttttcgtttgcgtatttgggtcggtttttcgcggggtcgttcgttttttacgttttttttttatttaacgtcgttttgtttttttttttaacgttgttggtttttaattttgagttcgcgtttttgtagagtttcgcgtttttttcgtttaattaagtttttttgttttttatttttgttgtttttttgtcgtttgttaacgtttttttgtttattaagtttatttttttttcgtataagggcgttcgttttttttttacggtgtattattagtttttgtttcggttggttt

SEQ ID NO: 2490 - DNA, 673 bp, Artificial Sequence
  chemically treated genomic DNA (Homo sapiens) CpG-island No: 2490
aaaccaaccgaaacaaaaactaataatacaccgtaaaaaaaaaacgaacgcccttatacgaaaaaaaaataaacttaataaacaaaaaaacgttaacaaacgacaaaaaaacaacaaaaataaaaaacaaaaaaacttaattaaacgaaaaaaacgcgaaactctacaaaaacgcgaactcaaaattaaaaaccaacaacgttaaaaaaaaaaacaaaacgacgttaaataaaaaaaaaacgtaaaaaacgaacgaccccgcgaaaaaccgacccaaatacgcaaacgaaaacaacgaaaaaaacgaaaacgaaaacgaaaaaaacgaccgaatctcaaccgaaaccgaaacctaaaaaaaaaaaaccgaaacgctaaccgccgcctacaacgaactcgaacccaatataacgctaccacatacaaccccgcgaccgacacgaactccaaacgaataaacaaaaacgaaaaacaccgcgtaattaaaaacacctacaaataaaaaaaaaaaacgcaacttcaacaaacgacaacatccaaacaaacgcaaaacaacaaccgcaaactcacaaaaaaaaaaacgaaacgacgccgccaaacgtatacgaacaccaaacacaaacaacgactcgaccaaactcgtaataacccgccctccgccctccgacccccc

SEQ ID NO: 2491 - DNA, 673 bp, Artificial Sequence
  chemically treated genomic DNA (Homo sapiens) CpG-island No: 2491
gggttagtcggggtaggggttggtggtgtatcgtgaaggaggggcgggcgtttttgtgcgggagggaggtgagtttgatagataaagaggcgttagtaggcggtagagaggtagtagaggtggggggtaagaaagtttggttaggcgggagggacgcgaggttttgtagaagcgcgggtttagggttagaggttagtagcgttgggggaggaggtaaggcggcgttaggtggagggggggcgtggaggacgggcggtttcgcgggggatcggtttaggtgcgtaggcgggggtagcgggggaggcggaggcggaggcggagggggcggtcgggttttaatcgaggtcggggtttgaaaggaagaggtcgaggcgttggtcgtcgtttgtagcgggttcgggtttagtgtggcgttgttatatgtagtttcgcggtcgatacgggttttaaacggatgagtagaggcggagggtatcgcgtggttaaagatatttgtaaataggagagaaaaacgtagttttaataagcggtagtatttaggtaagcgtagagtagtagtcgtaggtttataaaaagggaagcgaaacggcgtcgttaggcgtgtgcgggtattaagtataagtagcggttcggttaggttcgtggtggttcgtttttcgtttttcggtttttt

SEQ ID NO: 2492 - DNA, 673 bp, Artificial Sequence
  chemically treated genomic DNA (Homo sapiens) CpG-island No: 2492
aaaaaaccgaaaaacgaaaaacgaaccaccacgaacctaaccgaaccgctacttatacttaatacccgcacacgcctaacgacgccgtttcgcttccctttttataaacctacgactactactctacgcttacctaaatactaccgcttattaaaactacgtttttctctcctatttacaaatatctttaaccacgcgataccctccgcctctactcatccgtttaaaacccgtatcgaccgcgaaactacatataacaacgccacactaaacccgaacccgctacaaacgacgaccaacgcctcgacctcttcctttcaaaccccgacctcgattaaaacccgaccgccccctccgcctccgcctccgcctcccccgctacccccgcctacgcacctaaaccgatcccccgcgaaaccgcccgtcctccacgccccccctccacctaacgccgccttacctcctcccccaacgctactaacctctaaccctaaacccgcgcttctacaaaacctcgcgtccctcccgcctaaccaaactttcttaccccccacctctactacctctctaccgcctactaacgcctctttatctatcaaactcacctccctcccgcacaaaaacgcccgcccctccttcacgatacaccaccaacccctaccccgactaaccc

SEQ ID NO: 2493 - DNA, 1319 bp, Artificial Sequence
  chemically treated genomic DNA (Homo sapiens) CpG-island No: 2493
tacgggcgtcgggacggggtagtgagtattcggttttcgaggggtttagtttgggattcgttcgcgcgttcgggacgtttttatttcggtttcgtttgttcgaaagtagaagaggaaatttattattagttttattagtcgtcgttttagtattgcgggtatagcgcgtatttaggggcgtaggtagttttcgttcggatttcggtttttcgttttcggcgtttcgattcggatttcggttttcggtattttcgtttagatttcggtttcggtttttcgtttttggtattgtttcggtttttcgggtttcgtttatcgttgttttttttggggttttttatgtttagttcggtcgttatttcggtcggttgtcgggatagagtttgtagttttttttcgttgtatcgtatggtttcgcggggaacgggaattcgggtcgcgttttttcggtcgtcgttttcgtttaggttggggtcggcgttaaaaatgttttagggcgtagatacggaagtatttttagggttagtgcgtttgcgtattttgggttagttatgtcgttcgttttcgttgcgtggcgttggcgattcgtggttgttggcgtgggcggggtatcggttggtaggagagacggatcgttgttatataattattaaattgaaataaatcggattaaggtggaatagaattaaggtattttagcgatggttggtatttttttttagagcggttaggcgtaggcggagggagcgataacgtcgttcggagagtgttagtcgttttttcgcgaaagttggtttcgtgcggtcgtagcggatcgagggttcgttgagagcgttgtgcgtacgcgtagtttgttttttaggtcgcgtttttagtttttttttttttagttttttttttcgcgtttcgggattttttgatttacgtcgttgggcgggttaggtatgcgtatattagagggttcgttttatttgtttcggaagtgttttttttgttcgtcgttcgttaaacgaagtcgtggaggtggcgaaacgaggaggagataacgcggttttgggttttggtgaggagtagaggcggttgagggcggcggtcgacgcggatcgggggttttttgggggatagcggacgtaggagagaggcgtttgcgataggtcgcgggtcgagggtggggcggcggcgtcgttttttttttttttttcgtgagcgttcggttttgtgtattttgaggtttcgcgttgggcgggtttggagggtcgggttcgttaggaattttatttttaaatttttgttgggaggtcgcgcgcggggttttacgt

SEQ ID NO: 2494 - DNA, 1319 bp, Artificial Sequence
  chemically treated genomic DNA (Homo sapiens) CpG-island No: 2494
acgtaaaaccccgcgcgcgacctcccaacaaaaatttaaaaataaaattcctaacgaacccgaccctccaaacccgcccaacgcgaaacctcaaaatacacaaaaccgaacgctcacgaaaaaaaaaaaaaaaacgacgccgccgccccaccctcgacccgcgacctatcgcaaacgcctctctcctacgtccgctatcccccaaaaaacccccgatccgcgtcgaccgccgccctcaaccgcctctactcctcaccaaaacccaaaaccgcgttatctcctcctcgtttcgccacctccacgacttcgtttaacgaacgacgaacaaaaaaaacacttccgaaacaaataaaacgaaccctctaatatacgcatacctaacccgcccaacgacgtaaatcaaaaaatcccgaaacgcgaaaaaaaaaactaaaaaaaaaaaaactaaaaacgcgacctaaaaaacaaactacgcgtacgcacaacgctctcaacgaaccctcgatccgctacgaccgcacgaaaccaactttcgcgaaaaaacgactaacactctccgaacgacgttatcgctccctccgcctacgcctaaccgctctaaaaaaaaataccaaccatcgctaaaataccttaattctattccaccttaatccgatttatttcaatttaataattatataacaacgatccgtctctcctaccaaccgataccccgcccacgccaacaaccacgaatcgccaacgccacgcaacgaaaacgaacgacataactaacccaaaatacgcaaacgcactaaccctaaaaatacttccgtatctacgccctaaaacatttttaacgccgaccccaacctaaacgaaaacgacgaccgaaaaaacgcgacccgaattcccgttccccgcgaaaccatacgatacaacgaaaaaaaactacaaactctatcccgacaaccgaccgaaataacgaccgaactaaacataaaaaaccccaaaaaaaacaacgataaacgaaacccgaaaaaccgaaacaataccaaaaacgaaaaaccgaaaccgaaatctaaacgaaaataccgaaaaccgaaatccgaatcgaaacgccgaaaacgaaaaaccgaaatccgaacgaaaactacctacgcccctaaatacgcgctatacccgcaatactaaaacgacgactaataaaactaataataaatttcctcttctactttcgaacaaacgaaaccgaaataaaaacgtcccgaacgcgcgaacgaatcccaaactaaacccctcgaaaaccgaatactcactaccccgtcccgacgcccgta

SEQ ID NO: 2495 - DNA, 1319 bp, Artificial Sequence
  chemically treated genomic DNA (Homo sapiens) CpG-island No: 2495
gcgtgaggtttcgcgcgcggttttttaataggagtttggaaatagagtttttggcgggttcgattttttaggttcgtttagcgcggggttttaggatgtataaggtcggacgtttacgggaggagggaggggagcgacgtcgtcgttttattttcggttcgcggtttgtcgtaagcgttttttttttacgttcgttgttttttagggaattttcggttcgcgtcggtcgtcgtttttaatcgtttttattttttattagagtttaaggtcgcgttatttttttttcgtttcgttatttttacgatttcgtttggcgaacggcgggtaaagaaagtattttcggggtaaatgagacgggttttttggtgtgcgtatgtttggttcgtttagcggcgtgagttagagggtttcgaggcgcgaaggaaaaggttggagggggagaggttgaaagcgcggtttggaaggtaaattgcgcgtgcgtataacgtttttaacgaattttcggttcgttgcggtcgtacggggttaattttcgcgagggagcggttgatatttttcgggcgacgttatcgtttttttcgtttgcgtttggtcgttttagaaaggggtgttagttatcgttggggtgttttgattttgttttattttggttcggtttattttagtttaatggttatgtaataacggttcgttttttttattaatcggtatttcgtttacgttagtagttacgggtcgttagcgttacgtagcggaggcgggcggtatggttggtttaaggtgcgtaggcgtattagttttgggggtgttttcgtgtttgcgttttgagatatttttggcgtcggttttagtttgagcggggacggcggtcgggagggcgcggttcgggttttcgtttttcgcggagttatgcggtataacgagaaggagttgtaggttttgtttcggtagtcggtcgagatggcggtcgagttgggtatgaggggttttaagaagggtagcggtgagcgggattcgggagatcgagatagtgttaggggcgggaggtcggggtcggggtttgggcgggggtgtcggaggtcggagttcgggtcggggcgtcggggacgggaggtcggggttcgggcgggggttgtttgcgtttttgagtgcgcgttgtgttcgtagtgttgaagcggcggttggtgaagttggtggtgaatttttttttttattttcggatagacgaggtcgaggtaggggcgtttcgggcgcgcgggcgggttttaggttgggtttttcggaggtcgggtgtttattgtttcgtttcggcgttcgtg

SEQ ID NO: 2496 - DNA, 1319 bp, Artificial Sequence
  chemically treated genomic DNA (Homo sapiens) CpG-island No: 2496
cacgaacgccgaaacgaaacaataaacacccgacctccgaaaaacccaacctaaaacccgcccgcgcgcccgaaacgcccctacctcgacctcgtctatccgaaaataaaaaaaaaaattcaccaccaacttcaccaaccgccgcttcaacactacgaacacaacgcgcactcaaaaacgcaaacaacccccgcccgaaccccgacctcccgtccccgacgccccgacccgaactccgacctccgacacccccgcccaaaccccgaccccgacctcccgcccctaacactatctcgatctcccgaatcccgctcaccgctacccttcttaaaacccctcatacccaactcgaccgccatctcgaccgactaccgaaacaaaacctacaactccttctcgttataccgcataactccgcgaaaaacgaaaacccgaaccgcgccctcccgaccgccgtccccgctcaaactaaaaccgacgccaaaaatatctcaaaacgcaaacacgaaaacacccccaaaactaatacgcctacgcaccttaaaccaaccataccgcccgcctccgctacgtaacgctaacgacccgtaactactaacgtaaacgaaataccgattaataaaaaaaacgaaccgttattacataaccattaaactaaaataaaccgaaccaaaataaaacaaaatcaaaacaccccaacgataactaacacccctttctaaaacgaccaaacgcaaacgaaaaaaacgataacgtcgcccgaaaaatatcaaccgctccctcgcgaaaattaaccccgtacgaccgcaacgaaccgaaaattcgttaaaaacgttatacgcacgcgcaatttaccttccaaaccgcgctttcaacctctccccctccaaccttttccttcgcgcctcgaaaccctctaactcacgccgctaaacgaaccaaacatacgcacaccaaaaaacccgtctcatttaccccgaaaatactttctttacccgccgttcgccaaacgaaatcgtaaaaataacgaaacgaaaaaaaaataacgcgaccttaaactctaataaaaaataaaaacgattaaaaacgacgaccgacgcgaaccgaaaattccctaaaaaacaacgaacgtaaaaaaaaaacgcttacgacaaaccgcgaaccgaaaataaaacgacgacgtcgctcccctccctcctcccgtaaacgtccgaccttatacatcctaaaaccccgcgctaaacgaacctaaaaaatcgaacccgccaaaaactctatttccaaactcctattaaaaaaccgcgcgcgaaacctcacgc

SEQ ID NO: 2497 - DNA, 2026 bp, Artificial Sequence
  chemically treated genomic DNA (Homo sapiens) CpG-island No: 2497
tagtcgcgtgtttatttatcgtagattttcggttgagtatcgttcggttgtaggtattgttgttcggcgacgattatcgttgttttatacggatgatttcggttttgtttttgttgtcgcggttcgagttcgcgtcgttgtttgcgtacggttagttggatatcgtgtttttttcgtcgtttaggtgcgcgtaggtatcgggatacggggtaggagcgggcgggggcggcgtggtttcgtggtcgtttttaatttttttaattgcgggttttaggttattcgcggaattcgaggagtcgttatttagcgtagatttttttttggagacgtttacgcgtttggtgcgggcgttgcgggttttttcggttcgggttttcgcgtcgcgtttggttttggattcggacgcgttggtcggtttttcgtagggtttagttaatttgtcggatttcgcggcgttggagcgtttattcgacggcgaggagtcgttgttgttgttgttgaggtttattgcggttattatcggggattttgcgtttttgtacgattttacgtcggcgtcgtgggttacggttttggcgcgtcgcgtggttgttgaattgtaagcggcggttgtcgagttgcgaagtttttcgggtttgttttcggttatagtttcgttgttggcgcgtttgttcgcgttttgtttaggtggtttcggcggtttcggcgattttttgcgagcgttgttgtttttgaaggcgttgtagggtttgcgcgtggagtggcgcgggcgggattcgcgcgggtcgggtcgggtatagcgtagcgcgggggttatcgtcgtcgacgggtcgtgcgcgttgcgcgagtttagcgtagattttcgcgtcgagcgtttcgtatttattttcgagatttattaggttaataattgttagggcgtgtgcggttggttttagttcgatcgtaattcgcgttacggtaattacgtggtgttgttgttgaagatgtaggttcgtggggtcgttttggcgcgtttattttgttgcgtgtttatcgtttacgcgggtaagttgtttattagtttgtcggaggagcgtattagcgcgtattacgtgtttaatatggtggttatcgagtgtggttgtcggtgatttttgcgtcgcgcggatttttgtttcgagggttcggacgcgttttagttcgcgtttttttttatatttattcggattttaagtatcgttttaataaagattagtaagtaatcggttggggtgttcgtgcgtgttagggggttcgtgggattttttttgtcgttttttttcgcgtacggttcgggttcgttttgtagcgttcgttgttttttttttgtttgaagcgttttattatcgttttttaggtttcggatttggtgtcgggtttaggcgtaaaggagtaggtgattttgcggtcgtagtattcgttttatttcgttagagtcgcggggcgtttagaaggggtttttggatttcggcgcggggtcggtttagtttcgttttttgtttgcgcggagtttttggcgatttttaggtcgttgtttttcgtcgggacgtttcggggatatttaggtttgtttttttttgggttcggcgtttttggagtttcgtgtttacggtcggtggtttttttcgcgtgatttttagcgttggggtagggtttttcggggttttttggcggttcgtggtttttttttttttcgcggttttttttttttaggtttttttttttttcgcggttttttttttcgcggtttttttttttttcgaggtttttttttgggttttcggtttgcgagggttatacggttttttcggacggttttttcggtggtttcgtcgggttttttttcgtcgttttttgtagtttttcgattttcgggaattttgggtttgatttttgtttcggttcggggcgtaggcggcgttgatggaggcgtttgggtttcgaatttaggttgtaagatagagtggggttttggggtaagcgtttatttttttttcggttcggg

SEQ ID NO: 2498 - DNA, 2026 bp, Artificial Sequence
  chemically treated genomic DNA (Homo sapiens) CpG-island No: 2498
cccgaaccgaaaaaaaaataaacgcttaccccaaaaccccactctatcttacaacctaaattcgaaacccaaacgcctccatcaacgccgcctacgccccgaaccgaaacaaaaatcaaacccaaaattcccgaaaatcgaaaaactacaaaaaacgacgaaaaaaaacccgacgaaaccaccgaaaaaaccgtccgaaaaaaccgtataaccctcgcaaaccgaaaacccaaaaaaaaacctcgaaaaaaaaaaaaaccgcgaaaaaaaaaaccgcgaaaaaaaaaaaaacctaaaaaaaaaaaaccgcgaaaaaaaaaaaaaccacgaaccgccaaaaaaccccgaaaaaccctaccccaacgctaaaaatcacgcgaaaaaaaccaccgaccgtaaacacgaaactccaaaaacgccgaacccaaaaaaaaacaaacctaaatatccccgaaacgtcccgacgaaaaacaacgacctaaaaatcgccaaaaactccgcgcaaacaaaaaacgaaactaaaccgaccccgcgccgaaatccaaaaaccccttctaaacgccccgcgactctaacgaaataaaacgaatactacgaccgcaaaatcacctactcctttacgcctaaacccgacaccaaatccgaaacctaaaaaacgataataaaacgcttcaaacaaaaaaaaaacaacgaacgctacaaaacgaacccgaaccgtacgcgaaaaaaaacgacaaaaaaaatcccacgaaccccctaacacgcacgaacaccccaaccgattacttactaatctttattaaaacgatacttaaaatccgaataaatataaaaaaaaacgcgaactaaaacgcgtccgaaccctcgaaacaaaaatccgcgcgacgcaaaaatcaccgacaaccacactcgataaccaccatattaaacacgtaatacgcgctaatacgctcctccgacaaactaataaacaacttacccgcgtaaacgataaacacgcaacaaaataaacgcgccaaaacgaccccacgaacctacatcttcaacaacaacaccacgtaattaccgtaacgcgaattacgatcgaactaaaaccaaccgcacacgccctaacaattattaacctaataaatctcgaaaataaatacgaaacgctcgacgcgaaaatctacgctaaactcgcgcaacgcgcacgacccgtcgacgacgataacccccgcgctacgctatacccgacccgacccgcgcgaatcccgcccgcgccactccacgcgcaaaccctacaacgccttcaaaaacaacaacgctcgcaaaaaatcgccgaaaccgccgaaaccacctaaacaaaacgcgaacaaacgcgccaacaacgaaactataaccgaaaacaaacccgaaaaacttcgcaactcgacaaccgccgcttacaattcaacaaccacgcgacgcgccaaaaccgtaacccacgacgccgacgtaaaatcgtacaaaaacgcaaaatccccgataataaccgcaataaacctcaacaacaacaacaacgactcctcgccgtcgaataaacgctccaacgccgcgaaatccgacaaattaactaaaccctacgaaaaaccgaccaacgcgtccgaatccaaaaccaaacgcgacgcgaaaacccgaaccgaaaaaacccgcaacgcccgcaccaaacgcgtaaacgtctccaaaaaaaaatctacgctaaataacgactcctcgaattccgcgaataacctaaaacccgcaattaaaaaaattaaaaacgaccacgaaaccacgccgcccccgcccgctcctaccccgtatcccgatacctacgcgcacctaaacgacgaaaaaaacacgatatccaactaaccgtacgcaaacaacgacgcgaactcgaaccgcgacaacaaaaacaaaaccgaaatcatccgtataaaacaacgataatcgtcgccgaacaacaatacctacaaccgaacgatactcaaccgaaaatctacgataaataaacacgcgacta

SEQ ID NO: 2499 - DNA, 2026 bp, Artificial Sequence
  chemically treated genomic DNA (Homo sapiens) CpG-island No: 2499
ttcgggtcggggggaaggtgggcgtttattttaggattttattttgttttgtagtttaagttcgaggtttaggcgtttttattagcgtcgtttgcgtttcgggtcgaggtagaggttagatttaagattttcgggagtcgggaggttgtagagaacgacgaagaggagttcggcgaggttatcggagaggtcgttcgggaggatcgtgtgattttcgtagatcggggatttaaggagaggtttcggagagaggggaagtcgcggaaggagaagtcgcggaaggaggagagatttaagaaagagaggtcgcggaaagaggagaggttacgggtcgttagggagtttcgggaagttttattttagcgttgggagttacgcgaagggggttatcggtcgtgggtacgggattttagggacgtcgagtttaggaagaagtaggtttgggtgttttcgaggcgtttcgacgaggagtagcggtttgggagtcgttagaagtttcgcgtaggtaaggggcgggattgagtcggtttcgcgtcggagtttaggggttttttttggacgtttcgcgattttggcgaaataaagcgagtgttgcggtcgtagagttatttgtttttttacgtttggattcggtattaagttcggggtttgaaagacggtggtggggcgttttaggtaggggagagatagcgagcgttatagggcggattcgggtcgtgcgcgaggagagacggtaagggaggttttacgggttttttaatacgtacggatattttagtcggttgtttgttggtttttattggggcgatgtttggggttcgaataaatatgggaaggggcgcgagttggggcgcgttcggattttcggggtaggagttcgcgcggcgtaggggttatcggtagttatattcggtggttattatgttgggtacgtggtgcgcgttgatgcgttttttcgataggttgatgagtagtttgttcgcgtaggcggtgggtacgtagtagggtgggcgcgttagggcggttttacggatttgtatttttagtagtagtattacgtggttgtcgtagcgcgggttgcggtcggattgaggttagtcgtatacgttttggtaattgttggtttggtaggtttcggggatgagtacggagcgttcggcgcggaggtttacgttgagttcgcgtagcgcgtacggttcgtcggcggcggtggttttcgcgttgcgttgtgttcgattcggttcgcgcggatttcgttcgcgttattttacgcgtaggttttgtagcgtttttaggagtagtagcgttcgtaggggatcgtcgaggtcgtcggggttatttgggtagagcgcgagtaggcgcgttagtagcggggttgtggtcggaggtagattcgggaggtttcgtagttcggtagtcgtcgtttgtagtttagtagttacgcggcgcgttagggtcgtggtttacggcgtcgacgtggggtcgtgtaggggcgtaggattttcggtggtggtcgtagtgggttttagtagtagtagtagcggtttttcgtcgtcgagtaggcgttttagcgtcgcggggttcgataggttgattaggttttgcgggaagtcggttagcgcgttcggatttagggttaggcgcggcgcggaggttcgggtcggggggattcgtagcgttcgtattaggcgcgtgagcgtttttaggaaggggtttgcgttgggtggcgatttttcgagtttcgcggatggtttggaattcgtaattggaggagttgagagcggttacgaggttacgtcgttttcgttcgtttttgtttcgtgtttcggtgtttgcgcgtatttgggcggcgggaagggtacggtgtttagttggtcgtgcgtaggtagcggcgcgggttcggatcgcggtagtaggagtagggtcggggttattcgtgtgaagtagcggtggtcgtcgtcgaatagtagtgtttgtagtcgggcggtatttagtcgggagtttgcggtgggtgggtacgcggttg

SEQ ID NO: 2500 - DNA, 2026 bp, Artificial Sequence
  chemically treated genomic DNA (Homo sapiens) CpG-island No: 2500
caaccgcgtacccacccaccgcaaactcccgactaaataccgcccgactacaaacactactattcgacgacgaccaccgctacttcacacgaataaccccgaccctactcctactaccgcgatccgaacccgcgccgctacctacgcacgaccaactaaacaccgtacccttcccgccgcccaaatacgcgcaaacaccgaaacacgaaacaaaaacgaacgaaaacgacgtaacctcgtaaccgctctcaactcctccaattacgaattccaaaccatccgcgaaactcgaaaaatcgccacccaacgcaaaccccttcctaaaaacgctcacgcgcctaatacgaacgctacgaatccccccgacccgaacctccgcgccgcgcctaaccctaaatccgaacgcgctaaccgacttcccgcaaaacctaatcaacctatcgaaccccgcgacgctaaaacgcctactcgacgacgaaaaaccgctactactactactaaaacccactacgaccaccaccgaaaatcctacgcccctacacgaccccacgtcgacgccgtaaaccacgaccctaacgcgccgcgtaactactaaactacaaacgacgactaccgaactacgaaacctcccgaatctacctccgaccacaaccccgctactaacgcgcctactcgcgctctacccaaataaccccgacgacctcgacgatcccctacgaacgctactactcctaaaaacgctacaaaacctacgcgtaaaataacgcgaacgaaatccgcgcgaaccgaatcgaacacaacgcaacgcgaaaaccaccgccgccgacgaaccgtacgcgctacgcgaactcaacgtaaacctccgcgccgaacgctccgtactcatccccgaaacctaccaaaccaacaattaccaaaacgtatacgactaacctcaatccgaccgcaacccgcgctacgacaaccacgtaatactactactaaaaatacaaatccgtaaaaccgccctaacgcgcccaccctactacgtacccaccgcctacgcgaacaaactactcatcaacctatcgaaaaaacgcatcaacgcgcaccacgtacccaacataataaccaccgaatataactaccgataacccctacgccgcgcgaactcctaccccgaaaatccgaacgcgccccaactcgcgccccttcccatatttattcgaaccccaaacatcgccccaataaaaaccaacaaacaaccgactaaaatatccgtacgtattaaaaaacccgtaaaacctcccttaccgtctctcctcgcgcacgacccgaatccgccctataacgctcgctatctctcccctacctaaaacgccccaccaccgtctttcaaaccccgaacttaataccgaatccaaacgtaaaaaaacaaataactctacgaccgcaacactcgctttatttcgccaaaatcgcgaaacgtccaaaaaaaacccctaaactccgacgcgaaaccgactcaatcccgccccttacctacgcgaaacttctaacgactcccaaaccgctactcctcgtcgaaacgcctcgaaaacacccaaacctacttcttcctaaactcgacgtccctaaaatcccgtacccacgaccgataacccccttcgcgtaactcccaacgctaaaataaaacttcccgaaactccctaacgacccgtaacctctcctctttccgcgacctctctttcttaaatctctcctccttccgcgacttctccttccgcgacttcccctctctccgaaacctctccttaaatccccgatctacgaaaatcacacgatcctcccgaacgacctctccgataacctcgccgaactcctcttcgtcgttctctacaacctcccgactcccgaaaatcttaaatctaacctctacctcgacccgaaacgcaaacgacgctaataaaaacgcctaaacctcgaacttaaactacaaaacaaaataaaatcctaaaataaacgcccaccttccccccgacccgaa

SEQ ID NO: 2501 - DNA, 582 bp, Artificial Sequence
  chemically treated genomic DNA (Homo sapiens) CpG-island No: 2501
ggcgcgtatcgatagcggtgttcgcgggtgatttatttgtttatcgtttggttggttagttggcgtatgcgattgaattgtttttttatcgtggtttcgttgtcgcgttagttcgggagttggggaaggacggagtagttcggagttcgtcgtagggttatatggttttcgcgcggagtttttcgggcgacggcggcggtattgcggagttttcgggcgtcgtttggttcgcgcgtagttttttttcgagggcgtcgtcgtttatttttttcgtcgcgtcgttttttgtcgtattttttttacgcgcgtcgcgtaatgttcggggtagagtaatgtttggggtcgttttcggtatcggttcgtttcgttcgggttgtttgtttttagttttagttcggcgcggggattcgggagttttcgtaggttggttggtcggttggttcggcggttttcgtgcgtttgtgcggagaacgtcgtgtatgtcgggatttgtagtttcgcgtttcgtgtttattttttttttgtttaaagtttgtaaggatagtggagtgcggaggtgggagaaggtagcgttattagtag

SEQ ID NO: 2502 - DNA, 582 bp, Artificial Sequence
  chemically treated genomic DNA (Homo sapiens) CpG-island No: 2502
ctactaataacgctaccttctcccacctccgcactccactatccttacaaactttaaacaaaaaaaaaataaacacgaaacgcgaaactacaaatcccgacatacacgacgttctccgcacaaacgcacgaaaaccgccgaaccaaccgaccaaccaacctacgaaaactcccgaatccccgcgccgaactaaaactaaaaacaaacaacccgaacgaaacgaaccgataccgaaaacgaccccaaacattactctaccccgaacattacgcgacgcgcgtaaaaaaaatacgacaaaaaacgacgcgacgaaaaaaataaacgacgacgccctcgaaaaaaaactacgcgcgaaccaaacgacgcccgaaaactccgcaataccgccgccgtcgcccgaaaaactccgcgcgaaaaccatataaccctacgacgaactccgaactactccgtccttccccaactcccgaactaacgcgacaacgaaaccacgataaaaaaacaattcaatcgcatacgccaactaaccaaccaaacgataaacaaataaatcacccgcgaacaccgctatcgatacgcgcc

SEQ ID NO: 2503 - DNA, 582 bp, Artificial Sequence
  chemically treated genomic DNA (Homo sapiens) CpG-island No: 2503
ttgttggtgacgttgtttttttttattttcgtattttattgtttttgtaaattttggatagaggaaaggtgggtacggggcgcgaaattataagtttcggtatgtacggcgtttttcgtataggcgtacggggatcgtcgggttagtcggttagttagtttgcggagattttcgggttttcgcgtcggattgggattgggagtaggtagttcgggcggagcgggtcggtgtcgaggacggttttaggtattgttttgtttcgggtattgcgcggcgcgcgtgagggggatgcggtaggaggcggcgcggcgggaggagtaggcggcggcgttttcgggagggagttgcgcgcgggttagacggcgttcggaggtttcgtagtgtcgtcgtcgtcgttcgggaggtttcgcgcgggagttatgtaattttgcggcgggtttcgggttgtttcgtttttttttagttttcgggttagcgcggtagcggggttacgatgaagaagtagtttaatcgtatgcgttagttggttaattagacggtgggtaggtaggttattcgcgggtatcgttgtcggtgcgcgtt

SEQ ID NO: 2504 - DNA, 582 bp, Artificial Sequence
  chemically treated genomic DNA (Homo sapiens) CpG-island No: 2504
aacgcgcaccgacaacgatacccgcgaataacctacctacccaccgtctaattaaccaactaacgcatacgattaaactacttcttcatcgtaaccccgctaccgcgctaacccgaaaactaaaaaaaaacgaaacaacccgaaacccgccgcaaaattacataactcccgcgcgaaacctcccgaacgacgacgacgacactacgaaacctccgaacgccgtctaacccgcgcgcaactccctcccgaaaacgccgccgcctactcctcccgccgcgccgcctcctaccgcatccccctcacgcgcgccgcgcaatacccgaaacaaaacaatacctaaaaccgtcctcgacaccgacccgctccgcccgaactacctactcccaatcccaatccgacgcgaaaacccgaaaatctccgcaaactaactaaccgactaacccgacgatccccgtacgcctatacgaaaaacgccgtacataccgaaacttataatttcgcgccccgtacccacctttcctctatccaaaatttacaaaaacaataaaatacgaaaataaaaaaaaacaacgtcaccaacaa

SEQ ID NO: 2505 - DNA, 622 bp, Artificial Sequence
  chemically treated genomic DNA (Homo sapiens) CpG-island No: 2505
attgcggtcggtaaatcggaatagaattaggggcggggtcgtttgagacgttttagtatttttttattttatggttattgttaattgataagtttcgagcggtaaagtttttttttattggatgagtagtttcgcgtaggcgggaagttcggtgtacggcgcgttgattggttggattcgttatgcggagcggttaggtggtgtacgggaaacgcgggcgtaggtgatcggcggtttttttagttttggtggagacgggcgtatgtgggcgttttgttcgttgttgcggttcgcggtcggacgtattatgtcgtagggacgtattatatcgtaggtattcgttcgtcgcgagcggtcgcgtaaggattcgttgcggtatttgcgtacgcgagagaagcgcggatcgtcggggtgtttcggcggtttaaatatcgtgtatttgtaggtggtggtagcgggtagtcgggattcgggcgtcgcgttttacgtttttttcgagtttaatcggttagttaacgagttacgtttcgtttcgttgggtttttagtgcggcgtagtttttgagtatcggggtattttttagggtttcggtttttttgttttatatatgtggtttattgtt

SEQ ID NO: 2506 - DNA, 622 bp, Artificial Sequence
  chemically treated genomic DNA (Homo sapiens) CpG-island No: 2506
aacaataaaccacatatataaaacaaaaaaaccgaaaccctaaaaaataccccgatactcaaaaactacgccgcactaaaaacccaacgaaacgaaacgtaactcgttaactaaccgattaaactcgaaaaaaacgtaaaacgcgacgcccgaatcccgactacccgctaccaccacctacaaatacacgatatttaaaccgccgaaacaccccgacgatccgcgcttctctcgcgtacgcaaataccgcaacgaatccttacgcgaccgctcgcgacgaacgaatacctacgatataatacgtccctacgacataatacgtccgaccgcgaaccgcaacaacgaacaaaacgcccacatacgcccgtctccaccaaaactaaaaaaaccgccgatcacctacgcccgcgtttcccgtacaccacctaaccgctccgcataacgaatccaaccaatcaacgcgccgtacaccgaacttcccgcctacgcgaaactactcatccaataaaaaaaaactttaccgctcgaaacttatcaattaacaataaccataaaataaaaaaatactaaaacgtctcaaacgaccccgcccctaattctattccgatttaccgaccgcaat

SEQ ID NO: 2507 - DNA, 622 bp, Artificial Sequence
  chemically treated genomic DNA (Homo sapiens) CpG-island No: 2507
aatagtgaattatatgtgtgaagtagggaagtcgaagttttgggaggtgtttcgatgtttagaggttgcgtcgtattgagggtttagcgggacggggcgtggttcgttgattgatcggttgaattcggagaagacgtagagcgcggcgttcgagtttcggttattcgttgttattatttgtaggtatacggtgtttgggtcgtcggagtatttcgacggttcgcgtttttttcgcgtgcgtaggtgtcgtagcgggtttttgcgcggtcgttcgcggcgggcgggtgtttgcgatatggtgcgtttttgcgatatggtgcgttcggtcgcggatcgtagtagcgagtaaagcgtttatatgcgttcgtttttattaaaattgagaaagtcgtcggttatttacgttcgcgtttttcgtgtattatttagtcgtttcgtatggcggatttagttaattagcgcgtcgtgtatcgagtttttcgtttacgcgaggttgtttatttaatagaaaggagttttatcgttcgggatttgttaattgatagtggttatagagtagaggaatattagagcgttttaagcggtttcgtttttagttttgtttcggtttgtcggtcgtaat

SEQ ID NO: 2508 - DNA, 622 bp, Artificial Sequence
  chemically treated genomic DNA (Homo sapiens) CpG-island No: 2508
attacgaccgacaaaccgaaacaaaactaaaaacgaaaccgcttaaaacgctctaatattcctctactctataaccactatcaattaacaaatcccgaacgataaaactcctttctattaaataaacaacctcgcgtaaacgaaaaactcgatacacgacgcgctaattaactaaatccgccatacgaaacgactaaataatacacgaaaaacgcgaacgtaaataaccgacgactttctcaattttaataaaaacgaacgcatataaacgctttactcgctactacgatccgcgaccgaacgcaccatatcgcaaaaacgcaccatatcgcaaacacccgcccgccgcgaacgaccgcgcaaaaacccgctacgacacctacgcacgcgaaaaaaacgcgaaccgtcgaaatactccgacgacccaaacaccgtatacctacaaataataacaacgaataaccgaaactcgaacgccgcgctctacgtcttctccgaattcaaccgatcaatcaacgaaccacgccccgtcccgctaaaccctcaatacgacgcaacctctaaacatcgaaacacctcccaaaacttcgacttccctacttcacacatataattcactatt

SEQ ID NO: 2509 - DNA, 620 bp, Artificial Sequence
  chemically treated genomic DNA (Homo sapiens) CpG-island No: 2509
  unsure (23, 46, 82, 138, 171, 175, 183, 478)
gttaatttcgaggtggttggagntcgcgttttttttttagagtgtnatcgtagtcgttgtatttaggaatcgttttagtttncgttttcggtcggtcgggcggggaagattggtgtggtttggttatggatgggtttntaggttagtgtagggtcgttgaggcgcgggcgntcgnaagcgttngcgtaagttttagttatatagcgggtcggttttggttttgtttttgaggtttaggaagatacgaaagtagttgcgaagtgttgtatttcgtatggtagcgttgaggacgtagacgttgtttagcgagaattcggaggaatcgagggtggagtcgacggtcgacgatttgggggacgcgttattcggtggggcggtagtggcggcgtttcggacgtagttcggcgagaattatacgttatttggggttcgtagagttgttggaggtttttcgtcgcgcgttttttgtagatttcgntcgcgcgtttggtgtcgttatatcgcgttcgcgcgtttggtggaggtgttcgtcgcgtcggttcgggtggtggagatttcggttttgttgtgtatcgcgtaatatttagcggtcgtttagtcgttcggggtttttgcgacgg

SEQ ID NO: 2510 - DNA, 620 bp, Artificial Sequence
  chemically treated genomic DNA (Homo sapiens) CpG-island No: 2510
  unsure (143, 438, 446, 450, 483, 539, 575, 598)
ccgtcgcaaaaaccccgaacgactaaacgaccgctaaatattacgcgatacacaacaaaaccgaaatctccaccacccgaaccgacgcgacgaacacctccaccaaacgcgcgaacgcgatataacgacaccaaacgcgcgancgaaatctacaaaaaacgcgcgacgaaaaacctccaacaactctacgaaccccaaataacgtataattctcgccgaactacgtccgaaacgccgccactaccgccccaccgaataacgcgtcccccaaatcgtcgaccgtcgactccaccctcgattcctccgaattctcgctaaacaacgtctacgtcctcaacgctaccatacgaaatacaacacttcgcaactactttcgtatcttcctaaacctcaaaaacaaaaccaaaaccgacccgctatataactaaaacttacgcnaacgcttncgancgcccgcgcctcaacgaccctacactaacctanaaacccatccataaccaaaccacaccaatcttccccgcccgaccgaccgaaaacgnaaactaaaacgattcctaaatacaacgactacgatnacactctaaaaaaaaaacgcganctccaaccacctcgaaattaac

SEQ ID NO: 2511 - DNA, 620 bp, Artificial Sequence
  chemically treated genomic DNA (Homo sapiens) CpG-island No: 2511
  unsure (143, 438, 446, 450, 483, 539, 575, 598)
tcgtcgtaggggtttcggacgattggacggtcgttaagtgttgcgcggtgtatagtagggtcgaggtttttattattcggatcggcgcggcgggtatttttattaggcgcgcgggcgcgatatggcggtattaggcgcgcgancggggtttgtagggagcgcgcggcgggaggtttttagtagttttgcgggttttaggtggcgtatggttttcgtcgggttgcgttcgggacgtcgttattgtcgttttatcgggtagcgcgttttttaggtcgtcggtcgtcgattttattttcgattttttcgagttttcgttaggtagcgtttgcgtttttagcgttgttatgcgggatataatatttcgtagttgttttcgtatttttttggattttaagggtagggttaggatcgattcgttgtgtggttggggtttgcgtnggcgtttncggncgttcgcgttttaacggttttgtattggtttgngagtttatttatggttagattatattagtttttttcgttcggtcggtcgggggcgnaagttaaagcggtttttgaatgtagcggttgcggtngtattttgggaagggggcgcggnttttagttatttcggggttggt

SEQ ID NO: 2512 - DNA, 620 bp, Artificial Sequence
  chemically treated genomic DNA (Homo sapiens) CpG-island No: 2512
  unsure (23, 46, 82, 138, 171, 175, 183, 478)
accaaccccgaaataactaaaanccgcgcccccttcccaaaatacnaccgcaaccgctacattcaaaaaccgctttaacttncgcccccgaccgaccgaacgaaaaaaactaatataatctaaccataaataaactcncaaaccaatacaaaaccgttaaaacgcgaacgnccgnaaacgccnacgcaaaccccaaccacacaacgaatcgatcctaaccctacccttaaaatccaaaaaaatacgaaaacaactacgaaatattatatcccgcataacaacgctaaaaacgcaaacgctacctaacgaaaactcgaaaaaatcgaaaataaaatcgacgaccgacgacctaaaaaacgcgctacccgataaaacgacaataacgacgtcccgaacgcaacccgacgaaaaccatacgccacctaaaacccgcaaaactactaaaaacctcccgccgcgcgctccctacaaaccccgntcgcgcgcctaataccgccatatcgcgcccgcgcgcctaataaaaatacccgccgcgccgatccgaataataaaaacctcgaccctactatacaccgcgcaacacttaacgaccgtccaatcgtccgaaacccctacgacga

SEQ ID NO: 2513 - DNA, 701 bp, Artificial Sequence
  chemically treated genomic DNA (Homo sapiens) CpG-island No: 2513
gtaaggcgtgggagtttggaagttagcgttgcgtttttcgtgggaagcgatcgttttttttgttaattcgcgtttgggtatttagtttttttcgttttagggcgtcgttttttcggatggtaaatattataaagtggcggcgaataaggttttttttgttgttttcggtttagtttaagattagcgatattacgcgtttttcggagtatcgcgtgtaggagttatggcgcgggagttatattacgaagagttcgttcgggcgggtaagtaggcggggttgtaggtttggaggattgagaagttggagttggtgttcgtgttttagagcgtttacggcgatttttacgtcggggatgtttatttggtgttgtatacggttaagacgagtcgaggttttatttattatttgtatttttggttcggtaagggacggcgggcggcgggatttcgacgtattaaggtcggcgaggggagggcgtaggggtttgagatttgtaggcgtgggagtaaaggggatcgtaaattgagttagttattcgcgtttttacggggttgtttttggggtcggttattttttttttatcgaagttaattcgtcggttgtaaacgcggggtttaggcgttgttcgtaattgatttatttcgtaggttttgatttttgttaggtgtagtttttggattttggagttggtgattggttt

SEQ ID NO: 2514 - DNA, 701 bp, Artificial Sequence
  chemically treated genomic DNA (Homo sapiens) CpG-island No: 2514
aaaccaatcaccaactccaaaatccaaaaactacacctaacaaaaatcaaaacctacgaaataaatcaattacgaacaacgcctaaaccccgcgtttacaaccgacgaattaacttcgataaaaaaaaaataaccgaccccaaaaacaaccccgtaaaaacgcgaataactaactcaatttacgatcccctttactcccacgcctacaaatctcaaacccctacgccctcccctcgccgaccttaatacgtcgaaatcccgccgcccgccgtcccttaccgaaccaaaaatacaaataataaataaaacctcgactcgtcttaaccgtatacaacaccaaataaacatccccgacgtaaaaatcgccgtaaacgctctaaaacacgaacaccaactccaacttctcaatcctccaaacctacaaccccgcctacttacccgcccgaacgaactcttcgtaatataactcccgcgccataactcctacacgcgatactccgaaaaacgcgtaatatcgctaatcttaaactaaaccgaaaacaacaaaaaaaaccttattcgccgccactttataatatttaccatccgaaaaaacgacgccctaaaacgaaaaaaactaaatacccaaacgcgaattaacaaaaaaaacgatcgcttcccacgaaaaacgcaacgctaacttccaaactcccacgccttac

SEQ ID NO: 2515 - DNA, 701 bp, Artificial Sequence
  chemically treated genomic DNA (Homo sapiens) CpG-island No: 2515
aagttagttattagttttaaagtttaggaattatatttggtaaaggttaaagtttgcgaggtaagttaattgcggataacgtttgagtttcgcgtttgtagtcggcgagttgatttcggtagggagaaagtggtcggttttaaaggtagtttcgtgggggcgcgagtggttagtttagtttgcggttttttttatttttacgtttgtaaattttagatttttacgtttttttttcgtcggttttggtgcgtcggggtttcgtcgttcgtcgttttttatcgagttagaagtgtaggtggtaggtgaagtttcggttcgttttggtcgtgtgtagtattaggtaggtattttcgacgtagaagtcgtcgtgagcgttttggggtacgggtattagttttagttttttaattttttagatttgtagtttcgtttgtttgttcgttcgggcgaatttttcgtggtatagttttcgcgttatggtttttgtacgcgatgtttcgggggacgcgtgatatcgttgattttggattaaatcgagagtagtaggaggaattttattcgtcgttattttatagtgtttgttattcggggaggcggcgttttgaaacgggaggggttaagtgtttaggcgcgagttgatagaggagacgatcgttttttacggggagcgtagcgttggtttttaagtttttacgttttgt

SEQ ID NO: 2516 - DNA, 701 bp, Artificial Sequence
  chemically treated genomic DNA (Homo sapiens) CpG-island No: 2516
acaaaacgtaaaaacttaaaaaccaacgctacgctccccgtaaaaaacgatcgtctcctctatcaactcgcgcctaaacacttaacccctcccgtttcaaaacgccgcctccccgaataacaaacactataaaataacgacgaataaaattcctcctactactctcgatttaatccaaaatcaacgatatcacgcgtcccccgaaacatcgcgtacaaaaaccataacgcgaaaactataccacgaaaaattcgcccgaacgaacaaacaaacgaaactacaaatctaaaaaattaaaaaactaaaactaatacccgtaccccaaaacgctcacgacgacttctacgtcgaaaatacctacctaatactacacacgaccaaaacgaaccgaaacttcacctaccacctacacttctaactcgataaaaaacgacgaacgacgaaaccccgacgcaccaaaaccgacgaaaaaaaaacgtaaaaatctaaaatttacaaacgtaaaaataaaaaaaaccgcaaactaaactaaccactcgcgcccccacgaaactacctttaaaaccgaccactttctccctaccgaaatcaactcgccgactacaaacgcgaaactcaaacgttatccgcaattaacttacctcgcaaactttaacctttaccaaatataattcctaaactttaaaactaataactaactt

SEQ ID NO: 2517 - DNA, 583 bp, Artificial Sequence
  chemically treated genomic DNA (Homo sapiens) CpG-island No: 2517
ttcgatagtttaggaagcgcgggtaatggagttattcggtttagaagcgaaatttcgtttcgggttcgttttcggcgttttggatttgggtttcggcgttgcgttttttatttggatttcgtcgtcggtttcggtttttttacggtttcgtcggttttgtttttggagatttgagggcgtttttttttcggggaattgcgattcggaattttggtttcgtttttgtcgcgttcgttgagtgcggggacggtgtttagcgttcggtatttagtttcgaggttaggatcgaggaaggcgatcgggcggatttttaattattttcgttgtttgtacgcgtagtagtagcgtttagtttatttcgttattggtgtttttcgcgtttgtagcgcgtcgtcggaagtgtttggttttattttcggttagaggttacgttttcggaagcggcggtgtaggtacgaaaagcgcgcgcggggattttaggagtcgtggtgattagggaggggagtcgggttagcggcggtaggagattaggggagttgagttatgtgtttgggggagagcggggtcgggagttcgaaggaga

SEQ ID NO: 2518 - DNA, 583 bp, Artificial Sequence
  chemically treated genomic DNA (Homo sapiens) CpG-island No: 2518
tctccttcgaactcccgaccccgctctcccccaaacacataactcaactcccctaatctcctaccgccgctaacccgactcccctccctaatcaccacgactcctaaaatccccgcgcgcgcttttcgtacctacaccgccgcttccgaaaacgtaacctctaaccgaaaataaaaccaaacacttccgacgacgcgctacaaacgcgaaaaacaccaataacgaaataaactaaacgctactactacgcgtacaaacaacgaaaataattaaaaatccgcccgatcgccttcctcgatcctaacctcgaaactaaataccgaacgctaaacaccgtccccgcactcaacgaacgcgacaaaaacgaaaccaaaattccgaatcgcaattccccgaaaaaaaaacgccctcaaatctccaaaaacaaaaccgacgaaaccgtaaaaaaaccgaaaccgacgacgaaatccaaataaaaaacgcaacgccgaaacccaaatccaaaacgccgaaaacgaacccgaaacgaaatttcgcttctaaaccgaataactccattacccgcgcttcctaaactatcgaa

SEQ ID NO: 2519 - DNA, 583 bp, Artificial Sequence
  chemically treated genomic DNA (Homo sapiens) CpG-island No: 2519
tttttttcgagttttcggtttcgtttttttttaagtatatggtttagtttttttagttttttgtcgtcgttggttcggtttttttttttggttattacgatttttggaattttcgcgcgcgtttttcgtatttgtatcgtcgttttcgggggcgtggtttttgatcggaagtgaggttaggtattttcggcggcgcgttgtaggcgcggggaatattaatggcggggtgagttgggcgttgttgttgcgcgtgtagatagcgggagtggttgggggttcgttcggtcgtttttttcggttttggtttcggggttgggtgtcgagcgttgggtatcgttttcgtatttagcgagcgcgataggggcgaggttaggatttcgggtcgtagtttttcgggaggagggcgtttttaggtttttaggggtagggtcggcggggtcgtggggaggtcggggtcggcggcggagtttaggtggggggcgtagcgtcggggtttagatttaaggcgtcgggggcgagttcggggcgggatttcgtttttgggtcgggtagttttattgttcgcgttttttgggttgtcgag

SEQ ID NO: 2520 - DNA, 583 bp, Artificial Sequence
  chemically treated genomic DNA (Homo sapiens) CpG-island No: 2520
ctcgacaacccaaaaaacgcgaacaataaaactacccgacccaaaaacgaaatcccgccccgaactcgcccccgacgccttaaatctaaaccccgacgctacgccccccacctaaactccgccgccgaccccgacctccccacgaccccgccgaccctacccctaaaaacctaaaaacgccctcctcccgaaaaactacgacccgaaatcctaacctcgcccctatcgcgctcgctaaatacgaaaacgatacccaacgctcgacacccaaccccgaaaccaaaaccgaaaaaaacgaccgaacgaacccccaaccactcccgctatctacacgcgcaacaacaacgcccaactcaccccgccattaatattccccgcgcctacaacgcgccgccgaaaatacctaacctcacttccgatcaaaaaccacgcccccgaaaacgacgatacaaatacgaaaaacgcgcgcgaaaattccaaaaatcgtaataaccaaaaaaaaaaaccgaaccaacgacgacaaaaaactaaaaaaactaaaccatatacttaaaaaaaaacgaaaccgaaaactcgaaaaaaa

SEQ ID NO: 2521 - DNA, 917 bp, Artificial Sequence
  chemically treated genomic DNA (Homo sapiens) CpG-island No: 2521
gacgtcggatttatttatattacggagtcgaagtcggatttatattacggagtcgacgtcggatttatttatattacggagtcgacgtcggatttatttatattacggagtcgaagtcggatttatttatattacggagtcgaagtcggatttatttatattacggagtcgacgtcggatttatttatattacggagtcgacgtcggatttatattacggagtcgacgtcggatttatttatattacggagtcgacgtcggatttatttatattacggagtcgaagtcggatttatttatattacggagtcgacgtcggatttatttatattacggagtcgacgtcggatttatttatattacggagtcgacgtcggatttatttatattacggagtcgacgtcggatttatttatattacggagtcgacgtcggatttatattacggagtcgacgtcggatttatttatattacggagtcgaagtcggatttatttatattacggagtcgacgtcggatttatttatattacggagtcgaagtcggatttatttatattacggagtcgacgtcggatttatttatattacggagtcgaagtcggatttatttatattacggagtcgacgtcggatttatttatattacggagtcgacgtcggatttatttatattacggagtcgacgtcggatttatttatattacggagtcgaagtcggatttatttatattacggagtcgaagtcggatttatttatattacggagtcgacgttggatttatttatattacggagtcgacgttggatttatttatattatatttatttatgttacggagttaacgttggatttatttatttatgttatagagtcgacgttgcgggtacgtttttttgtttaaaaaaattatggt

SEQ ID NO: 2522 - DNA, 917 bp, Artificial Sequence
  chemically treated genomic DNA (Homo sapiens) CpG-island No: 2522
accataatttttttaaacaaaaaaacgtacccgcaacgtcgactctataacataaataaataaatccaacgttaactccgtaacataaataaatataatataaataaatccaacgtcgactccgtaatataaataaatccaacgtcgactccgtaatataaataaatccgacttcgactccgtaatataaataaatccgacttcgactccgtaatataaataaatccgacgtcgactccgtaatataaataaatccgacgtcgactccgtaatataaataaatccgacgtcgactccgtaatataaataaatccgacttcgactccgtaatataaataaatccgacgtcgactccgtaatataaataaatccgacttcgactccgtaatataaataaatccgacgtcgactccgtaatataaataaatccgacttcgactccgtaatataaataaatccgacgtcgactccgtaatataaatccgacgtcgactccgtaatataaataaatccgacgtcgactccgtaatataaataaatccgacgtcgactccgtaatataaataaatccgacgtcgactccgtaatataaataaatccgacgtcgactccgtaatataaataaatccgacttcgactccgtaatataaataaatccgacgtcgactccgtaatataaataaatccgacgtcgactccgtaatataaatccgacgtcgactccgtaatataaataaatccgacgtcgactccgtaatataaataaatccgacttcgactccgtaatataaataaatccgacttcgactccgtaatataaataaatccgacgtcgactccgtaatataaataaatccgacgtcgactccgtaatataaatccgacttcgactccgtaatataaataaatccgacgtc

SEQ ID NO: 2523 - DNA, 917 bp, Artificial Sequence
  chemically treated genomic DNA (Homo sapiens) CpG-island No: 2523
attatgatttttttgaataaaaggacgtgttcgtagcgtcgattttgtagtatgagtgagtgggtttagcgttgatttcgtagtatgagtgggtgtagtgtgagtgagtttagcgtcgatttcgtagtgtgagtgagtttagcgtcgatttcgtagtgtgagtgagttcggtttcgatttcgtagtgtgagtgagttcggtttcgatttcgtagtgtgagtgagttcggcgtcgatttcgtagtgtgagtgagttcggcgtcgatttcgtagtgtgagtgagttcggcgtcgatttcgtagtgtgagtgagttcggtttcgatttcgtagtgtgagtgagttcggcgtcgatttcgtagtgtgagtgagttcggtttcgatttcgtagtgtgagtgagttcggcgtcgatttcgtagtgtgagtgagttcggtttcgatttcgtagtgtgagtgagttcggcgtcgatttcgtagtgtgagttcggcgtcgatttcgtagtgtgagtgagttcggcgtcgatttcgtagtgtgagtgagttcggcgtcgatttcgtagtgtgagtgagttcggcgtcgatttcgtagtgtgagtgagttcggcgtcgatttcgtagtgtgagtgagttcggtttcgatttcgtagtgtgagtgagttcggcgtcgatttcgtagtgtgagtgagttcggcgtcgatttcgtagtgtgagttcggcgtcgatttcgtagtgtgagtgagttcggcgtcgatttcgtagtgtgagtgagttcggtttcgatttcgtagtgtgagtgagttcggtttcgatttcgtagtgtgagtgagttcggcgtcgatttcgtagtgtgagtgagttcggcgtcgatttcgtagtgtgagttcggtttcgatttcgtagtgtgagtgagttcggcgtt

SEQ ID NO: 2524 - DNA, 917 bp, Artificial Sequence
  chemically treated genomic DNA (Homo sapiens) CpG-island No: 2524
aacgccgaactcactcacactacgaaatcgaaaccgaactcacactacgaaatcgacgccgaactcactcacactacgaaatcgacgccgaactcactcacactacgaaatcgaaaccgaactcactcacactacgaaatcgaaaccgaactcactcacactacgaaatcgacgccgaactcactcacactacgaaatcgacgccgaactcacactacgaaatcgacgccgaactcactcacactacgaaatcgacgccgaactcactcacactacgaaatcgaaaccgaactcactcacactacgaaatcgacgccgaactcactcacactacgaaatcgacgccgaactcactcacactacgaaatcgacgccgaactcactcacactacgaaatcgacgccgaactcactcacactacgaaatcgacgccgaactcacactacgaaatcgacgccgaactcactcacactacgaaatcgaaaccgaactcactcacactacgaaatcgacgccgaactcactcacactacgaaatcgaaaccgaactcactcacactacgaaatcgacgccgaactcactcacactacgaaatcgaaaccgaactcactcacactacgaaatcgacgccgaactcactcacactacgaaatcgacgccgaactcactcacactacgaaatcgacgccgaactcactcacactacgaaatcgaaaccgaactcactcacactacgaaatcgaaaccgaactcactcacactacgaaatcgacgctaaactcactcacactacgaaatcgacgctaaactcactcacactacacccactcatactacgaaatcaacgctaaacccactcactcatactacaaaatcgacgctacgaacacgtccttttattcaaaaaaatcataat

SEQ ID NO: 2525 - DNA, 687 bp, Artificial Sequence
  chemically treated genomic DNA (Homo sapiens) CpG-island No: 2525
cgtggacggggaggggtatgtgggcgtggttaggcgggttgtaggcgtgcgaggtcgggcgaggagcgcggcgggtcgtaggggcggattgtgggcgtggcgcgcgggggagggggcgtgattaggcggggtgtgggcggggcgagggcgcggcgcggtagggttgcgcggtcgggtggcgcgggaggaagttacgtgggagcgcgggtttatatgattggtcgcgcgatggattcgttgttcgcggttgtagtcggggcggtagttgaggcggaggttgacgaggaggcggatttttcggcgttaggtagggcgtggggcggcggtagtttttatttgtttagggcgcgcggttcgattattttcggcggacgggtttagtcgtcgcgtttggttttcgattcgttttttgttttcgcgtttcgcgttcggttttacgttttagtttttcggaggtttttttgtttttttgcgcgtttgttttttgggggttttcgtgttttttcgcgttttcgtttttcggggttttttgtttttttgcgtcgggagagttttgtttaggttatagttggtcgcgtttcgaggcgttttttcggggtttttagaggcgttttcggggatagtttttttttcgtttcgtttttggtgttttgtttttttgttttgtttggttacgttgagcgatgg

SEQ ID NO: 2526 - DNA, 687 bp, Artificial Sequence
  chemically treated genomic DNA (Homo sapiens) CpG-island No: 2526
ccatcgctcaacgtaaccaaacaaaacaaaaaaacaaaacaccaaaaacgaaacgaaaaaaaaactatccccgaaaacgcctctaaaaaccccgaaaaaacgcctcgaaacgcgaccaactataacctaaacaaaactctcccgacgcaaaaaaacaaaaaaccccgaaaaacgaaaacgcgaaaaaacacgaaaacccccaaaaaacaaacgcgcaaaaaaacaaaaaaacctccgaaaaactaaaacgtaaaaccgaacgcgaaacgcgaaaacaaaaaacgaatcgaaaaccaaacgcgacgactaaacccgtccgccgaaaataatcgaaccgcgcgccctaaacaaataaaaactaccgccgccccacgccctacctaacgccgaaaaatccgcctcctcgtcaacctccgcctcaactaccgccccgactacaaccgcgaacaacgaatccatcgcgcgaccaatcatataaacccgcgctcccacgtaacttcctcccgcgccacccgaccgcgcaaccctaccgcgccgcgccctcgccccgcccacaccccgcctaatcacgccccctcccccgcgcgccacgcccacaatccgcccctacgacccgccgcgctcctcgcccgacctcgcacgcctacaacccgcctaaccacgcccacatacccctccccgtccacg

SEQ ID NO: 2527 - DNA, 687 bp, Artificial Sequence
  chemically treated genomic DNA (Homo sapiens) CpG-island No: 2527
ttatcgtttagcgtgattaggtagggtagaagagtagggtattaggaacggggcgaggaggaaattgttttcgaggacgtttttgagagtttcgggaaagcgtttcggaacgcggttagttgtaatttggatagggttttttcggcgtaggagggtaggggatttcgagggacggaggcgcgagagagtacggggatttttaaaggataggcgcgtaggagggtagggggattttcgagggattggggcgtggggtcgaacgcggggcgcgggggtaggaaacgagtcggggattaagcgcggcggttgagttcgttcgtcgggggtggtcgggtcgcgcgttttgggtaggtgggggttatcgtcgttttacgttttatttgacgtcgggggattcgttttttcgttagttttcgttttagttgtcgtttcgattgtagtcgcgggtagcgggtttatcgcgcggttagttatgtgagttcgcgtttttacgtgattttttttcgcgttattcggtcgcgtagttttgtcgcgtcgcgttttcgtttcgtttatatttcgtttggttacgttttttttttcgcgcgttacgtttatagttcgtttttgcggttcgtcgcgtttttcgttcggtttcgtacgtttataattcgtttagttacgtttatatgttttttttcgtttacg

SEQ ID NO: 2528 - DNA, 687 bp, Artificial Sequence
  chemically treated genomic DNA (Homo sapiens) CpG-island No: 2528
cgtaaacgaaaaaaaacatataaacgtaactaaacgaattataaacgtacgaaaccgaacgaaaaacgcgacgaaccgcaaaaacgaactataaacgtaacgcgcgaaaaaaaaaacgtaaccaaacgaaatataaacgaaacgaaaacgcgacgcgacaaaactacgcgaccgaataacgcgaaaaaaaatcacgtaaaaacgcgaactcacataactaaccgcgcgataaacccgctacccgcgactacaatcgaaacgacaactaaaacgaaaactaacgaaaaaacgaatcccccgacgtcaaataaaacgtaaaacgacgataacccccacctacccaaaacgcgcgacccgaccacccccgacgaacgaactcaaccgccgcgcttaatccccgactcgtttcctacccccgcgccccgcgttcgaccccacgccccaatccctcgaaaatccccctaccctcctacgcgcctatcctttaaaaatccccgtactctctcgcgcctccgtccctcgaaatcccctaccctcctacgccgaaaaaaccctatccaaattacaactaaccgcgttccgaaacgctttcccgaaactctcaaaaacgtcctcgaaaacaatttcctcctcgccccgttcctaataccctactcttctaccctacctaatcacgctaaacgataa

SEQ ID NO: 2529 - DNA, 927 bp, Artificial Sequence
  chemically treated genomic DNA (Homo sapiens) CpG-island No: 2529
cgtttcgggggcggcgcgggagttttcgtaggatcgggcgggcgtttcggttggcgcgggcggggggcgcgttttttttatttgcggtttcggtttttaggttatttttttacgcggcggcggtcgggattgagttgatattatttaggtcggtcgggtttgaatgaggaggagcgggcgcggagaggagggagcggggagcgcgtgagggagggagggaggcgtcgcggagtttttttcggttttttgtgcggatattttcggatttcgcgttcgtattcggttttttaaaagatacggggagtcgcgggcgaggggtgtagttatttttcgaggcgtttagtgttttcgcgtttttaagatttttttttaataaaaaggagcgttttttatttttattttcgttcggaggatttagggtttgggtttatttcgggcgcggagttaagtgtaggcgtcgggggtttttagagtcgtcggggcgtagcgagttcggcgttgggtaattgttgggttagaaattgtttaggtagtagttgttgtgtttttttttgtttcgtcgttcggagacgtttcgttttttgtttttaatcgcgcgtcgtttcgttttttgttttgaacgtcgttcgtttcgttttagcgtttacgtgattagtatagcgcgttttcgtttcgttcgtcgtcgtagatttcgtttaagggattcgagcgagcggcgagcgcgcgtaatattagtttttgttcggcgattttcgcgtacgcgtcgtgttatttttttcgtattttttttttcgttattcggtttaacgtggcgggcgcgcgtcgagtatgtagtcgtgataggtattcggcgggggggggggggagggggttggttcgcgagggtgtgcgtaggtatagattcgggttttgttttcgtcgtttttt

SEQ ID NO: 2530 - DNA, 927 bp, Artificial Sequence
  chemically treated genomic DNA (Homo sapiens) CpG-island No: 2530
aaaaaacgacgaaaacaaaacccgaatctatacctacgcacaccctcgcgaaccaaccccctcccccccccccccgccgaatacctatcacgactacatactcgacgcgcgcccgccacgttaaaccgaataacgaaaaaaaaaatacgaaaaaaataacacgacgcgtacgcgaaaatcgccgaacaaaaactaatattacgcgcgctcgccgctcgctcgaatcccttaaacgaaatctacgacgacgaacgaaacgaaaacgcgctatactaatcacgtaaacgctaaaacgaaacgaacgacgttcaaaacaaaaaacgaaacgacgcgcgattaaaaacaaaaaacgaaacgtctccgaacgacgaaacaaaaaaaaacacaacaactactacctaaacaatttctaacccaacaattacccaacgccgaactcgctacgccccgacgactctaaaaacccccgacgcctacacttaactccgcgcccgaaataaacccaaaccctaaatcctccgaacgaaaataaaaataaaaaacgctcctttttattaaaaaaaaatcttaaaaacgcgaaaacactaaacgcctcgaaaaataactacacccctcgcccgcgactccccgtatcttttaaaaaaccgaatacgaacgcgaaatccgaaaatatccgcacaaaaaaccgaaaaaaactccgcgacgcctccctccctccctcacgcgctccccgctccctcctctccgcgcccgctcctcctcattcaaacccgaccgacctaaataatatcaactcaatcccgaccgccgccgcgtaaaaaaataacctaaaaaccgaaaccgcaaataaaaaaaacgcgccccccgcccgcgccaaccgaaacgcccgcccgatcctacgaaaactcccgcgccgcccccgaaacg

SEQ ID NO: 2531 - DNA, 927 bp, Artificial Sequence
  chemically treated genomic DNA (Homo sapiens) CpG-island No: 2531
agggggcggcggggataggattcgggtttgtgtttgcgtatattttcgcgggttaattttttttttttttttttcgtcgggtatttgttacggttatatgttcggcgcgcgttcgttacgttaagtcggatggcgggaggaggggtgcggggagggtggtacggcgcgtgcgcgggagtcgtcgagtaagaattggtattgcgcgcgttcgtcgttcgttcgaattttttaagcggagtttgcggcggcgggcgaaacgggggcgcgttatgttagttacgtgggcgttggggcggggcgggcggcgtttaaggtagggggcggggcggcgcgcggttgaaggtagggggcggggcgttttcgagcggcggggtaagggagggtataatagttgttatttgaatagtttttgatttaatagttatttagcgtcggattcgttgcgtttcggcggttttagggattttcggcgtttatatttagtttcgcgttcgaggtgagtttaggttttaaatttttcgggcgggggtaggggtgggggacgtttttttttgttgggggggggttttggaggcgcgaaggtattaggcgtttcgggggatggttgtatttttcgttcgcggtttttcgtgttttttggggggtcgggtgcgggcgcggaattcgggagtgttcgtataaaaggtcgagaaaaatttcgcgacgttttttttttttttttacgcgtttttcgttttttttttttcgcgttcgtttttttttatttaaattcggtcggtttgagtggtgttagtttagtttcggtcgtcgtcgcgtgaggaaatggtttaggagtcggagtcgtaggtaaagggggcgcgtttttcgttcgcgttagtcggggcgttcgttcggttttgcggaggttttcgcgtcgttttcgaggcg

SEQ ID NO: 2532 - DNA, 927 bp, Artificial Sequence
  chemically treated genomic DNA (Homo sapiens) CpG-island No: 2532
cgcctcgaaaacgacgcgaaaacctccgcaaaaccgaacgaacgccccgactaacgcgaacgaaaaacgcgccccctttacctacgactccgactcctaaaccatttcctcacgcgacgacgaccgaaactaaactaacaccactcaaaccgaccgaatttaaataaaaaaaaacgaacgcgaaaaaaaaaaaacgaaaaacgcgtaaaaaaaaaaaaaaaacgtcgcgaaatttttctcgaccttttatacgaacactcccgaattccgcgcccgcacccgaccccccaaaaaacacgaaaaaccgcgaacgaaaaatacaaccatcccccgaaacgcctaataccttcgcgcctccaaaacccccccccaacaaaaaaaaacgtcccccacccctacccccgcccgaaaaatttaaaacctaaactcacctcgaacgcgaaactaaatataaacgccgaaaatccctaaaaccgccgaaacgcaacgaatccgacgctaaataactattaaatcaaaaactattcaaataacaactattataccctcccttaccccgccgctcgaaaacgccccgccccctaccttcaaccgcgcgccgccccgccccctaccttaaacgccgcccgccccgccccaacgcccacgtaactaacataacgcgcccccgtttcgcccgccgccgcaaactccgcttaaaaaattcgaacgaacgacgaacgcgcgcaataccaattcttactcgacgactcccgcgcacgcgccgtaccaccctccccgcacccctcctcccgccatccgacttaacgtaacgaacgcgcgccgaacatataaccgtaacaaatacccgacgaaaaaaaaaaaaaaaaaattaacccgcgaaaatatacgcaaacacaaacccgaatcctatccccgccgccccct

SEQ ID NO: 2533 - DNA, 906 bp, Artificial Sequence
  chemically treated genomic DNA (Homo sapiens) CpG-island No: 2533
ggggcgacgggcgcgggtagaggttgaggttttgtgtaggtaggtgcgtgtttgtttgttcgcggagggaggagagggggatacggggtagaagaggggttttcgcgtagagtgcggtattgttttattttttttcgttggttcgcgagtacgcgcgtattcgtattcgttttatagatttttttttttatacgtataggtatttttttgtttcgttttttttcgatgggttcgtttgtttcggaggcgtagggggtcgtgtcgtcgtcgcgtatcggttgttttcgggagcgtcgttagggtcggtttcgtgtgggggaggggtggtttcgcgtcgtcgtcgtcgcgttttttttttttcgtttttttttttttcgggcgtttcgaggttcgggcggttttgtttaatgagtagcggcgttgttggtaggtggggagtgtttttgttttgggttgaagttgaggttgaggagagagtcgagttagcgacgagtagtcgttgcggtcgtcggcgtcgcgggaggtggtggaggtttagtcggagtcgagaggttttttgttttcgttttacggtttcggcgttattttttcggcgtttagttttcgtttcggaattttcgggtttgttttgggttttcggtttgtgtatttcgttcgtcgtagcgttcggttcgggtcgtattcgtcggttttatgaggagggacgtgaacggagtgattaagagtaggtttgaggtgtgagtttggggggttcgggcggcgtgaggagggcgggtcgcgcgttttaattttaaaacgttcgtttcgtacggagttttttttttggtaggcgtcgttatttatttattggcggggttgttagatttcgttttttttttttgcgatttagaagtttagcgtagttcg

SEQ ID NO: 2534 - DNA, 906 bp, Artificial Sequence
  chemically treated genomic DNA (Homo sapiens) CpG-island No: 2534
cgaactacgctaaacttctaaatcgcaaaaaaaaaaaacgaaatctaacaaccccgccaataaataaataacgacgcctaccaaaaaaaaaactccgtacgaaacgaacgttttaaaattaaaacgcgcgacccgccctcctcacgccgcccgaaccccccaaactcacacctcaaacctactcttaatcactccgttcacgtccctcctcataaaaccgacgaatacgacccgaaccgaacgctacgacgaacgaaatacacaaaccgaaaacccaaaacaaacccgaaaattccgaaacgaaaactaaacgccgaaaaaataacgccgaaaccgtaaaacgaaaacaaaaaacctctcgactccgactaaacctccaccacctcccgcgacgccgacgaccgcaacgactactcgtcgctaactcgactctctcctcaacctcaacttcaacccaaaacaaaaacactccccacctaccaacaacgccgctactcattaaacaaaaccgcccgaacctcgaaacgcccgaaaaaaaaaaaaacgaaaaaaaaaaaacgcgacgacgacgacgcgaaaccacccctcccccacacgaaaccgaccctaacgacgctcccgaaaacaaccgatacgcgacgacgacacgaccccctacgcctccgaaacaaacgaacccatcgaaaaaaaacgaaacaaaaaaatacctatacgtataaaaaaaaaaatctataaaacgaatacgaatacgcgcgtactcgcgaaccaacgaaaaaaaataaaacaataccgcactctacgcgaaaacccctcttctaccccgtatccccctctcctccctccgcgaacaaacaaacacgcacctacctacacaaaacctcaacctctacccgcgcccgtcgcccc

SEQ ID NO: 2535 - DNA, 906 bp, Artificial Sequence
  chemically treated genomic DNA (Homo sapiens) CpG-island No: 2535
cgggttgcgttgggtttttgggtcgtaagaaaggggagcggagtttggtagtttcgttagtgggtgggtgacggcgtttgttagggaggaggtttcgtgcggagcggacgttttgggattagagcgcgcgattcgttttttttacgtcgttcgagttttttaagtttatattttaaatttgtttttggttatttcgtttacgtttttttttatggggtcggcgggtgcggttcgggtcgggcgttgcggcgagcggagtgtatagatcgggggtttaggataggttcgggagtttcgggacggggattgggcgtcggaggggtgacgtcgggatcgtgggacgggaataagagatttttcggtttcggttaggtttttattatttttcgcggcgtcggcggtcgtaacgattgttcgtcgttagttcggttttttttttagttttaattttaatttaaaataaaaatattttttatttgttagtaacgtcgttgtttattggatagagtcgttcgggtttcggagcgttcgggagggggaggggcgggaggggaggagcgcggcggcggcggcgcgagattattttttttttatacggggtcggttttgacggcgttttcgggagtagtcggtgcgcggcggcggtacgattttttgcgttttcgaggtagacgagtttatcgggagaaggcgaggtagggaagtgtttgtgcgtgtggaaaagggggtttgtggggcggatgcgagtgcgcgcgtgttcgcggattagcgagggagagtagagtagtatcgtattttgcgcgggggttttttttttgtttcgtgtttttttttttttttttcgcgggtaaataggtacgtatttgtttgtatagaattttagtttttgttcgcgttcgtcgtttt

SEQ ID NO: 2536 - DNA, 906 bp, Artificial Sequence
  chemically treated genomic DNA (Homo sapiens) CpG-island No: 2536
aaaacgacgaacgcgaacaaaaactaaaattctatacaaacaaatacgtacctatttacccgcgaaaaaaaaaaaaaaaaacacgaaacaaaaaaaaaacccccgcgcaaaatacgatactactctactctccctcgctaatccgcgaacacgcgcgcactcgcatccgccccacaaacccccttttccacacgcacaaacacttccctacctcgccttctcccgataaactcgtctacctcgaaaacgcaaaaaatcgtaccgccgccgcgcaccgactactcccgaaaacgccgtcaaaaccgaccccgtataaaaaaaaaataatctcgcgccgccgccgccgcgctcctcccctcccgcccctccccctcccgaacgctccgaaacccgaacgactctatccaataaacaacgacgttactaacaaataaaaaatatttttattttaaattaaaattaaaactaaaaaaaaaaccgaactaacgacgaacaatcgttacgaccgccgacgccgcgaaaaataataaaaacctaaccgaaaccgaaaaatctcttattcccgtcccacgatcccgacgtcacccctccgacgcccaatccccgtcccgaaactcccgaacctatcctaaacccccgatctatacactccgctcgccgcaacgcccgacccgaaccgcacccgccgaccccataaaaaaaaacgtaaacgaaataaccaaaaacaaatttaaaatataaacttaaaaaactcgaacgacgtaaaaaaaacgaatcgcgcgctctaatcccaaaacgtccgctccgcacgaaacctcctccctaacaaacgccgtcacccacccactaacgaaactaccaaactccgctcccctttcttacgacccaaaaacccaacgcaacccg

SEQ ID NO: 2537 - DNA, 1347 bp, Artificial Sequence
  chemically treated genomic DNA (Homo sapiens) CpG-island No: 2537
tagcggggtatggcggtgttagagggtggggatatggaggcggtataaggttaaggcgtcgggggatggttagagggaagtaacggtcgcgtttgtggtggagatggggacgggatagagaagttttggggggtgatcggggtaggtacggcggtgttggggggagggcgtttaatgaagtttacgggggggaaaggggcgtgttttatcgagcgtgttgggggagttatagtcgtgtttgggaggatggggtttgggggaaggacggggcgcgttttagtgggatgagggggagggtatagtcgtgttgggaaggtaaagggtcggggggcgggatggagtatgttatggtggggtcgaagaggcggggggcgggaaggggtttttttagaaatcgggagggcgttatagttgtgttcgggaggacggggcgttggggagggatagggagcgttttagtggattcggggaatacggtcgtgttggaaggtatcgagttggggggttgggggcgggacggggtgttttttaggaagtggggcgggtaaggttacgtttcgggggatggagttttggggcgggacggggcgcgttttagtggggtagagcggggggcgcggttcggggcgggttttagggagtttttgaaggtcgaattcgggtagcggtgtagttgggcgtggaaggcggaggatttagtagggcgtgatcggtttagttttcgtttttttcgggtttcggttagttttttttcgttttttttttttttttttttttgttttttttttttgttttttcgttttttttttagttcggttttttttattcgtttttcgtttttttagtcgttttttatttttgggttttgttgtttggcgtttttttcgggtatagaacgcgtttttagttatattttggagattataaggcgtcggatataattacgttttttataggggtttaggttcgttcggggcgtttttcgtcgtgttcgcgattttttttttaggtttttattttaggttttagtatgggtcgcgtttcggggttttaggtatttggcggcgggcgcggcgcgtttttttcgcgcggcggatcgtatggtcgagcgttggtttagagcgtaggattttgttttgcgtatttcgcgttcgggcgtcgttagtgttaaggttttcgtttttttagttgcgggatttgggtcgggcgttcgttttttttttattcgcgttattttttggttttcgggattttcgggatttgcgcgtggaaataggtttttttaggtcgttatacgggaaggtttgggttaaggagttgattaaatttagttacgattgatcgggt

SEQ ID NO: 2538 - DNA, 1347 bp, Artificial Sequence
  chemically treated genomic DNA (Homo sapiens) CpG-island No: 2538
acccgatcaatcgtaactaaatttaatcaactccttaacccaaaccttcccgtataacgacctaaaaaaacctatttccacgcgcaaatcccgaaaatcccgaaaaccaaaaaataacgcgaataaaaaaaaaacgaacgcccgacccaaatcccgcaactaaaaaaacgaaaaccttaacactaacgacgcccgaacgcgaaatacgcaaaacaaaatcctacgctctaaaccaacgctcgaccatacgatccgccgcgcgaaaaaaacgcgccgcgcccgccgccaaatacctaaaaccccgaaacgcgacccatactaaaacctaaaataaaaacctaaaaaaaaaatcgcgaacacgacgaaaaacgccccgaacgaacctaaacccctataaaaaacgtaattatatccgacgccttataatctccaaaatataactaaaaacgcgttctatacccgaaaaaaacgccaaacaacaaaacccaaaaataaaaaacgactaaaaaaacgaaaaacgaataaaaaaaaccgaactaaaaaaaaaacgaaaaaacaaaaaaaaaaaacaaaaaaaaaaaaaaaaaaaaaacgaaaaaaaactaaccgaaacccgaaaaaaacgaaaactaaaccgatcacgccctactaaatcctccgccttccacgcccaactacaccgctacccgaattcgaccttcaaaaactccctaaaacccgccccgaaccgcgccccccgctctaccccactaaaacgcgccccgtcccgccccaaaactccatcccccgaaacgtaaccttacccgccccacttcctaaaaaacaccccgtcccgcccccaaccccccaactcgataccttccaacacgaccgtattccccgaatccactaaaacgctccctatccctccccaacgccccgtcctcccgaacacaactataacgccctcccgatttctaaaaaaaccccttcccgccccccgcctcttcgaccccaccataacatactccatcccgccccccgaccctttaccttcccaacacgactataccctccccctcatcccactaaaacgcgccccgtccttcccccaaaccccatcctcccaaacacgactataactcccccaacacgctcgataaaacacgcccctttcccccccgtaaacttcattaaacgccctccccccaacaccgccgtacctaccccgatcaccccccaaaacttctctatcccgtccccatctccaccacaaacgcgaccgttacttccctctaaccatcccccgacgccttaaccttataccgcctccatatccccaccctctaacaccgccataccccgcta

SEQ ID NO: 2539 - DNA, 1347 bp, Artificial Sequence
  chemically treated genomic DNA (Homo sapiens) CpG-island No: 2539
gttcggttaatcgtaattgggtttaattagttttttagtttaggttttttcgtgtgacgatttgggaaaatttgtttttacgcgtaggtttcggaggtttcgagagttaggagatgacgcggatgaaggaggggcgggcgttcggtttagatttcgtagttgagagggcggaagttttggtattagcggcgttcgggcgcggagtgcgtagggtaaggttttgcgttttgggttagcgttcggttatgcgattcgtcgcgcggaggggacgcgtcgcgttcgtcgttaggtgtttgggatttcgggacgcggtttatattaaggtttagggtgggggtttggggagggggtcgcgagtacggcgaggggcgtttcgggcgagtttgggtttttgtaaagggcgtggttgtgttcggcgttttgtagtttttaaaatgtagttggaggcgcgttttgtgttcgggaaagacgttagatagtagagtttagggatggggggcgattgaggggacgaagggcgggtggaggagatcgaattgaagggaaggcggaagggtagggaaagagaataaaggaggaagggaagggagggcggaggaaggttggtcgggattcggagggagcggaaattgggtcggttacgttttgttgggtttttcgttttttacgtttagttatatcgttgttcggattcggtttttaaaggttttttaagattcgtttcgaatcgcgtttttcgttttgttttattaagacgcgtttcgtttcgttttaaggttttatttttcgaagcgtagttttgttcgttttattttttaagaggtatttcgtttcgtttttaattttttagttcgatgttttttagtacggtcgtgtttttcgggtttattaagacgttttttgtttttttttaacgtttcgttttttcgagtatagttgtgacgttttttcgatttttaagaaggttttttttcgtttttcgttttttcggttttattatgatatgttttatttcgtttttcggttttttgtttttttagtacggttgtgtttttttttttattttattaagacgcgtttcgttttttttttagattttatttttttaagtacggttgtgatttttttaatacgttcggtaagatacgtttttttttttttcgtgggttttattgggcgttttttttttagtatcgtcgtgtttatttcggttattttttaagatttttttgtttcgtttttatttttattataagcgcggtcgttatttttttttggttatttttcggcgttttggttttgtgtcgtttttatgtttttattttttagtatcgttatgtttcgttg

SEQ ID NO: 2540 - DNA, 1347 bp, Artificial Sequence
  chemically treated genomic DNA (Homo sapiens) CpG-island No: 2540
caacgaaacataacgatactaaaaaataaaaacataaaaacgacacaaaaccaaaacgccgaaaaataaccaaaaaaaaataacgaccgcgcttataataaaaataaaaacgaaacaaaaaaatcttaaaaaataaccgaaataaacacgacgatactaaaaaaaaaacgcccaataaaacccacgaaaaaaaaaaaaacgtatcttaccgaacgtattaaaaaaatcacaaccgtacttaaaaaaataaaatctaaaaaaaaaacgaaacgcgtcttaataaaataaaaaaaaaaacacaaccgtactaaaaaaacaaaaaaccgaaaaacgaaataaaacatatcataataaaaccgaaaaaacgaaaaacgaaaaaaaaccttcttaaaaatcgaaaaaacgtcacaactatactcgaaaaaacgaaacgttaaaaaaaaacaaaaaacgtcttaataaacccgaaaaacacgaccgtactaaaaaacatcgaactaaaaaattaaaaacgaaacgaaatacctcttaaaaaataaaacgaacaaaactacgcttcgaaaaataaaaccttaaaacgaaacgaaacgcgtcttaataaaacaaaacgaaaaacgcgattcgaaacgaatcttaaaaaacctttaaaaaccgaatccgaacaacgatataactaaacgtaaaaaacgaaaaacccaacaaaacgtaaccgacccaatttccgctccctccgaatcccgaccaaccttcctccgccctcccttcccttcctcctttattctctttccctacccttccgccttcccttcaattcgatctcctccacccgcccttcgtcccctcaatcgccccccatccctaaactctactatctaacgtctttcccgaacacaaaacgcgcctccaactacattttaaaaactacaaaacgccgaacacaaccacgccctttacaaaaacccaaactcgcccgaaacgcccctcgccgtactcgcgaccccctccccaaacccccaccctaaaccttaatataaaccgcgtcccgaaatcccaaacacctaacgacgaacgcgacgcgtcccctccgcgcgacgaatcgcataaccgaacgctaacccaaaacgcaaaaccttaccctacgcactccgcgcccgaacgccgctaataccaaaacttccgccctctcaactacgaaatctaaaccgaacgcccgcccctccttcatccgcgtcatctcctaactctcgaaacctccgaaacctacgcgtaaaaacaaattttcccaaatcgtcacacgaaaaaacctaaactaaaaaactaattaaacccaattacgattaaccgaac

SEQ ID NO: 2541 - DNA, 768 bp, Artificial Sequence
  chemically treated genomic DNA (Homo sapiens) CpG-island No: 2541
tgttgtcgtcggagttttttcggtcgcggaaggagttttcgcggaggaagaggggttgtagtcgggcggttgtcgggggcggcgggaaggaatcggacgcggaggagatcgagcgagggtggtcgagcgtcgggcgtattgtttttcgaggggttttggggtcgtttagttgtttttttttcgttaatttcgggcgggcgaggcgggttaggcggtcgaggggagtcggggttcgtcgtttttttagtagtggggattcgtatttgggtcgggcggcggcgagattcggattggagttattggattgggcgagtcgggtcgggcggtagggagagggggtaggcggtgaatcgagcggatcgcggtgaagataggcgaggcgggggcggggcggggcggggcggggagcgagtttcgtcgggagggagggaggttggcggcggggaaattaggattggattcgagggggagaggaagtagcgagattagaggaggagaaagcgcggcgcgttggattaacgggaagagaaggggcgggggtgtagtgcgttatagtcgggtcgggagttttgtggtttggaggaagcgggaggaggcgcgggtagtcgttagggcgaggcgattcggtgcggggggatttttatggagcgcggatttttaaggaagtcgttgggaattttatcggttgtatcgtagggcgttagtatttagatggtttcggtgtttttaagcgatgggtttaagttatagggcgggttttgtatttgg

SEQ ID NO: 2542 - DNA, 768 bp, Artificial Sequence
  chemically treated genomic DNA (Homo sapiens) CpG-island No: 2542
ccaaatacaaaacccgccctataacttaaacccatcgcttaaaaacaccgaaaccatctaaatactaacgccctacgatacaaccgataaaattcccaacgacttccttaaaaatccgcgctccataaaaatccccccgcaccgaatcgcctcgccctaacgactacccgcgcctcctcccgcttcctccaaaccacaaaactcccgacccgactataacgcactacacccccgccccttctcttcccgttaatccaacgcgccgcgctttctcctcctctaatctcgctacttcctctccccctcgaatccaatcctaatttccccgccgccaacctccctccctcccgacgaaactcgctccccgccccgccccgccccgcccccgcctcgcctatcttcaccgcgatccgctcgattcaccgcctaccccctctccctaccgcccgacccgactcgcccaatccaataactccaatccgaatctcgccgccgcccgacccaaatacgaatccccactactaaaaaaacgacgaaccccgactcccctcgaccgcctaacccgcctcgcccgcccgaaattaacgaaaaaaaaacaactaaacgaccccaaaacccctcgaaaaacaatacgcccgacgctcgaccaccctcgctcgatctcctccgcgtccgattccttcccgccgcccccgacaaccgcccgactacaacccctcttcctccgcgaaaactccttccgcgaccgaaaaaactccgacgacaaca

SEQ ID NO: 2543 - DNA, 768 bp, Artificial Sequence
  chemically treated genomic DNA (Homo sapiens) CpG-island No: 2543
ttaggtgtaaagttcgttttgtagtttgagtttatcgtttgggggtatcgaagttatttaggtattaacgttttgcggtatagtcggtgggatttttagcgatttttttaggagttcgcgttttatgggagttttttcgtatcgggtcgtttcgttttggcggttgttcgcgttttttttcgttttttttaggttatagggttttcgattcgattgtgacgtattgtattttcgtttttttttttttcgttgatttagcgcgtcgcgttttttttttttttggtttcgttgttttttttttttttcgaatttagttttggttttttcgtcgttagtttttttttttttcggcgggattcgtttttcgtttcgtttcgtttcgttttcgtttcgtttgtttttatcgcggttcgttcggtttatcgtttgttttttttttttgtcgttcggttcggttcgtttagtttagtggttttagttcggatttcgtcgtcgttcggtttaggtgcgagtttttattgttggggaggcggcgggtttcggtttttttcggtcgtttagttcgtttcgttcgttcggggttggcggggagggaatagttgggcggttttagagtttttcggaggataatgcgttcggcgttcggttattttcgttcggtttttttcgcgttcggttttttttcgtcgttttcggtagtcgttcggttgtagttttttttttttcgcgggggtttttttcgcggtcggagaggtttcggcgatagta

SEQ ID NO: 2544 - DNA, 768 bp, Artificial Sequence
  chemically treated genomic DNA (Homo sapiens) CpG-island No: 2544
tactatcgccgaaacctctccgaccgcgaaaaaaacccccgcgaaaaaaaaaaaactacaaccgaacgactaccgaaaacgacgaaaaaaaaccgaacgcgaaaaaaaccgaacgaaaataaccgaacgccgaacgcattatcctccgaaaaactctaaaaccgcccaactattccctccccgccaaccccgaacgaacgaaacgaactaaacgaccgaaaaaaaccgaaacccgccgcctccccaacaataaaaactcgcacctaaaccgaacgacgacgaaatccgaactaaaaccactaaactaaacgaaccgaaccgaacgacaaaaaaaaaaaacaaacgataaaccgaacgaaccgcgataaaaacaaacgaaacgaaaacgaaacgaaacgaaacgaaaaacgaatcccgccgaaaaaaaaaaaaactaacgacgaaaaaaccaaaactaaattcgaaaaaaaaaaaaaacaacgaaaccaaaaaaaaaaaaaacgcgacgcgctaaatcaacgaaaaaaaaaaaaacgaaaatacaatacgtcacaatcgaatcgaaaaccctataacctaaaaaaaacgaaaaaaaacgcgaacaaccgccaaaacgaaacgacccgatacgaaaaaactcccataaaacgcgaactcctaaaaaaatcgctaaaaatcccaccgactataccgcaaaacgttaatacctaaataacttcgatacccccaaacgataaactcaaactacaaaacgaactttacacctaa

SEQ ID NO: 2545 - DNA, 1189 bp, Artificial Sequence
  chemically treated genomic DNA (Homo sapiens) CpG-island No: 2545
acgtttttttgtgagtttatcggttttcgattatacgttatcgtatacgttttatatttgtggtatatttttgtgagtttataggttttcgattatacgttatcgtatacgttttatatttgtgacgtttttttgtgagtttatcggtttttaattatatattatcgtatacgttttatatttgtgacgtttttttgtgagtttatcggtttttaattatacgttatcgtatacgttttatatttgtgacgtttttttgtgagtttatcggttttcgattatacgttatcgtatacgttttatatttgtgacgtttttttgtgagtttatcggttttcgattatacgttatcgtatacgttttatatttgtgacgtttttttgtgagtttatcggttttcgattatacgttatcgtatacgttttatatttgtgacgtttttttgtgagtttatcggttttcgattatacgttatcgtatacgttttatatttgtgacgtttttttgtgagtttatcggttttcgattatacgttatcgtatacgttttatatttgtgacgtatttttgtgagtttataggttttcgattatacgttatcgtatacgttttatatttgtgacgcgtttttgtgagtttatcggttttcgattatatgttatcgtatacgttttatatttgcgacgtttttttgtgagtttatcggtttttatatgttatcgtatacgttttatatttgtggtatatttttgtgagtttatcggttttcgattatacgttatcgtatacgttttatatttgtggtatatttttgtgagtttatcggttttcgattatacgttatcgtatacgttttatatttgtggcgtttttttgtgagtttatcggtttttaattatacgttatcgtatacgttttatatttgtggtatatttttgtgagtttataggttttcgattatatgttatcgtatacgttttatatttgtggcgtttttttgtgagtttatcggttttcgattatacgttattatatacgttttatatttgtgacgtttttttgtgagtttatcggttttcgattatacgttatcgtatacgtttttttattgtttatggtgttatttttgtttttagtataagtttttgattgatttataagttttacgtttttattttggttttcgtttt

SEQ ID NO: 2546 - DNA, 1189 bp, Artificial Sequence
  chemically treated genomic DNA (Homo sapiens) CpG-island No: 2546
aaaacgaaaaccaaaataaaaacgtaaaacttataaatcaatcaaaaacttatactaaaaacaaaaataacaccataaacaataaaaaaacgtatacgataacgtataatcgaaaaccgataaactcacaaaaaaacgtcacaaatataaaacgtatataataacgtataatcgaaaaccgataaactcacaaaaaaacgccacaaatataaaacgtatacgataacatataatcgaaaacctataaactcacaaaaatataccacaaatataaaacgtatacgataacgtataattaaaaaccgataaactcacaaaaaaacgccacaaatataaaacgtatacgataacgtataatcgaaaaccgataaactcacaaaaatataccacaaatataaaacgtatacgataacgtataatcgaaaaccgataaactcacaaaaatataccacaaatataaaacgtatacgataacatataaaaaccgataaactcacaaaaaaacgtcgcaaatataaaacgtatacgataacatataatcgaaaaccgataaactcacaaaaacgcgtcacaaatataaaacgtatacgataacgtataatcgaaaacctataaactcacaaaaatacgtcacaaatataaaacgtatacgataacgtataatcgaaaaccgataaactcacaaaaaaacgtcacaaatataaaacgtatacgataacgtataatcgaaaaccgataaactcacaaaaaaacgtcacaaatataaaacgtatacgataacgtataatcgaaaaccgataaactcacaaaaaaacgtcacaaatataaaacgtatacgataacgtataatcgaaaaccgataaactcacaaaaaaacgtcacaaatataaaacgtatacgataacgtataatcgaaaaccgataaactcacaaaaaaacgtcacaaatataaaacgtatacgataacgtataattaaaaaccgataaactcacaaaaaaacgtcacaaatataaaacgtatacgataatatataattaaaaaccgataaactcacaaaaaaacgtcacaaatataaaacgtatacgataacgtataatcgaaaacctataaactcacaaaaatataccacaaatataaaacgtatacgataacgtataatcgaaaaccgataaactcacaaaaaaacgt

SEQ ID NO: 2547 - DNA, 1189 bp, Artificial Sequence
  chemically treated genomic DNA (Homo sapiens) CpG-island No: 2547
gggacgaggattaggatgagggcgtaggatttatgaattaattaagggtttgtgttggaggtaagaataatattatgagtagtaaaggagcgtgtgcgatggcgtgtgatcgaaggtcggtaagtttataggagggcgttataggtgtggggcgtgtgtgatggcgtgtgatcgaaggtcggtaagtttataggagggcgttataggtgtggagcgtgtgcgatggtatgtgatcgaaggtttgtgagtttataggagtgtgttataggtgtggggcgtgtgcgatggcgtgtgattgaaggtcggtaagtttataggagggcgttataggtgtggggcgtgtgcgatggcgtgtgatcgaaggtcggtaagtttataggagtgtgttataggtgtggggcgtgtgcgatggcgtgtgatcgaaggtcggtaagtttataggagtgtgttataggtgtggagcgtgtgcgatggtatgtgaaggtcggtaagtttataggagggcgtcgtaggtgtggggcgtgtgcgatggtatgtgatcgaaggtcggtaagtttataggagcgcgttataggtgtggggcgtgtgcgatggcgtgtgatcgaaggtttgtaagtttataggagtgcgttataggtgtggggcgtgtgcgatggcgtgtgatcgaaggtcggtaagtttataggagggcgttataggtgtggggcgtgtgcgatggcgtgtgatcgaaggtcggtaagtttataggagggcgttataggtgtggggcgtgtgcgatggcgtgtgatcgaaggtcggtaagtttataggagggcgttataggtgtggggcgtgtgcgatggcgtgtgatcgaaggtcggtaagtttataggagggcgttataggtgtggggcgtgtgcgatggcgtgtgatcgaaggtcggtaagtttataggagggcgttataggtgtggggcgtgtgcgatgacgtgtgattgaaggtcggtaagtttataggagggcgttataggtgtggggcgtgtgcgatgatgtgtgattgaaggtcggtaagtttataggagggcgttataggtgtggggcgtgtgcgatggcgtgtgatcgaaggtttgtaagtttataggagtgtgttataggtgtggagcgtgtgcgatggcgtgtgatcgaaggtcggtaagtttataggagggcgt

SEQ ID NO: 2548 - DNA, 1189 bp, Artificial Sequence
  chemically treated genomic DNA (Homo sapiens) CpG-island No: 2548
acgccctcctataaacttaccgaccttcgatcacacgccatcgcacacgctccacacctataacacactcctataaacttacaaaccttcgatcacacgccatcgcacacgccccacacctataacgccctcctataaacttaccgaccttcaatcacacatcatcgcacacgccccacacctataacgccctcctataaacttaccgaccttcaatcacacgtcatcgcacacgccccacacctataacgccctcctataaacttaccgaccttcgatcacacgccatcgcacacgccccacacctataacgccctcctataaacttaccgaccttcgatcacacgccatcgcacacgccccacacctataacgccctcctataaacttaccgaccttcgatcacacgccatcgcacacgccccacacctataacgccctcctataaacttaccgaccttcgatcacacgccatcgcacacgccccacacctataacgccctcctataaacttaccgaccttcgatcacacgccatcgcacacgccccacacctataacgcactcctataaacttacaaaccttcgatcacacgccatcgcacacgccccacacctataacgcgctcctataaacttaccgaccttcgatcacataccatcgcacacgccccacacctacgacgccctcctataaacttaccgaccttcacataccatcgcacacgctccacacctataacacactcctataaacttaccgaccttcgatcacacgccatcgcacacgccccacacctataacacactcctataaacttaccgaccttcgatcacacgccatcgcacacgccccacacctataacgccctcctataaacttaccgaccttcaatcacacgccatcgcacacgccccacacctataacacactcctataaactcacaaaccttcgatcacataccatcgcacacgctccacacctataacgccctcctataaacttaccgaccttcgatcacacgccatcacacacgccccacacctataacgccctcctataaacttaccgaccttcgatcacacgccatcgcacacgctcctttactactcataatattattcttacctccaacacaaacccttaattaattcataaatcctacgccctcatcctaatcctcgtccc

SEQ ID NO: 2549 - DNA, 1071 bp, Artificial Sequence
  chemically treated genomic DNA (Homo sapiens) CpG-island No: 2549
tattattatcgcgtcgggtatatagtaggcgtcggttttagtttttttgttttcgttcgcggagtttttagcgtttagtcgaggttatagcgagttgaattgaatttaaggttcgtattaaatttataggtatttgggggcggagtattcgtaggcgcggttttcggcgcgcggtttagttttttttatatgtagatgaaaattacgatttaaacgtttttatggtggaaattagaagacgcgtagggaaaatagggacgcggaaattgtcgggaagcgtaggggttgataagtagtttggtttaggtcgttttacgagcgttttttcgcgggagtagcgttttcgaggtcgttagcgagttagaggaaggtagggcgtattcgttttttagtaagaacgcgatgtattcgggcgcgacgacggtttaggtagtttttaggaggttgggatattagttcggtcgttttttttttttcgcggtttttcgtttcgttttcggttttgagtggcgagtggttcggttagaattcggacgtttttatttgagcggggtttatagtatagtatttgcgggcggggcggttttggagtttcgtagtcgcgcgcgtcgttcgttagtaaagtttacgcgtcgcgtcgagcgtagttatatagttttacgtagttattcggtcgtcgtcgtgcgtacgtgtacggggtgcggtttttttttttcgcgagttcgttcgttgtatagttaattagcggtcggcgcgcgcggtattacgggagttgtagttttgtaagcgcgcggagttcgtcgggcgtttatggaattcgattcgtaggttaaaggggtttcgttgtaaggaagaagtgcggggtttcgtcgttttttagatcgagatcgcggtgagttggtcgcggcgtataatgggtacggtttgggcggcggcgttcgtattatcgttttgtgtttgcggatttcggtaatattgcgcggtaggttttaggtcggttttttttagtttcgcggattgtttgggtcgggggttttaattttgattttagggtcgggtcgttggggtaga

SEQ ID NO: 2550 - DNA, 1071 bp, Artificial Sequence
  chemically treated genomic DNA (Homo sapiens) CpG-island No: 2550
tctaccccaacgacccgaccctaaaatcaaaattaaaacccccgacccaaacaatccgcgaaactaaaaaaaaccgacctaaaacctaccgcgcaatattaccgaaatccgcaaacacaaaacgataatacgaacgccgccgcccaaaccgtacccattatacgccgcgaccaactcaccgcgatctcgatctaaaaaacgacgaaaccccgcacttcttccttacaacgaaacccctttaacctacgaatcgaattccataaacgcccgacgaactccgcgcgcttacaaaactacaactcccgtaataccgcgcgcgccgaccgctaattaactatacaacgaacgaactcgcgaaaaaaaaaaaccgcaccccgtacacgtacgcacgacgacgaccgaataactacgtaaaactatataactacgctcgacgcgacgcgtaaactttactaacgaacgacgcgcgcgactacgaaactccaaaaccgccccgcccgcaaatactatactataaaccccgctcaaataaaaacgtccgaattctaaccgaaccactcgccactcaaaaccgaaaacgaaacgaaaaaccgcgaaaaaaaaaaaacgaccgaactaatatcccaacctcctaaaaactacctaaaccgtcgtcgcgcccgaatacatcgcgttcttactaaaaaacgaatacgccctaccttcctctaactcgctaacgacctcgaaaacgctactcccgcgaaaaaacgctcgtaaaacgacctaaaccaaactacttatcaacccctacgcttcccgacaatttccgcgtccctattttccctacgcgtcttctaatttccaccataaaaacgtttaaatcgtaattttcatctacatataaaaaaaactaaaccgcgcgccgaaaaccgcgcctacgaatactccgcccccaaatacctataaatttaatacgaaccttaaattcaattcaactcgctataacctcgactaaacgctaaaaactccgcgaacgaaaacaaaaaaactaaaaccgacgcctactatatacccgacgcgataataata

SEQ ID NO: 2551 - DNA, 1071 bp, Artificial Sequence
  chemically treated genomic DNA (Homo sapiens) CpG-island No: 2551
tttgttttagcggttcggttttgaagttaaggttgagattttcggtttagatagttcgcgaagttgagggaggtcggtttggggtttgtcgcgtaatgttatcgggattcgtaggtatagggcgatagtacggacgtcgtcgtttaggtcgtgtttattgtgcgtcgcggttagtttatcgcgatttcggtttaggaggcggcgggatttcgtattttttttttgtaacggagtttttttggtttgcgggtcgagttttataggcgttcgacgggtttcgcgcgtttataggattataattttcgtgatgtcgcgcgcgtcgatcgttgattggttgtgtagcggacggattcgcggggggggggggtcgtatttcgtgtacgtgcgtacggcgacggtcggatggttgcgtggggttgtgtggttgcgttcggcgcggcgcgtgggttttgttggcgggcggcgcgcgcggttgcggggttttagggtcgtttcgttcgtaggtgttatgttgtgggtttcgtttaggtgaggacgttcgggttttggtcgagttattcgttatttagggtcggaggcggggcggggagtcgcggggaaggaggggcggtcgggttggtattttagttttttgggaattgtttggatcgtcgtcgcgttcgagtgtatcgcgtttttgttggagggcggatgcgttttgtttttttttgattcgttggcggtttcggaaacgttattttcgcgggagagcgttcgtgggacggtttgggttaggttgtttgttagtttttgcgtttttcggtagttttcgcgtttttgttttttttgcgcgttttttgatttttattatgaggacgtttgggtcgtgatttttatttgtatgtggaggaaattgggtcgcgcgtcgggagtcgcgtttgcgggtgtttcgtttttaagtgtttgtgggtttggtgcgggttttgggtttagtttagttcgttgtgatttcgattgagcgttggaggtttcgcgggcgggagtaggagggttggagtcggcgtttgttgtgtgttcggcgcggtagtgatg

SEQ ID NO: 2552 - DNA, 1071 bp, Artificial Sequence
  chemically treated genomic DNA (Homo sapiens) CpG-island No: 2552
catcactaccgcgccgaacacacaacaaacgccgactccaaccctcctactcccgcccgcgaaacctccaacgctcaatcgaaatcacaacgaactaaactaaacccaaaacccgcaccaaacccacaaacacttaaaaacgaaacacccgcaaacgcgactcccgacgcgcgacccaatttcctccacatacaaataaaaatcacgacccaaacgtcctcataataaaaatcaaaaaacgcgcaaaaaaaacaaaaacgcgaaaactaccgaaaaacgcaaaaactaacaaacaacctaacccaaaccgtcccacgaacgctctcccgcgaaaataacgtttccgaaaccgccaacgaatcaaaaaaaaacaaaacgcatccgccctccaacaaaaacgcgatacactcgaacgcgacgacgatccaaacaattcccaaaaaactaaaataccaacccgaccgcccctccttccccgcgactccccgccccgcctccgaccctaaataacgaataactcgaccaaaacccgaacgtcctcacctaaacgaaacccacaacataacacctacgaacgaaacgaccctaaaaccccgcaaccgcgcgcgccgcccgccaacaaaacccacgcgccgcgccgaacgcaaccacacaaccccacgcaaccatccgaccgtcgccgtacgcacgtacacgaaatacgaccccccccccccgcgaatccgtccgctacacaaccaatcaacgatcgacgcgcgcgacatcacgaaaattataatcctataaacgcgcgaaacccgtcgaacgcctataaaactcgacccgcaaaccaaaaaaactccgttacaaaaaaaaaatacgaaatcccgccgcctcctaaaccgaaatcgcgataaactaaccgcgacgcacaataaacacgacctaaacgacgacgtccgtactatcgccctatacctacgaatcccgataacattacgcgacaaaccccaaaccgacctccctcaacttcgcgaactatctaaaccgaaaatctcaaccttaacttcaaaaccgaaccgctaaaacaaa

SEQ ID NO: 2553 - DNA, 794 bp, Artificial Sequence
  chemically treated genomic DNA (Homo sapiens) CpG-island No: 2553
ggtatcgggcggttcgcgggtggggcgggggttgcgtaggggtagggagggggttgtcgtcgtacgttcgtgcgtttgtttttcgtcgtagagggcgttttttaggtttattatttcggttcgtgcgggaagtataacgttatggtgttggagttgttggggtttagtttggaggatttgttcgatttgtgcgatcggatttttacgtttaagacggtgttgatgatcgttatttagttggtgcgcggcgggcggggcggggcggggttcggagggaagagggtggttttggaggggagcgcgtgggacggggaggggttcggtcgatatcgtcgtgtttttttgtagattacgcgtatggagtatgtgtatattaagagtttaatttatcgggacgtgaagttcgagaattttttggtgggtcgttcggggattaagcggtagtatgttatttatattatcgatttcgggttggttaaggagtatatcgatttcgagattaagaagtatatttcgtatcgcgagtataagagtttgacgggtacggcgcgttatatgagtattaatacgtatttgggtaagggtgagttgcgcgcgcgcggcggggggcgggcgttcggatttcgttgaggttgcgtttttgttttcgtagagtagagtcgtcgcgacgatttggaggcgttgggttatatgtttatgtattttttgcgcggtagttttttttggtaggggtttaaggtgggcgaggaggtcgggtaggcgggcggggacgtagggcgggagtaaggttgatt

SEQ ID NO: 2554 - DNA, 794 bp, Artificial Sequence
  chemically treated genomic DNA (Homo sapiens) CpG-island No: 2554
aatcaaccttactcccgccctacgtccccgcccgcctacccgacctcctcgcccaccttaaacccctaccaaaaaaaactaccgcgcaaaaaatacataaacatataacccaacgcctccaaatcgtcgcgacgactctactctacgaaaacaaaaacgcaacctcaacgaaatccgaacgcccgccccccgccgcgcgcgcgcaactcacccttacccaaatacgtattaatactcatataacgcgccgtacccgtcaaactcttatactcgcgatacgaaatatacttcttaatctcgaaatcgatatactccttaaccaacccgaaatcgataatataaataacatactaccgcttaatccccgaacgacccaccaaaaaattctcgaacttcacgtcccgataaattaaactcttaatatacacatactccatacgcgtaatctacaaaaaaacacgacgatatcgaccgaacccctccccgtcccacgcgctcccctccaaaaccaccctcttccctccgaaccccgccccgccccgcccgccgcgcaccaactaaataacgatcatcaacaccgtcttaaacgtaaaaatccgatcgcacaaatcgaacaaatcctccaaactaaaccccaacaactccaacaccataacgttatacttcccgcacgaaccgaaataataaacctaaaaaacgccctctacgacgaaaaacaaacgcacgaacgtacgacgacaaccccctccctacccctacgcaacccccgccccacccgcgaaccgcccgatacc

SEQ ID NO: 2555 - DNA, 794 bp, Artificial Sequence
  chemically treated genomic DNA (Homo sapiens) CpG-island No: 2555
ggttagttttgttttcgttttgcgttttcgttcgtttgttcggttttttcgtttattttgagtttttgttaggggaggttgtcgcgtaggaagtatatgaatatgtggtttagcgtttttaggtcgtcgcggcggttttgttttgcggggataggggcgtagttttagcggggttcgggcgttcgtttttcgtcgcgcgcgcgtagtttatttttgtttaggtgcgtgttgatgtttatgtagcgcgtcgtgttcgttaggtttttgtgttcgcggtacgggatgtgttttttggtttcggggtcgatgtattttttggttagttcgaagtcgatgatgtggatggtatgttgtcgtttggttttcgggcggtttattaggaagttttcgggttttacgtttcggtagattaggtttttggtgtgtatatattttatgcgcgtgatttgtaggggggtacggcggtgtcggtcgggttttttttcgttttacgcgtttttttttagggttattttttttttttcgagtttcgtttcgtttcgttcgtcgcgtattagttggatggcgattattagtatcgttttgagcgtgaaggttcggtcgtataggtcgaataggttttttaggttgggttttagtagttttagtattatggcgttgtatttttcgtacggatcgaagtagtagatttgagggacgttttttgcggcggaggatagacgtacgggcgtgcggcggtagttttttttttgtttttgcgtagttttcgttttattcgcgggtcgttcggtatt

SEQ ID NO: 2556 - DNA, 794 bp, Artificial Sequence
  chemically treated genomic DNA (Homo sapiens) CpG-island No: 2556
aataccgaacgacccgcgaataaaacgaaaactacgcaaaaacaaaaaaaaaactaccgccgcacgcccgtacgtctatcctccgccgcaaaaaacgtccctcaaatctactacttcgatccgtacgaaaaatacaacgccataatactaaaactactaaaacccaacctaaaaaacctattcgacctatacgaccgaaccttcacgctcaaaacgatactaataatcgccatccaactaatacgcgacgaacgaaacgaaacgaaactcgaaaaaaaaaaaataaccctaaaaaaaaacgcgtaaaacgaaaaaaaacccgaccgacaccgccgtacccccctacaaatcacgcgcataaaatatatacacaccaaaaacctaatctaccgaaacgtaaaacccgaaaacttcctaataaaccgcccgaaaaccaaacgacaacataccatccacatcatcgacttcgaactaaccaaaaaatacatcgaccccgaaaccaaaaaacacatcccgtaccgcgaacacaaaaacctaacgaacacgacgcgctacataaacatcaacacgcacctaaacaaaaataaactacgcgcgcgcgacgaaaaacgaacgcccgaaccccgctaaaactacgcccctatccccgcaaaacaaaaccgccgcgacgacctaaaaacgctaaaccacatattcatatacttcctacgcgacaacctcccctaacaaaaactcaaaataaacgaaaaaaccgaacaaacgaacgaaaacgcaaaacgaaaacaaaactaacc

SEQ ID NO: 2557 - DNA, 542 bp, Artificial Sequence
  chemically treated genomic DNA (Homo sapiens) CpG-island No: 2557
gcgttgcgcgggtttcgagtcgttttcgatatcggtggtagttttagtcgcgtttatttgtattttttcggaacgtttattagagggcgttgttggatagcgcgtagagttaagtttatggggcggaagagttgcgaggttagtatcgtcgattggagtattcggggcgggtgggtaggacgagcggaggtcgtgggttggagcgtgggagatttttaggagtttttacgttttttaagaggtttggcgtagttcggcgaggtttcgggggtgcgcggatattagtttttttagttttaggtttggaattcggcgggatgggggattgggcgacggtattgtgagggttcggcggaggcgttagggggcgttagttggtttttcgtagtcgatttaggtcgcggcggttttacgaggttcggcgtttcgcgtttcgcgattcgcggttttggttaagttgttagggaaggtgcggcggagattattcgtttttttttttttttttttttttttttttcggtcggcggggagtggcgtttatt

SEQ ID NO: 2558 - DNA, 542 bp, Artificial Sequence
  chemically treated genomic DNA (Homo sapiens) CpG-island No: 2558
aataaacgccactccccgccgaccgaaaaaaaaaaaaaaaaaaaaaaaaaaaaacgaataatctccgccgcaccttccctaacaacttaaccaaaaccgcgaatcgcgaaacgcgaaacgccgaacctcgtaaaaccgccgcgacctaaatcgactacgaaaaaccaactaacgccccctaacgcctccgccgaaccctcacaataccgtcgcccaatcccccatcccgccgaattccaaacctaaaactaaaaaaactaatatccgcgcacccccgaaacctcgccgaactacgccaaacctcttaaaaaacgtaaaaactcctaaaaatctcccacgctccaacccacgacctccgctcgtcctacccacccgccccgaatactccaatcgacgatactaacctcgcaactcttccgccccataaacttaactctacgcgctatccaacaacgccctctaataaacgttccgaaaaaatacaaataaacgcgactaaaactaccaccgatatcgaaaacgactcgaaacccgcgcaacgc

SEQ ID NO: 2559 - DNA, 542 bp, Artificial Sequence
  chemically treated genomic DNA (Homo sapiens) CpG-island No: 2559
ggtgggcgttatttttcgtcggtcgaagagggagggagggagggagaagaggaacgggtggttttcgtcgtattttttttgatagtttggttaggatcgcgggtcgcggggcgcggggcgtcggatttcgtggaatcgtcgcggtttggatcggttgcgaggagttagttagcgttttttggcgttttcgtcgagtttttataatgtcgtcgtttagttttttatttcgtcggattttagatttgaggttgaggaggttggtgttcgcgtattttcgagatttcgtcggattacgttaagttttttagaggacgtaggagtttttgaaggttttttacgttttaatttacggttttcgttcgttttgtttattcgtttcgagtgttttagtcggcggtgttgatttcgtagttttttcgttttataagtttggttttgcgcgttgtttaatagcgttttttggtgggcgtttcggggagatgtaggtgagcgcggttgaggttgttatcgatgtcgagaacggttcgggattcgcgtagcgt

SEQ ID NO: 2560 - DNA, 542 bp, Artificial Sequence
  chemically treated genomic DNA (Homo sapiens) CpG-island No: 2560
acgctacgcgaatcccgaaccgttctcgacatcgataacaacctcaaccgcgctcacctacatctccccgaaacgcccaccaaaaaacgctattaaacaacgcgcaaaaccaaacttataaaacgaaaaaactacgaaatcaacaccgccgactaaaacactcgaaacgaataaacaaaacgaacgaaaaccgtaaattaaaacgtaaaaaaccttcaaaaactcctacgtcctctaaaaaacttaacgtaatccgacgaaatctcgaaaatacgcgaacaccaacctcctcaacctcaaatctaaaatccgacgaaataaaaaactaaacgacgacattataaaaactcgacgaaaacgccaaaaaacgctaactaactcctcgcaaccgatccaaaccgcgacgattccacgaaatccgacgccccgcgccccgcgacccgcgatcctaaccaaactatcaaaaaaaatacgacgaaaaccacccgttcctcttctccctccctccctccctcttcgaccgacgaaaaataacgcccacc

SEQ ID NO: 2561 - DNA, 573 bp, Artificial Sequence
  chemically treated genomic DNA (Homo sapiens) CpG-island No: 2561
gcggggaagtcgtgaacgtcgaggttattgtaaggttgggtggtgcggagcgcgggaagggggttgggatttgaatgggagtttgtgattggtcgatttttggattgacgttattttttcgcggggcgattagtttgcgagaggagggtcggcggtttagtgcgttgggggcggtcggggcgttcgaggttttttaagcgtttcgcgcgggtgttttacgtgagtttcgggacgtcgtcgaggtaggtcggtagcgtcggtgttaggacgtacggaacggggagtaggggagaaatgcgtcgggagggcgagggaggaagggaattgggcgggggttgcgggtttaggtggcgggagttagcgtgtgcgtgtgtttgtttattttttttggtttttcgcgtgcgttttaggattcgggtacggcgttcgtttaggttttcgcgttcggtaggtagtagtacgtggagtttacggcgcggtagcggtattggttaagggaggttcgtttttttttttggttatttagttgtatgagtgttatagagtcgttataaagttagataatcgaaagta

SEQ ID NO: 2562 - DNA, 573 bp, Artificial Sequence
  chemically treated genomic DNA (Homo sapiens) CpG-island No: 2562
tactttcgattatctaactttataacgactctataacactcatacaactaaataaccaaaaaaaaaaacgaacctcccttaaccaataccgctaccgcgccgtaaactccacgtactactacctaccgaacgcgaaaacctaaacgaacgccgtacccgaatcctaaaacgcacgcgaaaaaccaaaaaaaataaacaaacacacgcacacgctaactcccgccacctaaacccgcaacccccgcccaattcccttcctccctcgccctcccgacgcatttctcccctactccccgttccgtacgtcctaacaccgacgctaccgacctacctcgacgacgtcccgaaactcacgtaaaacacccgcgcgaaacgcttaaaaaacctcgaacgccccgaccgcccccaacgcactaaaccgccgaccctcctctcgcaaactaatcgccccgcgaaaaaataacgtcaatccaaaaatcgaccaatcacaaactcccattcaaatcccaacccccttcccgcgctccgcaccacccaaccttacaataacctcgacgttcacgacttccccgc

SEQ ID NO: 2563 - DNA, 573 bp, Artificial Sequence
  chemically treated genomic DNA (Homo sapiens) CpG-island No: 2563
tattttcggttatttagttttatgacggttttgtggtatttatatagttagataattaaagagagaaacgggttttttttagttagtgtcgttgtcgcgtcgtgggttttacgtgttgttgtttgtcgagcgcgggagtttgagcggacgtcgtgttcggattttggggcgtacgcggagagttagaggggatggatagatatacgtatacgttgattttcgttatttaggttcgtagttttcgtttagttttttttttttttcgttttttcggcgtattttttttttgtttttcgtttcgtgcgttttggtatcggcgttgtcggtttgtttcgacggcgtttcggggtttacgtagggtattcgcgcggagcgtttagagagtttcgagcgtttcggtcgtttttagcgtattggatcgtcggtttttttttcgtaggttaatcgtttcgcggggaagtgacgttagtttagggatcggttaattataggtttttatttaaattttagtttttttttcgcgtttcgtattatttagttttataatggtttcggcgtttacggttttttcgt

SEQ ID NO: 2564 - DNA, 573 bp, Artificial Sequence
  chemically treated genomic DNA (Homo sapiens) CpG-island No: 2564
acgaaaaaaccgtaaacgccgaaaccattataaaactaaataatacgaaacgcgaaaaaaaaactaaaatttaaataaaaacctataattaaccgatccctaaactaacgtcacttccccgcgaaacgattaacctacgaaaaaaaaaccgacgatccaatacgctaaaaacgaccgaaacgctcgaaactctctaaacgctccgcgcgaataccctacgtaaaccccgaaacgccgtcgaaacaaaccgacaacgccgataccaaaacgcacgaaacgaaaaacaaaaaaaaaatacgccgaaaaaacgaaaaaaaaaaaaaactaaacgaaaactacgaacctaaataacgaaaatcaacgtatacgtatatctatccatcccctctaactctccgcgtacgccccaaaatccgaacacgacgtccgctcaaactcccgcgctcgacaaacaacaacacgtaaaacccacgacgcgacaacgacactaactaaaaaaaacccgtttctctctttaattatctaactatataaataccacaaaaccgtcataaaactaaataaccgaaaata

SEQ ID NO: 2565 - DNA, 745 bp, Artificial Sequence
  chemically treated genomic DNA (Homo sapiens) CpG-island No: 2565
gaggtattcggggtttttttttttttggtttacgaatttttaatttcgaacgttgtgggattgtatgggtttttgttcgggttaatgaaatgcgttgtcgagaggaggttgcggcgcggtttgaggtcggatttttataggtcggagagttttttgtcggtcgcggtcggatttttcgggaaatgggattagagcgcggagggagtttggttaggaggttttttaggatttagtcgcgacgttgaaaagtatgaagggtcggaattaggtatttatttagcgagcgttattaattcgaagttatagcgttaattttttgattcggtcgtttttatacgtagcgtcgggattagaggcgcggtcgtcgttcgtttcgtttttatattttaaacgcgttcgtttcgcgttttcgaggttgcgggtttagggttaattcgtcgcgtcgcgttcgtttggttcgagcgcgcggcgggtcgggttcggttagttggggcgagtcggtttgttcgttggttcgggcgttcggtttcgggttgggtaaggagcgtttggttatgagtcgcgggatagtttaggcgggacggatgcgttttttagggtttaggcgaggtcgcgcggtgtagaatcgtcgggatttttttaattcgggtatgcgtatttatagtagcggtttttggaggtcgcggcgttattttagtggtttttttttttttttggtatttgtcgtgtatggtgtggttgggtg

SEQ ID NO: 2566 - DNA, 745 bp, Artificial Sequence
  chemically treated genomic DNA (Homo sapiens) CpG-island No: 2566
cacccaaccacaccatacacgacaaataccaaaaaaaaaaaaaaaccactaaaataacgccgcgacctccaaaaaccgctactataaatacgcatacccgaattaaaaaaatcccgacgattctacaccgcgcgacctcgcctaaaccctaaaaaacgcatccgtcccgcctaaactatcccgcgactcataaccaaacgctccttacccaacccgaaaccgaacgcccgaaccaacgaacaaaccgactcgccccaactaaccgaacccgacccgccgcgcgctcgaaccaaacgaacgcgacgcgacgaattaaccctaaacccgcaacctcgaaaacgcgaaacgaacgcgtttaaaatataaaaacgaaacgaacgacgaccgcgcctctaatcccgacgctacgtataaaaacgaccgaatcaaaaaattaacgctataacttcgaattaataacgctcgctaaataaatacctaattccgacccttcatacttttcaacgtcgcgactaaatcctaaaaaacctcctaaccaaactccctccgcgctctaatcccatttcccgaaaaatccgaccgcgaccgacaaaaaactctccgacctataaaaatccgacctcaaaccgcgccgcaacctcctctcgacaacgcatttcattaacccgaacaaaaacccatacaatcccacaacgttcgaaattaaaaattcgtaaaccaaaaaaaaaaaaaccccgaatacctc

SEQ ID NO: 2567 - DNA, 745 bp, Artificial Sequence
  chemically treated genomic DNA (Homo sapiens) CpG-island No: 2567
tatttagttatattatatacgatagatgttaagggggaaggaaggttattaaaatggcgtcgcggtttttaaaggtcgttgttgtgggtgcgtatattcgggttggagaaatttcggcggttttgtatcgcgcggtttcgtttgggttttggagggcgtattcgtttcgtttgggttgtttcgcggtttatggttaagcgttttttgtttagttcggaatcgggcgttcgagttagcgaataggtcggttcgttttagttggtcgagttcgattcgtcgcgcgttcgggttaggcgagcgcggcgcggcggattagttttgagttcgtagtttcgagggcgcggggcgggcgcgtttggggtatgagggcggggcgggcggcggtcgcgtttttaatttcggcgttgcgtgtgggagcggtcggattagggaattagcgttgtaatttcggattagtaacgttcgttaaatgagtgtttaatttcgattttttatgttttttagcgtcgcggttgagttttaggaggttttttggttaggtttttttcgcgttttggttttatttttcgggaggttcggtcgcggtcggtagagaatttttcggtttgtggagattcggttttaggtcgcgtcgtagttttttttcggtagcgtattttattggttcgggtagaggtttatgtagttttatagcgttcggagttgggagttcgtggattagagaaaaggaagtttcggatgtttt

SEQ ID NO: 2568 - DNA, 745 bp, Artificial Sequence
  chemically treated genomic DNA (Homo sapiens) CpG-island No: 2568
aaaacatccgaaacttccttttctctaatccacgaactcccaactccgaacgctataaaactacataaacctctacccgaaccaataaaatacgctaccgaaaaaaaactacgacgcgacctaaaaccgaatctccacaaaccgaaaaattctctaccgaccgcgaccgaacctcccgaaaaataaaaccaaaacgcgaaaaaaacctaaccaaaaaacctcctaaaactcaaccgcgacgctaaaaaacataaaaaatcgaaattaaacactcatttaacgaacgttactaatccgaaattacaacgctaattccctaatccgaccgctcccacacgcaacgccgaaattaaaaacgcgaccgccgcccgccccgccctcataccccaaacgcgcccgccccgcgccctcgaaactacgaactcaaaactaatccgccgcgccgcgctcgcctaacccgaacgcgcgacgaatcgaactcgaccaactaaaacgaaccgacctattcgctaactcgaacgcccgattccgaactaaacaaaaaacgcttaaccataaaccgcgaaacaacccaaacgaaacgaatacgccctccaaaacccaaacgaaaccgcgcgatacaaaaccgccgaaatttctccaacccgaatatacgcacccacaacaacgacctttaaaaaccgcgacgccattttaataaccttccttcccccttaacatctatcgtatataatataactaaata

SEQ ID NO: 2569 - DNA, 844 bp, Artificial Sequence
  chemically treated genomic DNA (Homo sapiens) CpG-island No: 2569
cggttttggcggttttagtatcggaggcggttttttggatattcggcgttcgcgggagtttgaggcgttcggttgttagagttttagttgggagtggcgcggttgtttttcgttcgcgtaggattaggtcggttttcgcgggtttggagttggatttagagttagggaaattggaaaaataggtataaattcggaagtcgcggtacggtaagagtttaagtaaagaattttttttaagatttatatttcgtttatattagggaatcgtttgggtttacggtttttcgaattcgaagcgttcgtagtttagagttggtattaggttattaggtcgggaaggtcgtcgtaggttttagagtgcgggcgcggggggcgcgcgtttataggacgttcggggttgggtaggtaggagagaagggcgttagtaggttcgcggttgttttttttcggttcgtatagcgggttcgggaggttattttgagagcgcgaagaggggcggtaagatggttgcgtgggtattcggaaggtcgtcgcgttaagggttcgttgagtttttttttttattcgtttagtcgcgcggtttatagaagcggaacgcgcgtcgagagcgttttgttcgttcgttttagatagatgttcggttatttattatcgcgaggtttagaggaaagagtggttgtcgtttttttgtttatagttcgtcggatttttcgtcgcggttgttcggttttcggagtcgtagtcgtcgagttcggttgtgcgtgtcgtggttgttggggagaaagaggttttcggtaagagtttttttgattgggttgtttatttcgggtaggggcggaaacgg

SEQ ID NO: 2570 - DNA, 844 bp, Artificial Sequence
  chemically treated genomic DNA (Homo sapiens) CpG-island No: 2570
ccgtttccgcccctacccgaaataaacaacccaatcaaaaaaactcttaccgaaaacctctttctccccaacaaccacgacacgcacaaccgaactcgacgactacgactccgaaaaccgaacaaccgcgacgaaaaatccgacgaactataaacaaaaaaacgacaaccactctttcctctaaacctcgcgataataaataaccgaacatctatctaaaacgaacgaacaaaacgctctcgacgcgcgttccgcttctataaaccgcgcgactaaacgaataaaaaaaaaaactcaacgaacccttaacgcgacgaccttccgaatacccacgcaaccatcttaccgcccctcttcgcgctctcaaaataacctcccgaacccgctatacgaaccgaaaaaaaacaaccgcgaacctactaacgcccttctctcctacctacccaaccccgaacgtcctataaacgcgcgccccccgcgcccgcactctaaaacctacgacgaccttcccgacctaataacctaataccaactctaaactacgaacgcttcgaattcgaaaaaccgtaaacccaaacgattccctaatataaacgaaatataaatcttaaaaaaaattctttacttaaactcttaccgtaccgcgacttccgaatttatacctatttttccaatttccctaactctaaatccaactccaaacccgcgaaaaccgacctaatcctacgcgaacgaaaaacaaccgcgccactcccaactaaaactctaacaaccgaacgcctcaaactcccgcgaacgccgaatatccaaaaaaccgcctccgatactaaaaccgccaaaaccg

SEQ ID NO: 2571 - DNA, 844 bp, Artificial Sequence
  chemically treated genomic DNA (Homo sapiens) CpG-island No: 2571
tcgttttcgtttttgttcggggtgggtagtttagttaggggggtttttatcggaagtttttttttttttagtagttacgatacgtatagtcgggttcggcggttgcggtttcggggatcgggtagtcgcgacggagggttcggcgggttgtgggtaggaagacggtagttatttttttttttaggtttcgcggtaatgaataatcgggtatttgtttggggcgagcggatagggcgttttcgacgcgcgtttcgtttttgtgggtcgcgcggttggacgaatgggaggaggggtttagcgggtttttggcgcggcgatttttcgggtgtttacgtagttattttgtcgttttttttcgcgtttttaaaatggtttttcgggttcgttgtgcggatcgaggggaaatagtcgcgggtttgttggcgttttttttttttgtttatttaatttcgggcgttttgtgggcgcgcgtttttcgcgttcgtattttggggtttgcgacgattttttcggtttgatggtttgatgttagttttgggttgcgggcgtttcgggttcggaaggtcgtaggtttaggcggttttttggtgtagacgaggtgtgaattttggaaaggattttttgtttaggtttttgtcgtatcgcggttttcgagtttgtgtttgtttttttagtttttttagttttggatttagttttaggttcgcgggggtcggtttgattttgcgcgggcgggaagtagtcgcgttatttttagttaaggttttagtaatcgagcgttttaggttttcgcgaacgtcgggtgtttaagaagtcgttttcggtgttagaatcgttagagtcg

SEQ ID NO: 2572 - DNA, 844 bp, Artificial Sequence
  chemically treated genomic DNA (Homo sapiens) CpG-island No: 2572
cgactctaacgattctaacaccgaaaacgacttcttaaacacccgacgttcgcgaaaacctaaaacgctcgattactaaaaccttaactaaaaataacgcgactacttcccgcccgcgcaaaatcaaaccgacccccgcgaacctaaaactaaatccaaaactaaaaaaactaaaaaaacaaacacaaactcgaaaaccgcgatacgacaaaaacctaaacaaaaaatcctttccaaaattcacacctcgtctacaccaaaaaaccgcctaaacctacgaccttccgaacccgaaacgcccgcaacccaaaactaacatcaaaccatcaaaccgaaaaaatcgtcgcaaaccccaaaatacgaacgcgaaaaacgcgcgcccacaaaacgcccgaaattaaataaacaaaaaaaaaaaacgccaacaaacccgcgactatttcccctcgatccgcacaacgaacccgaaaaaccattttaaaaacgcgaaaaaaaacgacaaaataactacgtaaacacccgaaaaatcgccgcgccaaaaacccgctaaacccctcctcccattcgtccaaccgcgcgacccacaaaaacgaaacgcgcgtcgaaaacgccctatccgctcgccccaaacaaatacccgattattcattaccgcgaaacctaaaaaaaaaaataactaccgtcttcctacccacaacccgccgaaccctccgtcgcgactacccgatccccgaaaccgcaaccgccgaacccgactatacgtatcgtaactactaaaaaaaaaaaaacttccgataaaaacccccctaactaaactacccaccccgaacaaaaacgaaaacga

SEQ ID NO: 2573 - DNA, 635 bp, Artificial Sequence
  chemically treated genomic DNA (Homo sapiens) CpG-island No: 2573
atcggcgcgggtttagcgtcgagaggtgttagcgttcggattcgaattcgtagggtgggtcgtcgtttttcgggatttatatttatattcggattacggtttattcggtcgagagcgttttgtaggaggagtcggcggttattttcgtgcgtttcgtcgttcgtttgcgttcggtagaggcgtcgcggtgcgttttgggattagtcgtcgttttgtttcgggtttcgttttttgattggagagggaggggtcgcgtcgtcgtttagcgattcggttttttcgtcgtcgatttcgtcggaaatttcggtttttacggtgtttttcggtttgttgttttttcgattttaggtttacggtacggcgttttttttcgcgcggtttacgtagtttcggggtagcgtgtggtttttattcggtcggttcgtttcgttggtagtcgtaatttttcgtttgtatttagttaggtttcgcggttattcgagaggtaagcgggagatttttagcgcgattaataggagggtcgttaatggagcggttcgttcgcggggggagaagggggatttttgggtgggttttttttgcggaacgcgcgaattaaaggttaattttttttttttaaggagtaggtggattgg

SEQ ID NO: 2574 - DNA, 635 bp, Artificial Sequence
  chemically treated genomic DNA (Homo sapiens) CpG-island No: 2574
ccaatccacctactccttaaaaaaaaaaaattaacctttaattcgcgcgttccgcaaaaaaaacccacccaaaaatcccccttctccccccgcgaacgaaccgctccattaacgaccctcctattaatcgcgctaaaaatctcccgcttacctctcgaataaccgcgaaacctaactaaatacaaacgaaaaattacgactaccaacgaaacgaaccgaccgaataaaaaccacacgctaccccgaaactacgtaaaccgcgcgaaaaaaaacgccgtaccgtaaacctaaaatcgaaaaaacaacaaaccgaaaaacaccgtaaaaaccgaaatttccgacgaaatcgacgacgaaaaaaccgaatcgctaaacgacgacgcgacccctccctctccaatcaaaaaacgaaacccgaaacaaaacgacgactaatcccaaaacgcaccgcgacgcctctaccgaacgcaaacgaacgacgaaacgcacgaaaataaccgccgactcctcctacaaaacgctctcgaccgaataaaccgtaatccgaatataaatataaatcccgaaaaacgacgacccaccctacgaattcgaatccgaacgctaacacctctcgacgctaaacccgcgccgat

SEQ ID NO: 2575 - DNA, 635 bp, Artificial Sequence
  chemically treated genomic DNA (Homo sapiens) CpG-island No: 2575
ttaatttatttgttttttgagaaggggaggttggtttttggttcgcgcgtttcgtagggagagtttatttagaagtttttttttttttttcgcgggcggatcgttttattggcggtttttttattggtcgcgttgggagtttttcgtttgtttttcgggtagtcgcgggatttagttgggtgtagacgggaagttgcggttgttagcgaagcggatcggtcgggtggaggttatacgttatttcgaggttgcgtaggtcgcgcgaagggggacgtcgtgtcgtgggtttggggtcgggggagtagtagatcgggaagtatcgtgaggatcgaggttttcggcggggtcggcggcggggaggtcgggtcgttgagcgacggcgcggtttttttttttttagttagggagcgaggttcggagtagggcggcggttagttttagggcgtatcgcggcgtttttgtcgggcgtaggcgggcggcggggcgtacgggggtggtcgtcgattttttttgtaggacgttttcggtcgggtgggtcgtggttcgggtgtgggtgtgggtttcgggggacggcggtttattttgcgggttcgaattcgggcgttggtatttttcgacgttaggttcgcgtcggt

SEQ ID NO: 2576 - DNA, 635 bp, Artificial Sequence
  chemically treated genomic DNA (Homo sapiens) CpG-island No: 2576
accgacgcgaacctaacgtcgaaaaataccaacgcccgaattcgaacccgcaaaataaaccgccgtcccccgaaacccacacccacacccgaaccacgacccacccgaccgaaaacgtcctacaaaaaaaatcgacgaccacccccgtacgccccgccgcccgcctacgcccgacaaaaacgccgcgatacgccctaaaactaaccgccgccctactccgaacctcgctccctaactaaaaaaaaaaaaaccgcgccgtcgctcaacgacccgacctccccgccgccgaccccgccgaaaacctcgatcctcacgatacttcccgatctactactcccccgaccccaaacccacgacacgacgtcccccttcgcgcgacctacgcaacctcgaaataacgtataacctccacccgaccgatccgcttcgctaacaaccgcaacttcccgtctacacccaactaaatcccgcgactacccgaaaaacaaacgaaaaactcccaacgcgaccaataaaaaaaccgccaataaaacgatccgcccgcgaaaaaaaaaaaaaaacttctaaataaactctccctacgaaacgcgcgaaccaaaaaccaacctccccttctcaaaaaacaaataaattaa

SEQ ID NO: 2577 - DNA, 616 bp, Artificial Sequence
  chemically treated genomic DNA (Homo sapiens) CpG-island No: 2577
tcgggcgtcggtttaatgaatttttttgtagaaattttagcggttagttacggttttttcgtttatggttggtcggggattagtcggttttagttacgttcgcgtttagatataaagtatttttaaaaggagttcgtgtattttgcgttttgtcggttcgataattcgtagatttttcgaaagttatagcgcgtatatatatttgtaggttttttttggtcgtttttgttagatttttagcgtggcggggtacgcgttttagggaggatagtttcgcggttttatgcgattgtttcgcgagttcgggcgggttatcggttagcggcgttgggttacggagcgcgtcggggttttagttcgttcgcggcgtatcgcgcgtttttttttttttcgtcggggttttttcgaggagtttatatttatttgatattagtatcgattaaagtacgtggcgtagcgttagatagcggattttagcggtttagagcgcgttttaggtgttgtcgttcggttaggacggcgcgttcgagtttagtatattttttttttcgtagaggatgttgtaagtgggaggggtagagaggttgaggagggggagggaaacgggcggaggggt

SEQ ID NO: 2578 - DNA, 616 bp, Artificial Sequence
  chemically treated genomic DNA (Homo sapiens) CpG-island No: 2578
acccctccgcccgtttccctccccctcctcaacctctctacccctcccacttacaacatcctctacgaaaaaaaaaatatactaaactcgaacgcgccgtcctaaccgaacgacaacacctaaaacgcgctctaaaccgctaaaatccgctatctaacgctacgccacgtactttaatcgatactaatatcaaataaatataaactcctcgaaaaaaccccgacgaaaaaaaaaaaaacgcgcgatacgccgcgaacgaactaaaaccccgacgcgctccgtaacccaacgccgctaaccgataacccgcccgaactcgcgaaacaatcgcataaaaccgcgaaactatcctccctaaaacgcgtaccccgccacgctaaaaatctaacaaaaacgaccaaaaaaaacctacaaatatatatacgcgctataactttcgaaaaatctacgaattatcgaaccgacaaaacgcaaaatacacgaactccttttaaaaatactttatatctaaacgcgaacgtaactaaaaccgactaatccccgaccaaccataaacgaaaaaaccgtaactaaccgctaaaatttctacaaaaaaattcattaaaccgacgcccga

SEQ ID NO: 2579 - DNA, 616 bp, Artificial Sequence
  chemically treated genomic DNA (Homo sapiens) CpG-island No: 2579
gttttttcgttcgtttttttttttttttttagtttttttattttttttatttgtagtattttttacgaggaaaggaatgtgttgggttcggacgcgtcgttttggtcgaacggtagtatttggggcgcgttttggatcgttggggttcgttgtttggcgttgcgttacgtgttttgatcggtgttgatgttaagtgggtgtgggtttttcggaaaggtttcggcgaggaggaggagggcgcgcgatgcgtcgcgggcgagttgaggtttcggcgcgtttcgtagtttagcgtcgttgatcgatggttcgttcgggttcgcgaagtagtcgtatggagtcgcggagttgttttttttgggacgcgtgtttcgttacgttgggggtttggtaggggcgattaaggggggtttgtaggtgtgtgtgcgcgttgtaattttcggggggtttgcgggttgtcgagtcgatagggcgtagggtgtacgggttttttttgggggtgttttgtgtttgggcgcgggcgtgattggagtcggttagttttcggttagttatgagcgagggagtcgtagttggtcgttggagtttttgtaagagaatttattgagtcggcgttcgg

SEQ ID NO: 2580 - DNA, 616 bp, Artificial Sequence
  chemically treated genomic DNA (Homo sapiens) CpG-island No: 2580
ccgaacgccgactcaataaattctcttacaaaaactccaacgaccaactacgactccctcgctcataactaaccgaaaactaaccgactccaatcacgcccgcgcccaaacacaaaacacccccaaaaaaaacccgtacaccctacgccctatcgactcgacaacccgcaaaccccccgaaaattacaacgcgcacacacacctacaaaccccccttaatcgcccctaccaaacccccaacgtaacgaaacacgcgtcccaaaaaaaacaactccgcgactccatacgactacttcgcgaacccgaacgaaccatcgatcaacgacgctaaactacgaaacgcgccgaaacctcaactcgcccgcgacgcatcgcgcgccctcctcctcctcgccgaaacctttccgaaaaacccacacccacttaacatcaacaccgatcaaaacacgtaacgcaacgccaaacaacgaaccccaacgatccaaaacgcgccccaaatactaccgttcgaccaaaacgacgcgtccgaacccaacacattcctttcctcgtaaaaaatactacaaataaaaaaaataaaaaaactaaaaaaaaaaaaaaaaacgaacgaaaaaac

SEQ ID NO: 2581 - DNA, 780 bp, Artificial Sequence
  chemically treated genomic DNA (Homo sapiens) CpG-island No: 2581
cgttttttgttaaaaattataaaaattaaaatagtggtaaaggtcgaagatgtcgcgagtgttgggttggggatcgggattcggtattttttgggcgttttcgtttagggggttattattcggatttttcggtagagatggggaaattgaggtttggagcggtttagtcgcggagtcgggtatgttggggtttggttttgggttcgttacgtttcgtttacgtcgggacgcgtcgtttcgtttttcggttttagtttttttttttgttatcgggaataataagggatttgggttcggttcggttcggttttcggaaacgcgtataaatacggaacgtagcggcgcggggttgggtcgaggcgggagcgcggatggggtcgcgggtcggcgtttttattagtttttgattagttttcggtagcgtgggtttaggaatcgggttattatcgcggcggagtcgtatttttaggatgattttgtttagttgattcggttatattgcgtaggcgcggtcgcggcgcgtacgcgcgcggggagggcggggggggggggaggaaaaaaaaatattattcgttattgtgcgcgtagattcggaagttatttatagtaattttcggcgagggttggacgatcgcggagaagtggttcggagtgggcggcgttagggcggtgttttttggttacgtggtttggcggtcgattgtgtttttgggtttcgcggggttatttgttagtgattttgtgcgtttagtatgtgttagaacgttatttataatgaag

SEQ ID NO: 2582 - DNA, 780 bp, Artificial Sequence
  chemically treated genomic DNA (Homo sapiens) CpG-island No: 2582
cttcattataaataacgttctaacacatactaaacgcacaaaatcactaacaaataaccccgcgaaacccaaaaacacaatcgaccgccaaaccacgtaaccaaaaaacaccgccctaacgccgcccactccgaaccacttctccgcgatcgtccaaccctcgccgaaaattactataaataacttccgaatctacgcgcacaataacgaataatatttttttttcctccccccccccccgccctccccgcgcgcgtacgcgccgcgaccgcgcctacgcaatataaccgaatcaactaaacaaaatcatcctaaaaatacgactccgccgcgataataacccgattcctaaacccacgctaccgaaaactaatcaaaaactaataaaaacgccgacccgcgaccccatccgcgctcccgcctcgacccaaccccgcgccgctacgttccgtatttatacgcgtttccgaaaaccgaaccgaaccgaacccaaatcccttattattcccgataacaaaaaaaaaaactaaaaccgaaaaacgaaacgacgcgtcccgacgtaaacgaaacgtaacgaacccaaaaccaaaccccaacatacccgactccgcgactaaaccgctccaaacctcaatttccccatctctaccgaaaaatccgaataataaccccctaaacgaaaacgcccaaaaaataccgaatcccgatccccaacccaacactcgcgacatcttcgacctttaccactattttaatttttataatttttaacaaaaaacg

SEQ ID NO: 2583 - DNA, 780 bp, Artificial Sequence
  chemically treated genomic DNA (Homo sapiens) CpG-island No: 2583
ttttattgtaaataacgttttggtatatattaggcgtataaaattattggtaggtagtttcgcggagtttagaagtataatcggtcgttagattacgtggttagaaagtatcgttttaacgtcgtttatttcggattattttttcgcggtcgtttaattttcgtcggaagttattgtaagtggttttcgggtttgcgcgtatagtggcggatgatgtttttttttttttttttttttttcgtttttttcgcgcgcgtgcgcgtcgcggtcgcgtttgcgtagtgtagtcgggttagttggatagggttattttgagggtgcgatttcgtcgcgatggtgattcggtttttgggtttacgttatcgggagttggttaagaattggtgaggacgtcgattcgcggttttattcgcgttttcgtttcggtttagtttcgcgtcgttgcgtttcgtatttgtgcgcgttttcgggggtcgggtcgggtcgggtttaggttttttgttgttttcggtgatagagggggaaattgaggtcgagaggcggagcggcgcgtttcggcgtgaacgggacgtgacggatttaaggttaaattttagtatgttcggtttcgcggttaggtcgttttaagttttagtttttttatttttatcgggggattcgaatggtgattttttggacggaagcgtttagaaggtgtcgagtttcgatttttagtttagtattcgcggtattttcggtttttgttattattttggtttttatgatttttaataaggagcg

SEQ ID NO: 2584 - DNA, 780 bp, Artificial Sequence
  chemically treated genomic DNA (Homo sapiens) CpG-island No: 2584
cgctccttattaaaaatcataaaaaccaaaataataacaaaaaccgaaaataccgcgaatactaaactaaaaatcgaaactcgacaccttctaaacgcttccgtccaaaaaatcaccattcgaatcccccgataaaaataaaaaaactaaaacttaaaacgacctaaccgcgaaaccgaacatactaaaatttaaccttaaatccgtcacgtcccgttcacgccgaaacgcgccgctccgcctctcgacctcaatttccccctctatcaccgaaaacaacaaaaaacctaaacccgacccgacccgacccccgaaaacgcgcacaaatacgaaacgcaacgacgcgaaactaaaccgaaacgaaaacgcgaataaaaccgcgaatcgacgtcctcaccaattcttaaccaactcccgataacgtaaacccaaaaaccgaatcaccatcgcgacgaaatcgcaccctcaaaataaccctatccaactaacccgactacactacgcaaacgcgaccgcgacgcgcacgcgcgcgaaaaaaacgaaaaaaaaaaaaaaaaaaaaaaacatcatccgccactatacgcgcaaacccgaaaaccacttacaataacttccgacgaaaattaaacgaccgcgaaaaaataatccgaaataaacgacgttaaaacgatactttctaaccacgtaatctaacgaccgattatacttctaaactccgcgaaactacctaccaataattttatacgcctaatatataccaaaacgttatttacaataaaa

SEQ ID NO: 2585 - DNA, 515 bp, Artificial Sequence
  chemically treated genomic DNA (Homo sapiens) CpG-island No: 2585
tgttttcgaggtttttttaataaacgcgtattttagtttcgattcggtatagaacgattcggggaattatcgtcgaggtcgagtcgagacgagcgatattattataagtaatttattttttatttcgggttttataaaggggacgaatttttttggttagttcggagtcgcgtatgcgtaagaaggagcggagttaggcgtgttgtttttatttcgttcggaattataatttttagaagcgttttggtatcgttagatttcggtttttcgtaggtgggagtattcgtggtgcggttgggagaatcggacgatcgaagagtttcgttcgtttcgcgagagtatgaggtagtattttttgtgtttaatttttagagtaagggagggagggagtagcggagacgcggatcggagttagggttcgttttcgcgttttgtttgtataagtttttgcggtatagtgtttagggttgttgagtttaatttaaattatttcggtgtaagatacgttaaaatat

SEQ ID NO: 2586 - DNA, 515 bp, Artificial Sequence
  chemically treated genomic DNA (Homo sapiens) CpG-island No: 2586
atattttaacgtatcttacaccgaaataatttaaattaaactcaacaaccctaaacactataccgcaaaaacttatacaaacaaaacgcgaaaacgaaccctaactccgatccgcgtctccgctactccctccctcccttactctaaaaattaaacacaaaaaatactacctcatactctcgcgaaacgaacgaaactcttcgatcgtccgattctcccaaccgcaccacgaatactcccacctacgaaaaaccgaaatctaacgataccaaaacgcttctaaaaattataattccgaacgaaataaaaacaacacgcctaactccgctccttcttacgcatacgcgactccgaactaaccaaaaaaattcgtcccctttataaaacccgaaataaaaaataaattacttataataatatcgctcgtctcgactcgacctcgacgataattccccgaatcgttctataccgaatcgaaactaaaatacgcgtttattaaaaaaacctcgaaaaca

SEQ ID NO: 2587 - DNA, 515 bp, Artificial Sequence
  chemically treated genomic DNA (Homo sapiens) CpG-island No: 2587
gtattttaacgtattttatatcggagtaatttgggttgaatttagtagttttaagtattgtgtcgtaggaatttgtgtagataaagcgcggggacggattttgatttcggttcgcgttttcgttgtttttttttttttttgttttgaggattagatataggagatgttgttttatattttcgcgagacggacggagtttttcgatcgttcgatttttttagtcgtattacgggtgtttttatttgcggagaatcggagtttggcgatgttaaggcgtttttgggaattgtagtttcgggcgggatgagggtagtacgtttggtttcgtttttttttacgtatgcgcgatttcgagttggttaaagaagttcgttttttttgtgaggttcgggatgggaggtgagttgtttgtggtgatgtcgttcgtttcggttcggtttcggcggtggtttttcgggtcgttttgtgtcgagtcggggttagagtgcgcgtttgttaaaggggtttcgagggta

SEQ ID NO: 2588 - DNA, 515 bp, Artificial Sequence
  chemically treated genomic DNA (Homo sapiens) CpG-island No: 2588
taccctcgaaacccctttaacaaacgcgcactctaaccccgactcgacacaaaacgacccgaaaaaccaccgccgaaaccgaaccgaaacgaacgacatcaccacaaacaactcacctcccatcccgaacctcacaaaaaaaacgaacttctttaaccaactcgaaatcgcgcatacgtaaaaaaaaacgaaaccaaacgtactaccctcatcccgcccgaaactacaattcccaaaaacgccttaacatcgccaaactccgattctccgcaaataaaaacacccgtaatacgactaaaaaaatcgaacgatcgaaaaactccgtccgtctcgcgaaaatataaaacaacatctcctatatctaatcctcaaaacaaaaaaaaaaaaaaacaacgaaaacgcgaaccgaaatcaaaatccgtccccgcgctttatctacacaaattcctacgacacaatacttaaaactactaaattcaacccaaattactccgatataaaatacgttaaaatac

SEQ ID NO: 2589 - DNA, 743 bp, Artificial Sequence
  chemically treated genomic DNA (Homo sapiens) CpG-island No: 2589
cgttttttcgtcgttttatttagttttgtttcgtttcggatatttcgcggtttcgtttttgtgcgcgttggttggttttcgtaggtatgatgaaatttttcgtacgcgttataggagttaggtcggtataagcgttagcggtttcgtcgttcgttaagttgtttatatttttggttttagttcgttatattattttgatttgtttacgtttaggtgagtcgggttttgcgtttcgtgttttgcgtttcgcgttagtatttttttcgcgtgttttggggttgtttcggaaggaaggggtggaggatgcggtttttagtttggtattcggtagacgcggttcgcgggcgtttgttgatgttgcggtttttgcggtagggagggcggggcggacgtttagcgattgttacgtatttgatagttagcggaaggatttttttgttttggttttttgaagtatcgagagggaatcgcggtcggtaggtcggatcgtttcggagaggaggtagcggtagtttgagtttttgtaaatgttatatgtgtatttttttttattatgtggcgtcgaagtttgtggatattttcgcggttcgggtttttgcggcggacgggtcggatcgtgttcgtggttagggcgtagttaggtgtcgcgtggttttgatttaggaagagattgcggttttattatcgtttcggtgtttgtttttatttttaattgtttttttttttatttggatcgtttattt

SEQ ID NO: 2590 - DNA, 743 bp, Artificial Sequence
  chemically treated genomic DNA (Homo sapiens) CpG-island No: 2590
aaataaacgatccaaataaaaaaaaaaacaattaaaaataaaaacaaacaccgaaacgataataaaaccgcaatctcttcctaaatcaaaaccacgcgacacctaactacgccctaaccacgaacacgatccgacccgtccgccgcaaaaacccgaaccgcgaaaatatccacaaacttcgacgccacataataaaaaaaaatacacatataacatttacaaaaactcaaactaccgctacctcctctccgaaacgatccgacctaccgaccgcgattccctctcgatacttcaaaaaaccaaaacaaaaaaatccttccgctaactatcaaatacgtaacaatcgctaaacgtccgccccgccctccctaccgcaaaaaccgcaacatcaacaaacgcccgcgaaccgcgtctaccgaataccaaactaaaaaccgcatcctccaccccttccttccgaaacaaccccaaaacacgcgaaaaaaatactaacgcgaaacgcaaaacacgaaacgcaaaacccgactcacctaaacgtaaacaaatcaaaataatataacgaactaaaaccaaaaatataaacaacttaacgaacgacgaaaccgctaacgcttataccgacctaactcctataacgcgtacgaaaaatttcatcatacctacgaaaaccaaccaacgcgcacaaaaacgaaaccgcgaaatatccgaaacgaaacaaaactaaataaaacgacgaaaaaacg

SEQ ID NO: 2591 - DNA, 743 bp, Artificial Sequence
  chemically treated genomic DNA (Homo sapiens) CpG-island No: 2591
gggtgagcggtttaggtgaggaggggggtagttgaaggtgaaagtagatatcgagacggtgataaggtcgtagtttttttttagattaggattacgcgatatttgattgcgttttggttacgagtacgattcgattcgttcgtcgtagggattcggatcgcgaaaatgtttataggtttcgacgttatatagtaaaaaaaagtatatatataatatttataggggtttaaattgtcgttgtttttttttcggagcggttcggtttgtcggtcgcggttttttttcgatgttttagggaattaggatagaaaggttttttcgttagttgttaggtgcgtaataatcgttaggcgttcgtttcgttttttttatcgtaggagtcgtagtattagtaggcgttcgcgaatcgcgtttgtcgggtgttaggttgaagatcgtattttttatttttttttttcggagtagttttagggtacgcgaggaggatgttggcgcggggcgtagggtacggggcgtaggattcggtttatttgggcgtaagtaggttagggtgatgtggcgggttgaggttagggatgtggatagtttgacgggcggcgaggtcgttggcgtttatatcgatttggtttttgtaacgcgtgcgggaagttttattatgtttgcgaggattaattagcgcgtataggggcggggtcgcggggtgttcggggcggagtaggattaagtggggcggcggaagggcg

SEQ ID NO: 2592 - DNA, 743 bp, Artificial Sequence
  chemically treated genomic DNA (Homo sapiens) CpG-island No: 2592
cgcccttccgccgccccacttaatcctactccgccccgaacaccccgcgaccccgcccctatacgcgctaattaatcctcgcaaacataataaaacttcccgcacgcgttacaaaaaccaaatcgatataaacgccaacgacctcgccgcccgtcaaactatccacatccctaacctcaacccgccacatcaccctaacctacttacgcccaaataaaccgaatcctacgccccgtaccctacgccccgcgccaacatcctcctcgcgtaccctaaaactactccgaaaaaaaaaaataaaaaatacgatcttcaacctaacacccgacaaacgcgattcgcgaacgcctactaatactacgactcctacgataaaaaaaacgaaacgaacgcctaacgattattacgcacctaacaactaacgaaaaaacctttctatcctaattccctaaaacatcgaaaaaaaaccgcgaccgacaaaccgaaccgctccgaaaaaaaaacaacgacaatttaaacccctataaatattatatatatacttttttttactatataacgtcgaaacctataaacattttcgcgatccgaatccctacgacgaacgaatcgaatcgtactcgtaaccaaaacgcaatcaaatatcgcgtaatcctaatctaaaaaaaaactacgaccttatcaccgtctcgatatctactttcaccttcaactacccccctcctcacctaaaccgctcaccc

SEQ ID NO: 2593 - DNA, 910 bp, Artificial Sequence
  chemically treated genomic DNA (Homo sapiens) CpG-island No: 2593
gttagggttcgttttttttgagaattcggttttttcgtcgtttaagtttatttttttcgggtatttatttggtcgtttttgtcgttcgttttcgtttttttcggatatttatttgatcgtttttgtcgttcgttttcgtttttttcggtatttaattggtcgtttcggtcgttttagtcgtcgtatcgtttcgtagtcgtcgcggagggatacggtcgcgggaacgttttatacgtatgttcgatcgtattcgcggatcggatttattttttttaaagggttcggggtttcgcgtagaagcggcgtgtaggggttttttagattcggtttcgcgggttttaaggggttcgggcggcgaaggcgtacggagttaagtttcgggtagtagttttgggatgttttgagtcgggtcgggcggaggttttcgttgtttagtaatcggggtcgcggtttgtgggcggagtttgtatcgtggttgcgatacggggcggggttttagcgggagtcggtcgaggagcgggtatcggttattggtataggtacgggttattggcgtatgcgtagggcgcggttttggggcggggtttatttagtggcggagttttttgaggggcgggtcgtgggcggggtttggaggcggagtcggcgtcgttagtagtcggttgaggacggaggcggggttgggtttgggatggggcggggtttgcgttggtggggcgggcgggggaggagatacggttaagcgttcgagtgggggtcgttggttggtgcgcggttgaagggtgtggcgcgagtagcgtcgttggttggtcggcggcgggtcgggacgggtatggttttgttgttgtgtttggtgtgtttgacggcggcgttggtttacggttgtttgtattgttatagtaattttttt

SEQ ID NO: 2594 - DNA, 910 bp, Artificial Sequence
  chemically treated genomic DNA (Homo sapiens) CpG-island No: 2594
aaaaaaattactataacaatacaaacaaccgtaaaccaacgccgccgtcaaacacaccaaacacaacaacaaaaccatacccgtcccgacccgccgccgaccaaccaacgacgctactcgcgccacacccttcaaccgcgcaccaaccaacgacccccactcgaacgcttaaccgtatctcctcccccgcccgccccaccaacgcaaaccccgccccatcccaaacccaaccccgcctccgtcctcaaccgactactaacgacgccgactccgcctccaaaccccgcccacgacccgcccctcaaaaaactccgccactaaataaaccccgccccaaaaccgcgccctacgcatacgccaataacccgtacctataccaataaccgatacccgctcctcgaccgactcccgctaaaaccccgccccgtatcgcaaccacgatacaaactccgcccacaaaccgcgaccccgattactaaacaacgaaaacctccgcccgacccgactcaaaacatcccaaaactactacccgaaacttaactccgtacgccttcgccgcccgaaccccttaaaacccgcgaaaccgaatctaaaaaacccctacacgccgcttctacgcgaaaccccgaaccctttaaaaaaaataaatccgatccgcgaatacgatcgaacatacgtataaaacgttcccgcgaccgtatccctccgcgacgactacgaaacgatacgacgactaaaacgaccgaaacgaccaattaaataccgaaaaaaacgaaaacgaacgacaaaaacgatcaaataaatatccgaaaaaaacgaaaacgaacgacaaaaacgaccaaataaatacccgaaaaaaataaacttaaacgacgaaaaaaccgaattctcaaaaaaaacgaaccctaac

SEQ ID NO: 2595 - DNA, 910 bp, Artificial Sequence
  chemically treated genomic DNA (Homo sapiens) CpG-island No: 2595
ggagaagttgttgtggtagtgtagatagtcgtgggttagcgtcgtcgttaggtatattaggtatagtagtagggttatgttcgtttcggttcgtcgtcggttaattaacgacgttgttcgcgttatattttttagtcgcgtattaattaacggtttttattcgggcgtttggtcgtgttttttttttcgttcgttttattagcgtaggtttcgttttattttaggtttagtttcgttttcgtttttagtcgattattgacggcgtcggtttcgtttttaggtttcgtttacgattcgttttttagaagatttcgttattgggtgggtttcgttttaaggtcgcgttttacgtatgcgttaatggttcgtgtttgtgttaatggtcggtgttcgtttttcggtcggttttcgttgaggtttcgtttcgtgtcgtagttacggtgtaggtttcgtttataggtcgcggtttcggttgttaggtaacggagattttcgttcggttcggtttagggtattttagggttgttgttcggaatttggtttcgtgcgttttcgtcgttcgggttttttaaagttcgcgggatcgagtttgggagatttttgtacgtcgtttttgcgcggagtttcgggttttttaaggaaagtaggttcggttcgcgggtgcggtcgggtatgcgtgtggggcgttttcgcggtcgtgttttttcgcggcggttgcgaggcggtgcggcggttgaggcggtcgaggcggttagttgggtatcgggaggggcgaaggcgggcggtagaggcgattaggtgggtgttcgggaggggcgaaggcgggcggtagaggcggttaggtgggtgttcgggaggggtgaatttaggcggcgaggagatcgagtttttaggaagggcgaattttggt

SEQ ID NO: 2596 - DNA, 910 bp, Artificial Sequence
  chemically treated genomic DNA (Homo sapiens) CpG-island No: 2596
accaaaattcgcccttcctaaaaactcgatctcctcgccgcctaaattcacccctcccgaacacccacctaaccgcctctaccgcccgccttcgcccctcccgaacacccacctaatcgcctctaccgcccgccttcgcccctcccgatacccaactaaccgcctcgaccgcctcaaccgccgcaccgcctcgcaaccgccgcgaaaaaacacgaccgcgaaaacgccccacacgcatacccgaccgcacccgcgaaccgaacctactttccttaaaaaacccgaaactccgcgcaaaaacgacgtacaaaaatctcccaaactcgatcccgcgaactttaaaaaacccgaacgacgaaaacgcacgaaaccaaattccgaacaacaaccctaaaataccctaaaccgaaccgaacgaaaatctccgttacctaacaaccgaaaccgcgacctataaacgaaacctacaccgtaactacgacacgaaacgaaacctcaacgaaaaccgaccgaaaaacgaacaccgaccattaacacaaacacgaaccattaacgcatacgtaaaacgcgaccttaaaacgaaacccacccaataacgaaatcttctaaaaaacgaatcgtaaacgaaacctaaaaacgaaaccgacgccgtcaataatcgactaaaaacgaaaacgaaactaaacctaaaataaaacgaaacctacgctaataaaacgaacgaaaaaaaaaacacgaccaaacgcccgaataaaaaccgttaattaatacgcgactaaaaaatataacgcgaacaacgtcgttaattaaccgacgacgaaccgaaacgaacataaccctactactatacctaatatacctaacgacgacgctaacccacgactatctacactaccacaacaacttctcc

SEQ ID NO: 2597 - DNA, 545 bp, Artificial Sequence
  chemically treated genomic DNA (Homo sapiens) CpG-island No: 2597
tacgtgcgtatttcgatgattttttcgtttcgggtgatttgggggtgtacggcgtaatacgattacggaggtcgaaagcgtagcggaatttttcggttttaggtttcggttttcgtatgcgtttcgagtcgttttgggcggcggtttcgggaattcggagcgttaaggagaacggattttagaggttgtttgaaggtcgaggttaagatggcggtgttgttaggtgagcgcggtatcggcggcgggtgtggggtcgcgcgggtttggggtcgtgggagtttcgggtgtcgtggtggcgtcgggggtcggtgtcggcgtcgtggtcgcggtttttttcgggttttttcgagtcggtcgtttttcgggtttttcgttcggtttgcgatgaacggtcgtcgttattgcgtttagagtatagtcggggaaatcgaggttcggtaggttatgacgtaagtttttagttttaggaaggcgttcggggtggaggttggaggggttttatttacgttttcgagattagggtacggttcgcgaggttgtttttg

SEQ ID NO: 2598 - DNA, 545 bp, Artificial Sequence
  chemically treated genomic DNA (Homo sapiens) CpG-island No: 2598
caaaaacaacctcgcgaaccgtaccctaatctcgaaaacgtaaataaaacccctccaacctccaccccgaacgccttcctaaaactaaaaacttacgtcataacctaccgaacctcgatttccccgactatactctaaacgcaataacgacgaccgttcatcgcaaaccgaacgaaaaacccgaaaaacgaccgactcgaaaaaacccgaaaaaaaccgcgaccacgacgccgacaccgacccccgacgccaccacgacacccgaaactcccacgaccccaaacccgcgcgaccccacacccgccgccgataccgcgctcacctaacaacaccgccatcttaacctcgaccttcaaacaacctctaaaatccgttctccttaacgctccgaattcccgaaaccgccgcccaaaacgactcgaaacgcatacgaaaaccgaaacctaaaaccgaaaaattccgctacgctttcgacctccgtaatcgtattacgccgtacacccccaaatcacccgaaacgaaaaaatcatcgaaatacgcacgta

SEQ ID NO: 2599 - DNA, 545 bp, Artificial Sequence
  chemically treated genomic DNA (Homo sapiens) CpG-island No: 2599
taagagtagtttcgcgggtcgtgttttggtttcggggacgtgaatggggtttttttagtttttatttcgagcgtttttttgaggttggaggtttgcgttatgatttatcgggtttcggttttttcgattgtattttggacgtaataacggcgatcgtttatcgtaagtcgggcggggagttcgaggagcggtcggttcggagaagttcggagaggatcgcggttacgacgtcggtatcgattttcgacgttattacgatattcgaggtttttacggttttagattcgcgcggttttatattcgtcgtcggtgtcgcgtttatttgatagtatcgttattttggtttcggtttttagataatttttgaggttcgttttttttagcgtttcgggttttcggggtcgtcgtttaaagcggttcggagcgtatgcggaaatcggaatttggagtcgggaggtttcgttgcgttttcggttttcgtggtcgtgttgcgtcgtgtatttttagattattcgaggcggaaaggttatcggagtgcgtacgtg

SEQ ID NO: 2600 - DNA, 545 bp, Artificial Sequence
  chemically treated genomic DNA (Homo sapiens) CpG-island No: 2600
cacgtacgcactccgataacctttccgcctcgaataatctaaaaatacacgacgcaacacgaccacgaaaaccgaaaacgcaacgaaacctcccgactccaaattccgatttccgcatacgctccgaaccgctttaaacgacgaccccgaaaacccgaaacgctaaaaaaaacgaacctcaaaaattatctaaaaaccgaaaccaaaataacgatactatcaaataaacgcgacaccgacgacgaatataaaaccgcgcgaatctaaaaccgtaaaaacctcgaatatcgtaataacgtcgaaaatcgataccgacgtcgtaaccgcgatcctctccgaacttctccgaaccgaccgctcctcgaactccccgcccgacttacgataaacgatcgccgttattacgtccaaaatacaatcgaaaaaaccgaaacccgataaatcataacgcaaacctccaacctcaaaaaaacgctcgaaataaaaactaaaaaaaccccattcacgtccccgaaaccaaaacacgacccgcgaaactactctta

SEQ ID NO: 2601 - DNA, 560 bp, Artificial Sequence
  chemically treated genomic DNA (Homo sapiens) CpG-island No: 2601
ggcggcggcggttagcgcgtgtatatagggggttttttagcgttttattatcggtttgtttaggatgcgtaggtgcgtgttcgttgcgtcgtaggtcgcgggcgtcgttttttacgcggggttgtagttttcgtcgggcgcgaagatgggggtcgcgttgggggcgtttatgttgtaggttggacggcgattcgatttcgatcgcgcgtcgttcgggttcgttttttgtaggggtttgtgggtcgggggcgggtttaataggttcggggggcggattcgcgagaggacgcgcgcgcgcggtttcgggagcggtttttagcggcggttacgcgagaggtggcgggagtggggtcggggtttcggtcgttttttttttaaggagtttcggtgttttttttgcggagcgggtatcgtagtttcgcgttcggggacgcgaatttgtaggttggggattggaattttcgttttgtcgtttacgcgttatagattttttatttgttagtatcgtagaaaggtttttttttcgttggggtgtgagaatttgaggattttttaggcgt

SEQ ID NO: 2602 - DNA, 560 bp, Artificial Sequence
  chemically treated genomic DNA (Homo sapiens) CpG-island No: 2602
acgcctaaaaaatcctcaaattctcacaccccaacgaaaaaaaaacctttctacgatactaacaaataaaaaatctataacgcgtaaacgacaaaacgaaaattccaatccccaacctacaaattcgcgtccccgaacgcgaaactacgatacccgctccgcaaaaaaaacaccgaaactccttaaaaaaaaaacgaccgaaaccccgaccccactcccgccacctctcgcgtaaccgccgctaaaaaccgctcccgaaaccgcgcgcgcgcgtcctctcgcgaatccgccccccgaacctattaaacccgcccccgacccacaaacccctacaaaaaacgaacccgaacgacgcgcgatcgaaatcgaatcgccgtccaacctacaacataaacgcccccaacgcgacccccatcttcgcgcccgacgaaaactacaaccccgcgtaaaaaacgacgcccgcgacctacgacgcaacgaacacgcacctacgcatcctaaacaaaccgataataaaacgctaaaaaaccccctatatacacgcgctaaccgccgccgcc

SEQ ID NO: 2603 - DNA, 560 bp, Artificial Sequence
  chemically treated genomic DNA (Homo sapiens) CpG-island No: 2603
gcgtttggaagatttttagatttttatattttagcgaggagggggtttttttgcggtgttgatagatgaggaatttatggcgcgtaagcggtaaggcggggattttagtttttagtttgtaggttcgcgttttcgggcgcggggttgcggtgttcgtttcgtagagggggtatcgaggttttttggggagggggcggtcggggtttcgattttattttcgttatttttcgcgtggtcgtcgttagaggtcgttttcggagtcgcgcgcgcgcgttttttcgcgggttcgtttttcgggtttgttggattcgttttcggtttataagtttttgtagggagcgggttcgggcggcgcgcgatcgaggtcgggtcgtcgtttagtttgtagtatgagcgtttttagcgcgatttttattttcgcgttcggcgagaattgtagtttcgcgtggggggcggcgttcgcggtttacgacgtagcggatacgtatttgcgtattttgggtaagtcggtgatggagcgttgggagattttttatatgtacgcgttggtcgtcgtcgtt

SEQ ID NO: 2604 - DNA, 560 bp, Artificial Sequence
  chemically treated genomic DNA (Homo sapiens) CpG-island No: 2604
aacgacgacgaccaacgcgtacatataaaaaatctcccaacgctccatcaccgacttacccaaaatacgcaaatacgtatccgctacgtcgtaaaccgcgaacgccgccccccacgcgaaactacaattctcgccgaacgcgaaaataaaaatcgcgctaaaaacgctcatactacaaactaaacgacgacccgacctcgatcgcgcgccgcccgaacccgctccctacaaaaacttataaaccgaaaacgaatccaacaaacccgaaaaacgaacccgcgaaaaaacgcgcgcgcgcgactccgaaaacgacctctaacgacgaccacgcgaaaaataacgaaaataaaatcgaaaccccgaccgccccctccccaaaaaacctcgataccccctctacgaaacgaacaccgcaaccccgcgcccgaaaacgcgaacctacaaactaaaaactaaaatccccgccttaccgcttacgcgccataaattcctcatctatcaacaccgcaaaaaaaccccctcctcgctaaaatataaaaatctaaaaatcttccaaacgc

SEQ ID NO: 2605 - DNA, 893 bp, Artificial Sequence
  chemically treated genomic DNA (Homo sapiens) CpG-island No: 2605
gtgcgggcgggtatatttttatttttcgtagcgttttacgcggttttatcgttttcgagtgaagagttaaagaggaagcggtagtcgcgtttgcgtttatagtgtttagttcggagcgtcggtttcgtaagcgcgtacgcgtacgtaagttcgtacgcgcgcgtacgtacgtacgtggttcggttcgcgcgtattttttttttgtaggggcggggttagcgtagggattttattttttagcgtgtttcgcggtaacgttaggagttttcgaggagaaaggaaaacgcgcgacggtttcgattgcggcggcgcgaaattcgttttagggacgtacgtatagacggagtatttttggattcgttttcggagatttcgtgcgggagcgcgttcgggcgtgcgtaggggcggcggcgcggcggcgcggggacgcgcggtgatcgttggcgtcgaggggaggaggtagtcgtcgtcgtcgtcgtcgtcgtcgtcgtcgtcgtcgtcgtcgttgcgtagattcgggtcgcggttgtggggagggcgacggagcgggtgatttttcggaggcgggagcgagcgaggaggttcgggagcgtcgagcgtcgtcgtcgtcgtcgttatgaataattcgggcgtcgacgagatcgggtgaggacgagcggcgcgggtttgcgttttcgtttcgagttcggttcgtcgtttttcgtcgttcggttttagacgtcgtttttcggggtcgtttcgttaaggttacgtcggtcgggggcggattcgggattcggattcgtcgcggtttcgcgtcgggggttttggacgggtgttcggggtttgggggggttttggcgttttcgtcgtcgtttttcggtttttcgttttgggggattttgaaggagagt

SEQ ID NO: 2606 - DNA, 893 bp, Artificial Sequence
  chemically treated genomic DNA (Homo sapiens) CpG-island No: 2606
actctccttcaaaatcccccaaaacgaaaaaccgaaaaacgacgacgaaaacgccaaaacccccccaaaccccgaacacccgtccaaaacccccgacgcgaaaccgcgacgaatccgaatcccgaatccgcccccgaccgacgtaaccttaacgaaacgaccccgaaaaacgacgtctaaaaccgaacgacgaaaaacgacgaaccgaactcgaaacgaaaacgcaaacccgcgccgctcgtcctcacccgatctcgtcgacgcccgaattattcataacgacgacgacgacgacgctcgacgctcccgaacctcctcgctcgctcccgcctccgaaaaatcacccgctccgtcgccctccccacaaccgcgacccgaatctacgcaacgacgacgacgacgacgacgacgacgacgacgacgacgacgactacctcctcccctcgacgccaacgatcaccgcgcgtccccgcgccgccgcgccgccgcccctacgcacgcccgaacgcgctcccgcacgaaatctccgaaaacgaatccaaaaatactccgtctatacgtacgtccctaaaacgaatttcgcgccgccgcaatcgaaaccgtcgcgcgttttcctttctcctcgaaaactcctaacgttaccgcgaaacacgctaaaaaataaaatccctacgctaaccccgcccctacaaaaaaaaaatacgcgcgaaccgaaccacgtacgtacgtacgcgcgcgtacgaacttacgtacgcgtacgcgcttacgaaaccgacgctccgaactaaacactataaacgcaaacgcgactaccgcttcctctttaactcttcactcgaaaacgataaaaccgcgtaaaacgctacgaaaaataaaaatatacccgcccgcac

SEQ ID NO: 2607 - DNA, 893 bp, Artificial Sequence
  chemically treated genomic DNA (Homo sapiens) CpG-island No: 2607
gtttttttttaggattttttaggacgggaagtcgggaagcggcggcgggggcgttaggatttttttagatttcgggtattcgtttagggttttcggcgcgaagtcgcggcgagttcgggtttcgagttcgttttcggtcggcgtgattttgacggggcggtttcggggggcggcgtttgaggtcgggcggcggggagcggcgggtcgggttcggggcggagacgtaggttcgcgtcgttcgtttttattcgatttcgtcggcgttcgagttgtttatggcggcggcggcggcgacgttcggcgttttcgggttttttcgttcgttttcgttttcggaaggttattcgtttcgtcgttttttttatagtcgcggttcggatttgcgtaacggcggcggcggcggcggcggcggcggcggcggcggcggcggttgtttttttttttcggcgttaacggttatcgcgcgttttcgcgtcgtcgcgtcgtcgtttttgcgtacgttcgggcgcgttttcgtacggggttttcgggggcgggtttaggggtatttcgtttgtgcgtgcgtttttgaggcggatttcgcgtcgtcgtagtcggggtcgtcgcgcgttttttttttttttcggaggtttttggcgttgtcgcggggtacgttgggaaatggagtttttgcgttggtttcgtttttgtaaggggaggatgcgcgcgggtcgagttacgtgcgtgcgtgcgcgcgcgtgcgggtttgcgtgcgcgtgcgcgtttgcgagatcggcgtttcgggttaggtattgtgggcgtaggcgcggttgtcgttttttttttaattttttattcggaagcggtggagtcgcgtggggcgttgcggggagtgggagtgtattcgttcgtat

SEQ ID NO: 2608 - DNA, 893 bp, Artificial Sequence
  chemically treated genomic DNA (Homo sapiens) CpG-island No: 2608
atacgaacgaatacactcccactccccgcaacgccccacgcgactccaccgcttccgaataaaaaattaaaaaaaaaacgacaaccgcgcctacgcccacaatacctaacccgaaacgccgatctcgcaaacgcgcacgcgcacgcaaacccgcacgcgcgcgcacgcacgcacgtaactcgacccgcgcgcatcctccccttacaaaaacgaaaccaacgcaaaaactccatttcccaacgtaccccgcgacaacgccaaaaacctccgaaaaaaaaaaaaaacgcgcgacgaccccgactacgacgacgcgaaatccgcctcaaaaacgcacgcacaaacgaaatacccctaaacccgcccccgaaaaccccgtacgaaaacgcgcccgaacgtacgcaaaaacgacgacgcgacgacgcgaaaacgcgcgataaccgttaacgccgaaaaaaaaaaacaaccgccgccgccgccgccgccgccgccgccgccgccgccgccgttacgcaaatccgaaccgcgactataaaaaaaacgacgaaacgaataaccttccgaaaacgaaaacgaacgaaaaaacccgaaaacgccgaacgtcgccgccgccgccgccataaacaactcgaacgccgacgaaatcgaataaaaacgaacgacgcgaacctacgtctccgccccgaacccgacccgccgctccccgccgcccgacctcaaacgccgccccccgaaaccgccccgtcaaaatcacgccgaccgaaaacgaactcgaaacccgaactcgccgcgacttcgcgccgaaaaccctaaacgaatacccgaaatctaaaaaaatcctaacgcccccgccgccgcttcccgacttcccgtcctaaaaaatcctaaaaaaaaac

SEQ ID NO: 2609 - DNA, 637 bp, Artificial Sequence
  chemically treated genomic DNA (Homo sapiens) CpG-island No: 2609
ttcgcgggagtcggcggggatttttgggaagtcggttaaggttcgtttcgttcgtagtttcgttttcgtttattcgtaggcggggttcggggtttttcggttttagttttttttcgcggttcggggatgcggggaggcgtcggttgtttcgcgcggcgcggtcgttaggggtcgttgcggagtcgtttttgtggtttcgatgtcggggcgggcgcgggcgggaggagggcgcgggggttcgggagggaggcgggaggcgcggtcgtcgttttagttgcgagttcgttcgtcgttcgtcgtcgtcgtcgtcggttcggtttcgcgttcgttatggttcgtttgacggagagcgaggcgcgtcggtagtagtagtagtttttgtagtcgcggttttcgttcgtgggtagtagcgggttcgagtttttcggggggtagttcgacggtatgaaggatttggacgttattaaatttttcgtgggttagatttcgcggtatttggacgagaaggattttaagtcgtttttcgagtagttcggtcgtatttacgagtttacggtgtttaaagatttttatacggggatgtataaaggtgggcgttcggttttttttttttttttttttttttttcgttttttat

SEQ ID NO: 2610 - DNA, 637 bp, Artificial Sequence
  chemically treated genomic DNA (Homo sapiens) CpG-island No: 2610
ataaaaaacgaaaaaaaaaaaaaaaaaaaaaaaaaaccgaacgcccacctttatacatccccgtataaaaatctttaaacaccgtaaactcgtaaatacgaccgaactactcgaaaaacgacttaaaatccttctcgtccaaataccgcgaaatctaacccacgaaaaatttaataacgtccaaatccttcataccgtcgaactaccccccgaaaaactcgaacccgctactacccacgaacgaaaaccgcgactacaaaaactactactactaccgacgcgcctcgctctccgtcaaacgaaccataacgaacgcgaaaccgaaccgacgacgacgacgacgaacgacgaacgaactcgcaactaaaacgacgaccgcgcctcccgcctccctcccgaacccccgcgccctcctcccgcccgcgcccgccccgacatcgaaaccacaaaaacgactccgcaacgacccctaacgaccgcgccgcgcgaaacaaccgacgcctccccgcatccccgaaccgcgaaaaaaaactaaaaccgaaaaaccccgaaccccgcctacgaataaacgaaaacgaaactacgaacgaaacgaaccttaaccgacttcccaaaaatccccgccgactcccgcgaa

SEQ ID NO: 2611 - DNA, 637 bp, Artificial Sequence
  chemically treated genomic DNA (Homo sapiens) CpG-island No: 2611
gtgggaggcggagggagggggagaggggggagggggtcgggcgtttatttttgtgtattttcgtgtaggggtttttgagtatcgtgagttcgtagatgcggtcgaattgttcgaagagcggtttgaggtttttttcgtttaggtgtcgcgggatttggtttacgaagagtttgatggcgtttaggttttttatgtcgtcgggttgtttttcggggggttcgggttcgttgttgtttacgggcgagggtcgcggttgtaggagttgttgttgttgtcggcgcgtttcgtttttcgttaggcgggttatggcgggcgcgggatcgagtcggcggcggcggcggcgggcggcgggcggattcgtagttggagcggcggtcgcgtttttcgtttttttttcgggttttcgcgtttttttttcgttcgcgttcgtttcggtatcgggattataaaggcggtttcgtagcggtttttggcggtcgcgtcgcgcggggtagtcggcgttttttcgtattttcgggtcgcggggggaaattgaggtcggaaggtttcgggtttcgtttacgggtgggcgagggcggagttgcgggcgggacgggttttagtcggttttttaggggttttcgtcggttttcgcgga

SEQ ID NO: 2612 - DNA, 637 bp, Artificial Sequence
  chemically treated genomic DNA (Homo sapiens) CpG-island No: 2612
tccgcgaaaaccgacgaaaacccctaaaaaaccgactaaaacccgtcccgcccgcaactccgccctcgcccacccgtaaacgaaacccgaaaccttccgacctcaatttccccccgcgacccgaaaatacgaaaaaacgccgactaccccgcgcgacgcgaccgccaaaaaccgctacgaaaccgcctttataatcccgataccgaaacgaacgcgaacgaaaaaaaaacgcgaaaacccgaaaaaaaaacgaaaaacgcgaccgccgctccaactacgaatccgcccgccgcccgccgccgccgccgccgactcgatcccgcgcccgccataacccgcctaacgaaaaacgaaacgcgccgacaacaacaacaactcctacaaccgcgaccctcgcccgtaaacaacaacgaacccgaaccccccgaaaaacaacccgacgacataaaaaacctaaacgccatcaaactcttcgtaaaccaaatcccgcgacacctaaacgaaaaaaacctcaaaccgctcttcgaacaattcgaccgcatctacgaactcacgatactcaaaaacccctacacgaaaatacacaaaaataaacgcccgaccccctcccccctctccccctccctccgcctcccac

SEQ ID NO: 2613 - DNA, 876 bp, Artificial Sequence
  chemically treated genomic DNA (Homo sapiens) CpG-island No: 2613
taggcgtcgcgcgcgtagtttatatttaaattggaaggaatttgttttgttcggggcgggcgcgaagtcgtcgtagtcgcgagcgtcgcgcgggattagtttcggcgcgcgcgtgttttttttcgtcgttaaatttttaaatttttagggcgcgggcgggattgggcggtgggcgcgtcgggaaggcgttcgggggtggggacggggattcgcgcgttcgcgtttggtcgaggtgtttcgagataggatgtaggtatttttaatattttgtacgttcgcgtttttattagcgttgtagtaaagtttcggggtttgggcgggttacgcgcgtagaggcgtattcgggttgggagatcggggcgttgtgttaaggatttcggcggcgttggcgggggcggttcggtttcggatcgcgacgcggttatttttcgtgatttttagtttaggcggtaggttggcgggcgcgcgatcggcgcggtttaggtttacgtgggacggcgcgcgcgcgttaggtaggttttttttttggttgcgtttagcgttcgtagtatatggtcggcggcggcgcgttttcgaggtcggcggagatcggttgtagtcggtataggataagagttaggtagcgacgcggggtcggggcgcgggcggtagtacgtacggttcgggtcgtaggcggtcggggtggggggcggggggagggtgtggttcgggtgttcgagtcgcgggagtgggtggagggttcgggcgttcgggttttattagttcgagttaatttgcgttagagtcgggttcgttttttaaggggttaattttttttttatgttatcgagcggtttataaggagggggaggttaagttttcgttttattgggagtt

SEQ ID NO: 2614 - DNA, 876 bp, Artificial Sequence
  chemically treated genomic DNA (Homo sapiens) CpG-island No: 2614
aactcccaataaaacgaaaacttaacctccccctccttataaaccgctcgataacataaaaaaaaaattaaccccttaaaaaacgaacccgactctaacgcaaattaactcgaactaataaaacccgaacgcccgaaccctccacccactcccgcgactcgaacacccgaaccacaccctccccccgccccccaccccgaccgcctacgacccgaaccgtacgtactaccgcccgcgccccgaccccgcgtcgctacctaactcttatcctataccgactacaaccgatctccgccgacctcgaaaacgcgccgccgccgaccatatactacgaacgctaaacgcaaccaaaaaaaaaacctacctaacgcgcgcgcgccgtcccacgtaaacctaaaccgcgccgatcgcgcgcccgccaacctaccgcctaaactaaaaatcacgaaaaataaccgcgtcgcgatccgaaaccgaaccgcccccgccaacgccgccgaaatccttaacacaacgccccgatctcccaacccgaatacgcctctacgcgcgtaacccgcccaaaccccgaaactttactacaacgctaataaaaacgcgaacgtacaaaatattaaaaatacctacatcctatctcgaaacacctcgaccaaacgcgaacgcgcgaatccccgtccccacccccgaacgccttcccgacgcgcccaccgcccaatcccgcccgcgccctaaaaatttaaaaatttaacgacgaaaaaaaacacgcgcgcgccgaaactaatcccgcgcgacgctcgcgactacgacgacttcgcgcccgccccgaacaaaacaaattccttccaatttaaatataaactacgcgcgcgacgccta

SEQ ID NO: 2615 - DNA, 876 bp, Artificial Sequence
  chemically treated genomic DNA (Homo sapiens) CpG-island No: 2615
ggtttttaataaggcggaggtttggtttttttttttttataagtcgttcggtaatatgagaaaaggattaattttttagggggcgggttcgattttagcgtaagttggttcgggttggtgaggttcgagcgttcgggttttttatttattttcgcgattcgggtattcgagttatatttttttttcgttttttatttcggtcgtttgcgattcgggtcgtgcgtgttgtcgttcgcgtttcggtttcgcgtcgttgtttagtttttattttatatcggttgtagtcggttttcgtcggtttcgggggcgcgtcgtcgtcgattatgtgttgcgagcgttgagcgtagttaaggagggggtttgtttggcgcgcgcgcgtcgttttacgtggatttgagtcgcgtcggtcgcgcgttcgttagtttgtcgtttgggttgggggttacgaaaggtaatcgcgtcgcggttcggggtcgggtcgttttcgttagcgtcgtcggggtttttggtataacgtttcgattttttaattcgggtgcgtttttgcgcgcgtgattcgtttagatttcggagttttgttgtaacgttagtaggagcgcgagcgtgtagggtgttgggggtgtttgtattttgtttcggagtatttcggttaggcgcgagcgcgcgggttttcgtttttattttcgggcgttttttcggcgcgtttatcgtttagtttcgttcgcgttttgaggatttagggatttagcggcgagggggaatacgcgcgcgtcggggttgatttcgcgcggcgttcgcggttgcggcggtttcgcgttcgtttcgggtagaataggttttttttagtttgggtgtgagttgcgcgcgcggcgtttg

SEQ ID NO: 2616 - DNA, 876 bp, Artificial Sequence
  chemically treated genomic DNA (Homo sapiens) CpG-island No: 2616
caaacgccgcgcgcgcaactcacacccaaactaaaaaaaacctattctacccgaaacgaacgcgaaaccgccgcaaccgcgaacgccgcgcgaaatcaaccccgacgcgcgcgtattccccctcgccgctaaatccctaaatcctcaaaacgcgaacgaaactaaacgataaacgcgccgaaaaaacgcccgaaaataaaaacgaaaacccgcgcgctcgcgcctaaccgaaatactccgaaacaaaatacaaacacccccaacaccctacacgctcgcgctcctactaacgttacaacaaaactccgaaatctaaacgaatcacgcgcgcaaaaacgcacccgaattaaaaaatcgaaacgttataccaaaaaccccgacgacgctaacgaaaacgacccgaccccgaaccgcgacgcgattacctttcgtaacccccaacccaaacgacaaactaacgaacgcgcgaccgacgcgactcaaatccacgtaaaacgacgcgcgcgcgccaaacaaaccccctccttaactacgctcaacgctcgcaacacataatcgacgacgacgcgcccccgaaaccgacgaaaaccgactacaaccgatataaaataaaaactaaacaacgacgcgaaaccgaaacgcgaacgacaacacgcacgacccgaatcgcaaacgaccgaaataaaaaacgaaaaaaaaatataactcgaatacccgaatcgcgaaaataaataaaaaacccgaacgctcgaacctcaccaacccgaaccaacttacgctaaaatcgaacccgccccctaaaaaattaatccttttctcatattaccgaacgacttataaaaaaaaaaaaaccaaacctccgccttattaaaaacc

SEQ ID NO: 2617 - DNA, 892 bp, Artificial Sequence
  chemically treated genomic DNA (Homo sapiens) CpG-island No: 2617
tcgcggttttcgttacgttcgttttttttatatttttatttcgttttatcgatcgcgatcggttttcgtttttacgattcggttattttgtttaggggtttcggtttagttttgatagtattcgcgaatcgttttgattcgataggtttcgatattatttattcgcggtagtttttacgcgtatgcgtatcgcgttttttcgtattgcgttacgttacgtttattggcgttacgttttttacgttacgcgtcgcgtcgttgcgtcgcgtacgttttgtgggtttcgtttaatttacgatttatttatgttacgtttttgagcgtgcggtcgtttgggtaggcgtagagttggagtttagcggtcgcgattcgttttttttagaatagagggtagcgaggggattataagttttagttgtttattttcgtagtcgtcgatttttcgtttgcgttcgcggcggtttcgcggttcggttttcgagagttatagatgcgttcgcgtcgttggggtttttcgtgtgggaacgttttcggtaggtcgcgggtttgagaggtatcgtcggcgtgacgaatgtaattagcgtggttttaaatgagtcggcggtcgtcgtaggttgacgtagagtcgtagcgtttttcggggtcgttatttttagtatttttttttttttatttgttgggggtcgcgggggttggaatttagaagcgtaagtgtggggcgcgttttcgtggcgtttttggcgtttcgaggtcgaaattcggatgttgaggggaggtcgtgagttcggaaaggtatcgcggggtcggtattagggttgagttagttttgtattttttggtgggattttcggtttttttgggtttcgttatttttttttttttttttgttttt

SEQ ID NO: 2618 - DNA, 892 bp, Artificial Sequence
  chemically treated genomic DNA (Homo sapiens) CpG-island No: 2618
aaaaacaaaaaaaaaaaaaaaaataacgaaacccaaaaaaaccgaaaatcccaccaaaaaatacaaaactaactcaaccctaataccgaccccgcgatacctttccgaactcacgacctcccctcaacatccgaatttcgacctcgaaacgccaaaaacgccacgaaaacgcgccccacacttacgcttctaaattccaacccccgcgacccccaacaaataaaaaaaaaaaaatactaaaaataacgaccccgaaaaacgctacgactctacgtcaacctacgacgaccgccgactcatttaaaaccacgctaattacattcgtcacgccgacgatacctctcaaacccgcgacctaccgaaaacgttcccacacgaaaaaccccaacgacgcgaacgcatctataactctcgaaaaccgaaccgcgaaaccgccgcgaacgcaaacgaaaaatcgacgactacgaaaataaacaactaaaacttataatcccctcgctaccctctattctaaaaaaaacgaatcgcgaccgctaaactccaactctacgcctacccaaacgaccgcacgctcaaaaacgtaacataaataaatcgtaaattaaacgaaacccacaaaacgtacgcgacgcaacgacgcgacgcgtaacgtaaaaaacgtaacgccaataaacgtaacgtaacgcaatacgaaaaaacgcgatacgcatacgcgtaaaaactaccgcgaataaataatatcgaaacctatcgaatcaaaacgattcgcgaatactatcaaaactaaaccgaaacccctaaacaaaataaccgaatcgtaaaaacgaaaaccgatcgcgatcgataaaacgaaataaaaatataaaaaaaacgaacgtaacgaaaaccgcga

SEQ ID NO: 2619 - DNA, 892 bp, Artificial Sequence
  chemically treated genomic DNA (Homo sapiens) CpG-island No: 2619
aaaagtaagaaaaagaaagagaatggcgaggtttagagagatcgaaagttttattagagggtatagagttagtttagttttaatgtcggtttcgcggtgttttttcgagtttacggtttttttttagtattcgggtttcggtttcggagcgttagggacgttacgaggacgcgttttatatttgcgtttttgggttttagttttcgcggtttttaataaataaagaagggaaagtgttgagggtgacggtttcggggagcgttgcggttttacgttaatttgcggcggtcgtcgatttatttggggttacgttggttgtattcgttacgtcggcgatgttttttaaattcgcggtttgtcgaggacgtttttatacgggagattttagcgacgcgggcgtatttgtggttttcgagaatcgggtcgcggagtcgtcgcgagcgtaagcgaggaatcggcgattgcgggggtggatagttggggtttgtagttttttcgttattttttattttggaagaggcgggtcgcggtcgttgaattttagttttgcgtttgtttaggcggtcgtacgtttaggggcgtggtatgggtgggtcgtgagttgggcggggtttatagggcgtgcgcgacgtagcggcgcggcgcgtggcgtaaggggcgtggcgttagtgggcgtggcgtggcgtagtgcgaagggacgcggtgcgtatgcgcgtgagggttgtcgcgggtgggtggtatcgaggtttgtcgggttagggcggttcgcgggtgttgttagagttgggtcggggtttttaggtagggtagtcgggtcgtagaggcgggggtcggtcgcggtcggtggagcgggatgaggatgtaggaggggcggacgtggcggaagtcgcgg

SEQ ID NO: 2620 - DNA, 892 bp, Artificial Sequence
  chemically treated genomic DNA (Homo sapiens) CpG-island No: 2620
ccgcgacttccgccacgtccgcccctcctacatcctcatcccgctccaccgaccgcgaccgacccccgcctctacgacccgactaccctacctaaaaaccccgacccaactctaacaacacccgcgaaccgccctaacccgacaaacctcgataccacccacccgcgacaaccctcacgcgcatacgcaccgcgtcccttcgcactacgccacgccacgcccactaacgccacgccccttacgccacgcgccgcgccgctacgtcgcgcacgccctataaaccccgcccaactcacgacccacccataccacgcccctaaacgtacgaccgcctaaacaaacgcaaaactaaaattcaacgaccgcgacccgcctcttccaaaataaaaaataacgaaaaaactacaaaccccaactatccacccccgcaatcgccgattcctcgcttacgctcgcgacgactccgcgacccgattctcgaaaaccacaaatacgcccgcgtcgctaaaatctcccgtataaaaacgtcctcgacaaaccgcgaatttaaaaaacatcgccgacgtaacgaatacaaccaacgtaaccccaaataaatcgacgaccgccgcaaattaacgtaaaaccgcaacgctccccgaaaccgtcaccctcaacactttcccttctttatttattaaaaaccgcgaaaactaaaacccaaaaacgcaaatataaaacgcgtcctcgtaacgtccctaacgctccgaaaccgaaacccgaatactaaaaaaaaaccgtaaactcgaaaaaacaccgcgaaaccgacattaaaactaaactaactctataccctctaataaaactttcgatctctctaaacctcgccattctctttctttttcttactttt

SEQ ID NO: 2621 - DNA, 663 bp, Artificial Sequence
  chemically treated genomic DNA (Homo sapiens) CpG-island No: 2621
gttcgcggtgtcgcgagttgagtttttcgatgggttcggatttgggcggcggcggcggcggggtcggggtaggggtcggggtaggggtcggggcgtagcgtttcgtagcggaagtcgtaggttgtttgggttgtttgtttcgtttgtttttaatgtcggagtcgaggacgggggagaagggaaagcggaggaggagggacgggcgcgggtggggaggtttgcgaggtcgcgcgggagggtttcggtcggtagaagcgggtggagggaaaaggtttatttcgaattgttggggttttatttaggatcggttttagtcgtttttttgttttatttttttttcgtagcgcggttacgtgagatgcgttatagaagagtttgagatcgagtgaggcggcgcggtagtcgttagggggagcgcgggggcgtcgagtcgggagcgcggagttcggagcgtttgggttcggcgtagcgcggtgcgtttggattcggggcgcggatggcgcggttgagaggggcgcgtagttcgcgaaatgttcggcgttaaaggttttcggagattagttttcgcggatttttggttggagtttaaagtcggttagatttttttttcgcgttttttttttcgcggttcggagaggaaggtaggggagtttttaaatatta

SEQ ID NO: 2622 - DNA, 663 bp, Artificial Sequence
  chemically treated genomic DNA (Homo sapiens) CpG-island No: 2622
taatatttaaaaactcccctaccttcctctccgaaccgcgaaaaaaaaaacgcgaaaaaaaaatctaaccgactttaaactccaaccaaaaatccgcgaaaactaatctccgaaaacctttaacgccgaacatttcgcgaactacgcgcccctctcaaccgcgccatccgcgccccgaatccaaacgcaccgcgctacgccgaacccaaacgctccgaactccgcgctcccgactcgacgcccccgcgctccccctaacgactaccgcgccgcctcactcgatctcaaactcttctataacgcatctcacgtaaccgcgctacgaaaaaaaaataaaacaaaaaaacgactaaaaccgatcctaaataaaaccccaacaattcgaaataaaccttttccctccacccgcttctaccgaccgaaaccctcccgcgcgacctcgcaaacctccccacccgcgcccgtccctcctcctccgctttcccttctcccccgtcctcgactccgacattaaaaacaaacgaaacaaacaacccaaacaacctacgacttccgctacgaaacgctacgccccgacccctaccccgacccctaccccgaccccgccgccgccgccgcccaaatccgaacccatcgaaaaactcaactcgcgacaccgcgaac

SEQ ID NO: 2623 - DNA, 663 bp, Artificial Sequence
  chemically treated genomic DNA (Homo sapiens) CpG-island No: 2623
tgatatttgggggtttttttgttttttttttcgagtcgcggaaggggagacgcggggaggaggtttggtcggttttgggttttagttaggggttcgcggagattggttttcgaaggtttttgacgtcgggtatttcgcgagttacgcgttttttttagtcgcgttattcgcgtttcgagtttaggcgtatcgcgttgcgtcgagtttaggcgtttcgggtttcgcgttttcgattcgacgttttcgcgttttttttagcggttgtcgcgtcgttttattcggttttaggtttttttgtggcgtattttacgtgatcgcgttgcgggagagggatgaaataagagggcggttgaagtcgattttgagtggggttttagtaattcggaatgagttttttttttttattcgtttttgtcgatcggggttttttcgcgcggtttcgtaggtttttttattcgcgttcgttttttttttttcgtttttttttttttttcgttttcggtttcgatattaggggtaggcggggtaggtagtttaagtagtttgcggttttcgttgcggagcgttgcgtttcggtttttgtttcggtttttgtttcggtttcgtcgtcgtcgtcgtttaagttcggatttatcggggggtttagttcgcggtatcgcgagt

SEQ ID NO: 2624 - DNA, 663 bp, Artificial Sequence
  chemically treated genomic DNA (Homo sapiens) CpG-island No: 2624
actcgcgataccgcgaactaaaccccccgataaatccgaacttaaacgacgacgacgacgaaaccgaaacaaaaaccgaaacaaaaaccgaaacgcaacgctccgcaacgaaaaccgcaaactacttaaactacctaccccgcctacccctaatatcgaaaccgaaaacgaaaaaaaaaaaaaaacgaaaaaaaaaaaacgaacgcgaataaaaaaacctacgaaaccgcgcgaaaaaaccccgatcgacaaaaacgaataaaaaaaaaaaactcattccgaattactaaaaccccactcaaaatcgacttcaaccgccctcttatttcatccctctcccgcaacgcgatcacgtaaaatacgccacaaaaaaacctaaaaccgaataaaacgacgcgacaaccgctaaaaaaaacgcgaaaacgtcgaatcgaaaacgcgaaacccgaaacgcctaaactcgacgcaacgcgatacgcctaaactcgaaacgcgaataacgcgactaaaaaaaacgcgtaactcgcgaaatacccgacgtcaaaaaccttcgaaaaccaatctccgcgaacccctaactaaaacccaaaaccgaccaaacctcctccccgcgtctccccttccgcgactcgaaaaaaaaaacaaaaaaacccccaaatatca

SEQ ID NO: 2625 - DNA, 834 bp, Artificial Sequence
  chemically treated genomic DNA (Homo sapiens) CpG-island No: 2625
gttgagcggagtaggttttttcgcgtttcggtttcgtgcgggcgcggtttttagcgcgttatttttgtttttcgtttttttttcgcggcgggtcgtgtatattttggatggtttcgtagacggtttttgagtcgttgcgcgttaggggtcgcgggtatatttaggaattcgttatattgtagttttgaagttgtcgtttttttcgaggtggtcggcgggaggcgagacggcggcgcgcgttaggtagtttagggattgcgtaggtcgtaagtataggtaggcgggtaggtcgggcgttaggttgttgcgttgggtcgcggcgtcgcgttgcgaagggtcgtatagggagttggcgcggtttcggggtttcgcgggggtgttgtcggggttcgttgtcgtcgtcgcgtttataagtcggtagtcgtaggtgagcggttcgggggtcgaggggattgttggggggatttggcggcgcggtagtggtaggttgtttcgttcgggcgttttcgttcgcggggaggttatttgtttagcgtaggtagttcgcgtacgtattgcgcgggtaggtagaaggggtggtcgttaggttcgcgtcgtacgtgttattagtgtttcgtgttgcgtcgtagtagttagtagcgtttattgggttagatggttacgcggcgttagtttttgcgggtatattcgaaggggtgttttattattaggtagatatttttttttatatacgtcggtatcgtggtcgcggcgtttttttgtaggtaataaggaggagggtcgtggaggttaagattatcgagtttggaatagtttcgtattcggggatagatt

SEQ ID NO: 2626 - DNA, 834 bp, Artificial Sequence
  chemically treated genomic DNA (Homo sapiens) CpG-island No: 2626
aatctatccccgaatacgaaactattccaaactcgataatcttaacctccacgaccctcctccttattacctacaaaaaaacgccgcgaccacgataccgacgtatataaaaaaaaatatctacctaataataaaacaccccttcgaatatacccgcaaaaactaacgccgcgtaaccatctaacccaataaacgctactaactactacgacgcaacacgaaacactaataacacgtacgacgcgaacctaacgaccaccccttctacctacccgcgcaatacgtacgcgaactacctacgctaaacaaataacctccccgcgaacgaaaacgcccgaacgaaacaacctaccactaccgcgccgccaaatccccccaacaatcccctcgacccccgaaccgctcacctacgactaccgacttataaacgcgacgacgacaacgaaccccgacaacacccccgcgaaaccccgaaaccgcgccaactccctatacgacccttcgcaacgcgacgccgcgacccaacgcaacaacctaacgcccgacctacccgcctacctatacttacgacctacgcaatccctaaactacctaacgcgcgccgccgtctcgcctcccgccgaccacctcgaaaaaaacgacaacttcaaaactacaatataacgaattcctaaatatacccgcgacccctaacgcgcaacgactcaaaaaccgtctacgaaaccatccaaaatatacacgacccgccgcgaaaaaaaaacgaaaaacaaaaataacgcgctaaaaaccgcgcccgcacgaaaccgaaacgcgaaaaaacctactccgctcaac

SEQ ID NO: 2627 - DNA, 834 bp, Artificial Sequence
  chemically treated genomic DNA (Homo sapiens) CpG-island No: 2627
agtttgttttcgagtgcggggttattttaggttcggtggttttgatttttacggtttttttttttgttgtttgtagaaaaacgtcgcggttacgatgtcggcgtatgtggagggggatgtttatttggtggtggagtattttttcgagtatattcgtaaggattggcgtcgcgtggttatttggtttaatgagcgttattggttgttgcggcgtagtacggagtattggtggtacgtgcggcgcgagtttggcggttattttttttatttgttcgcgtagtacgtgcgcgagttgtttgcgttgggtaaatgattttttcgcgaacgggaacgttcggacgagataatttgttattgtcgcgtcgttaggtttttttaatagttttttcggttttcgagtcgtttatttacgattatcggtttgtgagcgcggcggcggtagcgggtttcgatagtattttcgcggagtttcgaggtcgcgttagttttttgtgcggtttttcgtaacgcggcgtcgcgatttagcgtagtagtttggcgttcggtttgttcgtttgtttgtatttgcggtttgcgtagtttttggattatttggcgcgcgtcgtcgtttcgtttttcgtcggttatttcggaaggagcggtagttttaaggttgtagtgtggcgggtttttggatgtgttcgcggtttttggcgcgtagcgatttagagatcgtttacgaggttatttaggatgtgtacggttcgtcgcgggaggagagcggggaataggggtggcgcgttggggatcgcgttcgtacggagtcggggcgcgaggagatttgtttcgtttagt

SEQ ID NO: 2628 - DNA, 834 bp, Artificial Sequence
  chemically treated genomic DNA (Homo sapiens) CpG-island No: 2628
actaaacgaaacaaatctcctcgcgccccgactccgtacgaacgcgatccccaacgcgccacccctattccccgctctcctcccgcgacgaaccgtacacatcctaaataacctcgtaaacgatctctaaatcgctacgcgccaaaaaccgcgaacacatccaaaaacccgccacactacaaccttaaaactaccgctccttccgaaataaccgacgaaaaacgaaacgacgacgcgcgccaaataatccaaaaactacgcaaaccgcaaatacaaacaaacgaacaaaccgaacgccaaactactacgctaaatcgcgacgccgcgttacgaaaaaccgcacaaaaaactaacgcgacctcgaaactccgcgaaaatactatcgaaacccgctaccgccgccgcgctcacaaaccgataatcgtaaataaacgactcgaaaaccgaaaaaactattaaaaaaacctaacgacgcgacaataacaaattatctcgtccgaacgttcccgttcgcgaaaaaatcatttacccaacgcaaacaactcgcgcacgtactacgcgaacaaataaaaaaaataaccgccaaactcgcgccgcacgtaccaccaatactccgtactacgccgcaacaaccaataacgctcattaaaccaaataaccacgcgacgccaatccttacgaatatactcgaaaaaatactccaccaccaaataaacatccccctccacatacgccgacatcgtaaccgcgacgtttttctacaaacaacaaaaaaaaaaaccgtaaaaatcaaaaccaccgaacctaaaataaccccgcactcgaaaacaaact

SEQ ID NO: 2629 - DNA, 576 bp, Artificial Sequence
  chemically treated genomic DNA (Homo sapiens) CpG-island No: 2629
ttcgttttcgtattcgggttttttcgcgatttcggaggaattttttagagtcgtttgatttcgtttttaggtttcgttttttttttttatttttttttcgtcgtagtgttttgtttttattggttttttcgtatattgttcgttttgttattggttaattcggagcgttcggttcgttttttaggtttggtaatttttcggtttttttcgcgcgggcggggcgagtggagggcgtggtttgtcgaggggcgaggcgagtggagggcggggtcgcgttgttcgtttcgtttcggtttcggtttcggtttcggcgttgtttttatcgtcgcggtaacggtttcggtttacggaggcggttggacggattttcgacggttggacgtacggattttgtttcgagagtaggtgagcgagtagtgtcggggcgttttttattttagcgtatttcgggggttatttggtcgttttttgtttttttcgttttttaatgtttttgtattttatcgtttgttcgtttatatttttgttttagttttcgtttgtttttttgttattttcgttgtataggttaggggg

SEQ ID NO: 2630 - DNA, 576 bp, Artificial Sequence
  chemically treated genomic DNA (Homo sapiens) CpG-island No: 2630
ccccctaacctatacaacgaaaataacaaaaaaacaaacgaaaactaaaacaaaaatataaacgaacaaacgataaaatacaaaaacattaaaaaacgaaaaaaacaaaaaacgaccaaataacccccgaaatacgctaaaataaaaaacgccccgacactactcgctcacctactctcgaaacaaaatccgtacgtccaaccgtcgaaaatccgtccaaccgcctccgtaaaccgaaaccgttaccgcgacgataaaaacaacgccgaaaccgaaaccgaaaccgaaacgaaacgaacaacgcgaccccgccctccactcgcctcgcccctcgacaaaccacgccctccactcgccccgcccgcgcgaaaaaaaccgaaaaattaccaaacctaaaaaacgaaccgaacgctccgaattaaccaataacaaaacgaacaatatacgaaaaaaccaataaaaacaaaacactacgacgaaaaaaaaataaaaaaaaaaaacgaaacctaaaaacgaaatcaaacgactctaaaaaattcctccgaaatcgcgaaaaaacccgaatacgaaaacgaa

SEQ ID NO: 2631 - DNA, 576 bp, Artificial Sequence
  chemically treated genomic DNA (Homo sapiens) CpG-island No: 2631
ttttttaatttatatagcgagagtgatagagagatagacggaaattgaggtaggaatgtagacggataggcggtggggtgtagaagtattaaggggcgggagagatagagggcggttaggtggttttcgagatgcgttgaaatggggggcgtttcggtattgttcgtttatttattttcgaagtagagttcgtacgtttaatcgtcgggggttcgtttagtcgttttcgtgggtcggggtcgttgtcgcggcggtgggagtagcgtcggagtcggggtcggggtcggggcggggcgggtagcgcggtttcgttttttattcgtttcgtttttcggtaggttacgttttttattcgtttcgttcgcgcggaagggatcggagagttgttaggtttggggggcgggtcgagcgtttcggattagttaatgatagggcgggtaatgtacgaaaaggttaatgggagtagggtattgcgacgggggggaagtggggggaaggggcggagtttgggggcggggttaggcggttttgggggattttttcggaatcgcgaaggggttcggatgcgggggcgag

SEQ ID NO: 2632 - DNA, 576 bp, Artificial Sequence
  chemically treated genomic DNA (Homo sapiens) CpG-island No: 2632
ctcgcccccgcatccgaaccccttcgcgattccgaaaaaatcccccaaaaccgcctaaccccgcccccaaactccgccccttccccccacttcccccccgtcgcaataccctactcccattaaccttttcgtacattacccgccctatcattaactaatccgaaacgctcgacccgccccccaaacctaacaactctccgatcccttccgcgcgaacgaaacgaataaaaaacgtaacctaccgaaaaacgaaacgaataaaaaacgaaaccgcgctacccgccccgccccgaccccgaccccgactccgacgctactcccaccgccgcgacaacgaccccgacccacgaaaacgactaaacgaacccccgacgattaaacgtacgaactctacttcgaaaataaataaacgaacaataccgaaacgccccccatttcaacgcatctcgaaaaccacctaaccgccctctatctctcccgccccttaatacttctacaccccaccgcctatccgtctacattcctacctcaatttccgtctatctctctatcactctcgctatataaattaaaaaa

SEQ ID NO: 2633 - DNA, 503 bp, Artificial Sequence
  chemically treated genomic DNA (Homo sapiens) CpG-island No: 2633
ttttcggtggagtttcggtttcgttttttttatacgatcgggtttatatttgaatattttttaggattgcgttacggatatttttacgttaatttttacgtcggattgttttacggatatttttacgttaatttttacgtcggattgcgttacggatatttttacgttaatttttacgtcggattgcgttacggatatttttacgttaatttttacgtcggattgttttacggatatttttacgttaatttttacgtcggatagcgttatggatatttttacgttaatttttacgtcggattgcgttacggatatttttacgttaatttttacgtcggattgcgttacggatatttttacgttaatttttacgttaggtttttgtattttatattcggtttttttttacgatattgtggttcgcgttggttttttacgtatatttttagtcgcgtttttgttttgtttaagttttttgtatttgtttttttttgttgagaaag

SEQ ID NO: 2634 - DNA, 503 bp, Artificial Sequence
  chemically treated genomic DNA (Homo sapiens) CpG-island No: 2634
ctttctcaacaaaaaaaaacaaatacaaaaaacttaaacaaaacaaaaacgcgactaaaaatatacgtaaaaaaccaacgcgaaccacaatatcgtaaaaaaaaaccgaatataaaatacaaaaacctaacgtaaaaattaacgtaaaaatatccgtaacgcaatccgacgtaaaaattaacgtaaaaatatccgtaacgcaatccgacgtaaaaattaacgtaaaaatatccataacgctatccgacgtaaaaattaacgtaaaaatatccgtaaaacaatccgacgtaaaaattaacgtaaaaatatccgtaacgcaatccgacgtaaaaattaacgtaaaaatatccgtaacgcaatccgacgtaaaaattaacgtaaaaatatccgtaaaacaatccgacgtaaaaattaacgtaaaaatatccgtaacgcaatcctaaaaaatattcaaatataaacccgatcgtataaaaaaaacgaaaccgaaactccaccgaaaa

SEQ ID NO: 2635 - DNA, 503 bp, Artificial Sequence
  chemically treated genomic DNA (Homo sapiens) CpG-island No: 2635
tttttttagtagggaaaggtaggtgtagaaggtttgagtagggtagggacgcggttgggagtatgcgtggaaggttagcgcgggttatagtgtcgtgaggaggagtcgggtgtggggtgtaggaatttggcgtgggagttggcgtggggatgttcgtgacgtagttcggcgtgggagttggcgtggggatgttcgtgacgtagttcggcgtgggagttggcgtggggatgtttataacgttgttcggcgtgggagttggcgtggggatgttcgtgaggtagttcggcgtgggagttggcgtggggatgttcgtgacgtagttcggcgtgggagttggcgtggggatgttcgtgacgtagttcggcgtgggagttggcgtggggatgttcgtgaggtagttcggcgtgggagttggcgtggggatgttcgtgacgtagttttggggggtgtttaggtgtgaattcggtcgtgtggaggaaacggggtcggggttttatcggagg

SEQ ID NO: 2636 - DNA, 503 bp, Artificial Sequence
  chemically treated genomic DNA (Homo sapiens) CpG-island No: 2636
cctccgataaaaccccgaccccgtttcctccacacgaccgaattcacacctaaacaccccccaaaactacgtcacgaacatccccacgccaactcccacgccgaactacctcacgaacatccccacgccaactcccacgccgaactacgtcacgaacatccccacgccaactcccacgccgaactacgtcacgaacatccccacgccaactcccacgccgaactacctcacgaacatccccacgccaactcccacgccgaacaacgttataaacatccccacgccaactcccacgccgaactacgtcacgaacatccccacgccaactcccacgccgaactacgtcacgaacatccccacgccaactcccacgccaaattcctacaccccacacccgactcctcctcacgacactataacccgcgctaaccttccacgcatactcccaaccgcgtccctaccctactcaaaccttctacacctacctttccctactaaaaaaa

SEQ ID NO: 2637 - DNA, 697 bp, Artificial Sequence
  chemically treated genomic DNA (Homo sapiens) CpG-island No: 2637
tttttggaatttcgtttatagaggttttttcggcgtggtcggtttagtagggacgcgtcgtcgtagcggaggagagaacgcgggcggggggttgtaggtcggcgcggggggcgcgacgtcgtcggcggggcgcgagggggtgtgttcgcgtcgcggttatcgcggttatcgcggttggcgttcgggtgcgtcgcgcgtttcggttttttcgggggttttttacgtcgtttttcgttcgtcggcggtcggggttcgttttttttgacgttatgcgggcggagggttcgttcgggcggcgttgtcgcgggcgtcgggagggggttcgatttcgggttttagttcgtcgtcgtgcgtttcgcgtcgtgcgttcggttttttgcgcgtcgtcgtagttatatttggaagcgtttagcgcgtttgttttcggcgcgtcgggcgggcgggcgggcggcgcgggtaggggcgggcgcgggcgcggcggggttgggtcggggggagtgagcgcggcgttttcgcgcgttcggtgtttttttttcgttgtttttgtagaaatagtttttgttagagcggcgttcggcgcggcgcggcgggttcggagcggcggcggcggttttttttgttttcgcgtttaggagttgtcggttttttttgatagtagagagtcgggtaggggttttaggaggattcgttgggagtg

SEQ ID NO: 2638 - DNA, 697 bp, Artificial Sequence
  chemically treated genomic DNA (Homo sapiens) CpG-island No: 2638
cactcccaacgaatcctcctaaaacccctacccgactctctactatcaaaaaaaaccgacaactcctaaacgcgaaaacaaaaaaaaccgccgccgccgctccgaacccgccgcgccgcgccgaacgccgctctaacaaaaactatttctacaaaaacaacgaaaaaaaaacaccgaacgcgcgaaaacgccgcgctcactccccccgacccaaccccgccgcgcccgcgcccgcccctacccgcgccgcccgcccgcccgcccgacgcgccgaaaacaaacgcgctaaacgcttccaaatataactacgacgacgcgcaaaaaaccgaacgcacgacgcgaaacgcacgacgacgaactaaaacccgaaatcgaaccccctcccgacgcccgcgacaacgccgcccgaacgaaccctccgcccgcataacgtcaaaaaaaacgaaccccgaccgccgacgaacgaaaaacgacgtaaaaaacccccgaaaaaaccgaaacgcgcgacgcacccgaacgccaaccgcgataaccgcgataaccgcgacgcgaacacaccccctcgcgccccgccgacgacgtcgcgccccccgcgccgacctacaaccccccgcccgcgttctctcctccgctacgacgacgcgtccctactaaaccgaccacgccgaaaaaacctctataaacgaaattccaaaaa

SEQ ID NO: 2639 - DNA, 697 bp, Artificial Sequence
  chemically treated genomic DNA (Homo sapiens) CpG-island No: 2639
tatttttagcgagtttttttgaggtttttgttcggttttttgttgttaaagggagtcggtaatttttgggcgcggaggtaggaagagtcgtcgtcgtcgtttcgggttcgtcgcgtcgcgtcgagcgtcgttttggtaggagttgtttttgtagaggtagcgagagggagatatcgggcgcgcgagagcgtcgcgtttatttttttcggtttagtttcgtcgcgttcgcgttcgtttttgttcgcgtcgttcgttcgttcgttcggcgcgtcggaggtagacgcgttgaacgtttttagatgtggttgcggcggcgcgtagggagtcgggcgtacggcgcggggcgtacggcggcggattggagttcgaagtcgggttttttttcggcgttcgcggtagcgtcgttcgagcgagtttttcgttcgtatgacgttaaagggagcgggtttcggtcgtcggcgggcgaggggcggcgtgaggagttttcggggaggtcggggcgcgcggcgtattcgggcgttagtcgcggtggtcgcggtggtcgcggcgcggatatattttttcgcgtttcgtcggcggcgtcgcgtttttcgcgtcggtttgtagtttttcgttcgcgttttttttttcgttgcggcggcgcgtttttgttgggtcggttacgtcgggaaggtttttgtgagcggaattttaagga

SEQ ID NO: 2640 - DNA, 697 bp, Artificial Sequence
  chemically treated genomic DNA (Homo sapiens) CpG-island No: 2640
tccttaaaattccgctcacaaaaaccttcccgacgtaaccgacccaacaaaaacgcgccgccgcaacgaaaaaaaaaacgcgaacgaaaaactacaaaccgacgcgaaaaacgcgacgccgccgacgaaacgcgaaaaaatatatccgcgccgcgaccaccgcgaccaccgcgactaacgcccgaatacgccgcgcgccccgacctccccgaaaactcctcacgccgcccctcgcccgccgacgaccgaaacccgctccctttaacgtcatacgaacgaaaaactcgctcgaacgacgctaccgcgaacgccgaaaaaaaacccgacttcgaactccaatccgccgccgtacgccccgcgccgtacgcccgactccctacgcgccgccgcaaccacatctaaaaacgttcaacgcgtctacctccgacgcgccgaacgaacgaacgaacgacgcgaacaaaaacgaacgcgaacgcgacgaaactaaaccgaaaaaaataaacgcgacgctctcgcgcgcccgatatctccctctcgctacctctacaaaaacaactcctaccaaaacgacgctcgacgcgacgcgacgaacccgaaacgacgacgacgactcttcctacctccgcgcccaaaaattaccgactccctttaacaacaaaaaaccgaacaaaaacctcaaaaaaactcgctaaaaata

SEQ ID NO: 2641 - DNA, 525 bp, Artificial Sequence
  chemically treated genomic DNA (Homo sapiens) CpG-island No: 2641
taaatataagaagtaggattcgttgtagttttgcgatacggagtatttcgtgttcgtgtattagtcggttattcgggaggttaacgggatcgtggagtgcgggttttgttagaagtaagatcgtagggcggcgtcgttcgtttcgttatatttttttcgttttcggtaaggcggaagtgcgggtagggtttcggaattttcgggaaacggttttatagtcgggaggaggggatgcgtttaagtgtagagtttacgttttcggggttttttttcgtcgtttttagtggaggagatacgtaggaggcggacggtttgaggcgggtaggacggttggggatcgggatagtcgggatggggagaggtggtttcgaggtttgattttgtgtgtcgagtttatttcgtcgaggtcgtagtcgtgattttacggcgtttttgggcgagtgggtttttcggcgggttttttttagttttgtttaggcggtgtttagggcggtgttagtgttcgcgtttgagttgcgtggggag

SEQ ID NO: 2642 - DNA, 525 bp, Artificial Sequence
  chemically treated genomic DNA (Homo sapiens) CpG-island No: 2642
ctccccacgcaactcaaacgcgaacactaacaccgccctaaacaccgcctaaacaaaactaaaaaaaacccgccgaaaaacccactcgcccaaaaacgccgtaaaatcacgactacgacctcgacgaaataaactcgacacacaaaatcaaacctcgaaaccacctctccccatcccgactatcccgatccccaaccgtcctacccgcctcaaaccgtccgcctcctacgtatctcctccactaaaaacgacgaaaaaaaaccccgaaaacgtaaactctacacttaaacgcatcccctcctcccgactataaaaccgtttcccgaaaattccgaaaccctacccgcacttccgccttaccgaaaacgaaaaaaatataacgaaacgaacgacgccgccctacgatcttacttctaacaaaacccgcactccacgatcccgttaacctcccgaataaccgactaatacacgaacacgaaatactccgtatcgcaaaactacaacgaatcctacttcttatattta

SEQ ID NO: 2643 - DNA, 525 bp, Artificial Sequence
  chemically treated genomic DNA (Homo sapiens) CpG-island No: 2643
ttttttacgtagtttaggcgcgggtattggtatcgttttgggtatcgtttgagtagggttgggggagattcgtcgaagggtttattcgtttagagacgtcgtggggttacggttgcggtttcggcggggtgggttcgatatatagggttaggtttcgggattatttttttttatttcggttgtttcggtttttagtcgttttgttcgttttagatcgttcgttttttgcgtgttttttttattgaggacggcgggggaagatttcgggagcgtgggttttgtatttagacgtatttttttttttcggttgtggagtcgtttttcgggggtttcggggttttgttcgtattttcgttttgtcgagggcgggaggagtgtggcgggacgggcggcgtcgttttgcggttttatttttggtagggttcgtattttacgatttcgttggtttttcggatggtcggttggtatacgaatacggggtatttcgtgtcgtagggttgtagcgggttttgttttttgtgtttg

SEQ ID NO: 2644 - DNA, 525 bp, Artificial Sequence
  chemically treated genomic DNA (Homo sapiens) CpG-island No: 2644
caaacacaaaaaacaaaacccgctacaaccctacgacacgaaataccccgtattcgtataccaaccgaccatccgaaaaaccaacgaaatcgtaaaatacgaaccctaccaaaaataaaaccgcaaaacgacgccgcccgtcccgccacactcctcccgccctcgacaaaacgaaaatacgaacaaaaccccgaaacccccgaaaaacgactccacaaccgaaaaaaaaaaatacgtctaaatacaaaacccacgctcccgaaatcttcccccgccgtcctcaataaaaaaaacacgcaaaaaacgaacgatctaaaacgaacaaaacgactaaaaaccgaaacaaccgaaataaaaaaaaataatcccgaaacctaaccctatatatcgaacccaccccgccgaaaccgcaaccgtaaccccacgacgtctctaaacgaataaacccttcgacgaatctcccccaaccctactcaaacgatacccaaaacgataccaatacccgcgcctaaactacgtaaaaaa

SEQ ID NO: 2645 - DNA, 1688 bp, Artificial Sequence
  chemically treated genomic DNA (Homo sapiens) CpG-island No: 2645
aattatgcgattaggttacgttacgtagtatttatacgtttaattatgcgattaggtcgcgttacgtagcgttaatacgtttaattatgcgattaggttaggttacgtagtatttatacgtttaattatgcgattaggttgcgttatatagtatttatacgtttaattatgcgattaggttaggttacgtagtattaatacgttaaattatgcgattaggttaggttacgtagtatttatacgtttaattatgcgattaggttgcgttatatagtatttatacgtttaattatgcgattaggttaggttacgtagtattaatacgtttaattatgcgattaggttaggttacgtagtatttatacgtttaattatgcgattaggtcgcgttacgtagtatttatacgtttaattatgcgattaggtcgcgttatatagtatttatatatttaattatgcgattaggtcgcgttacgtagtattaatacgtttaattatgcgattaggtcgcgttacgtagtattaatacgtttaattatgcgattaggttaggttatgtagtatttatacgtttaattatgcgattaggttaggttacgtagtatttatacgtttaattatgcgattaggttaggttacgtagtatttatacgtttaattatgcgattaggttaggttatgtagtatttatacgttttagtatgcgattaggttaggttacgtagtatttatacgtttaattatgcgattaggttaggttacgtagtatttatacgtttaattatgcgattaggttgcgttatatagtatttatacgtttaattatgcgattaggttaggttacgtagtattaatacgtttaattatgcgattaggttaggttacgtagtatttatacgtttaattatgcgattaggttgcgttatatagtatttatacgtttaattatgcgattaggttaggttacgtagtattaatacgtttaattatgcgattaggttaggttacgtagtatttatacgtttaattatgcgattaggtcgcgttacgtagtatttatacgtttaattatgtaattaggtcgcgttatatagtatttatacgtttaattatgcgattaggtcgcgttacgtagtattaatacgtttaattatgcgattaggtcgcgttacgtagtattaatatgtttaattatgcgattaggttaggttacgtagtatttatacgtttaattatgcgattaggttaggttacgtagtatttatacgtttaattatgcgattaggttaggttacgtagtattaatacgtttaattatgcgattaggttaggttacgtagtatttatacgtttaattatgcgattaggtcgtattacgtagtattaatacgtttaattatgtaattaggtcgcgttacgtagtattaatacgttttattatgcgattaggttaggttacgtagtatttatacgtttaattatgcgattaggtcgcgttacgtagtatttatacgtttaattatgtaattaggtcgcgttatatagtattaatacgttttaattatatacgtacgcgtgcgcgcgcgcgcgcgcgcgcgtatatatatatatatatatattatatttttttttatcgagtttttttgagattttagttcgggacgggattgcgttgggagttttgtagg

SEQ ID NO: 2646 - DNA, 1688 bp, Artificial Sequence
  chemically treated genomic DNA (Homo sapiens) CpG-island No: 2646
cctacaaaactcccaacgcaatcccgtcccgaactaaaatctcaaaaaaactcgataaaaaaaaatataatatatatatatatatatatacgcgcgcgcgcgcgcgcgcgcacgcgtacgtatataattaaaacgtattaatactatataacgcgacctaattacataattaaacgtataaatactacgtaacgcgacctaatcgcataattaaacgtataaatactacgtaacctaacctaatcgcataataaaacgtattaatactacgtaacgcgacctaattacataattaaacgtattaatactacgtaatacgacctaatcgcataattaaacgtataaatactacgtaacctaacctaatcgcataattaaacgtattaatactacgtaacctaacctaatcgcataattaaacgtataaatactacgtaacctaacctaatcgcataattaaacgtataaatactacgtaacctaacctaatcgcataattaaacatattaatactacgtaacgcgacctaatcgcataattaaacgtattaatactacgtaacgcgacctaatcgcataattaaacgtataaatactatataacgcgacctaattacataattaaacgtataaatactacgtaacgcgacctaatcgcataattaaacgtataaatactacgtaacctaacctaatcgcataattaaacgtattaatactacgtaacctaacctaatcgcataattaaacgtataaatactatataacgcaacctaatcgcataattaaacgtataaatactacgtaacctaacctaatcgcataattaaacgtattaatactacgtaacctaacctaatcgcataattaaacgtataaatactatataacgcaacctaatcgcataattaaacgtataaatactacgtaacctaacctaatcgcataattaaacgtataaatactacgtaacctaacctaatcgcatactaaaacgtataaatactacataacctaacctaatcgcataattaaacgtataaatactacgtaacctaacctaatcgcataattaaacgtataaatactacgtaacctaacctaatcgcataattaaacgtataaatactacataacctaacctaatcgcataattaaacgtattaatactacgtaacgcgacctaatcgcataattaaacgtattaatactacgtaacgcgacctaatcgcataattaaatatataaatactatataacgcgacctaatcgcataattaaacgtataaatactacgtaacgcgacctaatcgcataattaaacgtataaatactacgtaacctaacctaatcgcataattaaacgtattaatactacgtaacctaacctaatcgcataattaaacgtataaatactatataacgcaacctaatcgcataattaaacgtataaatactacgtaacctaacctaatcgcataatttaacgtattaatactacgtaacctaacctaatcgcataattaaacgtataaatactatataacgcaacctaatcgcataattaaacgtataaatactacgtaacctaacctaatcgcataattaaacgtattaacgctacgtaacgcgacctaatcgcataattaaacgtataaatactacgtaacgtaacctaatcgcataatt

SEQ ID NO: 2647 - DNA, 1688 bp, Artificial Sequence
  chemically treated genomic DNA (Homo sapiens) CpG-island No: 2647
tttgtagagtttttagcgtagtttcgtttcgagttggggttttaggggagttcggtgggggggggtgtggtgtgtgtgtgtgtgtgtgtgcgcgcgcgcgcgcgcgcgcgtacgcgtgcgtgtgtggttggggcgtgttagtgttgtgtggcgcggtttggttgtatggttaagcgtgtgagtgttgcgtggcgcggtttggtcgtatggttaagcgtgtgagtgttgcgtgatttggtttggtcgtatggtaaagcgtgttagtgttgcgtggcgcggtttggttgtatggttaagcgtgttagtgttgcgtggtgcggtttggtcgtatggttaagcgtgtgagtgttgcgtggtttggtttggtcgtatggttaagcgtgttagtgttgcgtggtttggtttggtcgtatggttaagcgtgtgagtgttacgtggtttggtttggtcgtatggttaagcgtgtgagtgttgcgtggtttggtttggtcgtatggttaagtatgttagtgttacgtggcgcggtttggtcgtatggttaagcgtgttagtgttgcgtggcgcggtttggtcgtatggttaagcgtgtgagtgttgtgtggcgcggtttggttgtatggttaagcgtgtgagtgttgcgtggcgcggtttggtcgtatggttaagcgtgtgagtgttgcgtggtttggtttggtcgtatggttaagcgtgttagtgttgcgtggtttggtttggtcgtatggttaagcgtgtgagtgttgtgtggcgtagtttggtcgtatggttaagcgtgtgagtgttgcgtggtttggtttggtcgtatggttaagcgtgttagtgttgcgtggtttggtttggtcgtatggttaagcgtgtgagtgttgtgtggcgtagtttggtcgtatggttaagcgtgtgagtgttgcgtggtttggtttggtcgtatggttaagcgtgtgagtgttgcgtggtttggtttggtcgtatgttgaagcgtgtgagtgttgtatggtttggtttggtcgtatggttaagcgtgtgagtgttgcgtggtttggtttggtcgtatggttaagcgtgtgagtgttgcgtggtttggtttggtcgtatggttaagcgtgtgagtgttgtatggtttggtttggtcgtatggttaagcgtgttagtgttacgtggcgcggtttggtcgtatggttaagcgtgttagtgttgcgtggcgcggtttggtcgtatggttaagtgtgtgagtgttgtgtggcgcggtttggtcgtatggttaagcgtgtgagtgttgcgtggcgcggtttggtcgtatggttaagcgtgtgagtgttgcgtggtttggtttggtcgtatggttaagcgtgttagtgttgcgtggtttggtttggtcgtatggttaagcgtgtgagtgttgtgtggcgtagtttggtcgtatggttaaacgtgtgagtgttgcgtggtttggtttggtcgtatggtttagcgtgttagtgttgcgtggtttggtttggtcgtatggttaagcgtgtgagtgttgtgtggcgtagtttggtcgtatggttaagcgtgtgagtgttgcgtggtttggtttggtcgtatggttaagcgtgttagcgttgcgtggcgcggtttggtcgtatgattaagcgtgtgagtgttgcgtggcgtggtttggtcgtatggtt

SEQ ID NO: 2648 - DNA, 1688 bp, Artificial Sequence
  chemically treated genomic DNA (Homo sapiens) CpG-island No: 2648
aaccatacgaccaaaccacgccacgcaacactcacacgcttaatcatacgaccaaaccgcgccacgcaacgctaacacgcttaaccatacgaccaaaccaaaccacgcaacactcacacgcttaaccatacgaccaaactacgccacacaacactcacacgcttaaccatacgaccaaaccaaaccacgcaacactaacacgctaaaccatacgaccaaaccaaaccacgcaacactcacacgtttaaccatacgaccaaactacgccacacaacactcacacgcttaaccatacgaccaaaccaaaccacgcaacactaacacgcttaaccatacgaccaaaccaaaccacgcaacactcacacgcttaaccatacgaccaaaccgcgccacgcaacactcacacgcttaaccatacgaccaaaccgcgccacacaacactcacacacttaaccatacgaccaaaccgcgccacgcaacactaacacgcttaaccatacgaccaaaccgcgccacgtaacactaacacgcttaaccatacgaccaaaccaaaccatacaacactcacacgcttaaccatacgaccaaaccaaaccacgcaacactcacacgcttaaccatacgaccaaaccaaaccacgcaacactcacacgcttaaccatacgaccaaaccaaaccatacaacactcacacgcttcaacatacgaccaaaccaaaccacgcaacactcacacgcttaaccatacgaccaaaccaaaccacgcaacactcacacgcttaaccatacgaccaaactacgccacacaacactcacacgcttaaccatacgaccaaaccaaaccacgcaacactaacacgcttaaccatacgaccaaaccaaaccacgcaacactcacacgcttaaccatacgaccaaactacgccacacaacactcacacgcttaaccatacgaccaaaccaaaccacgcaacactaacacgcttaaccatacgaccaaaccaaaccacgcaacactcacacgcttaaccatacgaccaaaccgcgccacgcaacactcacacgcttaaccatacaaccaaaccgcgccacacaacactcacacgcttaaccatacgaccaaaccgcgccacgcaacactaacacgcttaaccatacgaccaaaccgcgccacgtaacactaacatacttaaccatacgaccaaaccaaaccacgcaacactcacacgcttaaccatacgaccaaaccaaaccacgtaacactcacacgcttaaccatacgaccaaaccaaaccacgcaacactaacacgcttaaccatacgaccaaaccaaaccacgcaacactcacacgcttaaccatacgaccaaaccgcaccacgcaacactaacacgcttaaccatacaaccaaaccgcgccacgcaacactaacacgctttaccatacgaccaaaccaaatcacgcaacactcacacgcttaaccatacgaccaaaccgcgccacgcaacactcacacgcttaaccatacaaccaaaccgcgccacacaacactaacacgccccaaccacacacgcacgcgtacgcgcgcgcgcgcgcgcgcgcacacacacacacacacacaccacacccccccccaccgaactcccctaaaaccccaactcgaaacgaaactacgctaaaaactctacaaa

SEQ ID NO: 2649 - DNA, 623 bp, Artificial Sequence
  chemically treated genomic DNA (Homo sapiens) CpG-island No: 2649
ggggcggagcgtgaaaaatagttcgtgcgtttcggtcgattttgtagtgcgacgggcggagtttttagacgtttcgttttacgtcgtatgcgtttcgggaacgcgtggggcggagttttcggaggtttcgttttgttgtcgattttgtggagcggagggtgaagttttcggatgttagttttttatcgttggttcggtcgcgttgtggcgaagggggcggagtttgtattcgtttcgttttttttcgtttcgttcgtttcgcgtcgcgcggggaggaggaggaggagtcgcggcggggttcgtattgtagcgttagcgttcgagcgggcggtcgagttttcggagcggtttggtttcgagtttcgagcgggcgtcgtttagtagtaggtcgcggtcgtagttttatttagtttcgcgttcgttatgtcgttcgcgggtttcgtttgagttgcggttttcgcgcgcgggcgggtttggggacggcggggttatgcgcgcgttgttttaacgatgtcgttcgtcgcgttcgttcgtttggcgttggttttgggtttgggtttgtggttcggggcgttggcggggggtttcgggcgcggttgcgggttttgcgagtttttttgttt

SEQ ID NO: 2650 - DNA, 623 bp, Artificial Sequence
  chemically treated genomic DNA (Homo sapiens) CpG-island No: 2650
aaacaaaaaaactcgcaaaacccgcaaccgcgcccgaaaccccccgccaacgccccgaaccacaaacccaaacccaaaaccaacgccaaacgaacgaacgcgacgaacgacatcgttaaaacaacgcgcgcataaccccgccgtccccaaacccgcccgcgcgcgaaaaccgcaactcaaacgaaacccgcgaacgacataacgaacgcgaaactaaataaaactacgaccgcgacctactactaaacgacgcccgctcgaaactcgaaaccaaaccgctccgaaaactcgaccgcccgctcgaacgctaacgctacaatacgaaccccgccgcgactcctcctcctcctccccgcgcgacgcgaaacgaacgaaacgaaaaaaaacgaaacgaatacaaactccgcccccttcgccacaacgcgaccgaaccaacgataaaaaactaacatccgaaaacttcaccctccgctccacaaaatcgacaacaaaacgaaacctccgaaaactccgccccacgcgttcccgaaacgcatacgacgtaaaacgaaacgtctaaaaactccgcccgtcgcactacaaaatcgaccgaaacgcacgaactatttttcacgctccgcccc

SEQ ID NO: 2651 - DNA, 623 bp, Artificial Sequence
  chemically treated genomic DNA (Homo sapiens) CpG-island No: 2651
aggtaggggggttcgtagggttcgtagtcgcgttcggggtttttcgttagcgtttcgagttataggtttaggtttagggttagcgttaggcgggcgggcgcggcgggcggtatcgttagggtagcgcgcgtatggtttcgtcgtttttaggttcgttcgcgcgcggaggtcgtagtttaggcggggttcgcggacggtatggcgggcgcggggttggatggggttgcggtcgcgatttgttgttgagcgacgttcgttcggggttcggggttaggtcgtttcgggagttcggtcgttcgttcggacgttggcgttgtagtgcgggtttcgtcgcggtttttttttttttttttcgcgcggcgcggggcggacggggcgagggggggcggggcgggtgtaggtttcgtttttttcgttatagcgcgatcgggttagcgatgagggattggtattcggaggttttatttttcgttttatagggtcggtagtagggcggggttttcggaagtttcgttttacgcgttttcggggcgtatgcgacgtggggcggagcgtttggaagtttcgttcgtcgtattgtagagtcggtcgaggcgtacgagttattttttacgtttcgtttt

SEQ ID NO: 2652 - DNA, 623 bp, Artificial Sequence
  chemically treated genomic DNA (Homo sapiens) CpG-island No: 2652
aaaacgaaacgtaaaaaataactcgtacgcctcgaccgactctacaatacgacgaacgaaacttccaaacgctccgccccacgtcgcatacgccccgaaaacgcgtaaaacgaaacttccgaaaaccccgccctactaccgaccctataaaacgaaaaataaaacctccgaataccaatccctcatcgctaacccgatcgcgctataacgaaaaaaacgaaacctacacccgccccgccccccctcgccccgtccgccccgcgccgcgcgaaaaaaaaaaaaaaaaaccgcgacgaaacccgcactacaacgccaacgtccgaacgaacgaccgaactcccgaaacgacctaaccccgaaccccgaacgaacgtcgctcaacaacaaatcgcgaccgcaaccccatccaaccccgcgcccgccataccgtccgcgaaccccgcctaaactacgacctccgcgcgcgaacgaacctaaaaacgacgaaaccatacgcgcgctaccctaacgataccgcccgccgcgcccgcccgcctaacgctaaccctaaacctaaacctataactcgaaacgctaacgaaaaaccccgaacgcgactacgaaccctacgaacccccctacct

SEQ ID NO: 2653 - DNA, 1231 bp, Artificial Sequence
  chemically treated genomic DNA (Homo sapiens) CpG-island No: 2653
cgcgggaggaggcgaggggttttcgttcgtttcgtcgtcgcgattttttttattttttcggtttgcggggttttttttttgggttcgcgcgttcggtttttttttcgggttttttcgagggcgggacgtttcgggttttttcgtttttttaggttatttttcggtcgtgttttagcgttgttttcgggtcgggggcggggtcgcggggggggggtggcgtgaggatggggtcgaggaggacgcgcgcggttcggcgttttattttttttttttatttttttttttcggtgttcgtttttcgcggtcgcgtcgtttttttttttttttttttcggtttagcgtcggttttcgtcgttttttttttcgacgcgtacgtttcgtttggtagttggcgtttcgggtttggggtcgtagcggtgagaggggttttgttgggagggagggagcgagcgagcgaggggaggggtggaggtcgtttttcgcgtttttttttttcgttttttttcgcggtcggcgggtttttttttcgtcgtttttttttttttttttttcgttcgttcgttttttttttaagatattttcgtacggttcggtcgtcgcggttattttttttgttcgagttgtagatgtggcggagcggtcgggcgtcgggcggtcgtgttaggggagttcgcgtttcgtgaggtttcgcgtttcggttttcgttcgtttcggtttttttttcgttcggtttttcgcgtttttcgatcgtcggagttcgtagttcggatttcgatcgttttcgtcgttgaggtaggaagtttttcgggcgtcgcgtcgtggggatcgggtcggggcgggggggggggggttcgtttgtcgcgtcggggttgcggggttcgagggttttttttttcgttcgcgttcgcgtttcgggttattgtgagttttcgtcgaggttttcgcgttcgttcgttcgttggttcgcgcgttttttttttcgtcggtttttcggtcgggtttttcgagttttcggtttttttttttttttttttttttttttcgtttggaggtcgggtcgagtagcgttcgggttcggggcgggcgtaaattttagttgggaagttgggcggtcgcggtggggggcgtgcggcgaggtgagaggggggtattcggagtttgggtatgaagttgttcggggtagtcgttttttttttcggtcgcgtcggggttgttgttaggaagggttttg

SEQ ID NO: 2654 - DNA, 1231 bp, Artificial Sequence
  chemically treated genomic DNA (Homo sapiens) CpG-island No: 2654
caaaacccttcctaacaacaaccccgacgcgaccgaaaaaaaaaacgactaccccgaacaacttcatacccaaactccgaatacccccctctcacctcgccgcacgccccccaccgcgaccgcccaacttcccaactaaaatttacgcccgccccgaacccgaacgctactcgacccgacctccaaacgaaaaaaaaaaaaaaaaaaaaaaaaaaaccgaaaactcgaaaaacccgaccgaaaaaccgacgaaaaaaaaaacgcgcgaaccaacgaacgaacgaacgcgaaaacctcgacgaaaactcacaataacccgaaacgcgaacgcgaacgaaaaaaaaaaccctcgaaccccgcaaccccgacgcgacaaacgaacccccccccccccgccccgacccgatccccacgacgcgacgcccgaaaaacttcctacctcaacgacgaaaacgatcgaaatccgaactacgaactccgacgatcgaaaaacgcgaaaaaccgaacgaaaaaaaaaccgaaacgaacgaaaaccgaaacgcgaaacctcacgaaacgcgaactcccctaacacgaccgcccgacgcccgaccgctccgccacatctacaactcgaacaaaaaaaataaccgcgacgaccgaaccgtacgaaaatatcttaaaaaaaaaacgaacgaacgaaaaaaaaaaaaaaaaaaacgacgaaaaaaaaacccgccgaccgcgaaaaaaaacgaaaaaaaaaaacgcgaaaaacgacctccacccctcccctcgctcgctcgctccctccctcccaacaaaacccctctcaccgctacgaccccaaacccgaaacgccaactaccaaacgaaacgtacgcgtcgaaaaaaaaaacgacgaaaaccgacgctaaaccgaaaaaaaaaaaaaaaaaaacgacgcgaccgcgaaaaacgaacaccgaaaaaaaaaaataaaaaaaaaaaataaaacgccgaaccgcgcgcgtcctcctcgaccccatcctcacgccaccccccccccgcgaccccgcccccgacccgaaaacaacgctaaaacacgaccgaaaaataacctaaaaaaacgaaaaaacccgaaacgtcccgccctcgaaaaaacccgaaaaaaaaaccgaacgcgcgaacccaaaaaaaaaaccccgcaaaccgaaaaaataaaaaaaatcgcgacgacgaaacgaacgaaaacccctcgcctcctcccgcg

SEQ ID NO: 2655 - DNA, 1231 bp, Artificial Sequence
  chemically treated genomic DNA (Homo sapiens) CpG-island No: 2655
taaagttttttttagtagtagtttcggcgcggtcgagaggaggggcggttgtttcggataattttatgtttaggtttcgggtattttttttttatttcgtcgtacgttttttatcgcggtcgtttaattttttagttgaagtttgcgttcgtttcgggttcgggcgttgttcggttcggtttttagacggagggaaggaaggagggagaagaaagatcgagagttcgagggattcggtcggggagtcggcgagggagggagcgcgcgagttagcgagcgagcgaacgcgggggtttcggcgagggtttataatggttcggggcgcggacgcgagcgggggaggagattttcgggtttcgtagtttcggcgcgataggcgggttttttttttttcgtttcggttcggtttttacggcgcgacgttcggggggttttttattttagcggcgggggcggtcgggattcgggttgcgggtttcggcggtcggggggcgcggggagtcgagcgggggaggggtcgggacgggcgggggtcggggcgcgaggttttacggggcgcgggtttttttggtacggtcgttcggcgttcggtcgtttcgttatatttgtagttcgggtagggaaggtggtcgcggcggtcgggtcgtgcggggatgttttagagggagggcgggcgggcgggaggagggaggagggaggcggcgggaggagggttcgtcggtcgcggaggagggcgaggaggaggggcgcggggggcggtttttattttttttttcgttcgttcgtttttttttttttagtaaaattttttttatcgttgcggttttaggttcggggcgttagttgttaggcggggcgtgcgcgtcgggggagggggcggcgggagtcggcgttgggtcgagggagggggaagggagggcggcgcggtcgcggggagcgggtatcgggagggaggggtgagggagggaagtggggcgtcgagtcgcgcgcgtttttttcggttttatttttacgttatttttttttcgcggtttcgttttcggttcgagggtagcgttaggatacggtcgggaggtggtttgggggggcgggggagttcgagacgtttcgttttcggggaagttcgaggagggggtcgggcgcgcgggtttagaggaaaagtttcgtagatcgggaagatggaggaggtcgcggcggcggagcgggcggggatttttcgttttttttcgcg

SEQ ID NO: 2656 - DNA, 1231 bp, Artificial Sequence
  chemically treated genomic DNA (Homo sapiens) CpG-island No: 2656
cgcgaaaaaaaacgaaaaatccccgcccgctccgccgccgcgacctcctccatcttcccgatctacgaaacttttcctctaaacccgcgcgcccgaccccctcctcgaacttccccgaaaacgaaacgtctcgaactcccccgcccccccaaaccacctcccgaccgtatcctaacgctaccctcgaaccgaaaacgaaaccgcgaaaaaaaaataacgtaaaaataaaaccgaaaaaaacgcgcgcgactcgacgccccacttccctccctcacccctccctcccgatacccgctccccgcgaccgcgccgccctcccttccccctccctcgacccaacgccgactcccgccgccccctcccccgacgcgcacgccccgcctaacaactaacgccccgaacctaaaaccgcaacgataaaaaaaattttactaaaaaaaaaaaaacgaacgaacgaaaaaaaaaataaaaaccgccccccgcgcccctcctcctcgccctcctccgcgaccgacgaaccctcctcccgccgcctccctcctccctcctcccgcccgcccgccctccctctaaaacatccccgcacgacccgaccgccgcgaccaccttccctacccgaactacaaatataacgaaacgaccgaacgccgaacgaccgtaccaaaaaaacccgcgccccgtaaaacctcgcgccccgacccccgcccgtcccgacccctcccccgctcgactccccgcgccccccgaccgccgaaacccgcaacccgaatcccgaccgcccccgccgctaaaataaaaaaccccccgaacgtcgcgccgtaaaaaccgaaccgaaacgaaaaaaaaaaaacccgcctatcgcgccgaaactacgaaacccgaaaatctcctcccccgctcgcgtccgcgccccgaaccattataaaccctcgccgaaacccccgcgttcgctcgctcgctaactcgcgcgctccctccctcgccgactccccgaccgaatccctcgaactctcgatctttcttctccctccttccttccctccgtctaaaaaccgaaccgaacaacgcccgaacccgaaacgaacgcaaacttcaactaaaaaattaaacgaccgcgataaaaaacgtacgacgaaataaaaaaaaaatacccgaaacctaaacataaaattatccgaaacaaccgcccctcctctcgaccgcgccgaaactactactaaaaaaaacttta

SEQ ID NO: 2657 - DNA, 700 bp, Artificial Sequence
  chemically treated genomic DNA (Homo sapiens) CpG-island No: 2657
ggaatgcgtgggtttcggttcgtcggaagtttttttttttaggggtttagtttatttttaaattgtttcgcgtgaattgtttcgcgggcgcgtacgttttttcgcgtagtttttgtagtcggttggcgggagatttcggtcgtttttttttcgtcggtagaagttcggtcggggaagtttcggttgcgtacgtttatttttaggatttcggagtttttagcggttgtcgtagtttcgcgaattatttgtaagtttcgcggcgtcgtagtttttttttttttttttcgggtattcgttttttagttcgcgttttttttttagattttcgatttttggttttgttttcgttttttgtgtttcggcggttgcggggttcgtcgtaaagagttaagagtcggttttcgagacggtttcggcggtttcgggtttttagatttcgttcgtcgtttttgattggttgagcgtttgttagtagtaaagggtattagatggtaaagttgggatttttataaaggcgtggtggcgatttttcgtaatcgtcggtagtttatgatattagataggaacgtttgggatgtcgcgttgtttttggttaattttcgaggaggaggagggtttcgtcggttaagagttaattagtttcgtacggcgaggggggaggcgttagttttttggggatattggttgttattgtattttt

SEQ ID NO: 2658 - DNA, 700 bp, Artificial Sequence
  chemically treated genomic DNA (Homo sapiens) CpG-island No: 2658
aaaaatacaataacaaccaatatccccaaaaaactaacgcctcccccctcgccgtacgaaactaattaactcttaaccgacgaaaccctcctcctcctcgaaaattaaccaaaaacaacgcgacatcccaaacgttcctatctaatatcataaactaccgacgattacgaaaaatcgccaccacgcctttataaaaatcccaactttaccatctaataccctttactactaacaaacgctcaaccaatcaaaaacgacgaacgaaatctaaaaacccgaaaccgccgaaaccgtctcgaaaaccgactcttaactctttacgacgaaccccgcaaccgccgaaacacaaaaaacgaaaacaaaaccaaaaatcgaaaatctaaaaaaaaaacgcgaactaaaaaacgaatacccgaaaaaaaaaaaaaaaaactacgacgccgcgaaacttacaaataattcgcgaaactacgacaaccgctaaaaactccgaaatcctaaaaataaacgtacgcaaccgaaacttccccgaccgaacttctaccgacgaaaaaaaaacgaccgaaatctcccgccaaccgactacaaaaactacgcgaaaaaacgtacgcgcccgcgaaacaattcacgcgaaacaatttaaaaataaactaaacccctaaaaaaaaaaacttccgacgaaccgaaacccacgcattcc

SEQ ID NO: 2659 - DNA, 700 bp, Artificial Sequence
  chemically treated genomic DNA (Homo sapiens) CpG-island No: 2659
aggagtatagtggtagttagtgtttttagaaaattggcgttttttttttcgtcgtgcggggttaattaatttttagtcggcgggatttttttttttttcggaggttggttaggagtagcgcggtattttaggcgtttttgtttgatgttataggttgtcggcgattgcggagaatcgttattacgtttttatgaaggttttaattttgttatttgatattttttattattgataggcgtttagttaattaggagcggcgagcggggtttggggattcggagtcgtcgaagtcgtttcgggaatcggtttttaattttttgcggcgggtttcgtagtcgtcgaggtatagagggcgggagtagggttaggggtcgggaatttgggagaggggcgcgagttaaagagcggatgttcggaggaaagaaggaagggttgcgacgtcgcggggtttgtaggtggttcgcggggttgcggtagtcgttgggagtttcgaggttttggggatgggcgtgcgtagtcggggttttttcggtcgggtttttgtcggcgaaagggaagcggtcgggatttttcgttagtcggttgtaaaggttgcgcgaaagggcgtgcgcgttcgcgggatagtttacgcggggtaatttggaaataagttggatttttgagaagaaaagttttcgacggatcgaagtttacgtatttt

SEQ ID NO: 2660 - DNA, 700 bp, Artificial Sequence
  chemically treated genomic DNA (Homo sapiens) CpG-island No: 2660
aaaatacgtaaacttcgatccgtcgaaaacttttcttctcaaaaatccaacttatttccaaattaccccgcgtaaactatcccgcgaacgcgcacgccctttcgcgcaacctttacaaccgactaacgaaaaatcccgaccgcttccctttcgccgacaaaaacccgaccgaaaaaaccccgactacgcacgcccatccccaaaacctcgaaactcccaacgactaccgcaaccccgcgaaccacctacaaaccccgcgacgtcgcaacccttccttctttcctccgaacatccgctctttaactcgcgcccctctcccaaattcccgacccctaaccctactcccgccctctatacctcgacgactacgaaacccgccgcaaaaaattaaaaaccgattcccgaaacgacttcgacgactccgaatccccaaaccccgctcgccgctcctaattaactaaacgcctatcaataataaaaaatatcaaataacaaaattaaaaccttcataaaaacgtaataacgattctccgcaatcgccgacaacctataacatcaaacaaaaacgcctaaaataccgcgctactcctaaccaacctccgaaaaaaaaaaaaatcccgccgactaaaaattaattaaccccgcacgacgaaaaaaaaaacgccaattttctaaaaacactaactaccactatactcct

SEQ ID NO: 2661 - DNA, 660 bp, Artificial Sequence
  chemically treated genomic DNA (Homo sapiens) CpG-island No: 2661
ggcgtcggttagggcggacgggttagggtgtttatcggtattaggcgaggtcgcgttcgtagtatttgtcgaagaagtggggtttagagtttagcgcgcggacgtcggggtgtagtcgtagaaattttagtagggcgcgcgtgtcgtttttttttacgttaacgatgagcgtttgcgggaagcgtcggcggtcgggatcgttggttaaaggtaggtcgggtgttttcgggcggtggacggagttggacggttcggagggcgcgggggtcggcgcgggggcgcgggcggtcggcgggtagcggtcggggagggcgtagaggtagtaggcgtcgagtattagggttacgagtagtatcggcgcgcgggacgttcgtagagcggttttttgttcggtttttgcgttttggtcgttttcggtttcgtcgtttaggtcgtcgttatttgttatggggtcgcgtcgtttttaggttcgggagcgggggtagtaggcgggcgcgtatttcggttcgcgcgtcgtttagttcgtgggtgttcggtttgtgttttgcgttcggcggtttcgtagtttgggagcgggcgcggggcgggatcgggggcggggtttggacgtttttttttttttttttttttcgtttatttcgttttcgaggttattgtttg

SEQ ID NO: 2662 - DNA, 660 bp, Artificial Sequence
  chemically treated genomic DNA (Homo sapiens) CpG-island No: 2662
caaacaataacctcgaaaacgaaataaacgaaaaaaaaaaaaaaaaaaaaacgtccaaaccccgcccccgatcccgccccgcgcccgctcccaaactacgaaaccgccgaacgcaaaacacaaaccgaacacccacgaactaaacgacgcgcgaaccgaaatacgcgcccgcctactacccccgctcccgaacctaaaaacgacgcgaccccataacaaataacgacgacctaaacgacgaaaccgaaaacgaccaaaacgcaaaaaccgaacaaaaaaccgctctacgaacgtcccgcgcgccgatactactcgtaaccctaatactcgacgcctactacctctacgccctccccgaccgctacccgccgaccgcccgcgcccccgcgccgacccccgcgccctccgaaccgtccaactccgtccaccgcccgaaaacacccgacctacctttaaccaacgatcccgaccgccgacgcttcccgcaaacgctcatcgttaacgtaaaaaaaaacgacacgcgcgccctactaaaatttctacgactacaccccgacgtccgcgcgctaaactctaaaccccacttcttcgacaaatactacgaacgcgacctcgcctaataccgataaacaccctaacccgtccgccctaaccgacgcc

SEQ ID NO: 2663 - DNA, 660 bp, Artificial Sequence
  chemically treated genomic DNA (Homo sapiens) CpG-island No: 2663
taggtagtggtttcggaggcggagtgggcgggggagggggaggggggagggcgtttagatttcgttttcggtttcgtttcgcgttcgtttttaggttgcgggatcgtcgggcgtagagtataagtcgggtatttacggattgagcggcgcgcgggtcgagatgcgcgttcgtttgttgttttcgttttcgggtttgggagcggcgcgattttatggtaggtagcggcggtttgggcggcggggtcgggggcggttagggcgtaggggtcgggtaaggggtcgttttgcgggcgtttcgcgcgtcgatgttgttcgtggttttggtgttcggcgtttattgtttttgcgtttttttcggtcgttgttcgtcggtcgttcgcgttttcgcgtcggttttcgcgtttttcgagtcgtttagtttcgtttatcgttcgggagtattcggtttgtttttggttagcggtttcggtcgtcggcgtttttcgtaagcgtttatcgttggcgtgaagaagggcggtacgcgcgttttgttggagtttttgcggttgtatttcgacgttcgcgcgttgggttttgagttttattttttcgataggtgttacgagcgcggtttcgtttggtatcggtgagtattttggttcgttcgttttgatcggcgtt

SEQ ID NO: 2664 - DNA, 660 bp, Artificial Sequence
  chemically treated genomic DNA (Homo sapiens) CpG-island No: 2664
aacgccgatcaaaacgaacgaaccaaaatactcaccgataccaaacgaaaccgcgctcgtaacacctatcgaaaaaataaaactcaaaacccaacgcgcgaacgtcgaaatacaaccgcaaaaactccaacaaaacgcgcgtaccgcccttcttcacgccaacgataaacgcttacgaaaaacgccgacgaccgaaaccgctaaccaaaaacaaaccgaatactcccgaacgataaacgaaactaaacgactcgaaaaacgcgaaaaccgacgcgaaaacgcgaacgaccgacgaacaacgaccgaaaaaaacgcaaaaacaataaacgccgaacaccaaaaccacgaacaacatcgacgcgcgaaacgcccgcaaaacgaccccttacccgacccctacgccctaaccgcccccgaccccgccgcccaaaccgccgctacctaccataaaatcgcgccgctcccaaacccgaaaacgaaaacaacaaacgaacgcgcatctcgacccgcgcgccgctcaatccgtaaatacccgacttatactctacgcccgacgatcccgcaacctaaaaacgaacgcgaaacgaaaccgaaaacgaaatctaaacgccctcccccctccccctcccccgcccactccgcctccgaaaccactaccta

SEQ ID NO: 2665 - DNA, 881 bp, Artificial Sequence
  chemically treated genomic DNA (Homo sapiens) CpG-island No: 2665
tacgtatttggtagtttttcgcgagatttagataagggttttcgtttaggagcgcggattcgggagtttagattcgattcgatgttcgcggattttcgtcgtttacgtagaggttcgttgtagcgattaataggatttacgtgttttgtcggaaaagaagaacgagatttattgggaagtagtttttatagtacgttaagcgtcgcgagattttcgtagtttcgttttaagcgggagcgggtcgagtttttataagataatttgtgattggtttcgcggtgtttcgtttttatcgggttttgagtgtttttgttcgttcggttttagtcgcggttcgggaatttacgttattcgaaaagcgattataaacgtcggcgttttcgtttttagtcgcggttcgggaatttattcgaagagtggttataaacgttcgcgtttttattgcgtttttttttttatttaggtaggttttgtcgcgttgattattggcgtttcgttggtggttttcgagatcggcgttggttgaaaatcgttttcggttttggtcgtggtcgcgggtgagattcggcgtttagagttttcgggggttttagtttatcgcgcgttgttttatgtgcggcggtgaaatttaggtttcgataggcgttgtcgtttttttttcgggtgcggtcgttcgcgaggtttggtttttgatttttgatttcgattgtagatttttaattttgtttttttttcgtaggatattggtttttttacgtttgatatcgacgtcgttaggatcgcggggttgggggaatttggttgttttacgttttttaaataaagttgttttgtttaatttattgtatgcgggtgtttttggggtttcgattcgtttatta

SEQ ID NO: 2666 - DNA, 881 bp, Artificial Sequence
  chemically treated genomic DNA (Homo sapiens) CpG-island No: 2666
taataaacgaatcgaaaccccaaaaacacccgcatacaataaattaaacaaaacaactttatttaaaaaacgtaaaacaaccaaattcccccaaccccgcgatcctaacgacgtcgatatcaaacgtaaaaaaaccaatatcctacgaaaaaaaaacaaaattaaaaatctacaatcgaaatcaaaaatcaaaaaccaaacctcgcgaacgaccgcacccgaaaaaaaaacgacaacgcctatcgaaacctaaatttcaccgccgcacataaaacaacgcgcgataaactaaaacccccgaaaactctaaacgccgaatctcacccgcgaccacgaccaaaaccgaaaacgattttcaaccaacgccgatctcgaaaaccaccaacgaaacgccaataatcaacgcgacaaaacctacctaaataaaaaaaaaaacgcaataaaaacgcgaacgtttataaccactcttcgaataaattcccgaaccgcgactaaaaacgaaaacgccgacgtttataatcgcttttcgaataacgtaaattcccgaaccgcgactaaaaccgaacgaacaaaaacactcaaaacccgataaaaacgaaacaccgcgaaaccaatcacaaattatcttataaaaactcgacccgctcccgcttaaaacgaaactacgaaaatctcgcgacgcttaacgtactataaaaactacttcccaataaatctcgttcttcttttccgacaaaacacgtaaatcctattaatcgctacaacgaacctctacgtaaacgacgaaaatccgcgaacatcgaatcgaatctaaactcccgaatccgcgctcctaaacgaaaacccttatctaaatctcgcgaaaaactaccaaatacgta

SEQ ID NO: 2667 - DNA, 881 bp, Artificial Sequence
  chemically treated genomic DNA (Homo sapiens) CpG-island No: 2667
tgataggcgagtcggggttttaagaatattcgtatgtagtgagttagataaaatagttttatttgaaagacgtgggatagttaagtttttttaatttcgcggttttggcgacgtcggtgttaggcgtgggaggattagtgttttgcggagaaagaataaggttaggggtttgtagtcggggttaggagttaggggttagatttcgcgagcgatcgtattcgggggggaggcggtagcgtttgtcggggtttgggttttatcgtcgtatatggggtagcgcgcggtgagttgaggttttcgggggttttgggcgtcgaattttattcgcggttacggttaaagtcgggggcgatttttaattaacgtcggtttcgaagattattagcgagacgttagtggttaacgcggtaggatttatttaagtgaagaggagagcgtaatggaggcgcggacgtttatagttatttttcgggtggattttcgagtcgcggttggggacggaggcgtcggcgtttatagtcgtttttcgggtgacgtagattttcgggtcgcggttggggtcggacgggtaagagtatttagagttcggtgagggcggggtatcgcggagttaattataggttgttttataggagttcggttcgttttcgtttggggcggggttgcggagatttcgcggcgtttggcgtgttataaaagttgttttttagtaggtttcgtttttttttttcgataaaatacgtgagttttgttggtcgttgtagcgggtttttgcgtgggcggcgggaattcgcggatatcgggtcgggtttaggttttcgagttcgcgtttttgggcgggagtttttgtttgggtttcgcggggggttgttagatgcgta

SEQ ID NO: 2668 - DNA, 881 bp, Artificial Sequence
  chemically treated genomic DNA (Homo sapiens) CpG-island No: 2668
tacgcatctaacaaccccccgcgaaacccaaacaaaaactcccgcccaaaaacgcgaactcgaaaacctaaacccgacccgatatccgcgaattcccgccgcccacgcaaaaacccgctacaacgaccaacaaaactcacgtattttatcgaaaaaaaaaaacgaaacctactaaaaaacaacttttataacacgccaaacgccgcgaaatctccgcaaccccgccccaaacgaaaacgaaccgaactcctataaaacaacctataattaactccgcgataccccgccctcaccgaactctaaatactcttacccgtccgaccccaaccgcgacccgaaaatctacgtcacccgaaaaacgactataaacgccgacgcctccgtccccaaccgcgactcgaaaatccacccgaaaaataactataaacgtccgcgcctccattacgctctcctcttcacttaaataaatcctaccgcgttaaccactaacgtctcgctaataatcttcgaaaccgacgttaattaaaaatcgcccccgactttaaccgtaaccgcgaataaaattcgacgcccaaaacccccgaaaacctcaactcaccgcgcgctaccccatatacgacgataaaacccaaaccccgacaaacgctaccgcctcccccccgaatacgatcgctcgcgaaatctaacccctaactcctaaccccgactacaaacccctaaccttattctttctccgcaaaacactaatcctcccacgcctaacaccgacgtcgccaaaaccgcgaaattaaaaaaacttaactatcccacgtctttcaaataaaactattttatctaactcactacatacgaatattcttaaaaccccgactcgcctatca

SEQ ID NO: 2669 - DNA, 767 bp, Artificial Sequence
  chemically treated genomic DNA (Homo sapiens) CpG-island No: 2669
cgtacggatcgtattcgatagttggtatttttatattttagaacgtcgaaaagtaggagtaaacgttggttataaatgtttttttatattggtattaaagagttaggttattagcgatgttatattcgtcggtttatttttatcgattcgcgaagtatttttatagtttacggttttttttttaggtcggaaacgttttcgttcgttttcgtttttcgatgtagtcgttattgttcgaagtaaagatggcgttaagtgcgcggcgtcggcggggacgttatagtggtcgcgcgcggtgacgttatcgtagcgcgtcgggagtgtggcgttttgtgaagagttcggtgttaattttttttacgcggcggtggttgtcgggattttagtaggttttagttggagcggcggcggcggtaatatggtagagatcgcggtcggagtgggtcgttttaagattaagtgagttcggagttttggggtcgtgcggggagggagttgggtttgtagtcggtatagcggaggcgcgcgtggggtgggtacgtattggggttcgtggaggcgagaggttgtgtgtgcgtcggttcgcggggtcgcggaggttgcggtgatattaggcgggagagtcggtttcggttgttttcggggaggacggcgatcggagttcggtcgtcgggagtagtagcgtgggtttatcgagaagtcggttatggggtggagtggggattagaagtttcgatgaggggaggagagggttgagtttaggtcgg

SEQ ID NO: 2670 - DNA, 767 bp, Artificial Sequence
  chemically treated genomic DNA (Homo sapiens) CpG-island No: 2670
ccgacctaaactcaaccctctcctcccctcatcgaaacttctaatccccactccaccccataaccgacttctcgataaacccacgctactactcccgacgaccgaactccgatcgccgtcctccccgaaaacaaccgaaaccgactctcccgcctaatatcaccgcaacctccgcgaccccgcgaaccgacgcacacacaacctctcgcctccacgaaccccaatacgtacccaccccacgcgcgcctccgctataccgactacaaacccaactccctccccgcacgaccccaaaactccgaactcacttaatcttaaaacgacccactccgaccgcgatctctaccatattaccgccgccgccgctccaactaaaacctactaaaatcccgacaaccaccgccgcgtaaaaaaaattaacaccgaactcttcacaaaacgccacactcccgacgcgctacgataacgtcaccgcgcgcgaccactataacgtccccgccgacgccgcgcacttaacgccatctttacttcgaacaataacgactacatcgaaaaacgaaaacgaacgaaaacgtttccgacctaaaaaaaaaaccgtaaactataaaaatacttcgcgaatcgataaaaataaaccgacgaatataacatcgctaataacctaactctttaataccaatataaaaaaacatttataaccaacgtttactcctacttttcgacgttctaaaatataaaaataccaactatcgaatacgatccgtacg

SEQ ID NO: 2671 - DNA, 767 bp, Artificial Sequence
  chemically treated genomic DNA (Homo sapiens) CpG-island No: 2671
tcgatttaggtttagtttttttttttttttatcgggatttttggtttttattttattttatagtcggtttttcgatgagtttacgttgttgttttcggcggtcgggtttcgatcgtcgtttttttcgagagtagtcggggtcggttttttcgtttagtattatcgtagttttcgcgatttcgcgggtcggcgtatatatagtttttcgtttttacggattttaatgcgtgtttattttacgcgcgttttcgttatgtcggttgtaaatttagtttttttttcgtacggttttagagtttcgggtttatttggttttgaagcggtttatttcggtcgcggtttttgttatgttgtcgtcgtcgtcgttttagttgaaatttgttagggtttcggtagttatcgtcgcgtgagggaggttagtatcgaattttttatagaacgttatattttcggcgcgttgcgatggcgttatcgcgcgcgattattgtgacgttttcgtcggcgtcgcgtatttggcgttatttttgtttcgggtagtggcggttgtatcgggaagcggaagcgggcggagacgttttcggtttggagggagggtcgtgagttgtgagggtgtttcgcgggtcggtgggggtagatcggcggatgtggtatcgttggtggtttggttttttgatattagtataaaaaggtatttgtagttagcgtttatttttgtttttcggcgttttgggatgtgggggtattagttgtcgggtgcggttcgtgcg

SEQ ID NO: 2672 - DNA, 767 bp, Artificial Sequence
  chemically treated genomic DNA (Homo sapiens) CpG-island No: 2672
cgcacgaaccgcacccgacaactaatacccccacatcccaaaacgccgaaaaacaaaaataaacgctaactacaaatacctttttatactaatatcaaaaaaccaaaccaccaacgataccacatccgccgatctacccccaccgacccgcgaaacaccctcacaactcacgaccctccctccaaaccgaaaacgtctccgcccgcttccgcttcccgatacaaccgccactacccgaaacaaaaataacgccaaatacgcgacgccgacgaaaacgtcacaataatcgcgcgcgataacgccatcgcaacgcgccgaaaatataacgttctataaaaaattcgatactaacctccctcacgcgacgataactaccgaaaccctaacaaatttcaactaaaacgacgacgacgacaacataacaaaaaccgcgaccgaaataaaccgcttcaaaaccaaataaacccgaaactctaaaaccgtacgaaaaaaaaactaaatttacaaccgacataacgaaaacgcgcgtaaaataaacacgcattaaaatccgtaaaaacgaaaaactatatatacgccgacccgcgaaatcgcgaaaactacgataatactaaacgaaaaaaccgaccccgactactctcgaaaaaaacgacgatcgaaacccgaccgccgaaaacaacaacgtaaactcatcgaaaaaccgactataaaataaaataaaaaccaaaaatcccgataaaaaaaaaaaaaaactaaacctaaatcga

SEQ ID NO: 2673 - DNA, 832 bp, Artificial Sequence
  chemically treated genomic DNA (Homo sapiens) CpG-island No: 2673
ttcgtttgttcgaggtttttgggttgaggggtcgtcgatttttgagacggagtttcgggattattcggatttttggtttaaggatcgtagagttttgttcgttcggtatttagagcggtagtcgttttagcgtttttggtttcgcgtttcgtttaggtcgttttttaggcgattcggtttagttcggggcgtaggtgggagaggtgagaggaggtttcggagttttcgtttggttttgggcggtcgcgatttgggatttttaggcgcgtataattagttacgagtatttttgagttcggcggagggagcggtagaggggagttgcgagtggatcggaataggtttgtgaatttggtcgcgagcgagtggtagtgaaagttggtattcgcgtaagtttacgtgcgaggagtgcgtgcgtgcgttcgcgtacgtgttggcggggcgtggcgagttcgtgtaatttgtgtgggtcgtgggggtggttagtagggaggatacgtatgagtttcgcgcgtatatttaagtttcgtagataggtgcggttgggtgatgcggggatagggagggtaatagtgaagttatagatgttgggagttggggagaaatcgaagaggaaatttatagatcggcgaagcgtgtcggagtcggcgtttaggaggttggttgtaggggtggatttgtgattgttttttttcgggattttcgatattcgcggaaatcgttcgaaatttatcggaagttcgaaggaggtttcggttttttttgagtgtaggggtgggggtcggttttattttttttcgtttatagtcgttattattttcggtgttcggag

SEQ ID NO: 2674 - DNA, 832 bp, Artificial Sequence
  chemically treated genomic DNA (Homo sapiens) CpG-island No: 2674
ctccgaacaccgaaaataataacgactataaacgaaaaaaaataaaaccgacccccacccctacactcaaaaaaaaccgaaacctccttcgaacttccgataaatttcgaacgatttccgcgaatatcgaaaatcccgaaaaaaaacaatcacaaatccacccctacaaccaacctcctaaacgccgactccgacacgcttcgccgatctataaatttcctcttcgatttctccccaactcccaacatctataacttcactattaccctccctatccccgcatcacccaaccgcacctatctacgaaacttaaatatacgcgcgaaactcatacgtatcctccctactaaccacccccacgacccacacaaattacacgaactcgccacgccccgccaacacgtacgcgaacgcacgcacgcactcctcgcacgtaaacttacgcgaataccaactttcactaccactcgctcgcgaccaaattcacaaacctattccgatccactcgcaactcccctctaccgctccctccgccgaactcaaaaatactcgtaactaattatacgcgcctaaaaatcccaaatcgcgaccgcccaaaaccaaacgaaaactccgaaacctcctctcacctctcccacctacgccccgaactaaaccgaatcgcctaaaaaacgacctaaacgaaacgcgaaaccaaaaacgctaaaacgactaccgctctaaataccgaacgaacaaaactctacgatccttaaaccaaaaatccgaataatcccgaaactccgtctcaaaaatcgacgacccctcaacccaaaaacctcgaacaaacgaa

SEQ ID NO: 2675 - DNA, 832 bp, Artificial Sequence
  chemically treated genomic DNA (Homo sapiens) CpG-island No: 2675
tttcgagtatcgggggtggtggcgattgtgggcgaggggaggtgggatcgatttttatttttatatttaaaaaaggtcggggtttttttcgagttttcggtgaatttcgggcgattttcgcgggtgtcgggggtttcgggaggaggtagttatagatttatttttgtagttagttttttaggcgtcggtttcggtacgtttcgtcggtttgtagatttttttttcgatttttttttagtttttagtatttgtgattttattgttattttttttattttcgtattatttaatcgtatttgtttgcgggatttaggtgtgcgcgcggggtttatgcgtgttttttttgttggttatttttacggtttatataagttgtacgggttcgttacgtttcgttaatacgtgcgcggacgtacgtacgtatttttcgtacgtgggtttacgcgaatattagtttttattgttattcgttcgcggttagatttataggtttgtttcggtttattcgtagtttttttttgtcgtttttttcgtcgggtttaggagtattcgtagttgattgtgcgcgtttgagggttttagatcgcggtcgtttaggattaggcgaggatttcggagtttttttttattttttttatttgcgtttcgggttgggtcgggtcgtttggggggcggtttgagcgaggcgcggggttaggagcgttggagcgattgtcgttttaagtgtcgggcgggtaggattttacgatttttgggttagaggttcggatggtttcgggatttcgttttaagggtcggcgattttttaatttagaagtttcgagtaggcgga

SEQ ID NO: 2676 - DNA, 832 bp, Artificial Sequence
  chemically treated genomic DNA (Homo sapiens) CpG-island No: 2676
tccgcctactcgaaacttctaaattaaaaaatcgccgacccttaaaacgaaatcccgaaaccatccgaacctctaacccaaaaatcgtaaaatcctacccgcccgacacttaaaacgacaatcgctccaacgctcctaaccccgcgcctcgctcaaaccgccccccaaacgacccgacccaacccgaaacgcaaataaaaaaaataaaaaaaaactccgaaatcctcgcctaatcctaaacgaccgcgatctaaaaccctcaaacgcgcacaatcaactacgaatactcctaaacccgacgaaaaaaacgacaaaaaaaaactacgaataaaccgaaacaaacctataaatctaaccgcgaacgaataacaataaaaactaatattcgcgtaaacccacgtacgaaaaatacgtacgtacgtccgcgcacgtattaacgaaacgtaacgaacccgtacaacttatataaaccgtaaaaataaccaacaaaaaaaacacgcataaaccccgcgcgcacacctaaatcccgcaaacaaatacgattaaataatacgaaaataaaaaaaataacaataaaatcacaaatactaaaaactaaaaaaaaatcgaaaaaaaaatctacaaaccgacgaaacgtaccgaaaccgacgcctaaaaaactaactacaaaaataaatctataactacctcctcccgaaacccccgacacccgcgaaaatcgcccgaaattcaccgaaaactcgaaaaaaaccccgaccttttttaaatataaaaataaaaatcgatcccacctcccctcgcccacaatcgccaccacccccgatactcgaaa

SEQ ID NO: 2677 - DNA, 548 bp, Artificial Sequence
  chemically treated genomic DNA (Homo sapiens) CpG-island No: 2677
aaggcgaatagttgtcgtacgtcggcgcggttgtggttgtcgaaggagtaaataattttatcgttggggtttttatttagattcgttgtaaggatttgtattacgcgcgtgtcggagggtgtattttttaggacgcgcgttcggtataaggattggttgaagataggcgtattgttattcgcgtttagtattttgatgtgaataggtaggttggcggagagagttggggttttttcgtttaacgtcgttagtattaattggagattaggttttcgttttcggtttagggcgcgttttaatattagtttcgcgtatttggtgttgttttttcgcgtttgtacgcgaagcgtaaagtatttatttcggtttagtttataggtttgtaaagagttgttttttatatcgggatcgtgcgcgttttcgagcggaaagcgcgttttcggagttacggtttcgttaatttttaattttattttttgggtagggaaagtaggattgttgtcgttgatgttttggattattatttttacgttgaatagttttagcgg

SEQ ID NO: 2678 - DNA, 548 bp, Artificial Sequence
  chemically treated genomic DNA (Homo sapiens) CpG-island No: 2678
ccgctaaaactattcaacgtaaaaataataatccaaaacatcaacgacaacaatcctactttccctacccaaaaaataaaattaaaaattaacgaaaccgtaactccgaaaacgcgctttccgctcgaaaacgcgcacgatcccgatataaaaaacaactctttacaaacctataaactaaaccgaaataaatactttacgcttcgcgtacaaacgcgaaaaaacaacaccaaatacgcgaaactaatattaaaacgcgccctaaaccgaaaacgaaaacctaatctccaattaatactaacgacgttaaacgaaaaaaccccaactctctccgccaacctacctattcacatcaaaatactaaacgcgaataacaatacgcctatcttcaaccaatccttataccgaacgcgcgtcctaaaaaatacaccctccgacacgcgcgtaatacaaatccttacaacgaatctaaataaaaaccccaacgataaaattatttactccttcgacaaccacaaccgcgccgacgtacgacaactattcgcctt

SEQ ID NO: 2679 - DNA, 548 bp, Artificial Sequence
  chemically treated genomic DNA (Homo sapiens) CpG-island No: 2679
tcgttggagttgtttagcgtggaagtggtgatttaggatattaacgataataattttgttttttttatttaggaaatgaaattggagattagcgaggtcgtggtttcggggacgcgtttttcgttcgagagcgcgtacgatttcgatgtgggaagtaattttttataaatttatgagttgagtcgaaatgaatattttgcgtttcgcgtgtagacgcgggaggatagtattaagtacgcggagttggtgttggagcgcgttttggatcgagaacgggagtttagtttttagttagtgttgacggcgttggacggagggattttagtttttttcgttagtttgtttatttatattaaggtgttggacgcgaatgataatgcgtttgtttttaattagtttttgtatcgggcgcgcgttttggaggatgtatttttcggtacgcgcgtggtataagtttttgtaacggatttggatgaaggttttaacggtgaaattatttattttttcggtagttataatcgcgtcggcgtgcggtaattattcgtttt

SEQ ID NO: 2680 - DNA, 548 bp, Artificial Sequence
  chemically treated genomic DNA (Homo sapiens) CpG-island No: 2680
aaaacgaataattaccgcacgccgacgcgattataactaccgaaaaaataaataatttcaccgttaaaaccttcatccaaatccgttacaaaaacttataccacgcgcgtaccgaaaaatacatcctccaaaacgcgcgcccgatacaaaaactaattaaaaacaaacgcattatcattcgcgtccaacaccttaatataaataaacaaactaacgaaaaaaactaaaatccctccgtccaacgccgtcaacactaactaaaaactaaactcccgttctcgatccaaaacgcgctccaacaccaactccgcgtacttaatactatcctcccgcgtctacacgcgaaacgcaaaatattcatttcgactcaactcataaatttataaaaaattacttcccacatcgaaatcgtacgcgctctcgaacgaaaaacgcgtccccgaaaccacgacctcgctaatctccaatttcatttcctaaataaaaaaaacaaaattattatcgttaatatcctaaatcaccacttccacgctaaacaactccaacga

SEQ ID NO: 2681 - DNA, 528 bp, Artificial Sequence
  chemically treated genomic DNA (Homo sapiens) CpG-island No: 2681
gtcgtcgtcgtcgttcgtcgagggtagtttatttgggtttcggtttttttttttgtttcgggtttcgcggtcgggttttaggttttcgtcgggcggtttttatgtttcggtttacgttggtcggcgatttcgcgtttacgtcgttttcgtttggtagtttcgcgttcgtcgtcgtttagtcgttttttagttagtcgtcgcgtttcgttttattagtatgtcgggttgcgcgcgttttatgaatatataacgacgacgtttcgttttcgttcgtttgttttattttcgttcggattcgtagtttttattaatgggggaagggagaggggcggagggaagtcgcggaagcgcgttatttgtttatcggatttaattattcggatttacgtgggggggggtggtgagtgggcgttgtagtttttcgcggtcgcggcggagaatatcgttttttggcggttggagtagcgtaggtttttggtttttacgtagcgtttacgtggttgtatagtttgatagtttggatttttt

SEQ ID NO: 2682 - DNA, 528 bp, Artificial Sequence
  chemically treated genomic DNA (Homo sapiens) CpG-island No: 2682
aaaaaatccaaactatcaaactatacaaccacgtaaacgctacgtaaaaaccaaaaacctacgctactccaaccgccaaaaaacgatattctccgccgcgaccgcgaaaaactacaacgcccactcaccacccccccccacgtaaatccgaataattaaatccgataaacaaataacgcgcttccgcgacttccctccgcccctctcccttcccccattaataaaaactacgaatccgaacgaaaataaaacaaacgaacgaaaacgaaacgtcgtcgttatatattcataaaacgcgcgcaacccgacatactaataaaacgaaacgcgacgactaactaaaaaacgactaaacgacgacgaacgcgaaactaccaaacgaaaacgacgtaaacgcgaaatcgccgaccaacgtaaaccgaaacataaaaaccgcccgacgaaaacctaaaacccgaccgcgaaacccgaaacaaaaaaaaaaaccgaaacccaaataaactaccctcgacgaacgacgacgacgac

SEQ ID NO: 2683 - DNA, 528 bp, Artificial Sequence
  chemically treated genomic DNA (Homo sapiens) CpG-island No: 2683
agagggtttaggttgttaggttgtatagttacgtgggcgttgcgtgggagttagaggtttgcgttgttttaatcgttagagggcggtgtttttcgtcgcggtcgcggagagttgtagcgtttatttattatttttttttacgtgggttcgaatggttaggttcgatgggtaggtagcgcgttttcgcggttttttttcgtttttttttttttttttattggtaggggttgcgggttcgggcggaagtggggtaggcgggcgggagcgaggcgtcgtcgttgtatatttatgaggcgcgcgtagttcggtatgttaatgaggcggggcgcggcggttggttaaagagcgattgggcggcggcgggcgcggagttgttaggcgggagcggcgtaggcgcggggtcgtcggttagcgtgaatcgggatatggaagtcgttcggcgggagtttggggttcggtcgcgggattcgggataagaagaagggtcggagtttagatgagttgttttcggcgggcggcgacggcggt

SEQ ID NO: 2684 - DNA, 528 bp, Artificial Sequence
  chemically treated genomic DNA (Homo sapiens) CpG-island No: 2684
accgccgtcgccgcccgccgaaaacaactcatctaaactccgacccttcttcttatcccgaatcccgcgaccgaaccccaaactcccgccgaacgacttccatatcccgattcacgctaaccgacgaccccgcgcctacgccgctcccgcctaacaactccgcgcccgccgccgcccaatcgctctttaaccaaccgccgcgccccgcctcattaacataccgaactacgcgcgcctcataaatatacaacgacgacgcctcgctcccgcccgcctaccccacttccgcccgaacccgcaacccctaccaataaaaaaaaaaaaaaaaacgaaaaaaaaccgcgaaaacgcgctacctacccatcgaacctaaccattcgaacccacgtaaaaaaaaataataaataaacgctacaactctccgcgaccgcgacgaaaaacaccgccctctaacgattaaaacaacgcaaacctctaactcccacgcaacgcccacgtaactatacaacctaacaacctaaaccctct

SEQ ID NO: 2685 - DNA, 685 bp, Artificial Sequence
  chemically treated genomic DNA (Homo sapiens) CpG-island No: 2685
cggtttttacgttttttagtttcgagttagagaatcggttttttagggaagtcgtcgtttttttttatcgggttgttattgtttttcggttatttcgggcggcgatttttacggttcggttcgcgcgtttcgatagttttcgttcgcgggattagtagtcgcggtagggtacgggatattttttttttggcggggcggcgtgggggcggcgttgttaatcgttgcgtagcgtacgtgttgtacgtttgcgtattcggtttcgttcggtcggcgtggtgtggggttgcgggggtgcgggggcgcgaggcgtagcggcggtgtggacgcgcgagggtcgagggatgcgcgcgtcgcggggtggagtgcgcggtgtttcggatttcggggcggcgagagtgcgtcggggggtagtgcgaacgtttaggagtggggagtgcgtagagatttgggggtggtagaggacgagcgcgttagcggggattacggggggattcgagggtttataaaagggttcgtttttttttatgcgatggttgagtatcgggaaattttttagcggttttcgtttgtttttattttttttttattagaaatttgttatagttggtgggcgcgggttcgttgttttgtacgtttatcgttagattagtttagggttcgcgttcggaggttagggagttggagg

SEQ ID NO: 2686 - DNA, 685 bp, Artificial Sequence
  chemically treated genomic DNA (Homo sapiens) CpG-island No: 2686
cctccaactccctaacctccgaacgcgaaccctaaactaatctaacgataaacgtacaaaacaacgaacccgcgcccaccaactataacaaatttctaataaaaaaaaaataaaaacaaacgaaaaccgctaaaaaatttcccgatactcaaccatcgcataaaaaaaaacgaacccttttataaaccctcgaatccccccgtaatccccgctaacgcgctcgtcctctaccacccccaaatctctacgcactccccactcctaaacgttcgcactaccccccgacgcactctcgccgccccgaaatccgaaacaccgcgcactccaccccgcgacgcgcgcatccctcgaccctcgcgcgtccacaccgccgctacgcctcgcgcccccgcacccccgcaaccccacaccacgccgaccgaacgaaaccgaatacgcaaacgtacaacacgtacgctacgcaacgattaacaacgccgcccccacgccgccccgccaaaaaaaaaatatcccgtaccctaccgcgactactaatcccgcgaacgaaaactatcgaaacgcgcgaaccgaaccgtaaaaatcgccgcccgaaataaccgaaaaacaataacaacccgataaaaaaaaacgacgacttccctaaaaaaccgattctctaactcgaaactaaaaaacgtaaaaaccg

SEQ ID NO: 2687 - DNA, 685 bp, Artificial Sequence
  chemically treated genomic DNA (Homo sapiens) CpG-island No: 2687
tttttagttttttggttttcgggcgcgggttttgggttgatttggcggtggacgtgtagggtagcgggttcgcgtttattagttgtggtaagtttttagtaagagagggatagagataggcggagatcgttggggagtttttcggtgtttagttatcgtataggggggaacggatttttttgtgggttttcgggttttttcgtggttttcgttggcgcgttcgttttttgttatttttagatttttgcgtattttttatttttgggcgttcgtattgtttttcggcgtattttcgtcgtttcggggttcgaagtatcgcgtattttatttcgcgacgcgcgtatttttcgattttcgcgcgtttatatcgtcgttgcgtttcgcgttttcgtattttcgtaattttatattacgtcggtcgggcggggtcggatgcgtagacgtgtagtacgtgcgttgcgtagcgattggtagcgtcgtttttacgtcgtttcgttagggaaagggtgtttcgtgttttgtcgcggttgttggtttcgcgggcgggggttgtcggggcgcgcgggtcgggtcgtgggggtcgtcgttcgaagtgatcggggaataatgatagttcgatggggaagggcggcggtttttttagagggtcggttttttggttcggagttggggggcgtgggggtcg

SEQ ID NO: 2688 - DNA, 685 bp, Artificial Sequence
  chemically treated genomic DNA (Homo sapiens) CpG-island No: 2688
cgacccccacgccccccaactccgaaccaaaaaaccgaccctctaaaaaaaccgccgcccttccccatcgaactatcattattccccgatcacttcgaacgacgacccccacgacccgacccgcgcgccccgacaacccccgcccgcgaaaccaacaaccgcgacaaaacacgaaacaccctttccctaacgaaacgacgtaaaaacgacgctaccaatcgctacgcaacgcacgtactacacgtctacgcatccgaccccgcccgaccgacgtaatataaaattacgaaaatacgaaaacgcgaaacgcaacgacgatataaacgcgcgaaaatcgaaaaatacgcgcgtcgcgaaataaaatacgcgatacttcgaaccccgaaacgacgaaaatacgccgaaaaacaatacgaacgcccaaaaataaaaaatacgcaaaaatctaaaaataacaaaaaacgaacgcgccaacgaaaaccacgaaaaaacccgaaaacccacaaaaaaatccgttcccccctatacgataactaaacaccgaaaaactccccaacgatctccgcctatctctatccctctcttactaaaaacttaccacaactaataaacgcgaacccgctaccctacacgtccaccgccaaatcaacccaaaacccgcgcccgaaaaccaaaaaactaaaaa

SEQ ID NO: 2689 - DNA, 754 bp, Artificial Sequence
  chemically treated genomic DNA (Homo sapiens) CpG-island No: 2689
ggaacgaggggagggaagggaaaggaggggaggggaggcggggagaggattttaggggagggagtttagttcgttttcggcgttcgtcgcgtttcgttcgttcgcgtttatagtagtcgtcgttcgttcggggtgtttttcgtcgttttcgggtcgtattcggggttttttagcgcgattatggttcgtacgttgtcgtcgtcgtcgtcgttcggtagggtttttatcgggtcgggtaggaagtgacgggcgttcggaggcgggtaggggcggggtttggggttgcgcggcggggcgggggcgtttatttttcggttgtcgggaacgaacgcggaaatttaggcgcgcggggaggggatttagtttttggggggacgaacggggaaatcgaggcgcgcggggcggggatttagttaatagggaacgaacggggaaatcgaggtaggcggggtcgggatttagttattagggaacgaacggggaaatcgaggtaggcggggtcgggatttagtttttggggggacgaacggggagattgaggcgggaggcggggtcggttacgatttttatatttagaaatttagtttcgggaaggagggatatttaggcgaggggtcgaaaatttaattataattttgcgtttcgattcgggttgcggattgagttaggaatttagtttagggaggcgaggagatacggatagggaaattaaggtttgagtatcgacgagggaggggacgttttttttggaggt

SEQ ID NO: 2690 - DNA, 754 bp, Artificial Sequence
  chemically treated genomic DNA (Homo sapiens) CpG-island No: 2690
acctccaaaaaaaacgtcccctccctcgtcgatactcaaaccttaatttccctatccgtatctcctcgcctccctaaactaaattcctaactcaatccgcaacccgaatcgaaacgcaaaattataattaaattttcgacccctcgcctaaatatccctccttcccgaaactaaatttctaaatataaaaatcgtaaccgaccccgcctcccgcctcaatctccccgttcgtccccccaaaaactaaatcccgaccccgcctacctcgatttccccgttcgttccctaataactaaatcccgaccccgcctacctcgatttccccgttcgttccctattaactaaatccccgccccgcgcgcctcgatttccccgttcgtccccccaaaaactaaatcccctccccgcgcgcctaaatttccgcgttcgttcccgacaaccgaaaaataaacgcccccgccccgccgcgcaaccccaaaccccgcccctacccgcctccgaacgcccgtcacttcctacccgacccgataaaaaccctaccgaacgacgacgacgacgacaacgtacgaaccataatcgcgctaaaaaaccccgaatacgacccgaaaacgacgaaaaacaccccgaacgaacgacgactactataaacgcgaacgaacgaaacgcgacgaacgccgaaaacgaactaaactccctcccctaaaatcctctccccgcctcccctcccctcctttcccttccctcccctcgttcc

SEQ ID NO: 2691 - DNA, 754 bp, Artificial Sequence
  chemically treated genomic DNA (Homo sapiens) CpG-island No: 2691
gtttttaagaagaacgttttttttttcgtcgatgtttaggttttagtttttttgttcgtgttttttcgtttttttgggttggatttttggtttagttcgtagttcggatcgggacgtagggttgtggttgagttttcgatttttcgtttaggtgtttttttttttcggagttagatttttgggtgtagggatcgtggtcggtttcgtttttcgttttagttttttcgttcgtttttttaggggttggatttcggtttcgtttgtttcggttttttcgttcgttttttgatggttggatttcggtttcgtttgtttcggttttttcgttcgttttttgttggttggattttcgtttcgcgcgtttcggttttttcgttcgtttttttaggggttggatttttttttcgcgcgtttgggttttcgcgttcgttttcggtagtcgggaggtgggcgttttcgtttcgtcgcgtagttttaggtttcgtttttgttcgttttcgggcgttcgttattttttgttcggttcggtgaaggttttgtcgggcggcggcggcggcgatagcgtgcgagttatggtcgcgttggagaatttcgagtgcggttcggaggcggcggagggtatttcgggcgggcggcggttgttgtgagcgcgggcgggcggggcgcggcgggcgtcgggggcgggttgggtttttttttttgagatttttttttcgttttttttttttttttttttttttttttttttcgtttt

SEQ ID NO: 2692 - DNA, 754 bp, Artificial Sequence
  chemically treated genomic DNA (Homo sapiens) CpG-island No: 2692
aaaacgaaaaaaaaaaaaaaaaaaaaaaaaaaaaaaaacgaaaaaaaaatctcaaaaaaaaaaacccaacccgcccccgacgcccgccgcgccccgcccgcccgcgctcacaacaaccgccgcccgcccgaaataccctccgccgcctccgaaccgcactcgaaattctccaacgcgaccataactcgcacgctatcgccgccgccgccgcccgacaaaaccttcaccgaaccgaacaaaaaataacgaacgcccgaaaacgaacaaaaacgaaacctaaaactacgcgacgaaacgaaaacgcccacctcccgactaccgaaaacgaacgcgaaaacccaaacgcgcgaaaaaaaaatccaacccctaaaaaaacgaacgaaaaaaccgaaacgcgcgaaacgaaaatccaaccaacaaaaaacgaacgaaaaaaccgaaacaaacgaaaccgaaatccaaccatcaaaaaacgaacgaaaaaaccgaaacaaacgaaaccgaaatccaacccctaaaaaaacgaacgaaaaaactaaaacgaaaaacgaaaccgaccacgatccctacacccaaaaatctaactccgaaaaaaaaaaacacctaaacgaaaaatcgaaaactcaaccacaaccctacgtcccgatccgaactacgaactaaaccaaaaatccaacccaaaaaaacgaaaaaacacgaacaaaaaaactaaaacctaaacatcgacgaaaaaaaaaacgttcttcttaaaaac

SEQ ID NO: 2693 - DNA, 686 bp, Artificial Sequence
  chemically treated genomic DNA (Homo sapiens) CpG-island No: 2693
ggtcgcgtcgcgtattttgtttatcgtttttaggtcgggggcggggtttttcgcggcgttgttttttttttcgtttattatttattattttttaaaggggtcgcgatttgaaaattttcgtttattttgttcggttttttagcgttttcgggttggttgcgcgtcgttagatcgcgggaggggggcgagggggcgtgcggggaaaagtggggagttttggcgaggttttttcgcgttcgggtcgcggcgttgaattatcggttaggtatttgtattcgagagcgattcgttttttggtgatttgtttgggggtgggggaggggcggggcgggggtcggtcgcgcgcggggcgttttttattaatcgggcggaggggtgtagacgcggacgcggttggcggttcggtgagtcggcgcgcggtatagtttcgtgggtcgggggtcgggagttagcggcgcgtatcggcggttggaagttaggcgggttcgggtaggtcgattttaggcgcggggcgcgcgttttattacgagtcgttttgcgcggtaaggttggggagcgcgttggtcgtttttagcgcgggtttcggtgtcggggtgggcgtagtgcgttttggaagttaaagaagggggtttttaaagttgggcggagatgttggtgggggtttcggattgggaaggcggttttgg

SEQ ID NO: 2694 - DNA, 686 bp, Artificial Sequence
  chemically treated genomic DNA (Homo sapiens) CpG-island No: 2694
ccaaaaccgccttcccaatccgaaacccccaccaacatctccgcccaactttaaaaacccccttctttaacttccaaaacgcactacgcccaccccgacaccgaaacccgcgctaaaaacgaccaacgcgctccccaaccttaccgcgcaaaacgactcgtaataaaacgcgcgccccgcgcctaaaatcgacctacccgaacccgcctaacttccaaccgccgatacgcgccgctaactcccgacccccgacccacgaaactataccgcgcgccgactcaccgaaccgccaaccgcgtccgcgtctacacccctccgcccgattaataaaaaacgccccgcgcgcgaccgacccccgccccgcccctcccccacccccaaacaaatcaccaaaaaacgaatcgctctcgaatacaaatacctaaccgataattcaacgccgcgacccgaacgcgaaaaaacctcgccaaaactccccacttttccccgcacgccccctcgcccccctcccgcgatctaacgacgcgcaaccaacccgaaaacgctaaaaaaccgaacaaaataaacgaaaattttcaaatcgcgacccctttaaaaaataataaataataaacgaaaaaaaaaacaacgccgcgaaaaaccccgcccccgacctaaaaacgataaacaaaatacgcgacgcgacc

SEQ ID NO: 2695 - DNA, 686 bp, Artificial Sequence
  chemically treated genomic DNA (Homo sapiens) CpG-island No: 2695
ttagggtcgtttttttagttcgggatttttattaatattttcgtttaattttggggatttttttttttggtttttaggacgtattgcgtttatttcggtatcggaattcgcgttgggaacggttagcgcgttttttagttttatcgcgtagggcggttcgtagtggggcgcgcgtttcgcgtttggggtcggtttgttcgggttcgtttggtttttagtcgtcggtgcgcgtcgttggttttcggttttcgatttacggggttgtgtcgcgcgtcgatttatcgagtcgttagtcgcgttcgcgtttatattttttcgttcgattggtaagaggcgtttcgcgcgcggtcggttttcgtttcgttttttttttatttttagataaattattaggggacgagtcgttttcggatgtaaatatttggtcggtgatttagcgtcgcggttcgggcgcgggagggtttcgttagggttttttattttttttcgtacgttttttcgtttttttttcgcggtttgacgacgcgtaattagttcgggggcgttggggagtcgggtagagtggacggaaatttttaggtcgcggtttttttaaaggataataaataataaacgggaaggggaatagcgtcgcgggaggtttcgttttcggtttagggacggtgggtaaagtgcgcgacgcggtt

SEQ ID NO: 2696 - DNA, 686 bp, Artificial Sequence
  chemically treated genomic DNA (Homo sapiens) CpG-island No: 2696
aaccgcgtcgcgcactttacccaccgtccctaaaccgaaaacgaaacctcccgcgacgctattccccttcccgtttattatttattatcctttaaaaaaaccgcgacctaaaaatttccgtccactctacccgactccccaacgcccccgaactaattacgcgtcgtcaaaccgcgaaaaaaaaacgaaaaaacgtacgaaaaaaaataaaaaaccctaacgaaaccctcccgcgcccgaaccgcgacgctaaatcaccgaccaaatatttacatccgaaaacgactcgtcccctaataatttatctaaaaataaaaaaaaaacgaaacgaaaaccgaccgcgcgcgaaacgcctcttaccaatcgaacgaaaaaatataaacgcgaacgcgactaacgactcgataaatcgacgcgcgacacaaccccgtaaatcgaaaaccgaaaaccaacgacgcgcaccgacgactaaaaaccaaacgaacccgaacaaaccgaccccaaacgcgaaacgcgcgccccactacgaaccgccctacgcgataaaactaaaaaacgcgctaaccgttcccaacgcgaattccgataccgaaataaacgcaatacgtcctaaaaaccaaaaaaaaaaatccccaaaattaaacgaaaatattaataaaaatcccgaactaaaaaaacgaccctaa

SEQ ID NO: 2697 - DNA, 651 bp, Artificial Sequence
  chemically treated genomic DNA (Homo sapiens) CpG-island No: 2697
ttcggaggttgggtgattcgcgtagaagtgaagtatttttttatttgtagatttgggtcgatgtcgttttaaaaaacgcgaggggttttatgtatttttttggcggtagttttttcgattttagtcgggtcgggtcgtgtcgtttttttttaggagagataaataggtgttttacgtggtagtcgcgtttcgggcgttttttttgtgatttcgtagcgttttttggttcgagtcgcgttcgggtttgtgagtagagtcgttcgggtatcgagcgttggtcgtcgtttttttttcggtgagttttagtttcgagttggttttggcgttcgggtattcgttagtgtcggttgtcgatgatcgatttacgttttcggtattggggttttttttgtttagttatttttatttagagtattcgggttgcgcggtttcgtcgagggtgcgggttttgttcgtattgtttgcgcgtatttgagcgcggtttttttggtacggcggcgtcgggggaagagcgtatttggcgcgcgtttttttcgtggttattcgcggttcgtttcgggcgagttggcggggttttgggaggggtgcggttagtaggtaagtgggtaggggtttcgggtataggggtggaggagggtatgtattaaattt

SEQ ID NO: 2698 - DNA, 651 bp, Artificial Sequence
  chemically treated genomic DNA (Homo sapiens) CpG-island No: 2698
aaatttaatacataccctcctccacccctatacccgaaacccctacccacttacctactaaccgcacccctcccaaaaccccgccaactcgcccgaaacgaaccgcgaataaccacgaaaaaaacgcgcgccaaatacgctcttcccccgacgccgccgtaccaaaaaaaccgcgctcaaatacgcgcaaacaatacgaacaaaacccgcaccctcgacgaaaccgcgcaacccgaatactctaaataaaaataactaaacaaaaaaaaccccaataccgaaaacgtaaatcgatcatcgacaaccgacactaacgaatacccgaacgccaaaaccaactcgaaactaaaactcaccgaaaaaaaaacgacgaccaacgctcgatacccgaacgactctactcacaaacccgaacgcgactcgaaccaaaaaacgctacgaaatcacaaaaaaaacgcccgaaacgcgactaccacgtaaaacacctatttatctctcctaaaaaaaaacgacacgacccgacccgactaaaatcgaaaaaactaccgccaaaaaaatacataaaacccctcgcgttttttaaaacgacatcgacccaaatctacaaataaaaaaatacttcacttctacgcgaatcacccaacctccgaa

SEQ ID NO: 2699 - DNA, 651 bp, Artificial Sequence
  chemically treated genomic DNA (Homo sapiens) CpG-island No: 2699
gggtttaatatatgtttttttttatttttgtattcggagtttttatttatttatttgttgatcgtattttttttaaaatttcgttagttcgttcgggacggatcgcgagtggttacgagggaggcgcgcgttaggtgcgtttttttttcgacgtcgtcgtgttaggaaggtcgcgtttaggtgcgcgtagataatgcgaataaagttcgtattttcggcggggtcgcgtagttcgggtgttttgggtaggggtggttgggtagagggggttttagtatcgggagcgtgaatcggttatcggtagtcggtattggcgggtattcgggcgttagagttaattcggggttgggatttatcggaaggagagcggcgattagcgttcggtgttcgggcggttttatttatagattcgggcgcggttcgggttagggggcgttacgggattataggaggggcgttcggggcgcggttgttacgtgggatatttgtttgttttttttgggagagggcggtacgattcgattcggttgaggtcggaggaattatcgttagggaggtgtatagagtttttcgcgttttttaaagcggtatcggtttaggtttgtaaataaaaaagtattttatttttacgcgggttatttagttttcgag

SEQ ID NO: 2700 - DNA, 651 bp, Artificial Sequence
  chemically treated genomic DNA (Homo sapiens) CpG-island No: 2700
ctcgaaaactaaataacccgcgtaaaaataaaatacttttttatttacaaacctaaaccgataccgctttaaaaaacgcgaaaaactctatacacctccctaacgataattcctccgacctcaaccgaatcgaatcgtaccgccctctcccaaaaaaaacaaacaaatatcccacgtaacaaccgcgccccgaacgcccctcctataatcccgtaacgccccctaacccgaaccgcgcccgaatctataaataaaaccgcccgaacaccgaacgctaatcgccgctctccttccgataaatcccaaccccgaattaactctaacgcccgaatacccgccaataccgactaccgataaccgattcacgctcccgatactaaaaccccctctacccaaccacccctacccaaaacacccgaactacgcgaccccgccgaaaatacgaactttattcgcattatctacgcgcacctaaacgcgaccttcctaacacgacgacgtcgaaaaaaaaacgcacctaacgcgcgcctccctcgtaaccactcgcgatccgtcccgaacgaactaacgaaattttaaaaaaaatacgatcaacaaataaataaataaaaactccgaatacaaaaataaaaaaaaacatatattaaaccc

SEQ ID NO: 2701 - DNA, 761 bp, Artificial Sequence
  chemically treated genomic DNA (Homo sapiens) CpG-island No: 2701
gcggtttatcgttttttcgtttcgtcgttaggtgcgtaaattggattttgtttaggtgtttagtaggttagaaaggtttcggacgtcgttaggtgtcgatatcgacgtttttcgggttcggcgcgcgagtttgggttttttagtagtttcgggttattcgtttgtattgttttttagtgttgagaaggaacgcggtttttagcgttttaggtcggattggcgtttatttcgcgtttcgtcggtttagggattcgcgagtagtattatagatttagcgttttcgagttcggacgttttagtgaggggagcgcgaggtcggttcgcgttcggacgttttttattggcgcgtcgggcgttatgttatttatttgtttggcgcggtagttttcgaaggtttttagggtattgtcggtgagttttacgtggaatatcgatattttgttgtcgtcgttaattcgttcgtacgatagttcgtagtttttatttttttttagcgtcgttattttgcgattatttttttttcgcgtttttttttcggttttagcgtcgttacgtcggttacgtttcgtttcgtcgttcgttgacgcgttgtattatttatgagacgcggttggttacgtttttcgagttcgattaaattaatagtcgtcgttatatcggtaggtagcgtattatattatttaggagacgcgtttggttacgttttatgagggttttataaggtttatagttaacgttttaagttgttgtatatttataag

SEQ ID NO: 2702 - DNA, 761 bp, Artificial Sequence
  chemically treated genomic DNA (Homo sapiens) CpG-island No: 2702
cttataaatatacaacaacttaaaacgttaactataaaccttataaaaccctcataaaacgtaaccaaacgcgtctcctaaataatataatacgctacctaccgatataacgacgactattaatttaatcgaactcgaaaaacgtaaccaaccgcgtctcataaataatacaacgcgtcaacgaacgacgaaacgaaacgtaaccgacgtaacgacgctaaaaccgaaaaaaaaacgcgaaaaaaaaataatcgcaaaataacgacgctaaaaaaaaataaaaactacgaactatcgtacgaacgaattaacgacgacaacaaaatatcgatattccacgtaaaactcaccgacaataccctaaaaaccttcgaaaactaccgcgccaaacaaataaataacataacgcccgacgcgccaataaaaaacgtccgaacgcgaaccgacctcgcgctcccctcactaaaacgtccgaactcgaaaacgctaaatctataatactactcgcgaatccctaaaccgacgaaacgcgaaataaacgccaatccgacctaaaacgctaaaaaccgcgttccttctcaacactaaaaaacaatacaaacgaataacccgaaactactaaaaaacccaaactcgcgcgccgaacccgaaaaacgtcgatatcgacacctaacgacgtccgaaacctttctaacctactaaacacctaaacaaaatccaatttacgcacctaacgacgaaacgaaaaaacgataaaccgc

SEQ ID NO: 2703 - DNA, 761 bp, Artificial Sequence
  chemically treated genomic DNA (Homo sapiens) CpG-island No: 2703
tttatgaatatgtaataatttggggcgttgattgtgggttttgtggggtttttatggggcgtggttaggcgcgttttttgaataatgtagtgcgttgtttgtcggtgtggcggcgattgttggtttggtcggattcggggggcgtggttagtcgcgttttatgaataatgtagcgcgttagcgggcggcggggcggggcgtggtcggcgtggcggcgttggagtcgggaagggggcgcgggggagagatggtcgtaagatggcggcgttgaaggaggataggagttacgggttgtcgtgcgggcgggttagcgacggtagtaaggtgtcggtgttttacgtgaagtttatcgatagtgttttgagggttttcgagagttatcgcgttagataggtgagtggtatggcgttcggcgcgttagtggggaacgttcggacgcgggtcggtttcgcgttttttttattgaggcgttcgggttcggagacgttaggtttgtggtgttgttcgcgggtttttgggtcggcggggcgcggagtgggcgttagttcggtttggagcgttgagaatcgcgtttttttttagtattaggaggtaatataggcgggtggttcggggttgttgaggggtttagattcgcgcgtcgggttcggggggcgtcggtgtcggtatttggcggcgttcggggtttttttggtttgttgggtatttgggtagggtttagtttgcgtatttggcggcggggcgaggaggcggtgggtcgt

SEQ ID NO: 2704 - DNA, 761 bp, Artificial Sequence
  chemically treated genomic DNA (Homo sapiens) CpG-island No: 2704
acgacccaccgcctcctcgccccgccgccaaatacgcaaactaaaccctacccaaatacccaacaaaccaaaaaaaccccgaacgccgccaaataccgacaccgacgccccccgaacccgacgcgcgaatctaaacccctcaacaaccccgaaccacccgcctatattacctcctaatactaaaaaaaaacgcgattctcaacgctccaaaccgaactaacgcccactccgcgccccgccgacccaaaaacccgcgaacaacaccacaaacctaacgtctccgaacccgaacgcctcaataaaaaaaacgcgaaaccgacccgcgtccgaacgttccccactaacgcgccgaacgccataccactcacctatctaacgcgataactctcgaaaaccctcaaaacactatcgataaacttcacgtaaaacaccgacaccttactaccgtcgctaacccgcccgcacgacaacccgtaactcctatcctccttcaacgccgccatcttacgaccatctctcccccgcgcccccttcccgactccaacgccgccacgccgaccacgccccgccccgccgcccgctaacgcgctacattattcataaaacgcgactaaccacgccccccgaatccgaccaaaccaacaatcgccgccacaccgacaaacaacgcactacattattcaaaaaacgcgcctaaccacgccccataaaaaccccacaaaacccacaatcaacgccccaaattattacatattcataaa

SEQ ID NO: 2705 - DNA, 818 bp, Artificial Sequence
  chemically treated genomic DNA (Homo sapiens) CpG-island No: 2705
tggattacgttttgtcgttcgggattatcgttcgtcgcgtttttcgttttcgcgtttttttttagcgcgttttcggagggcggtttcgcgtgtagcgagcgtagtatgttttttagtatttttttgaagttgatgtcgtagttttggtgcgcgagggtcgtagggtcggtttgggcgtcgggggtgtttagcggtacgacgtcggggtcggcgtttagggatagcggcgtcgggaaagagaagtgcgggggcggcgggaaggtttcggtcggggggttgtaggtgaggtttagtattttttcggggtcgtaaggtagcgttagcgggcgcggggcgggcggggcggggtagtttagggcgggcgtttgtttgcgttttacgttcgtatttattagtcgtagtttttgtagtattcggcgtacgtagttttcggggattttgatgtttgcgggtagagcgtcggggttagggtcggcgttgggggttcgggttttttcggggcgttcgtcgtttatttatttatttgtttttttttgtttttggtttttagtcgtacgatttgtaggtagttgttgttgttgacgtcggttatgacggcggcgatgcggttttatacgcgtagtagcgcgtcgtatagtatgtagtggtgtcgtagtcgtagtttttgtaggtagtttttatttttttgcgttagtcggtagtgtcggtttttgcggacgagacgggtcgtttcggtttaggcgggttttaggggttcgtaggttttttaggtgttttgagatttttcgtttttttttagggtttcgggagttttcgat

SEQ ID NO: 2706 - DNA, 818 bp, Artificial Sequence
  chemically treated genomic DNA (Homo sapiens) CpG-island No: 2706
atcgaaaactcccgaaaccctaaaaaaaaacgaaaaatctcaaaacacctaaaaaacctacgaacccctaaaacccgcctaaaccgaaacgacccgtctcgtccgcaaaaaccgacactaccgactaacgcaaaaaaataaaaactacctacaaaaactacgactacgacaccactacatactatacgacgcgctactacgcgtataaaaccgcatcgccgccgtcataaccgacgtcaacaacaacaactacctacaaatcgtacgactaaaaaccaaaaacaaaaaaaaacaaataaataaataaacgacgaacgccccgaaaaaacccgaacccccaacgccgaccctaaccccgacgctctacccgcaaacatcaaaatccccgaaaactacgtacgccgaatactacaaaaactacgactaataaatacgaacgtaaaacgcaaacaaacgcccgccctaaactaccccgccccgcccgccccgcgcccgctaacgctaccttacgaccccgaaaaaatactaaacctcacctacaaccccccgaccgaaaccttcccgccgcccccgcacttctctttcccgacgccgctatccctaaacgccgaccccgacgtcgtaccgctaaacacccccgacgcccaaaccgaccctacgaccctcgcgcaccaaaactacgacatcaacttcaaaaaaatactaaaaaacatactacgctcgctacacgcgaaaccgccctccgaaaacgcgctaaaaaaaaacgcgaaaacgaaaaacgcgacgaacgataatcccgaacgacaaaacgtaatcca

SEQ ID NO: 2707 - DNA, 818 bp, Artificial Sequence
  chemically treated genomic DNA (Homo sapiens) CpG-island No: 2707
atcgggggttttcgagattttgagaggaggcgggagattttagggtatttggggagtttgcgggtttttgggattcgtttgagtcgagacgattcgtttcgttcgtaggaatcggtattgtcggttggcgtaggagggtaaggattgtttgtaggggttgcggttgcggtattattatatgttgtgcggcgcgttgttgcgcgtgtggggtcgtatcgtcgtcgttatggtcgacgttagtagtagtagttatttgtagatcgtgcggttgaagattaaggataggaagaagtaagtgggtgagtgggcggcgggcgtttcgggaaggttcgagtttttagcgtcggttttgatttcgacgttttgttcgtaggtattaagattttcgagggttgcgtgcgtcgggtgttgtaggagttgcggttgatggatgcggacgtgaagcgtaggtaggcgttcgttttgggttgtttcgtttcgttcgtttcgcgttcgttggcgttgttttgcggtttcggagaggtgttggattttatttatagtttttcggtcgaggttttttcgtcgttttcgtatttttttttttcggcgtcgttgtttttggacgtcggtttcggcgtcgtgtcgttgggtattttcgacgtttaggtcgattttgcggttttcgcgtattagggttgcgatattaattttaaggaggtgttggaggatatgttgcgttcgttgtacgcggggtcgtttttcgagggcgcgttgggggagggcgcgggggcggggggcgcggcgggcggtggtttcgagcggtagagcgtgattta

SEQ ID NO: 2708 - DNA, 818 bp, Artificial Sequence
  chemically treated genomic DNA (Homo sapiens) CpG-island No: 2708
taaatcacgctctaccgctcgaaaccaccgcccgccgcgccccccgcccccgcgccctcccccaacgcgccctcgaaaaacgaccccgcgtacaacgaacgcaacatatcctccaacacctccttaaaattaatatcgcaaccctaatacgcgaaaaccgcaaaatcgacctaaacgtcgaaaatacccaacgacacgacgccgaaaccgacgtccaaaaacaacgacgccgaaaaaaaaaaatacgaaaacgacgaaaaaacctcgaccgaaaaactataaataaaatccaacacctctccgaaaccgcaaaacaacgccaacgaacgcgaaacgaacgaaacgaaacaacccaaaacgaacgcctacctacgcttcacgtccgcatccatcaaccgcaactcctacaacacccgacgcacgcaaccctcgaaaatcttaatacctacgaacaaaacgtcgaaatcaaaaccgacgctaaaaactcgaaccttcccgaaacgcccgccgcccactcacccacttacttcttcctatccttaatcttcaaccgcacgatctacaaataactactactactaacgtcgaccataacgacgacgatacgaccccacacgcgcaacaacgcgccgcacaacatataataataccgcaaccgcaacccctacaaacaatccttaccctcctacgccaaccgacaataccgattcctacgaacgaaacgaatcgtctcgactcaaacgaatcccaaaaacccgcaaactccccaaataccctaaaatctcccgcctcctctcaaaatctcgaaaacccccgat

SEQ ID NO: 2709 - DNA, 764 bp, Artificial Sequence
  chemically treated genomic DNA (Homo sapiens) CpG-island No: 2709
gtcgcgcgattttcgagttttaggtaagcgggaaattttattttataagaaagttttttttttcgaggtacgggcgtatgcgcgggtcggttattcgttggggtcgcggggtcgtcgttttggttcgcgtggggtagtcgttcgcgtttcgtttatgatgacgtacgttcggggcggtggggaaggtaagatggcggcgtttatggaggtggtcgtgtgtacggattcggcggtttcgatgtggagttgtatcgtgtgggaattttattcgggcgttaatttgtttatttatcgcggcggttaggcgggatttcgcggtttggcgttgtttaatggcgagtatttgttggcggcgtagttgggtaagaattatattagcgtttgggagttttagcggaaggtgcggcggtgcggtttcgttgttggggttatggggcgttcgaggttgaagtcgggggatgggttggtgggggtcgcgtgtatttttagtcggaattggcgtggggaggggaggtggttttcgttcgggcgttttgcgtatgcgcgggtttgggggttttggggagatacgtgcgatttgttaggtcgttttgcgtacgcgcggggtttaggtttgagttgttatgggggtagtgggggaaaatgggagacgtttcggggggttttttggggtaattgcgtatgtacgagtttttggagcgcgaaatttgattaaaaggggtttatgagttttgtggatgttgtggttttggaggaaaagggag

SEQ ID NO: 2710 - DNA, 764 bp, Artificial Sequence
  chemically treated genomic DNA (Homo sapiens) CpG-island No: 2710
ctcccttttcctccaaaaccacaacatccacaaaactcataaaccccttttaatcaaatttcgcgctccaaaaactcgtacatacgcaattaccccaaaaaaccccccgaaacgtctcccattttcccccactacccccataacaactcaaacctaaaccccgcgcgtacgcaaaacgacctaacaaatcgcacgtatctccccaaaacccccaaacccgcgcatacgcaaaacgcccgaacgaaaaccacctcccctccccacgccaattccgactaaaaatacacgcgacccccaccaacccatcccccgacttcaacctcgaacgccccataaccccaacaacgaaaccgcaccgccgcaccttccgctaaaactcccaaacgctaatataattcttacccaactacgccgccaacaaatactcgccattaaacaacgccaaaccgcgaaatcccgcctaaccgccgcgataaataaacaaattaacgcccgaataaaattcccacacgatacaactccacatcgaaaccgccgaatccgtacacacgaccacctccataaacgccgccatcttaccttccccaccgccccgaacgtacgtcatcataaacgaaacgcgaacgactaccccacgcgaaccaaaacgacgaccccgcgaccccaacgaataaccgacccgcgcatacgcccgtacctcgaaaaaaaaaactttcttataaaataaaatttcccgcttacctaaaactcgaaaatcgcgcgac

SEQ ID NO: 2711 - DNA, 764 bp, Artificial Sequence
  chemically treated genomic DNA (Homo sapiens) CpG-island No: 2711
ttttttttttttttagaattataatatttatagagtttataggttttttttaattaaatttcgcgttttaagaattcgtgtatgcgtaattgttttaagggatttttcggagcgttttttatttttttttattgtttttatagtagtttaggtttgagtttcgcgcgtgcgtagagcggtttaataggtcgtacgtatttttttaaagtttttagattcgcgtatgcgtagagcgttcgaacggagattattttttttttttacgttaatttcgattaagggtgtacgcggtttttattaatttatttttcgattttagtttcgggcgttttatgattttagtagcgagatcgtatcgtcgtatttttcgttggagtttttaggcgttgatgtaatttttgtttagttgcgtcgttagtagatattcgttattgagtagcgttaggtcgcggggtttcgtttggtcgtcgcggtaggtgagtaggttggcgttcgagtgaagtttttatacgatgtagttttatatcggggtcgtcgagttcgtatatacggttatttttatgggcgtcgttattttgttttttttatcgtttcggacgtgcgttattatgagcgagacgcggacgattgttttacgcgggttagagcggcggtttcgcggttttagcgggtggtcgattcgcgtatgcgttcgtgtttcggagagaggggtttttttgtgaagtgggatttttcgtttatttgagattcgagggtcgcgcggt

SEQ ID NO: 2712 - DNA, 764 bp, Artificial Sequence
  chemically treated genomic DNA (Homo sapiens) CpG-island No: 2712
accgcgcgaccctcgaatctcaaataaacgaaaaatcccacttcacaaaaaaacccctctctccgaaacacgaacgcatacgcgaatcgaccacccgctaaaaccgcgaaaccgccgctctaacccgcgtaaaacaatcgtccgcgtctcgctcataataacgcacgtccgaaacgataaaaaaaacaaaataacgacgcccataaaaataaccgtatatacgaactcgacgaccccgatataaaactacatcgtataaaaacttcactcgaacgccaacctactcacctaccgcgacgaccaaacgaaaccccgcgacctaacgctactcaataacgaatatctactaacgacgcaactaaacaaaaattacatcaacgcctaaaaactccaacgaaaaatacgacgatacgatctcgctactaaaatcataaaacgcccgaaactaaaatcgaaaaataaattaataaaaaccgcgtacacccttaatcgaaattaacgtaaaaaaaaaaaataatctccgttcgaacgctctacgcatacgcgaatctaaaaactttaaaaaaatacgtacgacctattaaaccgctctacgcacgcgcgaaactcaaacctaaactactataaaaacaataaaaaaaaataaaaaacgctccgaaaaatcccttaaaacaattacgcatacacgaattcttaaaacgcgaaatttaattaaaaaaaacctataaactctataaatattataattctaaaaaaaaaaaaaa

SEQ ID NO: 2713 - DNA, 1501 bp, Artificial Sequence
  chemically treated genomic DNA (Homo sapiens) CpG-island No: 2713
gtcgagataacgggaaggcggttagtcgtattaattagtagcgtttaagtttcgttagcgtagatttgttgttcgcggttaggtcgggtagttgttgattttcgggttatttttttaaagtttaggtagagcgcgggtgggaagcgtgcgaggagagttgagttagggagttgcggggaggagaaggtaagaatgttttagagaaaaagtcggagagggttgtaaattggttggttcggttggcggggttcggcgcggcggaagcgggaggagaggggaaggaaggggaggggaggggaggggagggggttagcgttttaaagtttcgcgtttcggcggcgtcggcgttagggttgtttatttaataggagcgtggtttaggttcggtcgcgtttcgcgcgtcgtaggtttagcgtttagcgtagtcgggcggttaggcgttttttaaggtcgttttcggcgggcggcgcgtcgggttcggcgcggggtttttttttgttcgcggcgtttttgcgtttcggggataggggcgcgcgttcgggtttcggtttttcggcgtcgacgttcgacgttttttttagcggcgattgtgaggcgcggggtggttggggcggtttgggagtcgtttttcggtgtttgtttcgcgtttgtaggattattttggtatagtcgcgttcgttcgttgcgcgcgttcggacggcggttagagaacggcgggttggttgggcggttgggcgtagtttattttttagcgggcgggcgggcggagggtggagggcgggttcgttttttttcgcgggtcgggaggcggggagatcgtggaggtcgggcggttgttgtttggttggtagtatcgtcgggaggcggcgtcggatttgttagttcgtcgtcgttgtcgtcgtttcggttgttacggcgatcgcggaacgtcggggggcgggggcggggatattttgcgagcggtcgcggtttcgttttcgtcgtttttttgcgtcggacgcgcgttttaggtcggttagcgcgtacgcgcggattttcggcgtaggcggggttcgatttttttggcgttcggttatttatattttttcggcgttcgcgcggggttcggtcggtgcgaggacgcgggggcggacggtttttcggaggcggtcgtttttttattgtgggagtgatggggtcgaaggaagagttttttcgggatcggggcgttgatttaagtttcggagtttgttaaggttgcgtttggagttcgcgtaggcgagacgcggcggggtagggagaaggcgttcggagcggttatttaggggcgttgtgcgtgcgttttgggcgtttggtcggttttatcgatgtgaagcgcgcgggtggtaattaagttatcgttttcgtttatttttcgtagtgtggtcgcgtaatttggagcgtagttttttatttatcgataagaagaacgggtgcgattcgatttaagatagtaatagagtattaaaatagtagtttggaa

SEQ ID NO: 2714 - DNA, 1501 bp, Artificial Sequence
  chemically treated genomic DNA (Homo sapiens) CpG-island No: 2714
ttccaaactactattttaatactctattactatcttaaatcgaatcgcacccgttcttcttatcgataaataaaaaactacgctccaaattacgcgaccacactacgaaaaataaacgaaaacgataacttaattaccacccgcgcgcttcacatcgataaaaccgaccaaacgcccaaaacgcacgcacaacgcccctaaataaccgctccgaacgccttctccctaccccgccgcgtctcgcctacgcgaactccaaacgcaaccttaacaaactccgaaacttaaatcaacgccccgatcccgaaaaaactcttccttcgaccccatcactcccacaataaaaaaacgaccgcctccgaaaaaccgtccgcccccgcgtcctcgcaccgaccgaaccccgcgcgaacgccgaaaaaatataaataaccgaacgccaaaaaaatcgaaccccgcctacgccgaaaatccgcgcgtacgcgctaaccgacctaaaacgcgcgtccgacgcaaaaaaacgacgaaaacgaaaccgcgaccgctcgcaaaatatccccgcccccgccccccgacgttccgcgatcgccgtaacaaccgaaacgacgacaacgacgacgaactaacaaatccgacgccgcctcccgacgatactaccaaccaaacaacaaccgcccgacctccacgatctccccgcctcccgacccgcgaaaaaaaacgaacccgccctccaccctccgcccgcccgcccgctaaaaaataaactacgcccaaccgcccaaccaacccgccgttctctaaccgccgtccgaacgcgcgcaacgaacgaacgcgactataccaaaataatcctacaaacgcgaaacaaacaccgaaaaacgactcccaaaccgccccaaccaccccgcgcctcacaatcgccgctaaaaaaaacgtcgaacgtcgacgccgaaaaaccgaaacccgaacgcgcgcccctatccccgaaacgcaaaaacgccgcgaacaaaaaaaaaccccgcgccgaacccgacgcgccgcccgccgaaaacgaccttaaaaaacgcctaaccgcccgactacgctaaacgctaaacctacgacgcgcgaaacgcgaccgaacctaaaccacgctcctattaaataaacaaccctaacgccgacgccgccgaaacgcgaaactttaaaacgctaaccccctcccctcccctcccctccccttccttcccctctcctcccgcttccgccgcgccgaaccccgccaaccgaaccaaccaatttacaaccctctccgactttttctctaaaacattcttaccttctcctccccgcaactccctaactcaactctcctcgcacgcttcccacccgcgctctacctaaactttaaaaaaataacccgaaaatcaacaactacccgacctaaccgcgaacaacaaatctacgctaacgaaacttaaacgctactaattaatacgactaaccgccttcccgttatctcgac

SEQ ID NO: 2715 - DNA, 1501 bp, Artificial Sequence
  chemically treated genomic DNA (Homo sapiens) CpG-island No: 2715
ttttaggttgttattttaatattttgttattattttaaatcgggtcgtattcgttttttttgtcggtgagtgaggggttgcgttttaagttgcgcgattatattgcggggagtaaacggagacggtgatttgattgttattcgcgcgttttatatcggtggggtcgattaggcgtttagggcgtacgtatagcgtttttaagtggtcgtttcgggcgttttttttttgtttcgtcgcgtttcgtttgcgcgggttttaagcgtagttttaataggtttcgaaatttgaattagcgtttcgatttcgagagggtttttttttcggttttattatttttataatggaagggcggtcgttttcggaaggtcgttcgttttcgcgttttcgtatcggtcgagtttcgcgcgggcgtcgaagaggtgtgggtagtcgggcgttagaggggtcgggtttcgtttgcgtcggaagttcgcgcgtgcgcgttggtcggtttggagcgcgcgttcggcgtagaggggcggcgggggcggggtcgcggtcgttcgtagggtgttttcgttttcgtttttcggcgtttcgcggtcgtcgtgataatcggagcggcggtaacggcggcgggttagtaagttcggcgtcgtttttcggcggtattgttagttaggtagtagtcgttcggtttttacgattttttcgtttttcggttcgcggggagggacgagttcgttttttatttttcgttcgttcgttcgttggagagtgagttgcgtttagtcgtttagttagttcgtcgttttttggtcgtcgttcgggcgcgcgtagcgagcgggcgcgattatgttaagatggttttgtaggcgcggaataagtatcgggaggcggtttttaagtcgttttagttatttcgcgttttatagtcgtcgttgaggggggcgtcggacgtcggcgtcggggagtcggggttcgagcgcgcgtttttgttttcggggcgtaagggcgtcgcgggtaggaaggggtttcgcgtcgagttcggcgcgtcgttcgtcgggggcggttttggggggcgtttggtcgttcggttgcgttgggcgttgggtttgcggcgcgcggggcgcggtcggatttggattacgtttttgttaggtgagtagttttagcgtcggcgtcgtcgggacgcggaattttgaggcgttggtttttttttttttttttttttttttttttttttttttttttttcgttttcgtcgcgtcgagtttcgttagtcggattagttagtttgtagtttttttcgattttttttttgggatatttttattttttttttttcgtaattttttggtttagtttttttcgtacgttttttattcgcgttttgtttgggttttaaaagaatggttcggggattaatagttgttcggtttggtcgcgggtagtaggtttgcgttaacgagatttgagcgttgttgattggtacgattggtcgttttttcgttatttcggt

SEQ ID NO: 2716 - DNA, 1501 bp, Artificial Sequence
  chemically treated genomic DNA (Homo sapiens) CpG-island No: 2716
accgaaataacgaaaaaacgaccaatcgtaccaatcaacaacgctcaaatctcgttaacgcaaacctactacccgcgaccaaaccgaacaactattaatccccgaaccattcttttaaaacccaaacaaaacgcgaataaaaaacgtacgaaaaaaactaaaccaaaaaattacgaaaaaaaaaaaataaaaatatcccaaaaaaaaaatcgaaaaaaactacaaactaactaatccgactaacgaaactcgacgcgacgaaaacgaaaaaaaaaaaaaaaaaaaaaaaaaaaaaaaaaaaaaaaaaaaccaacgcctcaaaattccgcgtcccgacgacgccgacgctaaaactactcacctaacaaaaacgtaatccaaatccgaccgcgccccgcgcgccgcaaacccaacgcccaacgcaaccgaacgaccaaacgccccccaaaaccgcccccgacgaacgacgcgccgaactcgacgcgaaaccccttcctacccgcgacgcccttacgccccgaaaacaaaaacgcgcgctcgaaccccgactccccgacgccgacgtccgacgcccccctcaacgacgactataaaacgcgaaataactaaaacgacttaaaaaccgcctcccgatacttattccgcgcctacaaaaccatcttaacataatcgcgcccgctcgctacgcgcgcccgaacgacgaccaaaaaacgacgaactaactaaacgactaaacgcaactcactctccaacgaacgaacgaacgaaaaataaaaaacgaactcgtccctccccgcgaaccgaaaaacgaaaaaatcgtaaaaaccgaacgactactacctaactaacaataccgccgaaaaacgacgccgaacttactaacccgccgccgttaccgccgctccgattatcacgacgaccgcgaaacgccgaaaaacgaaaacgaaaacaccctacgaacgaccgcgaccccgcccccgccgcccctctacgccgaacgcgcgctccaaaccgaccaacgcgcacgcgcgaacttccgacgcaaacgaaacccgacccctctaacgcccgactacccacacctcttcgacgcccgcgcgaaactcgaccgatacgaaaacgcgaaaacgaacgaccttccgaaaacgaccgcccttccattataaaaataataaaaccgaaaaaaaaaccctctcgaaatcgaaacgctaattcaaatttcgaaacctattaaaactacgcttaaaacccgcgcaaacgaaacgcgacgaaacaaaaaaaaaacgcccgaaacgaccacttaaaaacgctatacgtacgccctaaacgcctaatcgaccccaccgatataaaacgcgcgaataacaatcaaatcaccgtctccgtttactccccgcaatataatcgcgcaacttaaaacgcaacccctcactcaccgacaaaaaaaacgaatacgacccgatttaaaataataacaaaatattaaaataacaacctaaaa

SEQ ID NO: 2717 - DNA, 902 bp, Artificial Sequence
  chemically treated genomic DNA (Homo sapiens) CpG-island No: 2717
ttcgtcgatagattttttcgtttaggcgttttttttcgtataggttgtcggcgagtttagtttcggtattttatagattttcgtttcgcgtttacgtttcgttattttagtttttttttttgttagatcgcggtttagttcgtcgacgttattttttttaaggatgttggtttttgtatcgttagggagcgggttagtgataggatcgtgttgaaatagaagtttcgcgaggcgttggagtcggagtcggagtagtcgtcgtcgttttcgttttcgttttcgttttttcgggtcggggttatcgttattattttacgagtcgcggcgttgttcgtcggtttttcgtttttggttcgcgagcgttcgattttagggcgtaggagtaggtgtattcggttttttcgttacgtgattttttagttgttgatattagatagggcgtggttgcggggcgggtttatcgttgtaggggagagaggggatggatagtaggttgcggttgcgcgcgtcggatgtgggttttttttagtcgatttgcgcgatggtcggtttcgagggcggggttatttgcgcgcgacgcgcggaaggagttcgcgcgacgatcgcggggtcggcgggcggggcgaggttttggacggcggcggtagtggggtttttttttttgttttttagatcgagagtcgcgtcggtattatgttagtttattttaaaagttataattcgttcgacgacgacggggaggacgaaggcgttcggtcggttttttggagggacgttcgagattttttcgacgggttcgacgcgttcgcggataggtagtagtatttgcggtaggaggtttttcgtagggttgaggttacggtcgttagtattagtaggtttttggtttttatgtacgagtt

SEQ ID NO: 2718 - DNA, 902 bp, Artificial Sequence
  chemically treated genomic DNA (Homo sapiens) CpG-island No: 2718
aactcgtacataaaaaccaaaaacctactaatactaacgaccgtaacctcaaccctacgaaaaacctcctaccgcaaatactactacctatccgcgaacgcgtcgaacccgtcgaaaaaatctcgaacgtccctccaaaaaaccgaccgaacgccttcgtcctccccgtcgtcgtcgaacgaattataacttttaaaataaactaacataataccgacgcgactctcgatctaaaaaacaaaaaaaaaaaccccactaccgccgccgtccaaaacctcgccccgcccgccgaccccgcgatcgtcgcgcgaactccttccgcgcgtcgcgcgcaaataaccccgccctcgaaaccgaccatcgcgcaaatcgactaaaaaaaacccacatccgacgcgcgcaaccgcaacctactatccatcccctctctcccctacaacgataaacccgccccgcaaccacgccctatctaatatcaacaactaaaaaatcacgtaacgaaaaaaccgaatacacctactcctacgccctaaaatcgaacgctcgcgaaccaaaaacgaaaaaccgacgaacaacgccgcgactcgtaaaataataacgataaccccgacccgaaaaaacgaaaacgaaaacgaaaacgacgacgactactccgactccgactccaacgcctcgcgaaacttctatttcaacacgatcctatcactaacccgctccctaacgatacaaaaaccaacatccttaaaaaaaataacgtcgacgaactaaaccgcgatctaacaaaaaaaaaaactaaaataacgaaacgtaaacgcgaaacgaaaatctataaaataccgaaactaaactcgccgacaacctatacgaaaaaaaacgcctaaacgaaaaaatctatcgacgaa

SEQ ID NO: 2719 - DNA, 902 bp, Artificial Sequence
  chemically treated genomic DNA (Homo sapiens) CpG-island No: 2719
gattcgtatatgagggttagggatttgttggtgttggcggtcgtggttttagttttgcggaggattttttgtcgtaagtattgttgtttgttcgcgggcgcgtcgggttcgtcggggaggtttcgggcgtttttttaaggggtcggtcgggcgttttcgtttttttcgtcgtcgtcgaacggattgtagtttttagggtaagttgatatggtgtcggcgcggttttcggtttgggaaatagaaggaggagttttattgtcgtcgtcgtttagggtttcgtttcgttcgtcgatttcgcggtcgtcgcgcgaatttttttcgcgcgtcgcgcgtaggtggtttcgttttcggagtcgattatcgcgtaggtcggttggggggggtttatattcggcgcgcgtaatcgtagtttattgtttatttttttttttttttgtagcggtgggttcgtttcgtagttacgttttatttagtgttagtaattgagaggttacgtggcgggaaagtcggatgtatttatttttgcgttttgaggtcgggcgttcgcgggttaggagcggggagtcggcgggtagcgtcgcggttcgtgaggtgatggcggtggtttcggttcggagaggcggaggcggaggcggaggcggcggcggttgtttcggtttcggttttagcgtttcgcggggtttttattttaatacggttttgttattggttcgttttttggcggtgtagagattagtatttttggagaaggtaacgtcggcgggttgggtcgcggtttgataggaggaggggttggggtgacgaagcgtggacgcgggacgagggtttgtgggatgtcgaggttgggttcgtcggtagtttgtgcgggagggggcgtttgagcggagggatttatcggcgga

SEQ ID NO: 2720 - DNA, 902 bp, Artificial Sequence
  chemically treated genomic DNA (Homo sapiens) CpG-island No: 2720
tccgccgataaatccctccgctcaaacgccccctcccgcacaaactaccgacgaacccaacctcgacatcccacaaaccctcgtcccgcgtccacgcttcgtcaccccaacccctcctcctatcaaaccgcgacccaacccgccgacgttaccttctccaaaaatactaatctctacaccgccaaaaaacgaaccaataacaaaaccgtattaaaataaaaaccccgcgaaacgctaaaaccgaaaccgaaacaaccgccgccgcctccgcctccgcctccgcctctccgaaccgaaaccaccgccatcacctcacgaaccgcgacgctacccgccgactccccgctcctaacccgcgaacgcccgacctcaaaacgcaaaaataaatacatccgactttcccgccacgtaacctctcaattactaacactaaataaaacgtaactacgaaacgaacccaccgctacaaaaaaaaaaaaaaataaacaataaactacgattacgcgcgccgaatataaaccccccccaaccgacctacgcgataatcgactccgaaaacgaaaccacctacgcgcgacgcgcgaaaaaaattcgcgcgacgaccgcgaaatcgacgaacgaaacgaaaccctaaacgacgacgacaataaaactcctccttctatttcccaaaccgaaaaccgcgccgacaccatatcaacttaccctaaaaactacaatccgttcgacgacgacgaaaaaaacgaaaacgcccgaccgaccccttaaaaaaacgcccgaaacctccccgacgaacccgacgcgcccgcgaacaaacaacaatacttacgacaaaaaatcctccgcaaaactaaaaccacgaccgccaacaccaacaaatccctaaccctcatatacgaatc

SEQ ID NO: 2721 - DNA, 831 bp, Artificial Sequence
  chemically treated genomic DNA (Homo sapiens) CpG-island No: 2721
tttgttcgattttcgtagtagtagcgcgatcggatggtatgggtgttattacgcggtggttatttttattgttgcgaagcgtcggcggcgggatttcggagggggcgttttcggggtgcgaggttcggtatttcggaaatttttcgggagggaggggttgggagaaataaatttttttttttagagttgcgtaagagttagcgcggtagggttagagtgggaaggttagagcgggcgttttcgttagtgattttacgtcgttcgttcgcgtttaattcggttttcgtcgagtgtttaaattaaaagcgaaaggaattcgatttcgcgtttttttcggcggtttcgtagtcgcgttcgtttggagttcgtcgggcgttttcgattttgtcgggtcgttttgtgattttattcgtttcgtaataagttcgggtagttcgcgttttatttattttggttcggtagtttcgtcgttcgtagtttcgtttcgtttttcgcgtttttttttttttcggggttgggtttgtttcggtcgtcgcggagtttttttttttatcgttcgtgagtgtacgcgttcggtcgtcgtttttaggtagttcggagtaattcggcgttcggtttcgttgggcgtagtatttcgtcggcggcggcggcggcgcgatgttgtgttttttgaggggaatggttttcgtttttttttttttggtgatttggtcgttagtcgtttttattattttttacgtggtcgtcgtgtttttcgggtacgttaatttttttttttcgtatattaggtgagtggtagggtgggcgttagggttttaggagtaggtatag

SEQ ID NO: 2722 - DNA, 831 bp, Artificial Sequence
  chemically treated genomic DNA (Homo sapiens) CpG-island No: 2722
ctatacctactcctaaaaccctaacgcccaccctaccactcacctaatatacgaaaaaaaaaaattaacgtacccgaaaaacacgacgaccacgtaaaaaataataaaaacgactaacgaccaaatcaccaaaaaaaaaaaaacgaaaaccattcccctcaaaaaacacaacatcgcgccgccgccgccgccgacgaaatactacgcccaacgaaaccgaacgccgaattactccgaactacctaaaaacgacgaccgaacgcgtacactcacgaacgataaaaaaaaaaactccgcgacgaccgaaacaaacccaaccccgaaaaaaaaaaaaacgcgaaaaacgaaacgaaactacgaacgacgaaactaccgaaccaaaataaataaaacgcgaactacccgaacttattacgaaacgaataaaatcacaaaacgacccgacaaaatcgaaaacgcccgacgaactccaaacgaacgcgactacgaaaccgccgaaaaaaacgcgaaatcgaattcctttcgcttttaatttaaacactcgacgaaaaccgaattaaacgcgaacgaacgacgtaaaatcactaacgaaaacgcccgctctaaccttcccactctaaccctaccgcgctaactcttacgcaactctaaaaaaaaaaatttatttctcccaacccctccctcccgaaaaatttccgaaataccgaacctcgcaccccgaaaacgccccctccgaaatcccgccgccgacgcttcgcaacaataaaaataaccaccgcgtaataacacccataccatccgatcgcgctactactacgaaaatcgaacaaa

SEQ ID NO: 2723 - DNA, 831 bp, Artificial Sequence
  chemically treated genomic DNA (Homo sapiens) CpG-island No: 2723
ttgtgtttgtttttggggttttgacgtttattttgttatttatttgatatacgggaggaaggggttgacgtgttcggagagtacggcgattacgtaggagataatgaaggcggttgacgattaggttattaagaggaaggggacgaaagttattttttttaggaagtatagtatcgcgtcgtcgtcgtcgtcgacggagtgttgcgtttagcggggtcgggcgtcgggttgtttcgggttgtttggaggcggcggtcgggcgcgtatatttacggacggtgggaggggaggtttcgcgacggtcggggtaggtttagtttcggagggaggggaagcgcgaggagcggagcgaggttgcgggcggcgaggttgtcgggttagagtgggtggggcgcgggttgttcgggtttgttgcgaaacgagtgaagttataaagcggttcggtagggtcggaggcgttcggcgagttttaagcggacgcgattacggagtcgtcggaggggacgcggggtcgggtttttttcgtttttggtttggatattcggcggaggtcgggttgggcgcggacgggcggcgtggggttattggcggggacgttcgttttggtttttttattttggttttatcgcgttggtttttgcgtaattttggagaaaaggatttattttttttaatttttttttttcgggggattttcggagtgtcgggtttcgtatttcgagggcgtttttttcgaggtttcgtcgtcggcgtttcgtagtagtgagagtggttatcgcgtggtgatatttatgttattcggtcgcgttgttgttgcgggggtcgggtaga

SEQ ID NO: 2724 - DNA, 831 bp, Artificial Sequence
  chemically treated genomic DNA (Homo sapiens) CpG-island No: 2724
tctacccgacccccgcaacaacaacgcgaccgaataacataaatatcaccacgcgataaccactctcactactacgaaacgccgacgacgaaacctcgaaaaaaacgccctcgaaatacgaaacccgacactccgaaaatcccccgaaaaaaaaaaattaaaaaaaataaatccttttctccaaaattacgcaaaaaccaacgcgataaaaccaaaataaaaaaaccaaaacgaacgtccccgccaataaccccacgccgcccgtccgcgcccaacccgacctccgccgaatatccaaaccaaaaacgaaaaaaacccgaccccgcgtcccctccgacgactccgtaatcgcgtccgcttaaaactcgccgaacgcctccgaccctaccgaaccgctttataacttcactcgtttcgcaacaaacccgaacaacccgcgccccacccactctaacccgacaacctcgccgcccgcaacctcgctccgctcctcgcgcttcccctccctccgaaactaaacctaccccgaccgtcgcgaaacctcccctcccaccgtccgtaaatatacgcgcccgaccgccgcctccaaacaacccgaaacaacccgacgcccgaccccgctaaacgcaacactccgtcgacgacgacgacgacgcgatactatacttcctaaaaaaaataactttcgtccccttcctcttaataacctaatcgtcaaccgccttcattatctcctacgtaatcgccgtactctccgaacacgtcaaccccttcctcccgtatatcaaataaataacaaaataaacgtcaaaaccccaaaaacaaacacaa

SEQ ID NO: 2725 - DNA, 561 bp, Artificial Sequence
  chemically treated genomic DNA (Homo sapiens) CpG-island No: 2725
cggtcggtttcgcggggcgtagaggcgtaggaatgtagagtcgggacggggtttatatattttttcgtatttacggtttatttttagttatggttgtttcggtttcgtattcgttacgtttttcgcgcgtttttagacgtatgggtaagggagttcgttggttttttcgtagtttcggggtgtttagttgagttaggtgcggacgtagatagcgtaaggtttgatttcgagcggtcggaggtcgggatcgtttcgtaagcgcgtttatttcggttcgcggcgtcggtttcgggcgtattttcgggagttgggtggttgcgcgcgttttaggcggtaggcgaacgacgtgcggtatcgggcggagttagggggcgggggcggagttgatatcgaagtttttattggtcgtcggggacgtttcgtttttttttggcgttgtagtttaggagtttttatcgatatggtagcgaggttttcgagttaacgttatttttcgtttttttcgttatttatttattaattattgtttttgagtttttttattttttattcgttatttat

SEQ ID NO: 2726 - DNA, 561 bp, Artificial Sequence
  chemically treated genomic DNA (Homo sapiens) CpG-island No: 2726
ataaataacgaataaaaaataaaaaaactcaaaaacaataattaataaataaataacgaaaaaaacgaaaaataacgttaactcgaaaacctcgctaccatatcgataaaaactcctaaactacaacgccaaaaaaaaacgaaacgtccccgacgaccaataaaaacttcgatatcaactccgcccccgccccctaactccgcccgataccgcacgtcgttcgcctaccgcctaaaacgcgcgcaaccacccaactcccgaaaatacgcccgaaaccgacgccgcgaaccgaaataaacgcgcttacgaaacgatcccgacctccgaccgctcgaaatcaaaccttacgctatctacgtccgcacctaactcaactaaacaccccgaaactacgaaaaaaccaacgaactcccttacccatacgtctaaaaacgcgcgaaaaacgtaacgaatacgaaaccgaaacaaccataactaaaaataaaccgtaaatacgaaaaaatatataaaccccgtcccgactctacattcctacgcctctacgccccgcgaaaccgaccg

SEQ ID NO: 2727 - DNA, 561 bp, Artificial Sequence
  chemically treated genomic DNA (Homo sapiens) CpG-island No: 2727
ataaatgacgggtgagaagtgaaggaatttaggaatagtgattagtgagtgagtgacggaaggaacggaggatggcgttggttcgggaatttcgttgttatgtcggtggaggtttttgggttgtaacgttagagagaggcggggcgttttcgacggttaataggagtttcggtattagtttcgttttcgttttttagtttcgttcggtgtcgtacgtcgttcgtttgtcgtttgaggcgcgcgtagttatttagttttcggaagtgcgttcggagtcggcgtcgcgggtcgaggtgagcgcgtttgcggggcggtttcggttttcggtcgttcggggttaggttttgcgttatttgcgttcgtatttgatttagttgggtatttcggagttacggaggggttagcgggtttttttgtttatgcgtttgggagcgcgcgggggacgtggcgagtgcggggtcggggtagttatggttgggagtggatcgtgggtgcggggggatgtgtgaatttcgtttcggttttgtatttttgcgtttttgcgtttcgcgggatcggtcg

SEQ ID NO: 2728 - DNA, 561 bp, Artificial Sequence
  chemically treated genomic DNA (Homo sapiens) CpG-island No: 2728
cgaccgatcccgcgaaacgcaaaaacgcaaaaatacaaaaccgaaacgaaattcacacatccccccgcacccacgatccactcccaaccataactaccccgaccccgcactcgccacgtcccccgcgcgctcccaaacgcataaacaaaaaaacccgctaacccctccgtaactccgaaatacccaactaaatcaaatacgaacgcaaataacgcaaaacctaaccccgaacgaccgaaaaccgaaaccgccccgcaaacgcgctcacctcgacccgcgacgccgactccgaacgcacttccgaaaactaaataactacgcgcgcctcaaacgacaaacgaacgacgtacgacaccgaacgaaactaaaaaacgaaaacgaaactaataccgaaactcctattaaccgtcgaaaacgccccgcctctctctaacgttacaacccaaaaacctccaccgacataacaacgaaattcccgaaccaacgccatcctccgttccttccgtcactcactcactaatcactattcctaaattccttcacttctcacccgtcatttat

SEQ ID NO: 2729 - DNA, 585 bp, Artificial Sequence
  chemically treated genomic DNA (Homo sapiens) CpG-island No: 2729
gagtcgggcggttttgtagtttagtatttggttcgggttgcgcgtcgggttttggcgggggcgtgttaggaggcgtgttcggggcgtgtcggaggcggggttaaggcgggggtaagtttcgtttttcggtcgtgcgagaggtcgagtttgttgtattgtagtcgtcgcggcgtcgttcggttttttatttttaataatggcggtttcgagttcgagcggcggcggcggtttcgggggcggtagcggtagcggtattttcggtttcgtagggttttcggcgttaggttattcggtcgttagtagtatgtagggtaaggaacgcggtcgcgtcgagattttagttttttagcgcggtaattcgcgtcgtcgcggtttgttttagcggacgttttcggattcggttgaggaagttacggtagtcgtcggttttttttttttttttttttcggtttttcgtttcgttttcggtcgttttcggttcggtttggattcgggtttcggttcgtataggtttcggtcgcggtttttgtttgcgtttggtttttgggttttatcgggtttttagtaggttcgtagggtttattt

SEQ ID NO: 2730 - DNA, 585 bp, Artificial Sequence
  chemically treated genomic DNA (Homo sapiens) CpG-island No: 2730
aaataaaccctacgaacctactaaaaacccgataaaacccaaaaaccaaacgcaaacaaaaaccgcgaccgaaacctatacgaaccgaaacccgaatccaaaccgaaccgaaaacgaccgaaaacgaaacgaaaaaccgaaaaaaaaaaaaaaaaaaaaccgacgactaccgtaacttcctcaaccgaatccgaaaacgtccgctaaaacaaaccgcgacgacgcgaattaccgcgctaaaaaactaaaatctcgacgcgaccgcgttccttaccctacatactactaacgaccgaataacctaacgccgaaaaccctacgaaaccgaaaataccgctaccgctaccgcccccgaaaccgccgccgccgctcgaactcgaaaccgccattattaaaaataaaaaaccgaacgacgccgcgacgactacaatacaacaaactcgacctctcgcacgaccgaaaaacgaaacttacccccgccttaaccccgcctccgacacgccccgaacacgcctcctaacacgcccccgccaaaacccgacgcgcaacccgaaccaaatactaaactacaaaaccgcccgactc

SEQ ID NO: 2731 - DNA, 585 bp, Artificial Sequence
  chemically treated genomic DNA (Homo sapiens) CpG-island No: 2731
aggtgggttttgcgggtttgttgagagttcggtagggtttaggggttaagcgtaggtagaggtcgcggtcggggtttatgcgggtcggagttcggatttaagtcgggtcggaggcggtcgggagcggggcgggaagtcggggagggagagagggagaagtcggcggttgtcgtggtttttttagtcgggttcgggggcgttcgttggggtaggtcgcgacgacgcgggttgtcgcgttagggggttgggatttcggcgcggtcgcgttttttattttgtatgttgttgacggtcgggtggtttggcgtcggggattttacggggtcgggggtgtcgttgtcgttgtcgttttcggagtcgtcgtcgtcgttcgggttcggagtcgttattgttgggagtgaagagtcgagcggcgtcgcggcggttgtaatgtagtaagttcggtttttcgtacggtcgaggggcgaggtttattttcgttttggtttcgttttcgatacgtttcggatacgttttttgatacgttttcgttagagttcgacgcgtagttcgggttagatgttgagttgtagaatcgttcggttt

SEQ ID NO: 2732 - DNA, 585 bp, Artificial Sequence
  chemically treated genomic DNA (Homo sapiens) CpG-island No: 2732
aaaccgaacgattctacaactcaacatctaacccgaactacgcgtcgaactctaacgaaaacgtatcaaaaaacgtatccgaaacgtatcgaaaacgaaaccaaaacgaaaataaacctcgcccctcgaccgtacgaaaaaccgaacttactacattacaaccgccgcgacgccgctcgactcttcactcccaacaataacgactccgaacccgaacgacgacgacgactccgaaaacgacaacgacaacgacacccccgaccccgtaaaatccccgacgccaaaccacccgaccgtcaacaacatacaaaataaaaaacgcgaccgcgccgaaatcccaaccccctaacgcgacaacccgcgtcgtcgcgacctaccccaacgaacgcccccgaacccgactaaaaaaaccacgacaaccgccgacttctccctctctccctccccgacttcccgccccgctcccgaccgcctccgacccgacttaaatccgaactccgacccgcataaaccccgaccgcgacctctacctacgcttaacccctaaaccctaccgaactctcaacaaacccgcaaaacccacct

SEQ ID NO: 2733 - DNA, 1313 bp, Artificial Sequence
  chemically treated genomic DNA (Homo sapiens) CpG-island No: 2733
cggtattaggcgaggtttttgtcgtagttgcggtcgaagaagtggggttcggcgtttacggcgcgtacgtcggggtgtacgcgtaggaattttagtagcgttcgcgtgtcgtttttttttatttcgatgatgatggtttgcggtagttgtttgttgttttcgtttaggagtagcgttagggttttcggcggggtttcggttacggtgttttcggtttcggagtcgttcggattttttgataggttaggggatttttttttttaggtcgttttttcgtcgtcgtcgcggggcgcgggcggtcggcgttttcgttattgcggtagttgtaggaggcgttttttttgtgtcgtcgtcggttatatcgttagttttttcgggttttcggttaggacgtcgttattaggggttttcgttttttcgtcgtcgtcggatagttttacgacggggtcggatagggtttggtagcgttcggttaggtagtagaagacgtaaagggacgtgagtagggagtagagtattagtaagaattttcggaagatgttgcgggatagcggttcggtcgaggtggagagggtattggtcgggttcggaggggttattttagtcggaggcgacgtcgggtaacgcgtcggttatgttaggtttggatttcgataggtgttagagtattttttcggcgggttagcgcgttggacggaggttatatcgtcgtgcgtttttgtggtcgtgcgaattgtttcgggaggtagcggtcggggtttcgcggggaaacggaatttcgggggtttcgcgtaggatttttgtttttagtcgagggagcgggaaggggaacgcgggttcgtgtttaagaaattatcgttttagattcgtttaagttttgagtttggggtagttttggtttttcggtttttcgtaagagtcgtcggaatcggggttttggtagcggtgtcgaaggcgtgcgttttagtttcggtttcgagagatttttcggcgcggattttcgtttagcgattttgtattattggttcggttttcgtgagggtacgcgcggttgtcgggtttttgcgtttcgtgcgttttagatagtggcgagcgatagtgatttttagtttcggttttttttggtttttttgttcgtttgggcgcgtttttttcgttcgagtttaggtttttttagttaaggagcgaggttttttcgagtttttttgttcgagcgggagataggaggttcgtgtagagtcgtttattttttttcgtagcgtcgggttgttttaaattgtttttggattttatttgtgagtcgcgtggttggg

SEQ ID NO: 2734 - DNA, 1313 bp, Artificial Sequence
  chemically treated genomic DNA (Homo sapiens) CpG-island No: 2734
cccaaccacgcgactcacaaataaaatccaaaaacaatttaaaacaacccgacgctacgaaaaaaaataaacgactctacacgaacctcctatctcccgctcgaacaaaaaaactcgaaaaaacctcgctccttaactaaaaaaacctaaactcgaacgaaaaaaacgcgcccaaacgaacaaaaaaaccaaaaaaaaccgaaactaaaaatcactatcgctcgccactatctaaaacgcacgaaacgcaaaaacccgacaaccgcgcgtaccctcacgaaaaccgaaccaataatacaaaatcgctaaacgaaaatccgcgccgaaaaatctctcgaaaccgaaactaaaacgcacgccttcgacaccgctaccaaaaccccgattccgacgactcttacgaaaaaccgaaaaaccaaaactaccccaaactcaaaacttaaacgaatctaaaacgataatttcttaaacacgaacccgcgttccccttcccgctccctcgactaaaaacaaaaatcctacgcgaaacccccgaaattccgtttccccgcgaaaccccgaccgctacctcccgaaacaattcgcacgaccacaaaaacgcacgacgatataacctccgtccaacgcgctaacccgccgaaaaaatactctaacacctatcgaaatccaaacctaacataaccgacgcgttacccgacgtcgcctccgactaaaataacccctccgaacccgaccaataccctctccacctcgaccgaaccgctatcccgcaacatcttccgaaaattcttactaatactctactccctactcacgtccctttacgtcttctactacctaaccgaacgctaccaaaccctatccgaccccgtcgtaaaactatccgacgacgacgaaaaaacgaaaacccctaataacgacgtcctaaccgaaaacccgaaaaaactaacgatataaccgacgacgacacaaaaaaaacgcctcctacaactaccgcaataacgaaaacgccgaccgcccgcgccccgcgacgacgacgaaaaaacgacctaaaaaaaaaaatcccctaacctatcaaaaaatccgaacgactccgaaaccgaaaacaccgtaaccgaaaccccgccgaaaaccctaacgctactcctaaacgaaaacaacaaacaactaccgcaaaccatcatcatcgaaataaaaaaaaacgacacgcgaacgctactaaaattcctacgcgtacaccccgacgtacgcgccgtaaacgccgaaccccacttcttcgaccgcaactacgacaaaaacctcgcctaataccg

SEQ ID NO: 2735 - DNA, 1313 bp, Artificial Sequence
  chemically treated genomic DNA (Homo sapiens) CpG-island No: 2735
tttagttacgcggtttataggtggggtttaagagtagtttggagtaattcggcgttacggagaggggtggacggttttgtacgggttttttgtttttcgttcgggtagagggattcggggggatttcgttttttggttgagagaatttgaattcgggcggagagaacgcgtttaggcgggtaaggggattagagaaagtcggggttggaagttattgtcgttcgttattgtttggagcgtacggagcgtagaggttcggtagtcgcgcgtgtttttacggggatcgagttagtgatgtaggatcgttgagcggagattcgcgtcgagaagtttttcggggtcggggttgagacgtacgttttcgatatcgttgttaagatttcgatttcggcgatttttgcggggaatcgaggggttaaggttgttttaagtttaggatttgggcgagtttaagacgatggttttttaagtacggattcgcgttttttttttcgttttttcgattggaggtagggattttgcgcggggttttcgggatttcgttttttcgcggagtttcggtcgttgtttttcgggatagttcgtacggttataggggcgtacggcgatgtggttttcgtttagcgcgttggttcgtcggggggatgttttggtatttgtcggggtttaggtttagtatggtcggcgcgttgttcgacgtcgttttcggttaggatggttttttcgggttcggttagtgttttttttatttcggtcgagtcgttgtttcgtagtatttttcggaagtttttgttgatgttttgttttttgtttacgtttttttacgttttttattgtttggtcgagcgttgttagattttgttcggtttcgtcgtggggttgttcggcggcggcgaggaggcgggggtttttggtggcggcgttttggtcggaggttcgagggagttggcggtgtggtcggcggcggtatagagaaagcgttttttgtaattgtcgtagtggcggaggcgtcggtcgttcgcgtttcgcgacgacggcgaggaggcggtttgggaagaagagttttttggtttgttagggggttcgggcggtttcggggtcggaagtatcgtggtcgaggtttcgtcggggattttggcgttgtttttggacgaaggtagtaagtagttgtcgtaggttattattatcggagtgaagaagggcggtacgcgggcgttgttggagtttttgcgcgtgtatttcgacgtgcgcgtcgtgggcgtcgagttttattttttcgatcgtagttacgataagggtttcgtttggtatcg

SEQ ID NO: 2736 - DNA, 1313 bp, Artificial Sequence
  chemically treated genomic DNA (Homo sapiens) CpG-island No: 2736
cgataccaaacgaaacccttatcgtaactacgatcgaaaaaataaaactcgacgcccacgacgcgcacgtcgaaatacacgcgcaaaaactccaacaacgcccgcgtaccgcccttcttcactccgataataataacctacgacaactacttactaccttcgtccaaaaacaacgccaaaatccccgacgaaacctcgaccacgatacttccgaccccgaaaccgcccgaaccccctaacaaaccaaaaaactcttcttcccaaaccgcctcctcgccgtcgtcgcgaaacgcgaacgaccgacgcctccgccactacgacaattacaaaaaacgctttctctataccgccgccgaccacaccgccaactccctcgaacctccgaccaaaacgccgccaccaaaaacccccgcctcctcgccgccgccgaacaaccccacgacgaaaccgaacaaaatctaacaacgctcgaccaaacaataaaaaacgtaaaaaaacgtaaacaaaaaacaaaacatcaacaaaaacttccgaaaaatactacgaaacaacgactcgaccgaaataaaaaaaacactaaccgaacccgaaaaaaccatcctaaccgaaaacgacgtcgaacaacgcgccgaccatactaaacctaaaccccgacaaataccaaaacatccccccgacgaaccaacgcgctaaacgaaaaccacatcgccgtacgcccctataaccgtacgaactatcccgaaaaacaacgaccgaaactccgcgaaaaaacgaaatcccgaaaaccccgcgcaaaatccctacctccaatcgaaaaaacgaaaaaaaaaacgcgaatccgtacttaaaaaaccatcgtcttaaactcgcccaaatcctaaacttaaaacaaccttaacccctcgattccccgcaaaaatcgccgaaatcgaaatcttaacaacgatatcgaaaacgtacgtctcaaccccgaccccgaaaaacttctcgacgcgaatctccgctcaacgatcctacatcactaactcgatccccgtaaaaacacgcgcgactaccgaacctctacgctccgtacgctccaaacaataacgaacgacaataacttccaaccccgactttctctaatccccttacccgcctaaacgcgttctctccgcccgaattcaaattctctcaaccaaaaaacgaaatccccccgaatccctctacccgaacgaaaaacaaaaaacccgtacaaaaccgtccacccctctccgtaacgccgaattactccaaactactcttaaaccccacctataaaccgcgtaactaaa

SEQ ID NO: 2737 - DNA, 632 bp, Artificial Sequence
  chemically treated genomic DNA (Homo sapiens) CpG-island No: 2737
ttcgtagttttgtttcgcggtttttttcgaggtcggcgtttcgcgttcgttttttttagagtcggcgcggttggaatgttttttttttttcgcggggtcgttttttgttcgttatgttggaagtcgatttttgttatcgatttcggtttattgaggagcggagggggaagggtgtcgagggttatacggggcggcggagtcgggtgattcgggattattatcggtcgtagtttcgttttttgtattgcgggggcgtcggcgtttttcgtatcgcggtcgttttttttttcgtcgtcggtcggggttgtgtaattcggtggcggcgcgcggtttcgggcgggtttttggggtgaggggcgggggcggttggggtgggggagggaagcggttacgaggggagcggtttgcgtagggtttcgcgcgttagcggtcgcgtttttcgttttcgggtgcggcgggaggcgcgggtagtcggggcggggagtcggtttcgaagcggagttgagagggaaggaggtcgcgggcggcggtcgcggcgtttttagaggtaggaggtttgggggggcggcggggggatttatttcgggtagaggcggtgtttgaggtcgggtggggtatttagcgggaattta

SEQ ID NO: 2738 - DNA, 632 bp, Artificial Sequence
  chemically treated genomic DNA (Homo sapiens) CpG-island No: 2738
taaattcccgctaaataccccacccgacctcaaacaccgcctctacccgaaataaatccccccgccgcccccccaaacctcctacctctaaaaacgccgcgaccgccgcccgcgacctccttccctctcaactccgcttcgaaaccgactccccgccccgactacccgcgcctcccgccgcacccgaaaacgaaaaacgcgaccgctaacgcgcgaaaccctacgcaaaccgctcccctcgtaaccgcttccctcccccaccccaaccgcccccgcccctcaccccaaaaacccgcccgaaaccgcgcgccgccaccgaattacacaaccccgaccgacgacgaaaaaaaaaacgaccgcgatacgaaaaacgccgacgcccccgcaatacaaaaaacgaaactacgaccgataataatcccgaatcacccgactccgccgccccgtataaccctcgacacccttccccctccgctcctcaataaaccgaaatcgataacaaaaatcgacttccaacataacgaacaaaaaacgaccccgcgaaaaaaaaaaaacattccaaccgcgccgactctaaaaaaaacgaacgcgaaacgccgacctcgaaaaaaaccgcgaaacaaaactacgaa

SEQ ID NO: 2739 - DNA, 632 bp, Artificial Sequence
  chemically treated genomic DNA (Homo sapiens) CpG-island No: 2739
tgggttttcgttgggtattttattcggttttaggtatcgtttttattcgaaatgaattttttcgtcgtttttttaggttttttgtttttaggagcgtcgcggtcgtcgttcgcggttttttttttttttagtttcgtttcgaggtcggtttttcgtttcgattgttcgcgtttttcgtcgtattcgggagcgggaaacgcggtcgttggcgcgcggggttttgcgtaggtcgtttttttcgtggtcgttttttttttttattttaatcgttttcgttttttattttagggattcgttcggggtcgcgcgtcgttatcgggttatataatttcggtcggcgacgggggggggggcggtcgcggtgcggggggcgtcggcgttttcgtagtgtagggggcgaggttgcggtcggtggtgatttcgggttattcggtttcgtcgtttcgtgtggttttcgatattttttttttttcgttttttagtgggtcggagtcggtgataggaatcggtttttaatatggcggataggaagcggtttcgcgaggaggagagaatattttagtcgcgtcggttttggggggagcgggcgcggggcgtcggtttcgggaggagtcgcgggataagattgcggg

SEQ ID NO: 2740 - DNA, 632 bp, Artificial Sequence
  chemically treated genomic DNA (Homo sapiens) CpG-island No: 2740
cccgcaatcttatcccgcgactcctcccgaaaccgacgccccgcgcccgctccccccaaaaccgacgcgactaaaatattctctcctcctcgcgaaaccgcttcctatccgccatattaaaaaccgattcctatcaccgactccgacccactaaaaaacgaaaaaaaaaaaatatcgaaaaccacacgaaacgacgaaaccgaataacccgaaatcaccaccgaccgcaacctcgccccctacactacgaaaacgccgacgccccccgcaccgcgaccgcccccccccccgtcgccgaccgaaattatataacccgataacgacgcgcgaccccgaacgaatccctaaaataaaaaacgaaaacgattaaaataaaaaaaaaaaacgaccacgaaaaaaacgacctacgcaaaaccccgcgcgccaacgaccgcgtttcccgctcccgaatacgacgaaaaacgcgaacaatcgaaacgaaaaaccgacctcgaaacgaaactaaaaaaaaaaaaaaccgcgaacgacgaccgcgacgctcctaaaaacaaaaaacctaaaaaaacgacgaaaaaattcatttcgaataaaaacgatacctaaaaccgaataaaatacccaacgaaaaccca

SEQ ID NO: 2741 - DNA, 617 bp, Artificial Sequence
  chemically treated genomic DNA (Homo sapiens) CpG-island No: 2741
cggttcggtttttcggtgtcgtcgcgcgtttcgggcgcgttcgtcgcgcgttttttttggggagaaagagaaatcgtgtagacggtcggcgcgcgtttattcgtcgttttttttgcggagagcggcgaggtcggttcgaggcgggcgtcgagcgcggagcggaggggggttcgagggaggcgggggtggaattagtttaattttcgaggttggtttcgagggggattcggaatataggttggcggggggtcggcgggggtcgagttttcggaggaggggaaggcggaggtggtttcgtttttgggtattaattattgtttaggcgttcgggttttcgttcgcgtcgttttcgaggtttagcgtttttatttcgttcgttagtagaaagaattgagggggcggttagtacgggaagtaagtgcgggggttcgggtttcgaaggtttaaggtgggcgcgaggttgtcgggggggggatgaggaggtgcgtatcgtatgggggaggggataggtaagtgcggacgggggcgggaaggttttaacgatcggtgggggaggaaatggggagggagttatagaggcgggagggaatggagtggttgcgggggcggtttttggg

SEQ ID NO: 2742 - DNA, 617 bp, Artificial Sequence
  chemically treated genomic DNA (Homo sapiens) CpG-island No: 2742
cccaaaaaccgcccccgcaaccactccattccctcccgcctctataactccctccccatttcctcccccaccgatcgttaaaaccttcccgcccccgtccgcacttacctatcccctcccccatacgatacgcacctcctcatcccccccccgacaacctcgcgcccaccttaaaccttcgaaacccgaacccccgcacttacttcccgtactaaccgccccctcaattctttctactaacgaacgaaataaaaacgctaaacctcgaaaacgacgcgaacgaaaacccgaacgcctaaacaataattaatacccaaaaacgaaaccacctccgccttcccctcctccgaaaactcgacccccgccgaccccccgccaacctatattccgaatccccctcgaaaccaacctcgaaaattaaactaattccacccccgcctccctcgaacccccctccgctccgcgctcgacgcccgcctcgaaccgacctcgccgctctccgcaaaaaaaacgacgaataaacgcgcgccgaccgtctacacgatttctctttctccccaaaaaaaacgcgcgacgaacgcgcccgaaacgcgcgacgacaccgaaaaaccgaaccg

SEQ ID NO: 2743 - DNA, 617 bp, Artificial Sequence
  chemically treated genomic DNA (Homo sapiens) CpG-island No: 2743
tttagaggtcgttttcgtagttattttattttttttcgtttttgtggttttttttttatttttttttttatcggtcgttggggttttttcgttttcgttcgtatttatttgtttttttttttatgcggtacgtatttttttatttttttttcggtaatttcgcgtttattttggattttcggagttcggattttcgtatttgtttttcgtattggtcgtttttttagttttttttgttggcgggcgggatgggggcgttgagtttcggggacggcgcgagcgggggttcgggcgtttagataatagttgatgtttaaggacggggttattttcgtttttttttttttcgggagttcggttttcgtcggtttttcgttagtttgtatttcgggtttttttcggagttagtttcgggaattgggttgattttattttcgtttttttcgggttttttttcgtttcgcgttcggcgttcgtttcgggtcggtttcgtcgtttttcgtagaggaggcggcgagtgagcgcgcgtcggtcgtttatacggtttttttttttttttagggagagcgcgcggcggacgcgttcgggacgcgcggcggtatcgggaggtcgggtcg

SEQ ID NO: 2744 - DNA, 617 bp, Artificial Sequence
  chemically treated genomic DNA (Homo sapiens) CpG-island No: 2744
cgacccgacctcccgataccgccgcgcgtcccgaacgcgtccgccgcgcgctctccctaaaaaaaaaaaaaaaccgtataaacgaccgacgcgcgctcactcgccgcctcctctacgaaaaacgacgaaaccgacccgaaacgaacgccgaacgcgaaacgaaaaaaaacccgaaaaaaacgaaaataaaatcaacccaattcccgaaactaactccgaaaaaaacccgaaatacaaactaacgaaaaaccgacgaaaaccgaactcccgaaaaaaaaaaaaacgaaaataaccccgtccttaaacatcaactattatctaaacgcccgaacccccgctcgcgccgtccccgaaactcaacgcccccatcccgcccgccaacaaaaaaaactaaaaaaacgaccaatacgaaaaacaaatacgaaaatccgaactccgaaaatccaaaataaacgcgaaattaccgaaaaaaaaataaaaaaatacgtaccgcataaaaaaaaaaacaaataaatacgaacgaaaacgaaaaaaccccaacgaccgataaaaaaaaaaataaaaaaaaaaccacaaaaacgaaaaaaaataaaataactacgaaaacgacctctaaa

SEQ ID NO: 2745 - DNA, 680 bp, Artificial Sequence
  chemically treated genomic DNA (Homo sapiens) CpG-island No: 2745
ttcgtgggcggtcgtagttgcggcgattttcggtttttcggggaggtttagataggggtggtttttttggttttcgttttcgcggattttatgatatcgtattggttcgcgggacggggcggggtcgggtgagggggaggagatagttttacgttttggtattcgcggtgatttttacgcggaattttttcgcggtaattcgaagtatcgcgtttgcgtgttgtagtagcgtttggtggcggtggtagtttgttcgcgggtgtgtgaagggagttagtgtggcggtttacgggtattcgttacgatgagtagtattttagttaagatcgcggagatagaagtagaggtaatggacgtagttggcgttttatttttagtttgagtattttttttttggtggcgtcgtttttttttgtttttttttgagtcgcgttaggatcgggtttagatttcgcgattttttttagcgaggttcgtgtttcgattgttttttgttacgattaggagttttcgattttttttagttagggtttttttttttttcgtttcgcgtttacgttttcggatttttttttgttcgggttcgcgtttcgtatttttgtattttaggtttttagttcgtttttttttttagtgtttggtttttgttttgatgttgttttttttcgttttgttttgag

SEQ ID NO: 2746 - DNA, 680 bp, Artificial Sequence
  chemically treated genomic DNA (Homo sapiens) CpG-island No: 2746
ctcaaaacaaaacgaaaaaaaacaacatcaaaacaaaaaccaaacactaaaaaaaaaaacgaactaaaaacctaaaatacaaaaatacgaaacgcgaacccgaacaaaaaaaaatccgaaaacgtaaacgcgaaacgaaaaaaaaaaaaaccctaactaaaaaaaatcgaaaactcctaatcgtaacaaaaaacaatcgaaacacgaacctcgctaaaaaaaatcgcgaaatctaaacccgatcctaacgcgactcaaaaaaaaacaaaaaaaaacgacgccaccaaaaaaaaaatactcaaactaaaaataaaacgccaactacgtccattacctctacttctatctccgcgatcttaactaaaatactactcatcgtaacgaatacccgtaaaccgccacactaactcccttcacacacccgcgaacaaactaccaccgccaccaaacgctactacaacacgcaaacgcgatacttcgaattaccgcgaaaaaattccgcgtaaaaatcaccgcgaataccaaaacgtaaaactatctcctccccctcacccgaccccgccccgtcccgcgaaccaatacgatatcataaaatccgcgaaaacgaaaaccaaaaaaaccacccctatctaaacctccccgaaaaaccgaaaatcgccgcaactacgaccgcccacgaa

SEQ ID NO: 2747 - DNA, 680 bp, Artificial Sequence
  chemically treated genomic DNA (Homo sapiens) CpG-island No: 2747
tttagagtaaaacggaaagaaataatattagaataggagttaaatattgggagggggaacggattaagggtttaaggtgtaggggtgcggaacgcgggttcgggtaaaggggagttcgagagcgtagacgcgggacgaggggaaagggggttttgattgaggagagtcggggatttttagtcgtggtagagggtagtcggaatacgggtttcgttgagagaagtcgcggaatttaggttcggttttgacgcggtttaaaggagaataggaaggagcgacgttattaaagaaggaatgtttagattaagagtgaagcgttagttgcgtttattatttttgtttttattttcgcgattttagttaaggtgttgtttatcgtggcgagtattcgtgggtcgttatattggttttttttatatattcgcgggtaaattgttatcgttattaggcgttattgtagtacgtaggcgcggtatttcgaattatcgcgagagagtttcgcgtaggggttatcgcgagtgttaaagcgtggggttgtttttttttttttattcgatttcgtttcgtttcgcgagttagtgcggtgttatagagttcgcgggagcggaggttagagaggttatttttgtttgggttttttcgagaggtcgagggtcgtcgtagttgcggtcgtttacggg

SEQ ID NO: 2748 - DNA, 680 bp, Artificial Sequence
  chemically treated genomic DNA (Homo sapiens) CpG-island No: 2748
cccgtaaacgaccgcaactacgacgaccctcgacctctcgaaaaaacccaaacaaaaataacctctctaacctccgctcccgcgaactctataacaccgcactaactcgcgaaacgaaacgaaatcgaataaaaaaaaaaaaacaaccccacgctttaacactcgcgataacccctacgcgaaactctctcgcgataattcgaaataccgcgcctacgtactacaataacgcctaataacgataacaatttacccgcgaatatataaaaaaaaccaatataacgacccacgaatactcgccacgataaacaacaccttaactaaaatcgcgaaaataaaaacaaaaataataaacgcaactaacgcttcactcttaatctaaacattccttctttaataacgtcgctccttcctattctcctttaaaccgcgtcaaaaccgaacctaaattccgcgacttctctcaacgaaacccgtattccgactaccctctaccacgactaaaaatccccgactctcctcaatcaaaaccccctttcccctcgtcccgcgtctacgctctcgaactcccctttacccgaacccgcgttccgcacccctacaccttaaacccttaatccgttccccctcccaatatttaactcctattctaatattatttctttccgttttactctaaa

SEQ ID NO: 2749 - DNA, 728 bp, Artificial Sequence
  chemically treated genomic DNA (Homo sapiens) CpG-island No: 2749
gacgcgcggcggagagatttagttttattttagtttcgtttcgcgtagttgtttataagcgttcgcggcggatgagtttatacgagtggcggcggcggtaataggttttgagttcgcgatttggagatagttttggttaatcggacggcgcggaggcggagcggggtcggtcggtatcgcgcggtcgtacgtgcgttacgagtgttttagtcgttttttgttagcgttaggagcgggggattttcggggtttcgggtaggtatttggatagcgtaggttttcgtaaggtcgttttttagggacgtcgtttcgttattgacgtagtattagggttcgcgcgggttttcgttcgggtttcggtagtaattgtgattgtcggtttttaagagaggagagaaggaaatgtgtgtcggggttggtatcgggaacgcggtcgtcgttcgttagtttcggcgtcgtttttcggaggatatttattcgatacggggtcgaggttagttcgttttgcgcgtttagttagttgaggtagcggaggttcggcgcgggggaggtttggttttttcggtataggtggtcgttgttttagaaatagtttgtgaggaaaagaagttttcggatatagaatagcgggtagcgaacggaagacgtttagcgtggcggataggggagtcgggattattcgggttgaattttagtttggttaggggattcgggtattgttgggtttt

SEQ ID NO: 2750 - DNA, 728 bp, Artificial Sequence
  chemically treated genomic DNA (Homo sapiens) CpG-island No: 2750
aaaacccaacaatacccgaatcccctaaccaaactaaaattcaacccgaataatcccgactcccctatccgccacgctaaacgtcttccgttcgctacccgctattctatatccgaaaacttcttttcctcacaaactatttctaaaacaacgaccacctataccgaaaaaaccaaacctcccccgcgccgaacctccgctacctcaactaactaaacgcgcaaaacgaactaacctcgaccccgtatcgaataaatatcctccgaaaaacgacgccgaaactaacgaacgacgaccgcgttcccgataccaaccccgacacacatttccttctctcctctcttaaaaaccgacaatcacaattactaccgaaacccgaacgaaaacccgcgcgaaccctaatactacgtcaataacgaaacgacgtccctaaaaaacgaccttacgaaaacctacgctatccaaatacctacccgaaaccccgaaaatcccccgctcctaacgctaacaaaaaacgactaaaacactcgtaacgcacgtacgaccgcgcgataccgaccgaccccgctccgcctccgcgccgtccgattaaccaaaactatctccaaatcgcgaactcaaaacctattaccgccgccgccactcgtataaactcatccgccgcgaacgcttataaacaactacgcgaaacgaaactaaaataaaactaaatctctccgccgcgcgtc

SEQ ID NO: 2751 - DNA, 728 bp, Artificial Sequence
  chemically treated genomic DNA (Homo sapiens) CpG-island No: 2751
gaggtttagtagtgttcgggttttttaattaggttgaggtttagttcgggtggtttcggtttttttgttcgttacgttgggcgtttttcgttcgttgttcgttattttgtgttcgggggttttttttttttataggttgtttttgggataacggttatttgtatcgggaggattagatttttttcgcgtcgggttttcgttgttttaattggttggacgcgtagagcgggttggtttcggtttcgtgtcgggtaagtgtttttcgggggacggcgtcggggttggcgggcggcggtcgcgttttcggtgttagtttcggtatatatttttttttttttttttttaggggtcggtaattatagttattgtcgaaattcggacgaggattcgcgcgggttttggtgttacgttagtggcgaggcggcgtttttgagaaacggttttgcgaggatttgcgttgtttaggtatttgttcgggatttcgggaatttttcgtttttggcgttgataggaagcggttgagatattcgtggcgtacgtgcggtcgcgcgatgtcggtcggtttcgtttcgttttcgcgtcgttcgattggttagggttgtttttaggtcgcgggtttaaagtttattgtcgtcgtcgttattcgtatgagtttattcgtcgcgagcgtttgtaaataattgcgcggggcgaggttggggtgaggttaggttttttcgtcgcgcgtt

SEQ ID NO: 2752 - DNA, 728 bp, Artificial Sequence
  chemically treated genomic DNA (Homo sapiens) CpG-island No: 2752
aacgcgcgacgaaaaaacctaacctcaccccaacctcgccccgcgcaattatttacaaacgctcgcgacgaataaactcatacgaataacgacgacgacaataaactttaaacccgcgacctaaaaacaaccctaaccaatcgaacgacgcgaaaacgaaacgaaaccgaccgacatcgcgcgaccgcacgtacgccacgaatatctcaaccgcttcctatcaacgccaaaaacgaaaaattcccgaaatcccgaacaaatacctaaacaacgcaaatcctcgcaaaaccgtttctcaaaaacgccgcctcgccactaacgtaacaccaaaacccgcgcgaatcctcgtccgaatttcgacaataactataattaccgacccctaaaaaaaaaaaaaaaaaaatatataccgaaactaacaccgaaaacgcgaccgccgcccgccaaccccgacgccgtcccccgaaaaacacttacccgacacgaaaccgaaaccaacccgctctacgcgtccaaccaattaaaacaacgaaaacccgacgcgaaaaaaatctaatcctcccgatacaaataaccgttatcccaaaaacaacctataaaaaaaaaaaacccccgaacacaaaataacgaacaacgaacgaaaaacgcccaacgtaacgaacaaaaaaaccgaaaccacccgaactaaacctcaacctaattaaaaaacccgaacactactaaacctc

SEQ ID NO: 2753 - DNA, 1073 bp, Artificial Sequence
  chemically treated genomic DNA (Homo sapiens) CpG-island No: 2753
ttgtcgtcgcgttttttatattagtcgattttcgttcggtagttcgttcggttttaattgggcgttgaatatcgatttaaagtattcgttgtaggcggttagtacggcgcggtgcgttgggaagttttcgtcgtttattcgtaagagtacgtcgtagaagcgttcgtcgtttttgcgttgttggtttaggttgtgtagtattttcgtgttgtgtttgtttatttggtatgtgtagtagttagacgggtcgtacgaagcgtcgtttattcgttttatggtcgtcgtttttttttattagttcggtcgttgtatttgttcgtttttttttttttttttagtagcgagaagcggggcgtacgagacgtgtttatattttttatacgtgtcggttcgtggttttgtagtttcgtaggtgcgtcgagtgtatacgtttttagttcggattagattgtttagattgcggggtgtattatttttatatagttaattttcgttttcgttggattgcgcgtaattttttttttttcggtcgttcgtatttttttttcggtttattttttcgggggggtgcgcgagcgaagaggtgcgttttttttgtaaacgcgtttgttatttttcgcgtgtcgttcgttaggcggtcggcgcgtagttaagaagggtacgcgtacgcggggaggcgaaggagggtgttatcgcgtagcggcgcgcgtcgcggtttttttcgggtcgttgggggcgtcgttgcgttttttgtaaagcgcgagtcggtgcgggggcgtcggagcggaggaaataaaaggcgaaggcgaaggcgtgcggcggcggggcgcgtacgggggcggtggcgcgggtcgggtttcggagtttggagggcggtggcggcggcggcggcggttggagcgggcgggcggcggcggcggtagagtaggtttttttttaggtcgggagaaggcggcggcggagcggcggttgtgcggtttcgggtttcgtgtgttcggagcggaggaaagatggtagcggttgtatttttttttgtatttttatttttggggggaggagaaggagggggcgat

SEQ ID NO: 2754 - DNA, 1073 bp, Artificial Sequence
  chemically treated genomic DNA (Homo sapiens) CpG-island No: 2754
atcgccccctccttctcctccccccaaaaataaaaatacaaaaaaaaatacaaccgctaccatctttcctccgctccgaacacacgaaacccgaaaccgcacaaccgccgctccgccgccgccttctcccgacctaaaaaaaaacctactctaccgccgccgccgcccgcccgctccaaccgccgccgccgccgccaccgccctccaaactccgaaacccgacccgcgccaccgcccccgtacgcgccccgccgccgcacgccttcgccttcgccttttatttcctccgctccgacgcccccgcaccgactcgcgctttacaaaaaacgcaacgacgcccccaacgacccgaaaaaaaccgcgacgcgcgccgctacgcgataacaccctccttcgcctccccgcgtacgcgtacccttcttaactacgcgccgaccgcctaacgaacgacacgcgaaaaataacaaacgcgtttacaaaaaaaacgcacctcttcgctcgcgcacccccccgaaaaaataaaccgaaaaaaaaatacgaacgaccgaaaaaaaaaaaattacgcgcaatccaacgaaaacgaaaattaactatataaaaataatacaccccgcaatctaaacaatctaatccgaactaaaaacgtatacactcgacgcacctacgaaactacaaaaccacgaaccgacacgtataaaaaatataaacacgtctcgtacgccccgcttctcgctactaaaaaaaaaaaaaaaaacgaacaaatacaacgaccgaactaataaaaaaaaacgacgaccataaaacgaataaacgacgcttcgtacgacccgtctaactactacacataccaaataaacaaacacaacacgaaaatactacacaacctaaaccaacaacgcaaaaacgacgaacgcttctacgacgtactcttacgaataaacgacgaaaacttcccaacgcaccgcgccgtactaaccgcctacaacgaatactttaaatcgatattcaacgcccaattaaaaccgaacgaactaccgaacgaaaatcgactaatataaaaaacgcgacgacaa

SEQ ID NO: 2755 - DNA, 1073 bp, Artificial Sequence
  chemically treated genomic DNA (Homo sapiens) CpG-island No: 2755
atcgtttttttttttttttttttttaggggtgaaagtgtaagaggaagtgtagtcgttgttatttttttttcgtttcgaatatacggagttcggggtcgtatagtcgtcgtttcgtcgtcgttttttttcggtttgaggaagggtttattttgtcgtcgtcgtcgttcgttcgttttagtcgtcgtcgtcgtcgttatcgttttttaggtttcgggattcggttcgcgttatcgttttcgtgcgcgtttcgtcgtcgtacgttttcgttttcgttttttgtttttttcgtttcggcgttttcgtatcggttcgcgttttgtaggggacgtagcggcgtttttagcggttcgggaaaagtcgcggcgcgcgtcgttgcgcggtaatattttttttcgttttttcgcgtgcgcgtgttttttttggttgcgcgtcggtcgtttggcgggcggtacgcgggaggtggtaggcgcgtttgtaggaggggcgtattttttcgttcgcgtattttttcggaagggtagatcgggaaggggatgcgggcggtcggagaggagagagttgcgcgtagtttagcgagggcgggggttggttatgtgggggtggtgtatttcgtagtttagatagtttgattcgggttgggggcgtgtatattcggcgtatttgcgagattatagagttacgggtcggtacgtgtggggagtgtggatacgtttcgtgcgtttcgtttttcgttgttgaggggaagggagggggcgggtaggtgtagcggtcgggttagtgggagggggcggcggttatggagcgggtgaacgacgtttcgtgcggttcgtttggttgttatatatattaggtgagtagatatagtacggagatgttgtataatttgaattagtagcgtaaaaacggcgggcgtttttgcgacgtgtttttgcgggtaggcgacgagagttttttagcgtatcgcgtcgtgttggtcgtttgtagcgagtattttgagtcggtgtttagcgtttagttgggatcgggcggattgtcggacgggggtcggttgatgtagggggcgcgacggtag

SEQ ID NO: 2756 - DNA, 1073 bp, Artificial Sequence
  chemically treated genomic DNA (Homo sapiens) CpG-island No: 2756
ctaccgtcgcgccccctacatcaaccgacccccgtccgacaatccgcccgatcccaactaaacgctaaacaccgactcaaaatactcgctacaaacgaccaacacgacgcgatacgctaaaaaactctcgtcgcctacccgcaaaaacacgtcgcaaaaacgcccgccgtttttacgctactaattcaaattatacaacatctccgtactatatctactcacctaatatatataacaaccaaacgaaccgcacgaaacgtcgttcacccgctccataaccgccgccccctcccactaacccgaccgctacacctacccgccccctcccttcccctcaacaacgaaaaacgaaacgcacgaaacgtatccacactccccacacgtaccgacccgtaactctataatctcgcaaatacgccgaatatacacgcccccaacccgaatcaaactatctaaactacgaaatacaccacccccacataaccaacccccgccctcgctaaactacgcgcaactctctcctctccgaccgcccgcatccccttcccgatctacccttccgaaaaaatacgcgaacgaaaaaatacgcccctcctacaaacgcgcctaccacctcccgcgtaccgcccgccaaacgaccgacgcgcaaccaaaaaaaacacgcgcacgcgaaaaaacgaaaaaaaatattaccgcgcaacgacgcgcgccgcgacttttcccgaaccgctaaaaacgccgctacgtcccctacaaaacgcgaaccgatacgaaaacgccgaaacgaaaaaaacaaaaaacgaaaacgaaaacgtacgacgacgaaacgcgcacgaaaacgataacgcgaaccgaatcccgaaacctaaaaaacgataacgacgacgacgacgactaaaacgaacgaacgacgacgacgacaaaataaacccttcctcaaaccgaaaaaaaacgacgacgaaacgacgactatacgaccccgaactccgtatattcgaaacgaaaaaaaaataacaacgactacacttcctcttacactttcacccctaaaaaaaaaaaaaaaaaaaaacgat

SEQ ID NO: 2757 - DNA, 623 bp, Artificial Sequence
  chemically treated genomic DNA (Homo sapiens) CpG-island No: 2757
gtacgcgggttttagttgcgcgtttttcgtttcgtcgtttttttcgggttttttcgatttttcgtttcgtttcgtttcggagtcgggttcggagtgtttggtgggttgatttcggagcgtggaagggagtacggagtacggaagcgagagggaggcggcggcggcgggaggcgggaaggagggggatttttttcgttgtttttttaagtcggcgcggagtcgtttcgggtcgggtcgagggttgcgcggcggcggcggcggcggggttcggttaggatgcggggttttcgggatcgcgcggggcggggcgggcggcggcggcgggttgcgggcgggagttgttcgcggtgttgaagcggcggttgtttagggacgcggggacgagagtaggggagtttttttgggagttttatcgcgatcgcgaggcgggggcgtcgtcgtttatcggtttatgtcgagttttcgagtttcgcggaggaggcgggatcgttcgcggcgggataggtaaggggcggtttgggggcgtcgcgggagcgtagagttaggtacggagcggggagtgagttggggagggtacgggagttttttcggggttaggggttttgattttttgtttggtcgta

SEQ ID NO: 2758 - DNA, 623 bp, Artificial Sequence
  chemically treated genomic DNA (Homo sapiens) CpG-island No: 2758
tacgaccaaacaaaaaatcaaaacccctaaccccgaaaaaactcccgtaccctccccaactcactccccgctccgtacctaactctacgctcccgcgacgcccccaaaccgccccttacctatcccgccgcgaacgatcccgcctcctccgcgaaactcgaaaactcgacataaaccgataaacgacgacgcccccgcctcgcgatcgcgataaaactcccaaaaaaactcccctactctcgtccccgcgtccctaaacaaccgccgcttcaacaccgcgaacaactcccgcccgcaacccgccgccgccgcccgccccgccccgcgcgatcccgaaaaccccgcatcctaaccgaaccccgccgccgccgccgccgcgcaaccctcgacccgacccgaaacgactccgcgccgacttaaaaaaacaacgaaaaaaatccccctccttcccgcctcccgccgccgccgcctccctctcgcttccgtactccgtactcccttccacgctccgaaatcaacccaccaaacactccgaacccgactccgaaacgaaacgaaacgaaaaatcgaaaaaacccgaaaaaaacgacgaaacgaaaaacgcgcaactaaaacccgcgtac

SEQ ID NO: 2759 - DNA, 623 bp, Artificial Sequence
  chemically treated genomic DNA (Homo sapiens) CpG-island No: 2759
tgcggttaagtagggagttagagtttttagtttcgagagggttttcgtgttttttttagtttatttttcgtttcgtgtttagttttgcgttttcgcggcgtttttagatcgttttttatttgtttcgtcgcggacggtttcgtttttttcgcggggttcgggggttcggtatgggtcggtgagcgacggcgttttcgtttcgcggtcgcggtggaatttttaggagggtttttttgttttcgttttcgcgtttttgagtagtcgtcgttttagtatcgcggatagttttcgttcgtagttcgtcgtcgtcgttcgtttcgtttcgcgcggtttcgggagtttcgtattttggtcgggtttcgtcgtcgtcgtcgtcgcgtagttttcggttcggttcgaggcggtttcgcgtcgatttgggagagtagcgaggagggtttttttttttttcgtttttcgtcgtcgtcgtttttttttcgttttcgtgtttcgtgtttttttttacgtttcggaattagtttattaggtatttcggattcggtttcggggcggggcggggcgggaagtcgggggagttcggaggaggcggcgaagcgaggggcgcgtagttggaattcgcgtat

SEQ ID NO: 2760 - DNA, 623 bp, Artificial Sequence
  chemically treated genomic DNA (Homo sapiens) CpG-island No: 2760
atacgcgaattccaactacgcgcccctcgcttcgccgcctcctccgaactcccccgacttcccgccccgccccgccccgaaaccgaatccgaaatacctaataaactaattccgaaacgtaaaaaaaaacacgaaacacgaaaacgaaaaaaaaacgacgacgacgaaaaacgaaaaaaaaaaaaaccctcctcgctactctcccaaatcgacgcgaaaccgcctcgaaccgaaccgaaaactacgcgacgacgacgacgacgaaacccgaccaaaatacgaaactcccgaaaccgcgcgaaacgaaacgaacgacgacgacgaactacgaacgaaaactatccgcgatactaaaacgacgactactcaaaaacgcgaaaacgaaaacaaaaaaaccctcctaaaaattccaccgcgaccgcgaaacgaaaacgccgtcgctcaccgacccataccgaacccccgaaccccgcgaaaaaaacgaaaccgtccgcgacgaaacaaataaaaaacgatctaaaaacgccgcgaaaacgcaaaactaaacacgaaacgaaaaataaactaaaaaaaacacgaaaaccctctcgaaactaaaaactctaactccctacttaaccgca

SEQ ID NO: 2761 - DNA, 2110 bp, Artificial Sequence
  chemically treated genomic DNA (Homo sapiens) CpG-island No: 2761
tgtatgggacggaaaagggtaattgtgttgggcgtatgggacgggaaagggtaattgtgttgggcgtatgggacggaaaagggtaattgtgttgggcgtatgggacgggaaagggtaattgtgttgggcgtatgggacgggaaagggtaattgtgttgggcgtttgggacggaaaagggtaattgtgttgggcgtatgggacggaaaagagtaattgtgttgggcgtatgggacggaagagtaattgtgttgggcgcgtgggacggaaaagagtaattgtgttgggcgcgtgggacgggaaagggtaattgtgttgggcgtttgggacgggaaagggtaattgtgttgggcgtatgggacgggaaagggtaattgtgttgggcgtatgggacgggaaagggtaattgtgttgggcgtatgggacgggaaagggtaattgtgttgggcgtatgggacgggaaagggtaattgtgttgggcgtatgggacgggaaagggtaattgtgttgggcgtatgggacggtaaagagtaattgtgttgggcgtatgggacggtaaagagtaattgtgttgggcgtatgggacggaaaagagtatttgtgttgggcgtatggggcggaaaagagtatttgtgttgcgcgtatgggacgtaaaagagtaattgtgttgcgcgtatggggtggaagggtaattgtgttgggcgtatgggacggaaaagagtaattgtgttgggcgtatggtacggaatagagtaattgtgttgggcgcgtgggacggaaaagggtaattgtgttgggcgtatggtacgaaagagtaattgtgttgggcgcgtgggacggaaaagagtaattgtgttgggcgcgtgggacgggaaagggtaattgtgttgggcgtatgggacgggaaagggtaattgtgttgggcgtttgggacgggaaagagtaattgtgttgggcgtttgggacgggaaagagtaattgtgttgggcgtatgggacggaagagtaattgtgttgggcgcgtgggacggaaaagggtaattgtgttgggcgcgtgggacgggaaagggtaattgtgttgggcgtttgggacgggaaagggtaattgtgttgggcgtatgggacgggaaagggtaattgtgttgggcgtatgggacgggaaagggtaattgtgttgggcgtatgggacgggaaagagtaattgtgttgggcgtatgggacggaaaagagtaattgtgttgggcgcgtgggacgggaaagggtaattgtgttgggcgcgtgggacggaagagtaattgtgttgggcgcgtgggacggaaaagagtaattgtgttgggcgcgtgggacgggaaagggtaattgtgttgggcgcgtggggcgggaaagggtaattgtgttgggcgcgtgggacgggaaagggtaattgtgttgggcgcgtgggacgggaaagggtaattgtgttgggcgcgtggggcggaaaagggtaattgtgttgggttcgtgggacgggaaagggtaattgtgttgggcgtatggggcggaaaagggtaattgtgttgtgtttatgggacggtaaatggttattgtgttgggcgtatgggacgggaaagggtaattgtgttgggcgtatgggacgggaaagggtaattgtgttgggcgtatgggacgggaaagagtaattgtgttgggcgtatggggcggaaaagggtaattgtgttgggcgcgtggggcgggaaagggtaattgtgttgggcgcgtgggacgggaaagggtaattgtgttgggcgcgtgggacgggaaagggtaattgtgttgggcgcgtgggacgggaaagggtaattgtgttgggcgcgtggggcgggaaagggtaattgtgttgggcgcgtggggcgggaaagggtaattgtgttgggcgcgtgggacgggaaagggtaattgtgttgggcgcgtgggacgggaaagggtaattgtgttgggcgcgtgggacgggaaagggtaattgtgttgggcgcgtggggcgggaaagggtaattgtgttgggcgcgtgggacgggaaagcgatttgtcgcggggacggatatgagtaggtttttttttaaagtttcggggtttt

SEQ ID NO: 2762 - DNA, 2110 bp, Artificial Sequence
  chemically treated genomic DNA (Homo sapiens) CpG-island No: 2762
aaaaccccgaaactttaaaaaaaaacctactcatatccgtccccgcgacaaatcgctttcccgtcccacgcgcccaacacaattaccctttcccgccccacgcgcccaacacaattaccctttcccgtcccacgcgcccaacacaattaccctttcccgtcccacgcgcccaacacaattaccctttcccgtcccacgcgcccaacacaattaccctttcccgccccacgcgcccaacacaattaccctttcccgccccacgcgcccaacacaattaccctttcccgtcccacgcgcccaacacaattaccctttcccgtcccacgcgcccaacacaattaccctttcccgtcccacgcgcccaacacaattaccctttcccgccccacgcgcccaacacaattacccttttccgccccatacgcccaacacaattactctttcccgtcccatacgcccaacacaattaccctttcccgtcccatacgcccaacacaattaccctttcccgtcccatacgcccaacacaataaccatttaccgtcccataaacacaacacaattacccttttccgccccatacgcccaacacaattaccctttcccgtcccacgaacccaacacaattacccttttccgccccacgcgcccaacacaattaccctttcccgtcccacgcgcccaacacaattaccctttcccgtcccacgcgcccaacacaattaccctttcccgccccacgcgcccaacacaattaccctttcccgtcccacgcgcccaacacaattactcttttccgtcccacgcgcccaacacaattactcttccgtcccacgcgcccaacacaattaccctttcccgtcccacgcgcccaacacaattactcttttccgtcccatacgcccaacacaattactctttcccgtcccatacgcccaacacaattaccctttcccgtcccatacgcccaacacaattaccctttcccgtcccatacgcccaacacaattaccctttcccgtcccaaacgcccaacacaattaccctttcccgtcccacgcgcccaacacaattacccttttccgtcccacgcgcccaacacaattactcttccgtcccatacgcccaacacaattactctttcccgtcccaaacgcccaacacaattactctttcccgtcccaaacgcccaacacaattaccctttcccgtcccatacgcccaacacaattaccctttcccgtcccacgcgcccaacacaattactcttttccgtcccacgcgcccaacacaattactctttcgtaccatacgcccaacacaattacccttttccgtcccacgcgcccaacacaattactctattccgtaccatacgcccaacacaattactcttttccgtcccatacgcccaacacaattacccttccaccccatacgcgcaacacaattactcttttacgtcccatacgcgcaacacaaatactcttttccgccccatacgcccaacacaaatactcttttccgtcccatacgcccaacacaattactctttaccgtcccatacgcccaacacaattactctttaccgtcccatacgcccaacacaattaccctttcccgtcccatacgcccaacacaattaccctttcccgtcccatacgcccaacacaattaccctttcccgtcccatacgcccaacacaattaccctttcccgtcccatacgcccaacacaattaccctttcccgtcccatacgcccaacacaattaccctttcccgtcccaaacgcccaacacaattaccctttcccgtcccacgcgcccaacacaattactcttttccgtcccacgcgcccaacacaattactcttccgtcccatacgcccaacacaattactcttttccgtcccatacgcccaacacaattacccttttccgtcccaaacgcccaacacaattaccctttcccgtcccatacgcccaacacaattaccctttcccgtcccatacgcccaacacaattacccttttccgtcccatacgcccaacacaattaccctttcccgtcccatacgcccaacacaattacccttttccgtcccataca

SEQ ID NO: 2763 - DNA, 2110 bp, Artificial Sequence
  chemically treated genomic DNA (Homo sapiens) CpG-island No: 2763
aagatttcggggttttagaagaaaatttatttatattcgttttcgcggtaggtcgttttttcgttttacgcgtttagtatagttattttttttcgttttacgcgtttagtatagttattttttttcgttttacgcgtttagtatagttattttttttcgttttacgcgtttagtatagttattttttttcgttttacgcgtttagtatagttattttttttcgttttacgcgtttagtatagttattttttttcgttttacgcgtttagtatagttattttttttcgttttacgcgtttagtatagttattttttttcgttttacgcgtttagtatagttattttttttcgttttacgcgtttagtatagttattttttttcgttttacgcgtttagtatagttattttttttcgttttatgcgtttagtatagttattttttttcgttttatgcgtttagtatagttattttttttcgttttatgcgtttagtatagttattttttttcgttttatgcgtttagtatagtaattatttatcgttttatgagtatagtatagttattttttttcgttttatgcgtttagtatagttattttttttcgttttacgagtttagtatagttattttttttcgttttacgcgtttagtatagttattttttttcgttttacgcgtttagtatagttattttttttcgttttacgcgtttagtatagttattttttttcgttttacgcgtttagtatagttattttttttcgttttacgcgtttagtatagttattttttttcgttttacgcgtttagtatagttattttttcgttttacgcgtttagtatagttattttttttcgttttacgcgtttagtatagttattttttttcgttttatgcgtttagtatagttattttttttcgttttatgcgtttagtatagttattttttttcgttttatgcgtttagtatagttattttttttcgttttatgcgtttagtatagttattttttttcgttttaggcgtttagtatagttattttttttcgttttacgcgtttagtatagttattttttttcgttttacgcgtttagtatagttattttttcgttttatgcgtttagtatagttattttttttcgttttaggcgtttagtatagttattttttttcgttttaggcgtttagtatagttattttttttcgttttatgcgtttagtatagttattttttttcgttttacgcgtttagtatagttattttttttcgttttacgcgtttagtatagttattttttcgtattatgcgtttagtatagttattttttttcgttttacgcgtttagtatagttattttgtttcgtattatgcgtttagtatagttattttttttcgttttatgcgtttagtatagttatttttttattttatgcgcgtagtatagttatttttttacgttttatgcgcgtagtatagatattttttttcgttttatgcgtttagtatagatattttttttcgttttatgcgtttagtatagttattttttgtcgttttatgcgtttagtatagttattttttgtcgttttatgcgtttagtatagttattttttttcgttttatgcgtttagtatagttattttttttcgttttatgcgtttagtatagttattttttttcgttttatgcgtttagtatagttattttttttcgttttatgcgtttagtatagttattttttttcgttttatgcgtttagtatagttattttttttcgttttaggcgtttagtatagttattttttttcgttttacgcgtttagtatagttattttttttcgttttacgcgtttagtatagttattttttcgttttatgcgtttagtatagttattttttttcgttttatgcgtttagtatagttattttttttcgttttaggcgtttagtatagttattttttttcgttttatgcgtttagtatagttattttttttcgttttatgcgtttagtatagttattttttttcgttttatgcgtttagtatagttattttttttcgttttatgcgtttagtatagttattttttttcgttttatgta

SEQ ID NO: 2764 - DNA, 2110 bp, Artificial Sequence
  chemically treated genomic DNA (Homo sapiens) CpG-island No: 2764
tacataaaacgaaaaaaaataactatactaaacgcataaaacgaaaaaaaataactatactaaacgcataaaacgaaaaaaaataactatactaaacgcataaaacgaaaaaaaataactatactaaacgcataaaacgaaaaaaaataactatactaaacgcctaaaacgaaaaaaaataactatactaaacgcataaaacgaaaaaaaataactatactaaacgcataaaacgaaaaaataactatactaaacgcgtaaaacgaaaaaaaataactatactaaacgcgtaaaacgaaaaaaaataactatactaaacgcctaaaacgaaaaaaaataactatactaaacgcataaaacgaaaaaaaataactatactaaacgcataaaacgaaaaaaaataactatactaaacgcataaaacgaaaaaaaataactatactaaacgcataaaacgaaaaaaaataactatactaaacgcataaaacgaaaaaaaataactatactaaacgcataaaacgacaaaaaataactatactaaacgcataaaacgacaaaaaataactatactaaacgcataaaacgaaaaaaaatatctatactaaacgcataaaacgaaaaaaaatatctatactacgcgcataaaacgtaaaaaaataactatactacgcgcataaaataaaaaaataactatactaaacgcataaaacgaaaaaaaataactatactaaacgcataatacgaaacaaaataactatactaaacgcgtaaaacgaaaaaaaataactatactaaacgcataatacgaaaaaataactatactaaacgcgtaaaacgaaaaaaaataactatactaaacgcgtaaaacgaaaaaaaataactatactaaacgcataaaacgaaaaaaaataactatactaaacgcctaaaacgaaaaaaaataactatactaaacgcctaaaacgaaaaaaaataactatactaaacgcataaaacgaaaaaataactatactaaacgcgtaaaacgaaaaaaaataactatactaaacgcgtaaaacgaaaaaaaataactatactaaacgcctaaaacgaaaaaaaataactatactaaacgcataaaacgaaaaaaaataactatactaaacgcataaaacgaaaaaaaataactatactaaacgcataaaacgaaaaaaaataactatactaaacgcataaaacgaaaaaaaataactatactaaacgcgtaaaacgaaaaaaaataactatactaaacgcgtaaaacgaaaaaataactatactaaacgcgtaaaacgaaaaaaaataactatactaaacgcgtaaaacgaaaaaaaataactatactaaacgcgtaaaacgaaaaaaaataactatactaaacgcgtaaaacgaaaaaaaataactatactaaacgcgtaaaacgaaaaaaaataactatactaaacgcgtaaaacgaaaaaaaataactatactaaactcgtaaaacgaaaaaaaataactatactaaacgcataaaacgaaaaaaaataactatactatactcataaaacgataaataattactatactaaacgcataaaacgaaaaaaaataactatactaaacgcataaaacgaaaaaaaataactatactaaacgcataaaacgaaaaaaaataactatactaaacgcataaaacgaaaaaaaataactatactaaacgcgtaaaacgaaaaaaaataactatactaaacgcgtaaaacgaaaaaaaataactatactaaacgcgtaaaacgaaaaaaaataactatactaaacgcgtaaaacgaaaaaaaataactatactaaacgcgtaaaacgaaaaaaaataactatactaaacgcgtaaaacgaaaaaaaataactatactaaacgcgtaaaacgaaaaaaaataactatactaaacgcgtaaaacgaaaaaaaataactatactaaacgcgtaaaacgaaaaaaaataactatactaaacgcgtaaaacgaaaaaaaataactatactaaacgcgtaaaacgaaaaaacgacctaccgcgaaaacgaatataaataaattttcttctaaaaccccgaaatctt

SEQ ID NO: 2765 - DNA, 534 bp, Artificial Sequence
  chemically treated genomic DNA (Homo sapiens) CpG-island No: 2765
agagtcgggtaggtgttggtgtaattgacgcgggttgtgtatttataagaaagttcggtcggtgttggtgtaattgatacgggttgtgggtttgtaagagagtcgggtaggtgttggtgtaattgacgcgggttgtgtatttataagaaagttcggtcggtgttggtgtaattgacgcgggttgtgggtttgtaagagagtcgggtaggtgttggtgtaattgacgcgggttgtgtatttataagaaagttcggtcggtgttggtgtaattgacgtgggttgtgtatttataagaaagtttggtcggttttggtgtaattgttgcgggttttgtttttgtgtgaaagttcggtcggttttggtgtaattgatacgggttgtgggtttgtaagagagtcgggtaggtgttggtgtaattgacgtgggttgtgtatttatgagaaagtttggtcggttttggtgtaattgacgtgggttgtgtatttataagaaagtttggtcggttttggtgtaattgttgcgggttttgttttt

SEQ ID NO: 2766 - DNA, 534 bp, Artificial Sequence
  chemically treated genomic DNA (Homo sapiens) CpG-island No: 2766
aaaaacaaaacccgcaacaattacaccaaaaccgaccaaactttcttataaatacacaacccacgtcaattacaccaaaaccgaccaaactttctcataaatacacaacccacgtcaattacaccaacacctacccgactctcttacaaacccacaacccgtatcaattacaccaaaaccgaccgaactttcacacaaaaacaaaacccgcaacaattacaccaaaaccgaccaaactttcttataaatacacaacccacgtcaattacaccaacaccgaccgaactttcttataaatacacaacccgcgtcaattacaccaacacctacccgactctcttacaaacccacaacccgcgtcaattacaccaacaccgaccgaactttcttataaatacacaacccgcgtcaattacaccaacacctacccgactctcttacaaacccacaacccgtatcaattacaccaacaccgaccgaactttcttataaatacacaacccgcgtcaattacaccaacacctacccgactct

SEQ ID NO: 2767 - DNA, 534 bp, Artificial Sequence
  chemically treated genomic DNA (Homo sapiens) CpG-island No: 2767
aaaggtagagttcgtaatagttatattaggatcgattaggtttttttataaatgtatagtttacgttagttatattaggatcgattaggtttttttataaatgtatagtttacgttagttatattagtatttattcggtttttttataaatttatagttcgtgttagttatattaggatcgatcgggtttttatataaaggtagagttcgtaatagttatattaggatcgattaggtttttttataaatgtatagtttacgttagttatattagtatcgatcgggtttttttataaatgtatagttcgcgttagttatattagtatttattcggtttttttataaatttatagttcgcgttagttatattagtatcgatcgggtttttttataaatgtatagttcgcgttagttatattagtatttattcggtttttttataaatttatagttcgtgttagttatattagtatcgatcgggtttttttataaatgtatagttcgcgttagttatattagtatttattcggtttt

SEQ ID NO: 2768 - DNA, 534 bp, Artificial Sequence
  chemically treated genomic DNA (Homo sapiens) CpG-island No: 2768
aaaaccgaataaatactaatataactaacgcgaactatacatttataaaaaaacccgatcgatactaatataactaacacgaactataaatttataaaaaaaccgaataaatactaatataactaacgcgaactatacatttataaaaaaacccgatcgatactaatataactaacgcgaactataaatttataaaaaaaccgaataaatactaatataactaacgcgaactatacatttataaaaaaacccgatcgatactaatataactaacgtaaactatacatttataaaaaaacctaatcgatcctaatataactattacgaactctacctttatataaaaacccgatcgatcctaatataactaacacgaactataaatttataaaaaaaccgaataaatactaatataactaacgtaaactatacatttataaaaaaacctaatcgatcctaatataactaacgtaaactatacatttataaaaaaacctaatcgatcctaatataactattacgaactctaccttt

SEQ ID NO: 2769 - DNA, 601 bp, Artificial Sequence
  chemically treated genomic DNA (Homo sapiens) CpG-island No: 2769
gtttgttcgtggtgagagatttcgagtttcggtatattgtgggggggtcgtaggacggcggttcggggtgttttcgggatttttgcgtttcgagattcgaggattacgcgataaacggtagtttaggttgtcgcgggtgtaggtttgtttatttacggtcgtcgggttagggagacgattttggtacgttttaggtaggtcggtgtcgggagagggtttttgcgtgtgggagaatcgagcggcggggtcggttgagaatcggggaaggaacgcggcggttttttttcgcgggaagaggtttaagtcgggttcgttttgcggtttagcgaggagttcgttttgtcggtttttgaggacgcgtttcggattttgtttttttgggtttgaggtgatacgttttgtcgattgaggtttcgaggtttgcggaagtttttggtcgtagtcgcgggaggcgtaatacgttgaggttgcgcgacgtggggttcgttcggattcgttttcgttcgtgttttttcgtagtcgtttttgttagaattatcggaagagatcggaattgttggttttgtgtttgtgagaagagtagtattgggaataagttatt

SEQ ID NO: 2770 - DNA, 601 bp, Artificial Sequence
  chemically treated genomic DNA (Homo sapiens) CpG-island No: 2770
aataacttattcccaatactactcttctcacaaacacaaaaccaacaattccgatctcttccgataattctaacaaaaacgactacgaaaaaacacgaacgaaaacgaatccgaacgaaccccacgtcgcgcaacctcaacgtattacgcctcccgcgactacgaccaaaaacttccgcaaacctcgaaacctcaatcgacaaaacgtatcacctcaaacccaaaaaaacaaaatccgaaacgcgtcctcaaaaaccgacaaaacgaactcctcgctaaaccgcaaaacgaacccgacttaaacctcttcccgcgaaaaaaaaccgccgcgttccttccccgattctcaaccgaccccgccgctcgattctcccacacgcaaaaaccctctcccgacaccgacctacctaaaacgtaccaaaatcgtctccctaacccgacgaccgtaaataaacaaacctacacccgcgacaacctaaactaccgtttatcgcgtaatcctcgaatctcgaaacgcaaaaatcccgaaaacaccccgaaccgccgtcctacgacccccccacaatataccgaaactcgaaatctctcaccacgaacaaac

SEQ ID NO: 2771 - DNA, 601 bp, Artificial Sequence
  chemically treated genomic DNA (Homo sapiens) CpG-island No: 2771
ggtgatttatttttagtgttgttttttttatagatataaaattaatagtttcggtttttttcgatagttttggtagagacggttgcggggagatacgggcggaggcgggttcgggcgggttttacgtcgcgtagttttagcgtgttgcgtttttcgcggttgcggttagagattttcgtaaatttcggggttttaatcgatagaacgtgttattttaggtttaggagagtagggttcggggcgcgtttttagaagtcggtagggcgggtttttcgttgagtcgtagggcgagttcggtttgggttttttttcgcgggaggaggtcgtcgcgtttttttttcggtttttaatcgatttcgtcgttcggtttttttatacgtaggaattttttttcgatatcggtttgtttggaacgtgttagaatcgtttttttaattcggcggtcgtggatgagtaaatttgtattcgcggtagtttgaattgtcgtttgtcgcgtagttttcgagtttcggagcgtaggggtttcgagggtatttcgggtcgtcgttttgcggtttttttatagtgtgtcgggattcggggttttttattacgagtagat

SEQ ID NO: 2772 - DNA, 601 bp, Artificial Sequence
  chemically treated genomic DNA (Homo sapiens) CpG-island No: 2772
atctactcgtaataaaaaaccccgaatcccgacacactataaaaaaaccgcaaaacgacgacccgaaataccctcgaaacccctacgctccgaaactcgaaaactacgcgacaaacgacaattcaaactaccgcgaatacaaatttactcatccacgaccgccgaattaaaaaaacgattctaacacgttccaaacaaaccgatatcgaaaaaaaattcctacgtataaaaaaaccgaacgacgaaatcgattaaaaaccgaaaaaaaaacgcgacgacctcctcccgcgaaaaaaaacccaaaccgaactcgccctacgactcaacgaaaaacccgccctaccgacttctaaaaacgcgccccgaaccctactctcctaaacctaaaataacacgttctatcgattaaaaccccgaaatttacgaaaatctctaaccgcaaccgcgaaaaacgcaacacgctaaaactacgcgacgtaaaacccgcccgaacccgcctccgcccgtatctccccgcaaccgtctctaccaaaactatcgaaaaaaaccgaaactattaattttatatctataaaaaaaacaacactaaaaataaatcacc

SEQ ID NO: 2773 - DNA, 596 bp, Artificial Sequence
  chemically treated genomic DNA (Homo sapiens) CpG-island No: 2773
gggtttcgttgtcgtagttgtttagtcgcggtcgttttggttagttttgtttttaagggaatcgggacgtcgagttggtaatgttttattcgcgtcgttgacggcgcgcggagagcgtacgcgttcgtgacgtagtttaggcgtcgcggcgcgcggggtggggcggaggtcgcgtcgagggcggcgggttgtcgcgtaagggtggcgcgcgcgcggtgagtgtgcgagtgtcggcggcgtcggattttttacgtggggttcgggttttgcgggcgggaggcgggagttggtagttttaggcggtagcgtttcgttttgcggtttgggtgtgttaggagtcgttgcggtcggggcgtttttgttttaggagatttagattttcgttgattcgttcgtttcgtcgtagtggtttgagtcgtagttttttttcgtgtcgttcgcgggtttcgtttttttcgtgtttttatgtcgtagttagcgtggtcgcggttattttgttttcgttttcgtttcgtttttgtcgttttcggtattgttttatttttttgggttgtattttttttttggttttttatttttgttgattttgtaaggga

SEQ ID NO: 2774 - DNA, 596 bp, Artificial Sequence
  chemically treated genomic DNA (Homo sapiens) CpG-island No: 2774
tcccttacaaaatcaacaaaaataaaaaaccaaaaaaaaaatacaacccaaaaaaataaaacaataccgaaaacgacaaaaacgaaacgaaaacgaaaacaaaataaccgcgaccacgctaactacgacataaaaacacgaaaaaaacgaaacccgcgaacgacacgaaaaaaaactacgactcaaaccactacgacgaaacgaacgaatcaacgaaaatctaaatctcctaaaacaaaaacgccccgaccgcaacgactcctaacacacccaaaccgcaaaacgaaacgctaccgcctaaaactaccaactcccgcctcccgcccgcaaaacccgaaccccacgtaaaaaatccgacgccgccgacactcgcacactcaccgcgcgcgcgccacccttacgcgacaacccgccgccctcgacgcgacctccgccccaccccgcgcgccgcgacgcctaaactacgtcacgaacgcgtacgctctccgcgcgccgtcaacgacgcgaataaaacattaccaactcgacgtcccgattcccttaaaaacaaaactaaccaaaacgaccgcgactaaacaactacgacaacgaaaccc

SEQ ID NO: 2775 - DNA, 596 bp, Artificial Sequence
  chemically treated genomic DNA (Homo sapiens) CpG-island No: 2775
ttttttatagaattagtaagggtgaaaagttaggaaagagatgtaatttaaaggagtaaggtagtgtcgggagcggtagaagcggagcgggggcgagggtaaggtagtcgcggttacgttggttgcggtatggagatacgggaggaacgggattcgcgggcggtacgggaaagggttgcggtttagattattgcggcgggacgggcggattagcggggatttaagttttttgaggtaagggcgtttcgatcgtagcgatttttgatatatttaggtcgtaggacgaagcgttatcgtttggggttgttagttttcgtttttcgttcgtagagttcgggttttacgtagaggattcggcgtcgtcgatattcgtatatttatcgcgcgcgcgttatttttgcgcggtagttcgtcgttttcggcgcgattttcgttttatttcgcgcgtcgcggcgtttgggttacgttacgggcgcgtgcgtttttcgcgcgtcgttagcggcgcgggtggggtattgttagttcggcgtttcggtttttttggagatagagttggttagggcggtcgcggttgggtaattacgatagcggagttt

SEQ ID NO: 2776 - DNA, 596 bp, Artificial Sequence
  chemically treated genomic DNA (Homo sapiens) CpG-island No: 2776
aaactccgctatcgtaattacccaaccgcgaccgccctaaccaactctatctccaaaaaaaccgaaacgccgaactaacaataccccacccgcgccgctaacgacgcgcgaaaaacgcacgcgcccgtaacgtaacccaaacgccgcgacgcgcgaaataaaacgaaaatcgcgccgaaaacgacgaactaccgcgcaaaaataacgcgcgcgcgataaatatacgaatatcgacgacgccgaatcctctacgtaaaacccgaactctacgaacgaaaaacgaaaactaacaaccccaaacgataacgcttcgtcctacgacctaaatatatcaaaaatcgctacgatcgaaacgcccttacctcaaaaaacttaaatccccgctaatccgcccgtcccgccgcaataatctaaaccgcaaccctttcccgtaccgcccgcgaatcccgttcctcccgtatctccataccgcaaccaacgtaaccgcgactaccttaccctcgcccccgctccgcttctaccgctcccgacactaccttactcctttaaattacatctctttcctaacttttcacccttactaattctataaaaaa

SEQ ID NO: 2777 - DNA, 570 bp, Artificial Sequence
  chemically treated genomic DNA (Homo sapiens) CpG-island No: 2777
tttagcgtcggttgtcgattttttttagagttcggcggtgttagtttttttttgttgttcgttaggcgcggtgtttgcggtcgtttcggtaggaggggttggggggttcgggtcggcggtagtttcggcggcgttttttttttttaagtttttggcggcgggcggtcgggtcgagggcggggcgtttgtatagattttttttttgtgagcggcgtttttttcgggcggtttggcgcgtagggttcgggtattgcgttagggttcggaatagtttttttgttcggtcgttcgttttacgtttcggcggagtcgtttgatttgttcggtcgggcgtagaagagtttggggtcgcggtggtataggaatcgggtgcgtgtttagttgtacggggttgtagtcgttatttttcgttgggtcggtattggacgcgtgtagtcgggtttattgtgcgtagttcgttttttgtgtgaaaacgttcgttgtgtgtagattttcgttttcgtgtagggtttattgtgcgtcgtattttttttttatgtaaagtttattgtgtgtagaattttatttgtt

SEQ ID NO: 2778 - DNA, 570 bp, Artificial Sequence
  chemically treated genomic DNA (Homo sapiens) CpG-island No: 2778
aacaaataaaattctacacacaataaactttacataaaaaaaaaatacgacgcacaataaaccctacacgaaaacgaaaatctacacacaacgaacgttttcacacaaaaaacgaactacgcacaataaacccgactacacgcgtccaataccgacccaacgaaaaataacgactacaaccccgtacaactaaacacgcacccgattcctataccaccgcgaccccaaactcttctacgcccgaccgaacaaatcaaacgactccgccgaaacgtaaaacgaacgaccgaacaaaaaaactattccgaaccctaacgcaatacccgaaccctacgcgccaaaccgcccgaaaaaaacgccgctcacaaaaaaaaaatctatacaaacgccccgccctcgacccgaccgcccgccgccaaaaacttaaaaaaaaaaaacgccgccgaaactaccgccgacccgaaccccccaacccctcctaccgaaacgaccgcaaacaccgcgcctaacgaacaacaaaaaaaaactaacaccgccgaactctaaaaaaaatcgacaaccgacgctaaa

SEQ ID NO: 2779 - DNA, 570 bp, Artificial Sequence
  chemically treated genomic DNA (Homo sapiens) CpG-island No: 2779
ggtaaatggggttttgtatatagtaggttttgtatggaaggggggtgcggcgtatagtaggttttgtacgaagacggagatttgtatatagcgggcgtttttatataaaagacgggttgcgtatagtaggttcggttgtacgcgtttagtgtcggtttagcggagagtagcggttgtagtttcgtgtagttgagtacgtattcggtttttgtgttatcgcggttttaggtttttttgcgttcgatcgggtaggttaggcggtttcgtcggggcgtggggcgggcggtcgggtagggaggttatttcgggttttggcgtagtgttcgagttttgcgcgttaggtcgttcggggaaggcgtcgtttataaaaggagggtttgtgtagacgtttcgttttcggttcggtcgttcgtcgttaggggtttggaggagggagacgtcgtcggagttgtcgtcggttcggattttttaattttttttgtcggggcggtcgtagatatcgcgtttggcgggtaatagagggaggttggtatcgtcgggttttggagggggtcgatagtcggcgttggg

SEQ ID NO: 2780 - DNA, 570 bp, Artificial Sequence
  chemically treated genomic DNA (Homo sapiens) CpG-island No: 2780
cccaacgccgactatcgaccccctccaaaacccgacgataccaacctccctctattacccgccaaacgcgatatctacgaccgccccgacaaaaaaaattaaaaaatccgaaccgacgacaactccgacgacgtctccctcctccaaacccctaacgacgaacgaccgaaccgaaaacgaaacgtctacacaaaccctccttttataaacgacgccttccccgaacgacctaacgcgcaaaactcgaacactacgccaaaacccgaaataacctccctacccgaccgcccgccccacgccccgacgaaaccgcctaacctacccgatcgaacgcaaaaaaacctaaaaccgcgataacacaaaaaccgaatacgtactcaactacacgaaactacaaccgctactctccgctaaaccgacactaaacgcgtacaaccgaacctactatacgcaacccgtcttttatataaaaacgcccgctatatacaaatctccgtcttcgtacaaaacctactatacgccgcaccccccttccatacaaaacctactatatacaaaaccccatttacc

SEQ ID NO: 2781 - DNA, 574 bp, Artificial Sequence
  chemically treated genomic DNA (Homo sapiens) CpG-island No: 2781
acgaaggatcgtgtatacgtatgtttatttttgtattttacgcgggattgtgtatacgtatgtttatcgtgttttttacgcgggatcgtgtatacgtatgtttacgaatttttgtatatttatatttattaggtttgtttatgcgatgcgtttttgtagatttattgtggacgtttgtttgtcggcgttttgcgtatttcgcgtgagtggagtgtgtattcgtggagggggcgattgagtgcggggtaagcgtaagcgtaagtatattgggttcgcggagggtggagagaggtcgtgcgcgttttcggggttggcgcggaggtggggttagcggcgcgggagaacgtttcgtttcgttatcgttagttcggaagatttacggcggcgggcgttggcgttacgggtttttattggggtttcggcgtcggggtcgggattttttggcgtaggaacgttcgtgacggcggcgtttgtttgcgtcggttacgttgggaggtttgagtttggggatgatattagtttttgcgtttttggagttggttcgggcgggacggggatttggagaaagtagtga

SEQ ID NO: 2782 - DNA, 574 bp, Artificial Sequence
  chemically treated genomic DNA (Homo sapiens) CpG-island No: 2782
tcactactttctccaaatccccgtcccgcccgaaccaactccaaaaacgcaaaaactaatatcatccccaaactcaaacctcccaacgtaaccgacgcaaacaaacgccgccgtcacgaacgttcctacgccaaaaaatcccgaccccgacgccgaaaccccaataaaaacccgtaacgccaacgcccgccgccgtaaatcttccgaactaacgataacgaaacgaaacgttctcccgcgccgctaaccccacctccgcgccaaccccgaaaacgcgcacgacctctctccaccctccgcgaacccaatatacttacgcttacgcttaccccgcactcaatcgccccctccacgaatacacactccactcacgcgaaatacgcaaaacgccgacaaacaaacgtccacaataaatctacaaaaacgcatcgcataaacaaacctaataaatataaatatacaaaaattcgtaaacatacgtatacacgatcccgcgtaaaaaacacgataaacatacgtatacacaatcccgcgtaaaatacaaaaataaacatacgtatacacgatccttcgt

SEQ ID NO: 2783 - DNA, 574 bp, Artificial Sequence
  chemically treated genomic DNA (Homo sapiens) CpG-island No: 2783
ttattgttttttttaagttttcgtttcgttcgggttagttttagaaacgtaggggttgatgttatttttaggtttaaattttttagcgtggtcgacgtaggtaggcgtcgtcgttacgggcgtttttgcgttagggaatttcggtttcggcgtcggggttttagtggaaattcgtgacgttagcgttcgtcgtcgtgggtttttcgggttggcggtagcggggcggggcgttttttcgcgtcgttgattttattttcgcgttagtttcgggaacgcgtacggtttttttttatttttcgcgagtttagtgtgtttgcgtttgcgtttgtttcgtatttagtcgttttttttacgagtgtatattttatttacgcgggatgcgtaggacgtcgataagtaggcgtttatagtgggtttgtagggacgtatcgtatgggtaggtttggtgggtgtaggtgtgtaggagttcgtggatatgcgtgtgtacgatttcgcgtggaaggtacggtggatatgcgtgtgtataatttcgcgtgaaatgtaaaggtaggtatgcgtgtgtacgatttttcgt

SEQ ID NO: 2784 - DNA, 574 bp, Artificial Sequence
  chemically treated genomic DNA (Homo sapiens) CpG-island No: 2784
acgaaaaatcgtacacacgcatacctacctttacatttcacgcgaaattatacacacgcatatccaccgtaccttccacgcgaaatcgtacacacgcatatccacgaactcctacacacctacacccaccaaacctacccatacgatacgtccctacaaacccactataaacgcctacttatcgacgtcctacgcatcccgcgtaaataaaatatacactcgtaaaaaaaacgactaaatacgaaacaaacgcaaacgcaaacacactaaactcgcgaaaaataaaaaaaaaccgtacgcgttcccgaaactaacgcgaaaataaaatcaacgacgcgaaaaaacgccccgccccgctaccgccaacccgaaaaacccacgacgacgaacgctaacgtcacgaatttccactaaaaccccgacgccgaaaccgaaattccctaacgcaaaaacgcccgtaacgacgacgcctacctacgtcgaccacgctaaaaaatttaaacctaaaaataacatcaacccctacgtttctaaaactaacccgaacgaaacgaaaacttaaaaaaaacaataa

SEQ ID NO: 2785 - DNA, 922 bp, Artificial Sequence
  chemically treated genomic DNA (Homo sapiens) CpG-island No: 2785
ggcggatatttacgggtcgtgtgttcgttatacgttgtaggcgtcgcgcgtggggatttttgcgcgtgttcgtgtgcggtgtgtgtgtgttcgtggttgagtcgaggaggttcggttcgtcggtgttttcgagtcgtttgcgcgtgagtgtgtgtgtgcgcgtgtgtgtgcgcgcgcgtcgcggcgaaggtggattcgttcgtttcgtagcgagtttagtcggggtttcgcgatttgtagtcgtcgtcgttatcgttttcgtcgtttttcgggtttttttttgcgcgggtcgggtcggggatggagtcgtagtcggagtcgtcgtagtcggggtcgcggcgcggagtagtttgaggcgcgggcggtgcgcgggatcggggggagggcgggtcgaggggagggttttgcgggtcgggggggcgggcgcggcgcgttttttttttggcgcgttcgttttttttttcgcgcgttttttttcgtcgttttttttcgtcgtttgcggtttttttttcgtcggggatcgagcgcgttcgtttcggcgtcggtttcgttttttcgtagtagcgttatggtacgtcgtcgtatttattttcgttttcgttcggggattttttggggtggtgcgtgggtttcgggcgaaagttgtaagatttggggggatagggggcgggggtcgttcggaggaggggttcgaggcggggatttttattcgttagtcgttacgggatttttatttacgattttttttcgtatttcggttgggggcggagttggcgcgcggggcgtcgcgggagattttaagtggggggtttttcgcgggcgtcgcgagttggcgaggagggcggggtttttcggagaaggttttcgtaattttaggtcgggttttcgtttttttttcgggttagattttaggcgggagggt

SEQ ID NO: 2786 - DNA, 922 bp, Artificial Sequence
  chemically treated genomic DNA (Homo sapiens) CpG-island No: 2786
accctcccgcctaaaatctaacccgaaaaaaaaacgaaaacccgacctaaaattacgaaaaccttctccgaaaaaccccgccctcctcgccaactcgcgacgcccgcgaaaaaccccccacttaaaatctcccgcgacgccccgcgcgccaactccgcccccaaccgaaatacgaaaaaaaatcgtaaataaaaatcccgtaacgactaacgaataaaaatccccgcctcgaacccctcctccgaacgacccccgccccctatccccccaaatcttacaactttcgcccgaaacccacgcaccaccccaaaaaatccccgaacgaaaacgaaaataaatacgacgacgtaccataacgctactacgaaaaaacgaaaccgacgccgaaacgaacgcgctcgatccccgacgaaaaaaaaaccgcaaacgacgaaaaaaaacgacgaaaaaaaacgcgcgaaaaaaaaaacgaacgcgccaaaaaaaaaacgcgccgcgcccgcccccccgacccgcaaaaccctcccctcgacccgccctccccccgatcccgcgcaccgcccgcgcctcaaactactccgcgccgcgaccccgactacgacgactccgactacgactccatccccgacccgacccgcgcaaaaaaaaacccgaaaaacgacgaaaacgataacgacgacgactacaaatcgcgaaaccccgactaaactcgctacgaaacgaacgaatccaccttcgccgcgacgcgcgcgcacacacacgcgcacacacacactcacgcgcaaacgactcgaaaacaccgacgaaccgaacctcctcgactcaaccacgaacacacacacaccgcacacgaacacgcgcaaaaatccccacgcgcgacgcctacaacgtataacgaacacacgacccgtaaatatccgcc

SEQ ID NO: 2787 - DNA, 922 bp, Artificial Sequence
  chemically treated genomic DNA (Homo sapiens) CpG-island No: 2787
gttttttcgtttggggtttggttcggggagggggcgggggttcggtttggggttgcgggggtttttttcggggagtttcgtttttttcgttaattcgcggcgttcgcgaggggttttttatttggggtttttcgcggcgtttcgcgcgttagtttcgtttttagtcggggtgcggggggggatcgtgggtaggggtttcgtggcgattggcgagtgggggttttcgtttcgagtttttttttcgggcggttttcgttttttgtttttttagattttgtaattttcgttcggagtttacgtattattttaaaaagttttcgggcgaaaacgaaagtgggtgcggcgacgtattatggcgttgttgcgaggaggcgaggtcggcgtcggagcgagcgcgttcggttttcggcgaggggggggtcgtaggcggcgggaggaggcggcgagggagggcgcgcgggggagggagcgagcgcgttagggagggggcgcgtcgcgttcgttttttcggttcgtaggatttttttttcggttcgtttttttttcggtttcgcgtatcgttcgcgttttaggttgtttcgcgtcgcggtttcggttgcggcggtttcggttgcggttttattttcggttcggttcgcgtaaggggaggttcggggagcggcggaggcggtggcggcggcggttgtaggtcgcggggtttcggttgggttcgttgcggagcgagcggatttattttcgtcgcggcgcgcgcgtatatatacgcgtatatatatatttacgcgtaggcgattcggggatatcggcgggtcgggttttttcgatttagttacggatatatatatatcgtatacggatacgcgtagagatttttacgcgcggcgtttatagcgtgtgacggatatacggttcgtgggtgttcgtt

SEQ ID NO: 2788 - DNA, 922 bp, Artificial Sequence
  chemically treated genomic DNA (Homo sapiens) CpG-island No: 2788
aacgaacacccacgaaccgtatatccgtcacacgctataaacgccgcgcgtaaaaatctctacgcgtatccgtatacgatatatatatatccgtaactaaatcgaaaaaacccgacccgccgatatccccgaatcgcctacgcgtaaatatatatatacgcgtatatatacgcgcgcgccgcgacgaaaataaatccgctcgctccgcaacgaacccaaccgaaaccccgcgacctacaaccgccgccgccaccgcctccgccgctccccgaacctccccttacgcgaaccgaaccgaaaataaaaccgcaaccgaaaccgccgcaaccgaaaccgcgacgcgaaacaacctaaaacgcgaacgatacgcgaaaccgaaaaaaaaacgaaccgaaaaaaaaatcctacgaaccgaaaaaacgaacgcgacgcgccccctccctaacgcgctcgctccctcccccgcgcgccctccctcgccgcctcctcccgccgcctacgacccccccctcgccgaaaaccgaacgcgctcgctccgacgccgacctcgcctcctcgcaacaacgccataatacgtcgccgcacccactttcgttttcgcccgaaaactttttaaaataatacgtaaactccgaacgaaaattacaaaatctaaaaaaacaaaaaacgaaaaccgcccgaaaaaaaaactcgaaacgaaaacccccactcgccaatcgccacgaaacccctacccacgatccccccccgcaccccgactaaaaacgaaactaacgcgcgaaacgccgcgaaaaaccccaaataaaaaacccctcgcgaacgccgcgaattaacgaaaaaaacgaaactccccgaaaaaaacccccgcaaccccaaaccgaacccccgccccctccccgaaccaaaccccaaacgaaaaaac

SEQ ID NO: 2789 - DNA, 901 bp, Artificial Sequence
  chemically treated genomic DNA (Homo sapiens) CpG-island No: 2789
cgattttcgagcgcgtagttcgtgggggagttcgggttagggagggggcgtacggcgggacggcgcgtggggcgggggtcgcggcggttttcgcggggtgtttcggttcgggcgagcgcggcgcgttagttagcggaaaatggtcgttgcggagaggggcggagagcgcgtcgcggtcgtcgtcgggcgttttgaatttggagtcgggcgggcggtcgcgttcggcgtcgcgtaggagtagtcgtttcgtttgttttcgtatcgttttcgtttcgtttttcggtagattttcggtttcgttgtcgcgcgcgcggggtttttagttgggagggattttcgggtttcggttcggcgcgttttaggttttggagcggcggtggttgtatttggggtttcggtgttcggtcgattggcgtcggtgtcgtgcgtatttcgaggggtgcgtgggagtttttgcgtttcgtaacgggtcggtattggtatttgggggagcgtttggggtgtgcgcggcggggtggtagtgtatttgttttggggtcgcgggtttcggcgcgtcggtttcgtcgttttttgtgttcgcgtgtgtttgtatatttacgtgttggcgcgtgttgtgttgtgagcgtcgttcgtattgtgcggttgcgggatatttgtgtttttggataattgggcgattgtgcgcgcgtttttgcgggacggtgttgtgaaattatggttgggttgcgtgttcgcggagtcgcgtgtttttgggtgatcgtggggtgttttcgtgtgggtgtgtggcggttggggggggtcgttagggagtggagaattgtcgagtggtcgcgttttaggggatagttgggtgtcgtttgttgtgtgcgagtgattggcgttgagtttttttttagggaag

SEQ ID NO: 2790 - DNA, 901 bp, Artificial Sequence
  chemically treated genomic DNA (Homo sapiens) CpG-island No: 2790
cttccctaaaaaaaaactcaacgccaatcactcgcacacaacaaacgacacccaactatcccctaaaacgcgaccactcgacaattctccactccctaacgaccccccccaaccgccacacacccacacgaaaacaccccacgatcacccaaaaacacgcgactccgcgaacacgcaacccaaccataatttcacaacaccgtcccgcaaaaacgcgcgcacaatcgcccaattatccaaaaacacaaatatcccgcaaccgcacaatacgaacgacgctcacaacacaacacgcgccaacacgtaaatatacaaacacacgcgaacacaaaaaacgacgaaaccgacgcgccgaaacccgcgaccccaaaacaaatacactaccaccccgccgcgcacaccccaaacgctcccccaaataccaataccgacccgttacgaaacgcaaaaactcccacgcacccctcgaaatacgcacgacaccgacgccaatcgaccgaacaccgaaaccccaaatacaaccaccgccgctccaaaacctaaaacgcgccgaaccgaaacccgaaaatccctcccaactaaaaaccccgcgcgcgcgacaacgaaaccgaaaatctaccgaaaaacgaaacgaaaacgatacgaaaacaaacgaaacgactactcctacgcgacgccgaacgcgaccgcccgcccgactccaaattcaaaacgcccgacgacgaccgcgacgcgctctccgcccctctccgcaacgaccattttccgctaactaacgcgccgcgctcgcccgaaccgaaacaccccgcgaaaaccgccgcgacccccgccccacgcgccgtcccgccgtacgccccctccctaacccgaactcccccacgaactacgcgctcgaaaatcg

SEQ ID NO: 2791 - DNA, 901 bp, Artificial Sequence
  chemically treated genomic DNA (Homo sapiens) CpG-island No: 2791
tttttttagggggaggtttagcgttagttattcgtatatagtaagcggtatttaattgttttttggaacgcggttattcgatagttttttattttttggcgattttttttaatcgttatatatttatacggggatattttacggttatttagggatacgcggtttcgcggatacgtagtttagttatagttttataatatcgtttcgtagggacgcgcgtatagtcgtttagttatttaaagatataagtgtttcgtagtcgtataatgcgggcggcgtttataatataatacgcgttagtacgtggatgtgtagatatacgcggatatagaaagcggcggagtcgacgcgtcgggattcgcggttttaaggtaggtatattattatttcgtcgcgtatattttagacgtttttttagatgttaatgtcggttcgttacggagcgtaggggtttttacgtatttttcgaggtgcgtacgatatcgacgttagtcgatcggatatcggaattttaagtgtagttatcgtcgttttagggtttggggcgcgtcgggtcgagattcgggggttttttttagttggggatttcgcgcgcgcggtagcggggtcgggggtttgtcgaggggcggggcgggggcggtgcgagggtaggcggggcggttgtttttgcgcggcgtcgagcgcggtcgttcgttcggttttaagtttaaggcgttcggcggcggtcgcggcgcgtttttcgttttttttcgtagcggttatttttcgttagttggcgcgtcgcgttcgttcgggtcggggtatttcgcgggggtcgtcgcgattttcgttttacgcgtcgtttcgtcgtgcgttttttttttggttcgggtttttttacggattgcgcgttcgggggtcg

SEQ ID NO: 2792 - DNA, 901 bp, Artificial Sequence
  chemically treated genomic DNA (Homo sapiens) CpG-island No: 2792
cgacccccgaacgcgcaatccgtaaaaaaacccgaaccaaaaaaaaaacgcacgacgaaacgacgcgtaaaacgaaaatcgcgacgacccccgcgaaataccccgacccgaacgaacgcgacgcgccaactaacgaaaaataaccgctacgaaaaaaaacgaaaaacgcgccgcgaccgccgccgaacgccttaaacttaaaaccgaacgaacgaccgcgctcgacgccgcgcaaaaacaaccgccccgcctaccctcgcaccgcccccgccccgcccctcgacaaacccccgaccccgctaccgcgcgcgcgaaatccccaactaaaaaaaacccccgaatctcgacccgacgcgccccaaaccctaaaacgacgataactacacttaaaattccgatatccgatcgactaacgtcgatatcgtacgcacctcgaaaaatacgtaaaaacccctacgctccgtaacgaaccgacattaacatctaaaaaaacgtctaaaatatacgcgacgaaataataatatacctaccttaaaaccgcgaatcccgacgcgtcgactccgccgctttctatatccgcgtatatctacacatccacgtactaacgcgtattatattataaacgccgcccgcattatacgactacgaaacacttatatctttaaataactaaacgactatacgcgcgtccctacgaaacgatattataaaactataactaaactacgtatccgcgaaaccgcgtatccctaaataaccgtaaaatatccccgtataaatatataacgattaaaaaaaatcgccaaaaaataaaaaactatcgaataaccgcgttccaaaaaacaattaaataccgcttactatatacgaataactaacgctaaacctccccctaaaaaaa

SEQ ID NO: 2793 - DNA, 640 bp, Artificial Sequence
  chemically treated genomic DNA (Homo sapiens) CpG-island No: 2793
ttcgttttttcggtttgtaggatgagttttattcgtttatcgaggttttgttgttttacgttcgcgttttcgtttatatttggtttaatttgtaggcgcggaagcgtaagtattttaagaagtacgagaagcggatgtcgaaggacgaggagcgtgcggttaaggacgagttgttgggcgagaagttcgaggttaagtagaagtgggcgtcgcggttgttggttaagttgcgtaaggatattcggttcgagtgtcgcgaggatttcgtgttgagtattatcggtaagaaggcgtcgggttgcgtgttttttaatttcgattagaagggtaagatgcggcgtatcgattgttttcggtaggcggataaggtgtggcggttggatttggttatggttattttgtttaagggtatttcgttggagagtatcgacggcgagcgtttggttaaggttgcgtagtgcggttattcggttttgtgcgtgtagtcgtattatattggcgtggtcgttaaggagttggatttttatttggtttatttcgtgcgtgagcgaggtgaggtgtggtggtttgagcggagcggttagcggggagggtgtttgatggtggtgatacggggttaggagggtttgagggaggaggt

SEQ ID NO: 2794 - DNA, 640 bp, Artificial Sequence
  chemically treated genomic DNA (Homo sapiens) CpG-island No: 2794
acctcctccctcaaaccctcctaaccccgtatcaccaccatcaaacaccctccccgctaaccgctccgctcaaaccaccacacctcacctcgctcacgcacgaaataaaccaaataaaaatccaactccttaacgaccacgccaatataatacgactacacgcacaaaaccgaataaccgcactacgcaaccttaaccaaacgctcgccgtcgatactctccaacgaaatacccttaaacaaaataaccataaccaaatccaaccgccacaccttatccgcctaccgaaaacaatcgatacgccgcatcttacccttctaatcgaaattaaaaaacacgcaacccgacgccttcttaccgataatactcaacacgaaatcctcgcgacactcgaaccgaatatccttacgcaacttaaccaacaaccgcgacgcccacttctacttaacctcgaacttctcgcccaacaactcgtccttaaccgcacgctcctcgtccttcgacatccgcttctcgtacttcttaaaatacttacgcttccgcgcctacaaattaaaccaaatataaacgaaaacgcgaacgtaaaacaacaaaacctcgataaacgaataaaactcatcctacaaaccgaaaaaacgaa

SEQ ID NO: 2795 - DNA, 640 bp, Artificial Sequence
  chemically treated genomic DNA (Homo sapiens) CpG-island No: 2795
gtttttttttttaggtttttttggtttcgtgttattattattagatatttttttcgttggtcgtttcgtttaggttattatattttatttcgtttacgtacgaagtaggttaggtagaggtttagttttttgacggttacgttaatgtggtgcggttgtacgtataggatcgggtgatcgtattgcgtagttttgattaggcgttcgtcgtcggtgttttttagcgggatgtttttgaataggatgattatgattaggtttagtcgttatattttgttcgtttgtcggagatagtcgatgcgtcgtattttgtttttttggtcggggttggagagtacgtagttcggcgtttttttgtcggtgatgtttagtacgaagttttcgcggtattcgggtcggatgtttttgcgtagtttggttagtagtcgcgacgtttatttttgtttgatttcgggtttttcgtttagtagttcgtttttgatcgtacgtttttcgtttttcgatattcgtttttcgtgttttttgaagtatttgcgttttcgcgtttgtaggttgaattaggtgtaggcgaaggcgcggacgtgaggtagtagggtttcgatgaacgggtggaatttattttgtaggtcggagaggcgag

SEQ ID NO: 2796 - DNA, 640 bp, Artificial Sequence
  chemically treated genomic DNA (Homo sapiens) CpG-island No: 2796
ctcgcctctccgacctacaaaataaattccacccgttcatcgaaaccctactacctcacgtccgcgccttcgcctacacctaattcaacctacaaacgcgaaaacgcaaatacttcaaaaaacacgaaaaacgaatatcgaaaaacgaaaaacgtacgatcaaaaacgaactactaaacgaaaaacccgaaatcaaacaaaaataaacgtcgcgactactaaccaaactacgcaaaaacatccgacccgaataccgcgaaaacttcgtactaaacatcaccgacaaaaaaacgccgaactacgtactctccaaccccgaccaaaaaaacaaaatacgacgcatcgactatctccgacaaacgaacaaaatataacgactaaacctaatcataatcatcctattcaaaaacatcccgctaaaaaacaccgacgacgaacgcctaatcaaaactacgcaatacgatcacccgatcctatacgtacaaccgcaccacattaacgtaaccgtcaaaaaactaaacctctacctaacctacttcgtacgtaaacgaaataaaatataataacctaaacgaaacgaccaacgaaaaaaatatctaataataataacacgaaaccaaaaaaacctaaaaaaaaaaac

SEQ ID NO: 2797 - DNA, 533 bp, Artificial Sequence
  chemically treated genomic DNA (Homo sapiens) CpG-island No: 2797
tacgatttatatatcgtttcgatttagagttttaagaaagttaggagcggttcgttacgttcgggttcgttcgttttggtggggtttatattgttcgttcgtttatttgtattggaaggttatgttggtgattttgattttgattttttcgtttagtttgcgttcgtcggttatttcgaagagtttgttggttattttttcgtatattttggcgttgcgtttggtttgtttgagttcgtcgaagaattttttttagattagtatgaggtcgcgtatttcggcgttcgtttagttgcgggttcgtcggtgttttttcgtttggggagatacgaggtagtcgggtttttcggtcgtcgttatgtcggaggcgtttgtggggtgagagagcgcgtttagcgagggtttcggttcggttttacgtattatgggcgggaggcgtcgtttacgttcgttcgaaggtagttttacgtttaaaatggggtttatatttgataggtaggaatttagttaaaagtttttaaacgggaaacgtt

SEQ ID NO: 2798 - DNA, 533 bp, Artificial Sequence
  chemically treated genomic DNA (Homo sapiens) CpG-island No: 2798
aacgtttcccgtttaaaaacttttaactaaattcctacctatcaaatataaaccccattttaaacgtaaaactaccttcgaacgaacgtaaacgacgcctcccgcccataatacgtaaaaccgaaccgaaaccctcgctaaacgcgctctctcaccccacaaacgcctccgacataacgacgaccgaaaaacccgactacctcgtatctccccaaacgaaaaaacaccgacgaacccgcaactaaacgaacgccgaaatacgcgacctcatactaatctaaaaaaaattcttcgacgaactcaaacaaaccaaacgcaacgccaaaatatacgaaaaaataaccaacaaactcttcgaaataaccgacgaacgcaaactaaacgaaaaaatcaaaatcaaaatcaccaacataaccttccaatacaaataaacgaacgaacaatataaaccccaccaaaacgaacgaacccgaacgtaacgaaccgctcctaactttcttaaaactctaaatcgaaacgatatataaatcgta

SEQ ID NO: 2799 - DNA, 533 bp, Artificial Sequence
  chemically treated genomic DNA (Homo sapiens) CpG-island No: 2799
gacgtttttcgtttaaaagtttttaattaaatttttgtttgttagatgtaggttttattttgagcgtggagttgttttcgagcgagcgtgagcggcgtttttcgtttatggtgcgtggggtcgggtcggggttttcgttgagcgcgtttttttattttataggcgttttcggtatggcggcggtcgaggggttcggttatttcgtgtttttttaggcggagaagtatcggcgggttcgtaattggacggacgtcgagatgcgcggttttatgttggtttgggaggagtttttcgacgagtttaagtagattaagcgtaacgttaaggtgtacgagaagatggttagtaagtttttcgagatgatcggcgagcgtaggttgggcgaggagattaagattaagattattaatatgattttttagtataggtgggcgagcgggtagtgtgggttttattaggacgggcgggttcgggcgtggcgggtcgtttttgatttttttggagttttgagtcgggacgatgtgtgggtcgtg

SEQ ID NO: 2800 - DNA, 533 bp, Artificial Sequence
  chemically treated genomic DNA (Homo sapiens) CpG-island No: 2800
cacgacccacacatcgtcccgactcaaaactccaaaaaaatcaaaaacgacccgccacgcccgaacccgcccgtcctaataaaacccacactacccgctcgcccacctatactaaaaaatcatattaataatcttaatcttaatctcctcgcccaacctacgctcgccgatcatctcgaaaaacttactaaccatcttctcgtacaccttaacgttacgcttaatctacttaaactcgtcgaaaaactcctcccaaaccaacataaaaccgcgcatctcgacgtccgtccaattacgaacccgccgatacttctccgcctaaaaaaacacgaaataaccgaacccctcgaccgccgccataccgaaaacgcctataaaataaaaaaacgcgctcaacgaaaaccccgacccgaccccacgcaccataaacgaaaaacgccgctcacgctcgctcgaaaacaactccacgctcaaaataaaacctacatctaacaaacaaaaatttaattaaaaacttttaaacgaaaaacgtc

SEQ ID NO: 2801 - DNA, 655 bp, Artificial Sequence
  chemically treated genomic DNA (Homo sapiens) CpG-island No: 2801
ggtaaagcggcgataatatcggcgttagttcgcgtttcgatttcggtcgtcgagttttttttttgtagtatttcggtattttagcgttcggtttaattcggttcgttatattcgcgttcgcgcgtttagttcgagtttcggaacgatttcgagttttacgtcggcgttcggtggcgggagggggcgtcgagttcgcggtttatttgcgtgttggattttcgggttgttcggaggggtgcggggcgtaggcgagtgcggttcgtagattttaattttgttgttttcgggacggcgtagtcgttattttttcgcggagcgggcggtgcggttcgggttgtgcggttcgggttgtgatttagcggttcgcgcggtggcgcgtagggttttgtagttagtcgtttcgttcgcgttttcggtttcgcgcgtttttggttttaggcgtcgtttttttattttgcgcgttttcggttgcggggtagcgggtagttttgcgttgtcggtcgtttagtttgtatttttcgttttgggagggaagtttcgttttagtcgcgtcgttttcgcgtcgaagtgcgattcggggtttcgcgttggagttttttgtttttaggttggtttggaaggtggtggtggggtttagggttttcggaaagttggg

SEQ ID NO: 2802 - DNA, 655 bp, Artificial Sequence
  chemically treated genomic DNA (Homo sapiens) CpG-island No: 2802
cccaactttccgaaaaccctaaaccccaccaccaccttccaaaccaacctaaaaacaaaaaactccaacgcgaaaccccgaatcgcacttcgacgcgaaaacgacgcgactaaaacgaaacttccctcccaaaacgaaaaatacaaactaaacgaccgacaacgcaaaactacccgctaccccgcaaccgaaaacgcgcaaaataaaaaaacgacgcctaaaaccaaaaacgcgcgaaaccgaaaacgcgaacgaaacgactaactacaaaaccctacgcgccaccgcgcgaaccgctaaatcacaacccgaaccgcacaacccgaaccgcaccgcccgctccgcgaaaaaataacgactacgccgtcccgaaaacaacaaaattaaaatctacgaaccgcactcgcctacgccccgcacccctccgaacaacccgaaaatccaacacgcaaataaaccgcgaactcgacgccccctcccgccaccgaacgccgacgtaaaactcgaaatcgttccgaaactcgaactaaacgcgcgaacgcgaatataacgaaccgaattaaaccgaacgctaaaataccgaaatactacaaaaaaaaaactcgacgaccgaaatcgaaacgcgaactaacgccgatattatcgccgctttacc

SEQ ID NO: 2803 - DNA, 655 bp, Artificial Sequence
  chemically treated genomic DNA (Homo sapiens) CpG-island No: 2803
tttagtttttcggggattttgaattttattattattttttagattagtttgagagtaggggattttagcgcggggtttcggatcgtatttcggcgcggaaacgacgcggttggagcgaggttttttttttagggcggggggtgtaggttaggcggtcggtagcgtagggttgttcgttatttcgtagtcgagggcgcgtagagtggggagacggcgtttggggttaggggcgcgcggagtcgggggcgcgggcggggcggttggttgtagggttttgcgcgttatcgcgcgagtcgttgggttatagttcgggtcgtatagttcgggtcgtatcgttcgtttcgcgaggaagtgacgattgcgtcgtttcgagagtaataaagttagagtttgcgggtcgtattcgtttgcgtttcgtattttttcgagtagttcggggatttagtacgtaggtaagtcgcgggttcggcgttttttttcgttatcgggcgtcggcgtggggttcggaatcgtttcggggttcgggttgggcgcgcgggcgcggatgtggcgggtcgggttgggtcgggcgttggggtgtcggggtgttgtagggagggagttcggcggtcggggtcggggcgcgggttggcgtcggtgttgtcgtcgttttgtt

SEQ ID NO: 2804 - DNA, 655 bp, Artificial Sequence
  chemically treated genomic DNA (Homo sapiens) CpG-island No: 2804
aacaaaacgacgacaacaccgacgccaacccgcgccccgaccccgaccgccgaactccctccctacaacaccccgacaccccaacgcccgacccaacccgacccgccacatccgcgcccgcgcgcccaacccgaaccccgaaacgattccgaaccccacgccgacgcccgataacgaaaaaaaacgccgaacccgcgacttacctacgtactaaatccccgaactactcgaaaaaatacgaaacgcaaacgaatacgacccgcaaactctaactttattactctcgaaacgacgcaatcgtcacttcctcgcgaaacgaacgatacgacccgaactatacgacccgaactataacccaacgactcgcgcgataacgcgcaaaaccctacaaccaaccgccccgcccgcgcccccgactccgcgcgcccctaaccccaaacgccgtctccccactctacgcgccctcgactacgaaataacgaacaaccctacgctaccgaccgcctaacctacaccccccgccctaaaaaaaaaacctcgctccaaccgcgtcgtttccgcgccgaaatacgatccgaaaccccgcgctaaaatcccctactctcaaactaatctaaaaaataataataaaattcaaaatccccgaaaaactaaa

SEQ ID NO: 2805 - DNA, 907 bp, Artificial Sequence
  chemically treated genomic DNA (Homo sapiens) CpG-island No: 2805
attcgtcgggtcgcggtagttattttgtttcgttcgaggagattttaagatggcggcgagggggacggtgaaggttgtttttcgttcgttcgggttttgatttttcgttttttcgtttttcggcggtcggtttatggtttggcggaggttcgaattatggattttcgtatcgtcgtgtataacgtcgttcgtgatggtaagttgtagttgttttagaagttgtttagcggtcggagtcgggaggaattggacgagttgacgggcgaggtggtcggcgggggaacgtcgttatttatcgtcgttcgttacggttatttggacgtggtggagtatttggtggatcggtgcggcgcgagcgtggaggtcggtggttcggtgtatttcgatggcgagattatcgagggcgcgtcgtcgttgtgggtcgttttcgtagtcggttatttggacgtggtgcggagtttgttgcgtcgcggggtttcggtgaatcgtattacgcgtattaattttacgttttttcgcgtcgtttgtttcgacggttatttggaggtggtgcgttatttggtcggcgagtattaggtcgatttggaggtggttaatcggtacggttatacgtgttttatgatttcgtgttataagggttatcgtgagatcgttcgttatttgttggagtagggcgtttaggtgaatcggcgtagcgttaagggtaatacggttttgtatgattgcgtcgagttcggtagtttggagattttgtagttgttgttggggtgtaaggttcgtatggaacgtgacggttacggtatgatttcgttgttcgcggttagcgtgacgggttatattaatatcgtggagtattttatttaggagtagttcggttaggagtaggtcgtagggggagaggtttagt

SEQ ID NO: 2806 - DNA, 907 bp, Artificial Sequence
  chemically treated genomic DNA (Homo sapiens) CpG-island No: 2806
actaaacctctccccctacgacctactcctaaccgaactactcctaaataaaatactccacgatattaatataacccgtcacgctaaccgcgaacaacgaaatcataccgtaaccgtcacgttccatacgaaccttacaccccaacaacaactacaaaatctccaaactaccgaactcgacgcaatcatacaaaaccgtattacccttaacgctacgccgattcacctaaacgccctactccaacaaataacgaacgatctcacgataacccttataacacgaaatcataaaacacgtataaccgtaccgattaaccacctccaaatcgacctaatactcgccgaccaaataacgcaccacctccaaataaccgtcgaaacaaacgacgcgaaaaaacgtaaaattaatacgcgtaatacgattcaccgaaaccccgcgacgcaacaaactccgcaccacgtccaaataaccgactacgaaaacgacccacaacgacgacgcgccctcgataatctcgccatcgaaatacaccgaaccaccgacctccacgctcgcgccgcaccgatccaccaaatactccaccacgtccaaataaccgtaacgaacgacgataaataacgacgttcccccgccgaccacctcgcccgtcaactcgtccaattcctcccgactccgaccgctaaacaacttctaaaacaactacaacttaccatcacgaacgacgttatacacgacgatacgaaaatccataattcgaacctccgccaaaccataaaccgaccgccgaaaaacgaaaaaacgaaaaatcaaaacccgaacgaacgaaaaacaaccttcaccgtccccctcgccgccatcttaaaatctcctcgaacgaaacaaaataactaccgcgacccgacgaat

SEQ ID NO: 2807 - DNA, 907 bp, Artificial Sequence
  chemically treated genomic DNA (Homo sapiens) CpG-island No: 2807
gttgagtttttttttttgcgatttgtttttggtcgggttgtttttggatgaggtattttacgatgttggtgtggttcgttacgttggtcgcgagtagcggggttatgtcgtagtcgttacgttttatgcgggttttgtattttagtagtagttgtaggatttttaggttgtcggattcggcgtagttatgtagggtcgtgttgtttttggcgttgcgtcggtttatttgggcgttttgttttagtaggtagcgggcgattttacggtggtttttgtagtacgagattatgaggtacgtgtggtcgtgtcggttggttatttttaggtcggtttggtgttcgtcgattaggtagcgtattatttttaggtggtcgtcgaagtaggcggcgcggagaggcgtggagttggtgcgcgtggtgcggtttatcgaggtttcgcggcgtagtaggtttcgtattacgtttaggtggtcggttgcggaggcggtttatagcggcggcgcgttttcgatggtttcgttatcgaagtgtatcgagttatcggtttttacgttcgcgtcgtatcggtttattaggtattttattacgtttaggtggtcgtagcgggcggcgatgagtagcggcgttttttcgtcggttatttcgttcgttagttcgtttagtttttttcggtttcggtcgttgagtagtttttggagtagttgtagtttgttattacgggcggcgttgtatacggcggtgcggaggtttatggttcgggttttcgttaggttatgggtcggtcgtcgggggacggggagacggaggattagagttcggacgggcgggaggtaatttttatcgtttttttcgtcgttattttagggttttttcgggcggaataaaatggttgtcgcgattcgacggat

SEQ ID NO: 2808 - DNA, 907 bp, Artificial Sequence
  chemically treated genomic DNA (Homo sapiens) CpG-island No: 2808
atccgtcgaatcgcgacaaccattttattccgcccgaaaaaaccctaaaataacgacgaaaaaaacgataaaaattacctcccgcccgtccgaactctaatcctccgtctccccgtcccccgacgaccgacccataacctaacgaaaacccgaaccataaacctccgcaccgccgtatacaacgccgcccgtaataacaaactacaactactccaaaaactactcaacgaccgaaaccgaaaaaaactaaacgaactaacgaacgaaataaccgacgaaaaaacgccgctactcatcgccgcccgctacgaccacctaaacgtaataaaatacctaataaaccgatacgacgcgaacgtaaaaaccgataactcgatacacttcgataacgaaaccatcgaaaacgcgccgccgctataaaccgcctccgcaaccgaccacctaaacgtaatacgaaacctactacgccgcgaaacctcgataaaccgcaccacgcgcaccaactccacgcctctccgcgccgcctacttcgacgaccacctaaaaataatacgctacctaatcgacgaacaccaaaccgacctaaaaataaccaaccgacacgaccacacgtacctcataatctcgtactacaaaaaccaccgtaaaatcgcccgctacctactaaaacaaaacgcccaaataaaccgacgcaacgccaaaaacaacacgaccctacataactacgccgaatccgacaacctaaaaatcctacaactactactaaaatacaaaacccgcataaaacgtaacgactacgacataaccccgctactcgcgaccaacgtaacgaaccacaccaacatcgtaaaatacctcatccaaaaacaacccgaccaaaaacaaatcgcaaaaaaaaaaactcaac

SEQ ID NO: 2809 - DNA, 714 bp, Artificial Sequence
  chemically treated genomic DNA (Homo sapiens) CpG-island No: 2809
cgattagcggatcgatttttatagcgttttaaggcggagcgttcggtttttttaggatgttttagggcggtataaacgcgtagggggagaaaaagaagttttcgggttattacggttttagatcgtcggtttttcggtgacgggagtcgtcgtttttattatgtagcggggtcgtagcgttcgtttttcggtatgtttcgcgtatttttgttcgggatatttatcggcgtcggcggttttcgtttcggttttgcggcggcggttgtacgtttagtttttgcgtttgcgtcgtaagtagggtaggatagcgcgtagggggcgtgaagagtttagggcgtttgcgcggcgagacggattagttttgtagcgttgtgggaagaggggttatgcgcgtcgggtcgtcgacgagattcgcgcggggggcgtcgtgttttgtttttcgttgtttgggtttatttggtatagttcgcggtttaaaggaataagaagttgaagggttcgcgcgtgcgtgtgcggggtaggaacgcgttttataaaattgggatgcgttgggggtggagggcgttagttcggattggattttgggttcgaggtttgtttatttgtataattttagcgcgggataatgaaaggtttttcgtattggaaggagtgatttgtatatttttcggaggggttttattttagagcgtagtgattagtatatggcggggg

SEQ ID NO: 2810 - DNA, 714 bp, Artificial Sequence
  chemically treated genomic DNA (Homo sapiens) CpG-island No: 2810
cccccgccatatactaatcactacgctctaaaataaaacccctccgaaaaatatacaaatcactccttccaatacgaaaaacctttcattatcccgcgctaaaattatacaaataaacaaacctcgaacccaaaatccaatccgaactaacgccctccacccccaacgcatcccaattttataaaacgcgttcctaccccgcacacgcacgcgcgaacccttcaacttcttattcctttaaaccgcgaactataccaaataaacccaaacaacgaaaaacaaaacacgacgccccccgcgcgaatctcgtcgacgacccgacgcgcataacccctcttcccacaacgctacaaaactaatccgtctcgccgcgcaaacgccctaaactcttcacgccccctacgcgctatcctaccctacttacgacgcaaacgcaaaaactaaacgtacaaccgccgccgcaaaaccgaaacgaaaaccgccgacgccgataaatatcccgaacaaaaatacgcgaaacataccgaaaaacgaacgctacgaccccgctacataataaaaacgacgactcccgtcaccgaaaaaccgacgatctaaaaccgtaataacccgaaaacttctttttctccccctacgcgtttataccgccctaaaacatcctaaaaaaaccgaacgctccgccttaaaacgctataaaaatcgatccgctaatcg

SEQ ID NO: 2811 - DNA, 714 bp, Artificial Sequence
  chemically treated genomic DNA (Homo sapiens) CpG-island No: 2811
ttttcgttatatgttaattattgcgttttggagtaaggttttttcggggaatatgtaaattattttttttagtgcgggaggttttttattgtttcgcgttaggattatgtaaataagtaggtttcgggtttaggatttagttcgaattagcgttttttatttttagcgtattttagttttgtaaggcgcgtttttgtttcgtatacgtacgcgcgaattttttagttttttgtttttttgggtcgcgggttgtattaagtaaatttaggtagcgaggggtaaagtacggcgtttttcgcgcgggtttcgtcgacggttcgacgcgtatagtttttttttttatagcgttataggattagttcgtttcgtcgcgtaagcgttttaggttttttacgttttttgcgcgttgttttattttatttgcgacgtaggcgtagaggttgggcgtgtagtcgtcgtcgtagagtcggagcgggggtcgtcggcgtcggtgagtgtttcgggtaggggtgcgcgaggtatgtcgggaagcgggcgttacggtttcgttgtatgatgggagcgacgattttcgttatcggggagtcggcggtttggggtcgtggtgattcgagggtttttttttttttttttacgcgtttgtgtcgttttggggtattttgggagaatcgagcgtttcgttttgaagcgttgtgggagtcggttcgttagtcg

SEQ ID NO: 2812 - DNA, 714 bp, Artificial Sequence
  chemically treated genomic DNA (Homo sapiens) CpG-island No: 2812
cgactaacgaaccgactcccacaacgcttcaaaacgaaacgctcgattctcccaaaataccccaaaacgacacaaacgcgtaaaaaaaaaaaaaaaaaccctcgaatcaccacgaccccaaaccgccgactccccgataacgaaaatcgtcgctcccatcatacaacgaaaccgtaacgcccgcttcccgacatacctcgcgcacccctacccgaaacactcaccgacgccgacgacccccgctccgactctacgacgacgactacacgcccaacctctacgcctacgtcgcaaataaaataaaacaacgcgcaaaaaacgtaaaaaacctaaaacgcttacgcgacgaaacgaactaatcctataacgctataaaaaaaaaaactatacgcgtcgaaccgtcgacgaaacccgcgcgaaaaacgccgtactttacccctcgctacctaaatttacttaatacaacccgcgacccaaaaaaacaaaaaactaaaaaattcgcgcgtacgtatacgaaacaaaaacgcgccttacaaaactaaaatacgctaaaaataaaaaacgctaattcgaactaaatcctaaacccgaaacctacttatttacataatcctaacgcgaaacaataaaaaacctcccgcactaaaaaaaataatttacatattccccgaaaaaaccttactccaaaacgcaataattaacatataacgaaaa

SEQ ID NO: 2813 - DNA, 1021 bp, Artificial Sequence
  chemically treated genomic DNA (Homo sapiens) CpG-island No: 2813
agacgggcggatagagggacgtagagattggatagaaggatagcgggatcggtttggggagggcggatttgtgtgtgtaggggggtttcgggttttttgttttcgtcgggatttagtttgcgcgggtgggggggttgcggtacggcggtcgggtttcgcgttttttttttcgttcgtcgttttcggttttcggttcgcgttgcgttttgtttcggggagggggttcggttcggtttcgcgcgtattgttcggtttttgcggtttcgaggttgtcgggttgttattatagcgcgtttttcgttttagttcggtcggtcgatttcggttttcgattttatttggtttcgtcgcggtcgtttatagtagtagtagcggttattggaagcgtcgggttcggtttatggtgtcgtcgtcgtcgtcgtcgtcgttcgttttcggttcggtatttgtatcgttcgcgtcgttcgtttcgtttttcgcgtttcgttttttgttcgttcgggggcggggcgtcgaggtcggggcggggtcggggaggggagggggagacggaggagaggttcggagataatcggggggacggtacggtgggggaacggtgcggggtgcgaaagttggagaggagaggggtgaggagggcgggaaggggtgcgcgggagggcgatagcggcgtgggagtaggtgggggatttcggtgagcgcgggaaatggagggtgttgggtgagggtgttgcgtgcgggtttaggtgttgcgcgcgagggtgcggagttgttggtatgtagggtgtttgcgttgcgcggaggggagggtggtagggtgttgttggaggttgtgcgagggtgggggcgcgggcgtcgtggggtgcggtgtgtgcgaagggagagcgtggttagcgtgacgggggagcgtaagggagggagtgcgacgtgggaaaggtgagtgtgagaggcgtgttgcgggtaggtgggtgtttggagtttagcgagaggttgtgagttgagttatcgggataggggaggt

SEQ ID NO: 2814 - DNA, 1021 bp, Artificial Sequence
  chemically treated genomic DNA (Homo sapiens) CpG-island No: 2814
acctcccctatcccgataactcaactcacaacctctcgctaaactccaaacacccacctacccgcaacacgcctctcacactcacctttcccacgtcgcactccctcccttacgctcccccgtcacgctaaccacgctctcccttcgcacacaccgcaccccacgacgcccgcgcccccaccctcgcacaacctccaacaacaccctaccaccctcccctccgcgcaacgcaaacaccctacataccaacaactccgcaccctcgcgcgcaacacctaaacccgcacgcaacaccctcacccaacaccctccatttcccgcgctcaccgaaatcccccacctactcccacgccgctatcgccctcccgcgcaccccttcccgccctcctcacccctctcctctccaactttcgcaccccgcaccgttcccccaccgtaccgtccccccgattatctccgaacctctcctccgtctccccctcccctccccgaccccgccccgacctcgacgccccgcccccgaacgaacaaaaaacgaaacgcgaaaaacgaaacgaacgacgcgaacgatacaaataccgaaccgaaaacgaacgacgacgacgacgacgacgacaccataaaccgaacccgacgcttccaataaccgctactactactataaacgaccgcgacgaaaccaaataaaatcgaaaaccgaaatcgaccgaccgaactaaaacgaaaaacgcgctataataacaacccgacaacctcgaaaccgcaaaaaccgaacaatacgcgcgaaaccgaaccgaaccccctccccgaaacaaaacgcaacgcgaaccgaaaaccgaaaacgacgaacgaaaaaaaaaacgcgaaacccgaccgccgtaccgcaacccccccacccgcgcaaactaaatcccgacgaaaacaaaaaacccgaaacccccctacacacacaaatccgccctccccaaaccgatcccgctatccttctatccaatctctacgtccctctatccgcccgtct

SEQ ID NO: 2815 - DNA, 1021 bp, Artificial Sequence
  chemically treated genomic DNA (Homo sapiens) CpG-island No: 2815
gttttttttgtttcggtggtttagtttatagtttttcgttagattttagatatttatttgttcgtagtacgttttttatatttattttttttacgtcgtatttttttttttacgttttttcgttacgttggttacgtttttttttcgtatatatcgtattttacgacgttcgcgtttttattttcgtatagtttttagtaatattttgttattttttttttcgcgtagcgtaagtattttgtatgttagtaatttcgtattttcgcgcgtagtatttgggttcgtacgtagtatttttatttaatattttttatttttcgcgtttatcgagattttttatttgtttttacgtcgttgtcgttttttcgcgtattttttttcgttttttttattttttttttttttagttttcgtatttcgtatcgtttttttatcgtgtcgttttttcgattgttttcgggtttttttttcgtttttttttttttttttcggtttcgtttcggtttcggcgtttcgttttcgggcgggtagggggcggggcgcggggggcggggcgggcggcgcgggcggtgtaggtgtcgggtcgggagcgagcggcggcggcggcggcggcggtattatgggtcgggttcggcgtttttagtggtcgttgttgttgttgtgggcggtcgcggcggggttaggtagggtcgggggtcggggtcggtcggtcgggttggggcggggggcgcgttgtggtgatagttcggtagtttcggggtcgtagaggtcgaataatgcgcgcggggtcgggtcgggtttttttttcgggataaagcgtagcgcgggtcgggagtcgggagcgacgagcgggggagggggcgcggggttcggtcgtcgtgtcgtagtttttttattcgcgtaggttggatttcggcggggataaagggttcgagatttttttatatatataagttcgttttttttaggtcggtttcgttgtttttttgtttagtttttgcgtttttttgttcgttcgttt

SEQ ID NO: 2816 - DNA, 1021 bp, Artificial Sequence
  chemically treated genomic DNA (Homo sapiens) CpG-island No: 2816
aaacgaacgaacaaaaaaacgcaaaaactaaacaaaaaaacaacgaaaccgacctaaaaaaaacgaacttatatatataaaaaaatctcgaaccctttatccccgccgaaatccaacctacgcgaataaaaaaactacgacacgacgaccgaaccccgcgccccctcccccgctcgtcgctcccgactcccgacccgcgctacgctttatcccgaaaaaaaaacccgacccgaccccgcgcgcattattcgacctctacgaccccgaaactaccgaactatcaccacaacgcgccccccgccccaacccgaccgaccgaccccgacccccgaccctacctaaccccgccgcgaccgcccacaacaacaacaacgaccactaaaaacgccgaacccgacccataataccgccgccgccgccgccgccgctcgctcccgacccgacacctacaccgcccgcgccgcccgccccgccccccgcgccccgccccctacccgcccgaaaacgaaacgccgaaaccgaaacgaaaccgaaaaaaaaaaaaaaaaacgaaaaaaaaacccgaaaacaatcgaaaaaacgacacgataaaaaaacgatacgaaatacgaaaactaaaaaaaaaaaaaataaaaaaaacgaaaaaaaatacgcgaaaaaacgacaacgacgtaaaaacaaataaaaaatctcgataaacgcgaaaaataaaaaatattaaataaaaatactacgtacgaacccaaatactacgcgcgaaaatacgaaattactaacatacaaaatacttacgctacgcgaaaaaaaaaataacaaaatattactaaaaactatacgaaaataaaaacgcgaacgtcgtaaaatacgatatatacgaaaaaaaaacgtaaccaacgtaacgaaaaaacgtaaaaaaaaaaatacgacgtaaaaaaaataaatataaaaaacgtactacgaacaaataaatatctaaaatctaacgaaaaactataaactaaaccaccgaaacaaaaaaaac

SEQ ID NO: 2817 - DNA, 565 bp, Artificial Sequence
  chemically treated genomic DNA (Homo sapiens) CpG-island No: 2817
atcgtcgtagtagtttttcggggtcgcgggttttagtttttgcgggcgaacgcggtttgggggcggcgggggcgggcgcggggcgcgcggcgaggggcggcggcggtcgggttcgcgaggggggttttcgggtcggttttatgcggggcgtttcgtcgcgtcgcgttcgcgtttttgtatcggggtgcggggtttagttcgacgcgtattcggcgtttcgcgcgttttgcgggttttttaggtcggtttcgggtgggttaggatcgcggcgttggtaggtcggggttgagttcggtttttcgcgttggagtttttgcgtcgggtgtcgtcgcggtgcgtttagcgtttgtttcgtcgagtcgtagtttttacgtatagtcgggttggggaggagcgcgaggcggcgcgcgggagtcgggagtcgtggattcgggcggggcggggtaggggcggagagggaggaggcgcggaggagcggggatagtcggtttttcgatttcgttatttgggttggaggttggatgttgtcgagttgggagcgtagttttggagtcgggagatttgg

SEQ ID NO: 2818 - DNA, 565 bp, Artificial Sequence
  chemically treated genomic DNA (Homo sapiens) CpG-island No: 2818
ccaaatctcccgactccaaaactacgctcccaactcgacaacatccaacctccaacccaaataacgaaatcgaaaaaccgactatccccgctcctccgcgcctcctccctctccgcccctaccccgccccgcccgaatccacgactcccgactcccgcgcgccgcctcgcgctcctccccaacccgactatacgtaaaaactacgactcgacgaaacaaacgctaaacgcaccgcgacgacacccgacgcaaaaactccaacgcgaaaaaccgaactcaaccccgacctaccaacgccgcgatcctaacccacccgaaaccgacctaaaaaacccgcaaaacgcgcgaaacgccgaatacgcgtcgaactaaaccccgcaccccgatacaaaaacgcgaacgcgacgcgacgaaacgccccgcataaaaccgacccgaaaacccccctcgcgaacccgaccgccgccgcccctcgccgcgcgccccgcgcccgcccccgccgcccccaaaccgcgttcgcccgcaaaaactaaaacccgcgaccccgaaaaactactacgacgat

SEQ ID NO: 2819 - DNA, 565 bp, Artificial Sequence
  chemically treated genomic DNA (Homo sapiens) CpG-island No: 2819
ttaggtttttcggttttaagattgcgtttttagttcgatagtatttagtttttagtttaggtggcggggtcggggagtcggttgttttcgttttttcgcgtttttttttttttcgtttttgtttcgtttcgttcgggtttacggttttcggttttcgcgcgtcgtttcgcgtttttttttagttcggttgtgcgtggaggttgcggttcggcggggtaggcgttgagcgtatcgcggcggtattcggcgtagaggttttagcgcggggagtcgggtttagtttcggtttgttagcgtcgcggttttagtttattcgaggtcggtttggggggttcgtagggcgcgcggagcgtcgagtgcgcgtcgggttgggtttcgtatttcggtgtaggagcgcgggcgcggcgcggcggagcgtttcgtatggagtcggttcgggagtttttttcgcgggttcggtcgtcgtcgtttttcgtcgcgcgtttcgcgttcgttttcgtcgtttttaggtcgcgttcgttcgtagaggttgaggttcgcggtttcgaggggttgttgcggcgat

SEQ ID NO: 2820 - DNA, 565 bp, Artificial Sequence
  chemically treated genomic DNA (Homo sapiens) CpG-island No: 2820
atcgccgcaacaacccctcgaaaccgcgaacctcaacctctacgaacgaacgcgacctaaaaacgacgaaaacgaacgcgaaacgcgcgacgaaaaacgacgacgaccgaacccgcgaaaaaaactcccgaaccgactccatacgaaacgctccgccgcgccgcgcccgcgctcctacaccgaaatacgaaacccaacccgacgcgcactcgacgctccgcgcgccctacgaaccccccaaaccgacctcgaataaactaaaaccgcgacgctaacaaaccgaaactaaacccgactccccgcgctaaaacctctacgccgaataccgccgcgatacgctcaacgcctaccccgccgaaccgcaacctccacgcacaaccgaactaaaaaaaaacgcgaaacgacgcgcgaaaaccgaaaaccgtaaacccgaacgaaacgaaacaaaaacgaaaaaaaaaaaaacgcgaaaaaacgaaaacaaccgactccccgaccccgccacctaaactaaaaactaaatactatcgaactaaaaacgcaatcttaaaaccgaaaaacctaa

SEQ ID NO: 2821 - DNA, 800 bp, Artificial Sequence
  chemically treated genomic DNA (Homo sapiens) CpG-island No: 2821
gaaggtgcgataatttgaaggtttcgaaagtagtttaagttcggtcggggtcgtggagaaggcggcgggcgtaggtttggagttttcgagtaagaaaaagtcgttttcgtttcgtttcgggttttcgcgcgtgtcgtcgtttagtttgggttacggggtttgtttcgagtcgtcgttatcgggttttgttttggttaagttgtttcggaatggcgaggcgttcggggttgagtttgcgtttagcgtttgggcgtttatggagttgtaggtagatgtgcgcgtgaagttcgtgggcgcggtcggtggtagtagtacgttatcgtttaggttttttacgcgtttttttaaggtgtcggtgttcgagttttttgttttttttcgttacgcggattcggcgtattagtttttgttgcgcgtattattttagggcggtacgtggggtcgtcgttcgtcgttggttgtagttcggacggagagcggttgcgacgtagagggtcgggttagtttcgcggaaggaagcgtcggtttttcgggtttttttacgtgttgtcgttgtaaggagttggggttggagaaggaggatgcggcgttgttgtttcgcgcggggttggacggcgacgagaagttgtttcgggtcgtaacgtttacgggtgagtgtttatttgcgtcggtagtcgacgtcgttaggtcgggtggacgtagtcgaaatttttatattcgtttagttttggatcgttgggtagttgatcgattaagggatttagttggttatttcgatttttaattcgatttggtttttt

SEQ ID NO: 2822 - DNA, 800 bp, Artificial Sequence
  chemically treated genomic DNA (Homo sapiens) CpG-island No: 2822
aaaaaaccaaatcgaattaaaaatcgaaataaccaactaaatcccttaatcgatcaactacccaacgatccaaaactaaacgaatataaaaatttcgactacgtccacccgacctaacgacgtcgactaccgacgcaaataaacactcacccgtaaacgttacgacccgaaacaacttctcgtcgccgtccaaccccgcgcgaaacaacaacgccgcatcctccttctccaaccccaactccttacaacgacaacacgtaaaaaaacccgaaaaaccgacgcttccttccgcgaaactaacccgaccctctacgtcgcaaccgctctccgtccgaactacaaccaacgacgaacgacgaccccacgtaccgccctaaaataatacgcgcaacaaaaactaatacgccgaatccgcgtaacgaaaaaaaacaaaaaactcgaacaccgacaccttaaaaaaacgcgtaaaaaacctaaacgataacgtactactaccaccgaccgcgcccacgaacttcacgcgcacatctacctacaactccataaacgcccaaacgctaaacgcaaactcaaccccgaacgcctcgccattccgaaacaacttaaccaaaacaaaacccgataacgacgactcgaaacaaaccccgtaacccaaactaaacgacgacacgcgcgaaaacccgaaacgaaacgaaaacgactttttcttactcgaaaactccaaacctacgcccgccgccttctccacgaccccgaccgaacttaaactactttcgaaaccttcaaattatcgcaccttc

SEQ ID NO: 2823 - DNA, 800 bp, Artificial Sequence
  chemically treated genomic DNA (Homo sapiens) CpG-island No: 2823
gagaggttagatcgggttggggatcgggatggttaattgggttttttagtcggttagttgtttagcggtttagggttgggcgggtgtgggggtttcggttacgtttattcgatttggcggcgtcggttgtcggcgtaggtgagtatttattcgtaagcgttacggttcggggtagtttttcgtcgtcgtttaatttcgcgcggggtaatagcgtcgtattttttttttttagttttagttttttgtagcggtagtacgtgggggagttcggggagtcggcgttttttttcgcggggttggttcggttttttgcgtcgtagtcgtttttcgttcgggttgtagttagcggcgagcggcggttttacgtgtcgttttgggatggtgcgcgtagtaggagttggtgcgtcgggttcgcgtggcgggagaaggtaggggattcgggtatcggtattttgaggaagcgcgtggagggtttgggcgatggcgtgttgttgttatcggtcgcgtttacgggttttacgcgtatatttatttgtagttttatgggcgtttaggcgttgggcgtaggtttagtttcgggcgtttcgttatttcggggtagtttgattaaggtagggttcggtgacggcggttcggggtagatttcgtagtttaggttgagcggcggtacgcgcggggattcggggcgaggcgaaggcggtttttttttgttcgagggttttaggtttgcgttcgtcgttttttttacggtttcggtcggatttgggttgttttcgggatttttaggttgtcgtattttt

SEQ ID NO: 2824 - DNA, 800 bp, Artificial Sequence
  chemically treated genomic DNA (Homo sapiens) CpG-island No: 2824
aaaaatacgacaacctaaaaatcccgaaaacaacccaaatccgaccgaaaccgtaaaaaaaacgacgaacgcaaacctaaaaccctcgaacaaaaaaaaaccgccttcgcctcgccccgaatccccgcgcgtaccgccgctcaacctaaactacgaaatctaccccgaaccgccgtcaccgaaccctaccttaatcaaactaccccgaaataacgaaacgcccgaaactaaacctacgcccaacgcctaaacgcccataaaactacaaataaatatacgcgtaaaacccgtaaacgcgaccgataacaacaacacgccatcgcccaaaccctccacgcgcttcctcaaaataccgatacccgaatcccctaccttctcccgccacgcgaacccgacgcaccaactcctactacgcgcaccatcccaaaacgacacgtaaaaccgccgctcgccgctaactacaacccgaacgaaaaacgactacgacgcaaaaaaccgaaccaaccccgcgaaaaaaaacgccgactccccgaactcccccacgtactaccgctacaaaaaactaaaactaaaaaaaaaaaatacgacgctattaccccgcgcgaaattaaacgacgacgaaaaactaccccgaaccgtaacgcttacgaataaatactcacctacgccgacaaccgacgccgccaaatcgaataaacgtaaccgaaacccccacacccgcccaaccctaaaccgctaaacaactaaccgactaaaaaacccaattaaccatcccgatccccaacccgatctaacctctc

SEQ ID NO: 2825 - DNA, 567 bp, Artificial Sequence
  chemically treated genomic DNA (Homo sapiens) CpG-island No: 2825
ggcgcggtagtcgagtggtttttcggcgaaggtgtttaatatttgggcgtttagttcggcgggatttataggtttgcggcggggcggggagggttcgggaggagggattgggagggttcggcggggtaggatcgttaagtggttcggttcgggcgtattgcgcgtttcgtcgcgtcgttaggtagcgcgcgagtagaagaggggcgcgagcgggtataagggaaggatttacgacgaagaggagggtatatgtttataaaattgaggtcgggtacgtagtcgaacgttgtggtagatcgttaaggtttcgggagcgggaagttttcgcgttttttttaggagttcggacgattttagttcggttttgatttcgagatatttgtttcgtcgcgttcggggtttggttttattttttacgtttttttattaattcggagaggggggagggcgaggggagacgagattttggattcgtagtttgagggcgttttcgtcggttatatttgatattagttgcggttttttttcgttttttttggggggcggagagggggacgatttgggatt

SEQ ID NO: 2826 - DNA, 567 bp, Artificial Sequence
  chemically treated genomic DNA (Homo sapiens) CpG-island No: 2826
aatcccaaatcgtccccctctccgccccccaaaaaaaacgaaaaaaaaccgcaactaatatcaaatataaccgacgaaaacgccctcaaactacgaatccaaaatctcgtctcccctcgccctcccccctctccgaattaataaaaaaacgtaaaaaataaaaccaaaccccgaacgcgacgaaacaaatatctcgaaatcaaaaccgaactaaaatcgtccgaactcctaaaaaaaacgcgaaaacttcccgctcccgaaaccttaacgatctaccacaacgttcgactacgtacccgacctcaattttataaacatataccctcctcttcgtcgtaaatccttcccttatacccgctcgcgcccctcttctactcgcgcgctacctaacgacgcgacgaaacgcgcaatacgcccgaaccgaaccacttaacgatcctaccccgccgaaccctcccaatccctcctcccgaaccctccccgccccgccgcaaacctataaatcccgccgaactaaacgcccaaatattaaacaccttcgccgaaaaaccactcgactaccgcgcc

SEQ ID NO: 2827 - DNA, 567 bp, Artificial Sequence
  chemically treated genomic DNA (Homo sapiens) CpG-island No: 2827
agttttaagtcgttttttttttcgttttttaggaggggcgagagggagtcgtagttgatgttaggtatggtcggcggaggcgtttttaggttacgggtttaaggtttcgttttttttcgttttttttttttttcgggttggtggggaagcgtggaggatggaattaaatttcgggcgcggcggaataggtgtttcggggttaaagtcgggttggggtcgttcgggtttttgaggaaggcgcgaggatttttcgttttcggagttttagcgatttgttatagcgttcggttgcgtattcggttttaattttgtggatatgtattttttttttcgtcgtgggttttttttttgtgttcgttcgcgttttttttttgttcgcgcgttgtttggcggcgcggcggggcgcgtagtgcgttcggatcggattatttagcggttttgtttcgtcgggtttttttagttttttttttcgggtttttttcgtttcgtcgtagatttgtgggtttcgtcggattgggcgtttaggtgttgggtattttcgtcggggagttattcggttgtcgcgtt

SEQ ID NO: 2828 - DNA, 567 bp, Artificial Sequence
  chemically treated genomic DNA (Homo sapiens) CpG-island No: 2828
aacgcgacaaccgaataactccccgacgaaaatacccaacacctaaacgcccaatccgacgaaacccacaaatctacgacgaaacgaaaaaaacccgaaaaaaaaaactaaaaaaacccgacgaaacaaaaccgctaaataatccgatccgaacgcactacgcgccccgccgcgccgccaaacaacgcgcgaacaaaaaaaaaacgcgaacgaacacaaaaaaaaaacccacgacgaaaaaaaaaatacatatccacaaaattaaaaccgaatacgcaaccgaacgctataacaaatcgctaaaactccgaaaacgaaaaatcctcgcgccttcctcaaaaacccgaacgaccccaacccgactttaaccccgaaacacctattccgccgcgcccgaaatttaattccatcctccacgcttccccaccaacccgaaaaaaaaaaaaaacgaaaaaaaacgaaaccttaaacccgtaacctaaaaacgcctccgccgaccatacctaacatcaactacgactccctctcgcccctcctaaaaaacgaaaaaaaaaacgacttaaaact

SEQ ID NO: 2829 - DNA, 971 bp, Artificial Sequence
  chemically treated genomic DNA (Homo sapiens) CpG-island No: 2829
gcgcgtcgttacgggattcgatttcgttttatagttgcggttatcgtcggttcggttcggaggaggcgaaagcgaggtcgcggacggtttttatttcgaatttatggatttcgttcgtttggcgggttattttttttttcgtttttttttcgaagttttttcgtgtttcgattttttcgcgaatatcggaatttagggacgtttgtttttttttttttaggtaattttttggtcgtttatcgttgtcgtagtaacgttcgttttcgcgttcgtttttcgcgggtttgtttattagttttgtttcgtttcgttttatattgcgtatgttcgttagtttcgttcggtttatattgcgtatgtttgttaattacgttttgtttatattatattgcgtatgttcgtcggttttcgtttcgcgtacggcgttagcgtttagacgtaggtgcgttttcgtcgaggttcgcgtagcgggcgtttttggggatcgtttggcgggggtgttcgggagtcgcgggttgaagtacgggggcgtgtaggcgtttaggtttcgtgtagtgagggtcgagtttcgcgtcggtttcgttgtagttcgtagttttcggcggttttgtgggcgtagttacgttttttagtcgttcgtttatttgggtttgggtttcggttgtttttttgcggtggttgtggtcgttttcgttttagggtttcgagcgtatcgttttttcgttgcgttgttagtcgagggtagttttttgggggatttttcgattttttcgcgtcgtttaggcgttttggttcgcggaagcgtaggcgtcgattgtttggcgtcgttcgtgatttttggtttttttttgtggatttttttgtttttcgttgcgggttgtgttttttgtttcgtgggtttggtcgtttgcgtttggatgtaggttcgggtgagttttgcgtggttcgttggtttttttttgttttttagg

SEQ ID NO: 2830 - DNA, 971 bp, Artificial Sequence
  chemically treated genomic DNA (Homo sapiens) CpG-island No: 2830
cctaaaaaacaaaaaaaaaccaacgaaccacgcaaaactcacccgaacctacatccaaacgcaaacgaccaaacccacgaaacaaaaaacacaacccgcaacgaaaaacaaaaaaatccacaaaaaaaaaccaaaaatcacgaacgacgccaaacaatcgacgcctacgcttccgcgaaccaaaacgcctaaacgacgcgaaaaaatcgaaaaatcccccaaaaaactaccctcgactaacaacgcaacgaaaaaacgatacgctcgaaaccctaaaacgaaaacgaccacaaccaccgcaaaaaaacaaccgaaacccaaacccaaataaacgaacgactaaaaaacgtaactacgcccacaaaaccgccgaaaactacgaactacaacgaaaccgacgcgaaactcgaccctcactacacgaaacctaaacgcctacacgcccccgtacttcaacccgcgactcccgaacacccccgccaaacgatccccaaaaacgcccgctacgcgaacctcgacgaaaacgcacctacgtctaaacgctaacgccgtacgcgaaacgaaaaccgacgaacatacgcaatataatataaacaaaacgtaattaacaaacatacgcaatataaaccgaacgaaactaacgaacatacgcaatataaaacgaaacgaaacaaaactaataaacaaacccgcgaaaaacgaacgcgaaaacgaacgttactacgacaacgataaacgaccaaaaaattacctaaaaaaaaaaaaacaaacgtccctaaattccgatattcgcgaaaaaatcgaaacacgaaaaaacttcgaaaaaaaaacgaaaaaaaaaataacccgccaaacgaacgaaatccataaattcgaaataaaaaccgtccgcgacctcgctttcgcctcctccgaaccgaaccgacgataaccgcaactataaaacgaaatcgaatcccgtaacgacgcgc

SEQ ID NO: 2831 - DNA, 971 bp, Artificial Sequence
  chemically treated genomic DNA (Homo sapiens) CpG-island No: 2831
tttagggagtaggaaaaggttagcgggttacgtagggtttattcgggtttgtatttaaacgtaaacggttaggtttacgaagtaggaaatataattcgtaacgagaagtaaagggatttatagagaagggttaggagttacggacgacgttaggtagtcggcgtttgcgttttcgcgagttaagacgtttgagcggcgcggggggatcgggggattttttagaaaattgttttcgattaatagcgtagcgaaggggcggtgcgttcgagattttggaacgggaacgattatagttatcgtagggaaataatcggggtttaggtttaggtgggcgggcggttgaggagcgtggttgcgtttataaagtcgtcgggggttgcggattatagcgaagtcggcgcggggttcggtttttattatacgaggtttgggcgtttgtacgttttcgtgttttagttcgcggttttcgaatattttcgttaggcgatttttaaaaacgttcgttgcgcgagtttcgacgggaacgtatttgcgtttagacgttgacgtcgtgcgcggggcgggggtcggcgagtatgcgtagtgtggtgtggatagggcgtggttggtaagtatgcgtaatgtgggtcgggcggggttggcgagtatgcgtagtatggggcggggcggggtagggttggtgagtaagttcgcggggagcgagcgcggaggcgggcgttgttacggtaacggtgggcggttagggagttgtttgagggaaaaggggtagacgtttttgggtttcggtgttcgcggaggagtcgaggtacggagaggtttcgggggagggacggaaagaagggtggttcgttaggcgggcggggtttatggattcggggtgagggtcgttcgcggtttcgttttcgtttttttcgagtcgggtcggcgatggtcgtagttgtgaggcgaggtcgggtttcgtagcggcgcgt

SEQ ID NO: 2832 - DNA, 971 bp, Artificial Sequence
  chemically treated genomic DNA (Homo sapiens) CpG-island No: 2832
acgcgccgctacgaaacccgacctcgcctcacaactacgaccatcgccgacccgactcgaaaaaaacgaaaacgaaaccgcgaacgaccctcaccccgaatccataaaccccgcccgcctaacgaaccacccttctttccgtccctcccccgaaacctctccgtacctcgactcctccgcgaacaccgaaacccaaaaacgtctaccccttttccctcaaacaactccctaaccgcccaccgttaccgtaacaacgcccgcctccgcgctcgctccccgcgaacttactcaccaaccctaccccgccccgccccatactacgcatactcgccaaccccgcccgacccacattacgcatacttaccaaccacgccctatccacaccacactacgcatactcgccgacccccgccccgcgcacgacgtcaacgtctaaacgcaaatacgttcccgtcgaaactcgcgcaacgaacgtttttaaaaatcgcctaacgaaaatattcgaaaaccgcgaactaaaacacgaaaacgtacaaacgcccaaacctcgtataataaaaaccgaaccccgcgccgacttcgctataatccgcaacccccgacgactttataaacgcaaccacgctcctcaaccgcccgcccacctaaacctaaaccccgattatttccctacgataactataatcgttcccgttccaaaatctcgaacgcaccgccccttcgctacgctattaatcgaaaacaattttctaaaaaatcccccgatccccccgcgccgctcaaacgtcttaactcgcgaaaacgcaaacgccgactacctaacgtcgtccgtaactcctaacccttctctataaatccctttacttctcgttacgaattatatttcctacttcgtaaacctaaccgtttacgtttaaatacaaacccgaataaaccctacgtaacccgctaaccttttcctactccctaaa

SEQ ID NO: 2833 - DNA, 798 bp, Artificial Sequence
  chemically treated genomic DNA (Homo sapiens) CpG-island No: 2833
atatttagagtaagttacgtagaaatttttaggtcgtatttattttcggtgtatagcgcgggagatgatacgtattttatcggatttcgtatagtatcgttgatgaataagtatatagttgtttgtataattattatcggtcgtggcggtcggagattttttttttttttcgtcggatattggggcgtggttggaaattcgggagtggattggtcggaaggtgggacgtaaatttgtttgaaaggtttaattagtgttcggttttttcgttttagttaatagaaaatcgagaggaaggtagggagggcggagttttttatttgagtttgtggcgcgcgaggttttgtagttcgggttggcgtttgggtattggttgggttcgatgttgggtacgttgcgcgttatggagggcgaggacgtggaagacgattagttgttgtagaagtttagggttagtcgtcgtcgtttttagaggcgtatgtagcggttgatagagaaggtgcggttttcgtcggttcgtcgggaggggaggtttgcgtgtcggagtgaggttgggaggggacgtaggacgggaagggaaggggttttgaggattcggagcgggggttggggaagcgggattggggtttggatgcggagagaaggtggaggcggagttgggggtttcggagagggaaaaaggaggtagcgtcgaaggtttcggtgcggggacggggaggaaagattggggttttcggaacggggagtggggaagtaggtttggggttcgggtgtagagaggagggtttggtggggttg

SEQ ID NO: 2834 - DNA, 798 bp, Artificial Sequence
  chemically treated genomic DNA (Homo sapiens) CpG-island No: 2834
caaccccaccaaaccctcctctctacacccgaaccccaaacctacttccccactccccgttccgaaaaccccaatctttcctccccgtccccgcaccgaaaccttcgacgctacctcctttttccctctccgaaacccccaactccgcctccaccttctctccgcatccaaaccccaatcccgcttccccaacccccgctccgaatcctcaaaaccccttcccttcccgtcctacgtcccctcccaacctcactccgacacgcaaacctcccctcccgacgaaccgacgaaaaccgcaccttctctatcaaccgctacatacgcctctaaaaacgacgacgactaaccctaaacttctacaacaactaatcgtcttccacgtcctcgccctccataacgcgcaacgtacccaacatcgaacccaaccaatacccaaacgccaacccgaactacaaaacctcgcgcgccacaaactcaaataaaaaactccgccctccctaccttcctctcgattttctattaactaaaacgaaaaaaccgaacactaattaaacctttcaaacaaatttacgtcccaccttccgaccaatccactcccgaatttccaaccacgccccaatatccgacgaaaaaaaaaaaaaatctccgaccgccacgaccgataataattatacaaacaactatatacttattcatcaacgatactatacgaaatccgataaaatacgtatcatctcccgcgctatacaccgaaaataaatacgacctaaaaatttctacgtaacttactctaaatat

SEQ ID NO: 2835 - DNA, 798 bp, Artificial Sequence
  chemically treated genomic DNA (Homo sapiens) CpG-island No: 2835
tagttttattaaatttttttttttgtattcgagttttaggtttgtttttttatttttcgtttcggaggttttagtttttttttttcgttttcgtatcgaagttttcggcgttgtttttttttttttttttcggagtttttagtttcgtttttatttttttttcgtatttaagttttagtttcgtttttttaattttcgtttcgagtttttagagtttttttttttttcgttttacgtttttttttagttttatttcgatacgtaggttttttttttcggcggatcggcgggggtcgtattttttttattagtcgttgtatgcgtttttggaagcggcggcgattggttttgagtttttgtagtagttggtcgttttttacgttttcgttttttatggcgcgtagcgtatttagtatcggatttagttagtatttaagcgttaattcggattgtagggtttcgcgcgttataaatttaaataggagatttcgttttttttgtttttttttcggttttttattggttagagcggagaagtcgggtattgattgggttttttaaataaatttgcgttttatttttcggttaatttattttcgagtttttagttacgttttaatgttcggcggaagggagggagggttttcggtcgttacggtcggtggtagttgtataaatagttgtgtgtttatttattagcggtgttgtgcgagattcggtgggatgcgtgttatttttcgcgttgtgtatcggagataagtgcggtttggagatttttgcgtgatttgttttgggtgt

SEQ ID NO: 2836 - DNA, 798 bp, Artificial Sequence
  chemically treated genomic DNA (Homo sapiens) CpG-island No: 2836
acacccaaaacaaatcacgcaaaaatctccaaaccgcacttatctccgatacacaacgcgaaaaataacacgcatcccaccgaatctcgcacaacaccgctaataaataaacacacaactatttatacaactaccaccgaccgtaacgaccgaaaaccctccctcccttccgccgaacattaaaacgtaactaaaaactcgaaaataaattaaccgaaaaataaaacgcaaatttatttaaaaaacccaatcaatacccgacttctccgctctaaccaataaaaaaccgaaaaaaaaacaaaaaaaacgaaatctcctatttaaatttataacgcgcgaaaccctacaatccgaattaacgcttaaatactaactaaatccgatactaaatacgctacgcgccataaaaaacgaaaacgtaaaaaacgaccaactactacaaaaactcaaaaccaatcgccgccgcttccaaaaacgcatacaacgactaataaaaaaaatacgacccccgccgatccgccgaaaaaaaaaacctacgtatcgaaataaaactaaaaaaaaacgtaaaacgaaaaaaaaaaaaactctaaaaactcgaaacgaaaattaaaaaaacgaaactaaaacttaaatacgaaaaaaaaataaaaacgaaactaaaaactccgaaaaaaaaaaaaaaaaacaacgccgaaaacttcgatacgaaaacgaaaaaaaaaaactaaaacctccgaaacgaaaaataaaaaaacaaacctaaaactcgaatacaaaaaaaaaaatttaataaaacta

SEQ ID NO: 2837 - DNA, 855 bp, Artificial Sequence
  chemically treated genomic DNA (Homo sapiens) CpG-island No: 2837
gcgtatgatgcggttgcgaggttcggggatgttgcgggatttgtttttgcggtcgtttcgcgggttgagttgattttgcgcggatagttttggttattttgtgtcggcgttttcgaggcggcggtacgggattcgttgtcgcgcgcgattttattcgtggtggacggtggcgtggcgcgtgagatttttcgcgcggggtttgtttagttttttttcggaattttgtaggagttgggtaaggggagtacgtatcgtagttcgggtgttttacgttgttcggtttcgttttaaggacggtttcggggagacggacgcgtttggtaatagcgagggtaaagagttggtggttttaggtgaaaagtgagtgttttcgcgagcgtaggaggtttcgtttttttcggggttcgggtttaggttgtgtggggttttgcggtggggcgggataggagtcgagggtttagaaaagagaaagaaagaggtgtcgggcggtttgcgcgttttgcgttatgtgattaggttcggtttcgttcgcgtttttttcgttcgtaatttttcgttaggtatttatttttttttttcgttttcgggggttcgttttggtggggtcgcggtggggttgtatgggttcgtttggcgtttttagcgttagagaggtcgtttttttgttcgcgttgcgtgtttagttttttggtttgcggttgtagcgtttggtcgttcgttttagttattcgtgggcgatgttgtacgaatatttttatcgagtgatatttaggagttgggcgtttagtagagtttttatttttttgatttgtcgttttttttggttcgttttcgttttgtttgtttttttttggt

SEQ ID NO: 2838 - DNA, 855 bp, Artificial Sequence
  chemically treated genomic DNA (Homo sapiens) CpG-island No: 2838
accaaaaaaaaacaaacaaaacgaaaacgaaccaaaaaaaacgacaaatcaaaaaaataaaaactctactaaacgcccaactcctaaatatcactcgataaaaatattcgtacaacatcgcccacgaataactaaaacgaacgaccaaacgctacaaccgcaaaccaaaaaactaaacacgcaacgcgaacaaaaaaacgacctctctaacgctaaaaacgccaaacgaacccatacaaccccaccgcgaccccaccaaaacgaacccccgaaaacgaaaaaaaaaaataaatacctaacgaaaaattacgaacgaaaaaaacgcgaacgaaaccgaacctaatcacataacgcaaaacgcgcaaaccgcccgacacctctttctttctcttttctaaaccctcgactcctatcccgccccaccgcaaaaccccacacaacctaaacccgaaccccgaaaaaaacgaaacctcctacgctcgcgaaaacactcacttttcacctaaaaccaccaactctttaccctcgctattaccaaacgcgtccgtctccccgaaaccgtccttaaaacgaaaccgaacaacgtaaaacacccgaactacgatacgtactccccttacccaactcctacaaaattccgaaaaaaaactaaacaaaccccgcgcgaaaaatctcacgcgccacgccaccgtccaccacgaataaaatcgcgcgcgacaacgaatcccgtaccgccgcctcgaaaacgccgacacaaaataaccaaaactatccgcgcaaaatcaactcaacccgcgaaacgaccgcaaaaacaaatcccgcaacatccccgaacctcgcaaccgcatcatacgc

SEQ ID NO: 2839 - DNA, 855 bp, Artificial Sequence
  chemically treated genomic DNA (Homo sapiens) CpG-island No: 2839
attaagggagggtaggtagagcggaaacgagttaggaaaagcgataagttaggaaggtaaaggttttgttgaacgtttaatttttaaatgttattcggtggagatgttcgtgtagtatcgtttacgaatggttggggcgggcggttaggcgttgtagtcgtaagttagggagttgagtacgtagcgcgggtaggggagcggtttttttggcgttggggacgttaggcgagtttatatagttttatcgcggttttattagggcgaattttcgggggcggagaagggaagtgggtgtttggcggagggttgcgggcggggaaggcgcgggcggggtcgggtttaattatatggcgtaggacgcgtaggtcgttcggtattttttttttttttttttttagattttcggtttttatttcgttttatcgtagggttttatatagtttgagttcgggtttcgaaaggaacgaggttttttgcgttcgcggagatatttattttttatttgaggttattagttttttgttttcgttgttgttaaacgcgttcgttttttcggggtcgtttttggggcggggtcgggtagcgtgggatattcgggttgcgatgcgtgttttttttgtttagtttttgtaagatttcgaaggagagttggataggtttcgcgcgaggggttttacgcgttacgttatcgtttattacgggtggagtcgcgcgcggtagcgggtttcgtgtcgtcgtttcggggacgtcggtatagggtgattaaggttgttcgcgtagagttagtttagttcgcggggcgatcgtaggagtaggtttcgtagtattttcgagtttcgtagtcgtattatgcgt

SEQ ID NO: 2840 - DNA, 855 bp, Artificial Sequence
  chemically treated genomic DNA (Homo sapiens) CpG-island No: 2840
acgcataatacgactacgaaactcgaaaatactacgaaacctactcctacgatcgccccgcgaactaaactaactctacgcgaacaaccttaatcaccctataccgacgtccccgaaacgacgacacgaaacccgctaccgcgcgcgactccacccgtaataaacgataacgtaacgcgtaaaacccctcgcgcgaaacctatccaactctccttcgaaatcttacaaaaactaaacaaaaaaaacacgcatcgcaacccgaatatcccacgctacccgaccccgccccaaaaacgaccccgaaaaaacgaacgcgtttaacaacaacgaaaacaaaaaactaataacctcaaataaaaaataaatatctccgcgaacgcaaaaaacctcgttcctttcgaaacccgaactcaaactatataaaaccctacgataaaacgaaataaaaaccgaaaatctaaaaaaaaaaaaaaaaaaaataccgaacgacctacgcgtcctacgccatataattaaacccgaccccgcccgcgccttccccgcccgcaaccctccgccaaacacccacttcccttctccgcccccgaaaattcgccctaataaaaccgcgataaaactatataaactcgcctaacgtccccaacgccaaaaaaaccgctcccctacccgcgctacgtactcaactccctaacttacgactacaacgcctaaccgcccgccccaaccattcgtaaacgatactacacgaacatctccaccgaataacatttaaaaattaaacgttcaacaaaacctttaccttcctaacttatcgcttttcctaactcgtttccgctctacctaccctcccttaat

SEQ ID NO: 2841 - DNA, 834 bp, Artificial Sequence
  chemically treated genomic DNA (Homo sapiens) CpG-island No: 2841
tacgttttttgtttagcgcgggagttaattgttattcggtattatgtttatacgttttttgtttagcgcgggagttaattgttattcggtattatgtttatacgttttttgtttagcgcgggagttaattgttattcggtattatgtttatacgttttttgtttagcgcgggagttaattgttattcggtatcgtgtttatacgttttttgtttagcgcgggagttaattgttattcggtatcgtgtttatacgttttttgtttagcgcgggagttaattgttattcggtatcgtgtttatacgttttttgtttagcgcgggagttaattgttattcggtatcgtgtttatacgttttttgtttagcgcgggagttaattgttattcggtattatgtttatacgttttttgtttagcgcgggagttaattgttattcggtatcgtgtttatacgttttttgtttagcgcgggagttaattgttattcggtatcgtgtttatacgttttttgtttagcgcgggagttaattgttattcggtatcgtgtttatacgttttttgtttagcgcgggagttaattgttattcggtatcgtgtttatacgttttttgtttagcgcgggagttaattgttattcggtatcgtgtttatacgttttttgtttagcgcgggagttaattgttattcggtatcgtgtttatacgttttttgtttagcgcgggagttaattgttattcggtatcgtgtttatacgttttttgtttagcgcggttagtgaggttatacgtgtagtagttattttgaagttattgggatttagattcgttgggttgg

SEQ ID NO: 2842 - DNA, 834 bp, Artificial Sequence
  chemically treated genomic DNA (Homo sapiens) CpG-island No: 2842
ccaacccaacgaatctaaatcccaataacttcaaaataactactacacgtataacctcactaaccgcgctaaacaaaaaacgtataaacacgataccgaataacaattaactcccgcgctaaacaaaaaacgtataaacacgataccgaataacaattaactcccgcgctaaacaaaaaacgtataaacacgataccgaataacaattaactcccgcgctaaacaaaaaacgtataaacacgataccgaataacaattaactcccgcgctaaacaaaaaacgtataaacacgataccgaataacaattaactcccgcgctaaacaaaaaacgtataaacacgataccgaataacaattaactcccgcgctaaacaaaaaacgtataaacacgataccgaataacaattaactcccgcgctaaacaaaaaacgtataaacataataccgaataacaattaactcccgcgctaaacaaaaaacgtataaacacgataccgaataacaattaactcccgcgctaaacaaaaaacgtataaacacgataccgaataacaattaactcccgcgctaaacaaaaaacgtataaacacgataccgaataacaattaactcccgcgctaaacaaaaaacgtataaacacgataccgaataacaattaactcccgcgctaaacaaaaaacgtataaacataataccgaataacaattaactcccgcgctaaacaaaaaacgtataaacataataccgaataacaattaactcccgcgctaaacaaaaaacgtataaacataataccgaataacaattaactcccgcgctaaacaaaaaacgta

SEQ ID NO: 2843 - DNA, 834 bp, Artificial Sequence
  chemically treated genomic DNA (Homo sapiens) CpG-island No: 2843
ttagtttagcgggtttgggttttagtggttttaggatgattgttgtacgtgtggttttattaatcgcgttgggtaggggacgtgtgggtacggtgtcgggtgatagttaattttcgcgttgggtaggggacgtgtgggtacggtgtcgggtgatagttaattttcgcgttgggtaggggacgtgtgggtacggtgtcgggtgatagttaattttcgcgttgggtaggggacgtgtgggtacggtgtcgggtgatagttaattttcgcgttgggtaggggacgtgtgggtacggtgtcgggtgatagttaattttcgcgttgggtaggggacgtgtgggtacggtgtcgggtgatagttaattttcgcgttgggtaggggacgtgtgggtacggtgtcgggtgatagttaattttcgcgttgggtaggggacgtgtgggtatggtgtcgggtgatagttaattttcgcgttgggtaggggacgtgtgggtacggtgtcgggtgatagttaattttcgcgttgggtaggggacgtgtgggtacggtgtcgggtgatagttaattttcgcgttgggtaggggacgtgtgggtacggtgtcgggtgatagttaattttcgcgttgggtaggggacgtgtgggtacggtgtcgggtgatagttaattttcgcgttgggtaggggacgtgtgggtatggtgtcgggtgatagttaattttcgcgttgggtaggggacgtgtgggtatggtgtcgggtgatagttaattttcgcgttgggtaggggacgtgtgggtatggtgtcgggtgatagttaattttcgcgttgggtaggggacgtg

SEQ ID NO: 2844 - DNA, 834 bp, Artificial Sequence
  chemically treated genomic DNA (Homo sapiens) CpG-island No: 2844
cacgtcccctacccaacgcgaaaattaactatcacccgacaccatacccacacgtcccctacccaacgcgaaaattaactatcacccgacaccatacccacacgtcccctacccaacgcgaaaattaactatcacccgacaccatacccacacgtcccctacccaacgcgaaaattaactatcacccgacaccgtacccacacgtcccctacccaacgcgaaaattaactatcacccgacaccgtacccacacgtcccctacccaacgcgaaaattaactatcacccgacaccgtacccacacgtcccctacccaacgcgaaaattaactatcacccgacaccgtacccacacgtcccctacccaacgcgaaaattaactatcacccgacaccatacccacacgtcccctacccaacgcgaaaattaactatcacccgacaccgtacccacacgtcccctacccaacgcgaaaattaactatcacccgacaccgtacccacacgtcccctacccaacgcgaaaattaactatcacccgacaccgtacccacacgtcccctacccaacgcgaaaattaactatcacccgacaccgtacccacacgtcccctacccaacgcgaaaattaactatcacccgacaccgtacccacacgtcccctacccaacgcgaaaattaactatcacccgacaccgtacccacacgtcccctacccaacgcgaaaattaactatcacccgacaccgtacccacacgtcccctacccaacgcgattaataaaaccacacgtacaacaatcatcctaaaaccactaaaacccaaacccgctaaactaa

SEQ ID NO: 2845 - DNA, 708 bp, Artificial Sequence
  chemically treated genomic DNA (Homo sapiens) CpG-island No: 2845
agtcggttcgttttcgtcgtttcgatattgtatttcgtggagtcggttcgttttatagtttcgatattgtatttcgtggagtcggttcgttttatagtttcgatattgtatttcgtggagtcggttcgttttcgtcgtttcgatattgtatttcgtggagtcggttcgttttcgtcgtttcgatattgtatttcgtggagtcggttcgttttatagtttcgatattgtatttcgtggagtcggttcgttttcgtcgtttcgatattgtatttcgtggagtcggttcgttttatagtttcgatattgtatttcgtggagtcggttcgttttcgtcgtttcgatattgtatttcgtggagtcggttcgttttatagtttcgatattgtatttcgtggagtcggttcgttttcgtcgtttcgatattgtatttcgtggagtcggttcgttttcgtcgttttaatattgtatttcgtggagtcggttcgttttcgtcgtttcgatattgtatttcgtggagtcggttcgttttcgtcgtttcgatattgtatttcgtggagtcggttcgttttcgtcgtttcgatattgtatttcgtggagtcggttcgtttttatcgcgtatggtttgtatttatttgtggatgagattggtgaggggttcgattagttttttgtttagtcgcggttttaaaggagtaagagtatcgaatt

SEQ ID NO: 2846 - DNA, 708 bp, Artificial Sequence
  chemically treated genomic DNA (Homo sapiens) CpG-island No: 2846
aattcgatactcttactcctttaaaaccgcgactaaacaaaaaactaatcgaacccctcaccaatctcatccacaaataaatacaaaccatacgcgataaaaacgaaccgactccacgaaatacaatatcgaaacgacgaaaacgaaccgactccacgaaatacaatatcgaaacgacgaaaacgaaccgactccacgaaatacaatatcgaaacgacgaaaacgaaccgactccacgaaatacaatattaaaacgacgaaaacgaaccgactccacgaaatacaatatcgaaacgacgaaaacgaaccgactccacgaaatacaatatcgaaactataaaacgaaccgactccacgaaatacaatatcgaaacgacgaaaacgaaccgactccacgaaatacaatatcgaaactataaaacgaaccgactccacgaaatacaatatcgaaacgacgaaaacgaaccgactccacgaaatacaatatcgaaactataaaacgaaccgactccacgaaatacaatatcgaaacgacgaaaacgaaccgactccacgaaatacaatatcgaaacgacgaaaacgaaccgactccacgaaatacaatatcgaaactataaaacgaaccgactccacgaaatacaatatcgaaactataaaacgaaccgactccacgaaatacaatatcgaaacgacgaaaacgaaccgact

SEQ ID NO: 2847 - DNA, 708 bp, Artificial Sequence
  chemically treated genomic DNA (Homo sapiens) CpG-island No: 2847
agttcggtgtttttatttttttggaatcgcggttgggtaagaagttgatcgagttttttattaattttatttataggtgagtgtaggttatgcgcggtgggggcgggtcggttttacggggtgtagtgtcggagcggcgggggcgggtcggttttacggggtgtagtgtcggagcggcgggggcgggtcggttttacggggtgtagtgtcggagcggcgggggcgggtcggttttacggggtgtagtgttggagcggcgggggcgggtcggttttacggggtgtagtgtcggagcggcgggggcgggtcggttttacggggtgtagtgtcggagttgtggggcgggtcggttttacggggtgtagtgtcggagcggcgggggcgggtcggttttacggggtgtagtgtcggagttgtggggcgggtcggttttacggggtgtagtgtcggagcggcgggggcgggtcggttttacggggtgtagtgtcggagttgtggggcgggtcggttttacggggtgtagtgtcggagcggcgggggcgggtcggttttacggggtgtagtgtcggagcggcgggggcgggtcggttttacggggtgtagtgtcggagttgtggggcgggtcggttttacggggtgtagtgtcggagttgtggggcgggtcggttttacggggtgtagtgtcggagcggcgggggcgggtcggtt

SEQ ID NO: 2848 - DNA, 708 bp, Artificial Sequence
  chemically treated genomic DNA (Homo sapiens) CpG-island No: 2848
aaccgacccgcccccgccgctccgacactacaccccgtaaaaccgacccgccccacaactccgacactacaccccgtaaaaccgacccgccccacaactccgacactacaccccgtaaaaccgacccgcccccgccgctccgacactacaccccgtaaaaccgacccgcccccgccgctccgacactacaccccgtaaaaccgacccgccccacaactccgacactacaccccgtaaaaccgacccgcccccgccgctccgacactacaccccgtaaaaccgacccgccccacaactccgacactacaccccgtaaaaccgacccgcccccgccgctccgacactacaccccgtaaaaccgacccgccccacaactccgacactacaccccgtaaaaccgacccgcccccgccgctccgacactacaccccgtaaaaccgacccgcccccgccgctccaacactacaccccgtaaaaccgacccgcccccgccgctccgacactacaccccgtaaaaccgacccgcccccgccgctccgacactacaccccgtaaaaccgacccgcccccgccgctccgacactacaccccgtaaaaccgacccgcccccaccgcgcataacctacactcacctataaataaaattaataaaaaactcgatcaacttcttacccaaccgcgattccaaaaaaataaaaacaccgaact

SEQ ID NO: 2849 - DNA, 500 bp, Artificial Sequence
  chemically treated genomic DNA (Homo sapiens) CpG-island No: 2849
tgttaacgaataaacgtttttttttttttttttttttcgtttcgagcgtttttttttgagttagacgttaatttgatttttattagtattattaggagcgcgtttagtaagttggtagtttttttttttttttttcggcgtttttttcgtttttatttaatattttttattttattttcgatttttttcggggaatatcgggaaggttcgacgttttaggataggattagttacgtagataggtcgatttgtttaggttcgcgttcgtacgtacgtacgtatacggtttcgtatatagtttcgttttatttcgtaattagttttgtcgattgttttatatattcgttttcgcgttggtcggtcgatttagtgttttgtttttattttcgtgttggcggagcggacgtcgcgttttgggttttagaggggtcgggtggtttagacgatttattatttttttattttgatcgtgttgaatagatttttttatacgagagaaa

SEQ ID NO: 2850 - DNA, 500 bp, Artificial Sequence
  chemically treated genomic DNA (Homo sapiens) CpG-island No: 2850
tttctctcgtataaaaaaatctattcaacacgatcaaaataaaaaaataataaatcgtctaaaccacccgacccctctaaaacccaaaacgcgacgtccgctccgccaacacgaaaataaaaacaaaacactaaatcgaccgaccaacgcgaaaacgaatatataaaacaatcgacaaaactaattacgaaataaaacgaaactatatacgaaaccgtatacgtacgtacgtacgaacgcgaacctaaacaaatcgacctatctacgtaactaatcctatcctaaaacgtcgaaccttcccgatattccccgaaaaaaatcgaaaataaaataaaaaatattaaataaaaacgaaaaaaacgccgaaaaaaaaaaaaaaaaactaccaacttactaaacgcgctcctaataatactaataaaaatcaaattaacgtctaactcaaaaaaaaacgctcgaaacgaaaaaaaaaaaaaaaaaaaaacgtttattcgttaaca

SEQ ID NO: 2851 - DNA, 500 bp, Artificial Sequence
  chemically treated genomic DNA (Homo sapiens) CpG-island No: 2851
tttttttcgtgtgggggggtttgtttagtacggttagggtgggggagtggtgggtcgtttgagttattcggtttttttgggatttagagcgcggcgttcgtttcgttagtacgggggtgagaataaggtattaggtcggtcggttagcgcgggggcgggtgtataaggtagtcgatagggttggttgcggggtggggcggggttgtgtgcggggtcgtgtgcgtgcgtgcgtgcgggcgcgggtttgggtaaatcgatttgtttgcgtggttggttttgttttggagcgtcgagttttttcggtgtttttcggagggggtcggggataggatgagagatgttgaatgggggcgggaggggcgtcgggaaaggggggaggaaattattaatttgttgagcgcgtttttgataatgttggtgagggttaagttggcgtttggtttaaagaagggcgttcggggcggagagggagggagggaggggacgtttgttcgttggta

SEQ ID NO: 2852 - DNA, 500 bp, Artificial Sequence
  chemically treated genomic DNA (Homo sapiens) CpG-island No: 2852
taccaacgaacaaacgtcccctccctccctccctctccgccccgaacgcccttctttaaaccaaacgccaacttaaccctcaccaacattatcaaaaacgcgctcaacaaattaataatttcctcccccctttcccgacgcccctcccgcccccattcaacatctctcatcctatccccgaccccctccgaaaaacaccgaaaaaactcgacgctccaaaacaaaaccaaccacgcaaacaaatcgatttacccaaacccgcgcccgcacgcacgcacgcacacgaccccgcacacaaccccgccccaccccgcaaccaaccctatcgactaccttatacacccgcccccgcgctaaccgaccgacctaataccttattctcacccccgtactaacgaaacgaacgccgcgctctaaatcccaaaaaaaccgaataactcaaacgacccaccactcccccaccctaaccgtactaaacaaacccccccacacgaaaaaaa

SEQ ID NO: 2853 - DNA, 559 bp, Artificial Sequence
  chemically treated genomic DNA (Homo sapiens) CpG-island No: 2853
tttttttcgggggagttcgttttcgaatatgcgtagtacgtttattgttttttttttgacggttttgggtcgagtttttggtgtttttcggtttagaggtgttgtcgcgtgcggttatcgtatttttgggtttaaagcggtttgttttattttgatgggtcgggtcgttttatcggggttgtcgtcggggtcggtcgggggcgcgggttgcgagcgcgttgtcgtttcggttttgcgttcggattttcggcgggcgtcgtcgtttgggattcggtgtatcggtcgtttgcgaggttcgggaggggtggggtttgcggttagagttgcggtttggtcgcgtagtagtcgtattaggaagtcgatgtattttatggttaggcggagtatttcgtttttgtttagttttcggtcgggcgggtgcgtcggtagtagtttttttagttcggcgaaggcgtcgttaacgttttgttgtcgttagcgttttcggttgttggtgaatacgcgtcgggttattttttggggttggtgttttgtggataaggagggtcgggttggtgtt

SEQ ID NO: 2854 - DNA, 559 bp, Artificial Sequence
  chemically treated genomic DNA (Homo sapiens) CpG-island No: 2854
aacaccaacccgaccctccttatccacaaaacaccaaccccaaaaaataacccgacgcgtattcaccaacaaccgaaaacgctaacgacaacaaaacgttaacgacgccttcgccgaactaaaaaaactactaccgacgcacccgcccgaccgaaaactaaacaaaaacgaaatactccgcctaaccataaaatacatcgacttcctaatacgactactacgcgaccaaaccgcaactctaaccgcaaaccccacccctcccgaacctcgcaaacgaccgatacaccgaatcccaaacgacgacgcccgccgaaaatccgaacgcaaaaccgaaacgacaacgcgctcgcaacccgcgcccccgaccgaccccgacgacaaccccgataaaacgacccgacccatcaaaataaaacaaaccgctttaaacccaaaaatacgataaccgcacgcgacaacacctctaaaccgaaaaacaccaaaaactcgacccaaaaccgtcaaaaaaaaaacaataaacgtactacgcatattcgaaaacgaactcccccgaaaaaaa

SEQ ID NO: 2855 - DNA, 559 bp, Artificial Sequence
  chemically treated genomic DNA (Homo sapiens) CpG-island No: 2855
ggtattaattcggttttttttgtttatagggtattagttttagaaggtggttcggcgcgtgtttattaatagtcgggagcgttggcggtagtagaacgttaacggcgttttcgtcgagttgaggaagttgttgtcgacgtattcgttcgatcggaagttgagtaagaacgaggtgtttcgtttagttatgaagtatatcggttttttggtgcggttgttgcgcgattaagtcgtagttttggtcgtaggttttatttttttcgggtttcgtaaacggtcggtgtatcgggttttagacgacggcgttcgtcggggattcggacgtagggtcgaggcggtagcgcgttcgtagttcgcgttttcggtcgatttcgacggtagtttcggtggagcggttcggtttattaagatggagtaaatcgttttgagtttagaggtgcggtgatcgtacgcggtagtatttttgagtcggagggtattagggattcggtttagggtcgttaaggaaagggtagtggacgtgttgcgtatgttcgggagcgaattttttcgaagaagg

SEQ ID NO: 2856 - DNA, 559 bp, Artificial Sequence
  chemically treated genomic DNA (Homo sapiens) CpG-island No: 2856
ccttcttcgaaaaaattcgctcccgaacatacgcaacacgtccactaccctttccttaacgaccctaaaccgaatccctaataccctccgactcaaaaatactaccgcgtacgatcaccgcacctctaaactcaaaacgatttactccatcttaataaaccgaaccgctccaccgaaactaccgtcgaaatcgaccgaaaacgcgaactacgaacgcgctaccgcctcgaccctacgtccgaatccccgacgaacgccgtcgtctaaaacccgatacaccgaccgtttacgaaacccgaaaaaaataaaacctacgaccaaaactacgacttaatcgcgcaacaaccgcaccaaaaaaccgatatacttcataactaaacgaaacacctcgttcttactcaacttccgatcgaacgaatacgtcgacaacaacttcctcaactcgacgaaaacgccgttaacgttctactaccgccaacgctcccgactattaataaacacgcgccgaaccaccttctaaaactaataccctataaacaaaaaaaaccgaattaatacc

SEQ ID NO: 2857 - DNA, 605 bp, Artificial Sequence
  chemically treated genomic DNA (Homo sapiens) CpG-island No: 2857
tggcgcgcgttcggggttgttgtttcgtttcgcgttttcggaggagagtacgtcgagttcgcggcgtcgtcgcgttttttcgttttttcggaggcggtttattcgaggttgggtaggcgtagggtcggtagtatgagtcgtcgggagagtttttcgcgtagcgtcggtttttatcggggcggaagaaaggtatataagttggtcgtaatttttttttcgggtttattggggaaggcggtcgcggttgggtattcgaaattattttagggcgatcgcggggcgcgggaggcgtcggtttttcgttgttttttcgggtcggcggcggcgtagggcgcgtggacgagtcgtttttttttttttttttcgttgtttttcgttcggtcgttttgtgtaagcgtcgttggttgagttggttttaggggtattttttttcgtttgtttcgggtttcgcggtcggttttgttcggcggattttagcggcggcggcggcggcggcgttcgcgtacgttggtatcggtttgtttgtttcgtagggtttaagtttttaaattttttgtatttttagttttattattatggaaattattgattttttcggcgttgtt

SEQ ID NO: 2858 - DNA, 605 bp, Artificial Sequence
  chemically treated genomic DNA (Homo sapiens) CpG-island No: 2858
aacaacgccgaaaaaatcaataatttccataataataaaactaaaaatacaaaaaatttaaaaacttaaaccctacgaaacaaacaaaccgataccaacgtacgcgaacgccgccgccgccgccgccgctaaaatccgccgaacaaaaccgaccgcgaaacccgaaacaaacgaaaaaaaatacccctaaaaccaactcaaccaacgacgcttacacaaaacgaccgaacgaaaaacaacgaaaaaaaaaaaaaaaaacgactcgtccacgcgccctacgccgccgccgacccgaaaaaacaacgaaaaaccgacgcctcccgcgccccgcgatcgccctaaaataatttcgaatacccaaccgcgaccgccttccccaataaacccgaaaaaaaaattacgaccaacttatatacctttcttccgccccgataaaaaccgacgctacgcgaaaaactctcccgacgactcatactaccgaccctacgcctacccaacctcgaataaaccgcctccgaaaaaacgaaaaaacgcgacgacgccgcgaactcgacgtactctcctccgaaaacgcgaaacgaaacaacaaccccgaacgcgcgcca

SEQ ID NO: 2859 - DNA, 605 bp, Artificial Sequence
  chemically treated genomic DNA (Homo sapiens) CpG-island No: 2859
ggtaacgtcgagagagttagtggtttttatggtgatggagttgaaagtgtaggaaatttaaaggtttggattttgcgagatagataaatcggtgttaacgtgcgcggacgtcgtcgtcgtcgtcgtcgttggagttcgtcgggtagagtcggtcgcggagttcggagtaggcggagggaagtgtttttagaattagtttagttagcggcgtttgtatagagcggtcggacgaagagtagcgagaggaggaggggagagcggttcgtttacgcgttttgcgtcgtcgtcggttcgggaaggtagcgaggagtcggcgtttttcgcgtttcgcggtcgttttggagtaatttcggatgtttagtcgcggtcgttttttttagtagattcgggagaggagttgcggttaatttgtgtgtttttttttcgtttcggtgggagtcggcgttgcgcgaagggttttttcggcggtttatgttgtcggttttgcgtttgtttagtttcgggtgagtcgttttcggagagacgggggagcgcggcggcgtcgcgggttcggcgtgttttttttcggggacgcgggacgaagtagtagtttcgggcgcgcgtta

SEQ ID NO: 2860 - DNA, 605 bp, Artificial Sequence
  chemically treated genomic DNA (Homo sapiens) CpG-island No: 2860
taacgcgcgcccgaaactactacttcgtcccgcgtccccgaaaaaaaacacgccgaacccgcgacgccgccgcgctcccccgtctctccgaaaacgactcacccgaaactaaacaaacgcaaaaccgacaacataaaccgccgaaaaaacccttcgcgcaacgccgactcccaccgaaacgaaaaaaaaacacacaaattaaccgcaactcctctcccgaatctactaaaaaaaacgaccgcgactaaacatccgaaattactccaaaacgaccgcgaaacgcgaaaaacgccgactcctcgctaccttcccgaaccgacgacgacgcaaaacgcgtaaacgaaccgctctcccctcctcctctcgctactcttcgtccgaccgctctatacaaacgccgctaactaaactaattctaaaaacacttccctccgcctactccgaactccgcgaccgactctacccgacgaactccaacgacgacgacgacgacgacgtccgcgcacgttaacaccgatttatctatctcgcaaaatccaaacctttaaatttcctacactttcaactccatcaccataaaaaccactaactctctcgacgttacc

SEQ ID NO: 2861 - DNA, 551 bp, Artificial Sequence
  chemically treated genomic DNA (Homo sapiens) CpG-island No: 2861
tgcgtaggttttagtcgcgttttcgtaggttttattttcgttttttagtaacgtcgggttacgtgcgtcgtcgttcggatttcgtagcgtgagtttgtcggagtcggcgcgtatatgcgagcgtgtgcgcgcgtgcgtaggcggggcgatcggcgttttcggcgttcgtttcgttttcgagatgacgtcgtgcgtgcgcgcgttcggttcgcgttttcgtcgttttttatagcggtcgcgggcggcggcggtagcggttggaggttgtaggatcggcgaggaataggaattatggcggttgcgttgttcgtgttgttgggattcgcgttgttgggtatttacggagttttcggggttggtgaggagcgggtagggggcgggggtgcggttttgtaggggtcgggaatggaggtcgcggtgtcgattcgaagtcgacgggagtttggggtttcggcgcggggcggtttggggtgcgaaaggtcggtttcgggggtttttcgcgttagtatggagtttgggggtgaagttttagggtttgaggggggattaga

SEQ ID NO: 2862 - DNA, 551 bp, Artificial Sequence
  chemically treated genomic DNA (Homo sapiens) CpG-island No: 2862
tctaatcccccctcaaaccctaaaacttcacccccaaactccatactaacgcgaaaaacccccgaaaccgacctttcgcaccccaaaccgccccgcgccgaaaccccaaactcccgtcgacttcgaatcgacaccgcgacctccattcccgacccctacaaaaccgcacccccgccccctacccgctcctcaccaaccccgaaaactccgtaaatacccaacaacgcgaatcccaacaacacgaacaacgcaaccgccataattcctattcctcgccgatcctacaacctccaaccgctaccgccgccgcccgcgaccgctataaaaaacgacgaaaacgcgaaccgaacgcgcgcacgcacgacgtcatctcgaaaacgaaacgaacgccgaaaacgccgatcgccccgcctacgcacgcgcgcacacgctcgcatatacgcgccgactccgacaaactcacgctacgaaatccgaacgacgacgcacgtaacccgacgttactaaaaaacgaaaataaaacctacgaaaacgcgactaaaacctacgca

SEQ ID NO: 2863 - DNA, 551 bp, Artificial Sequence
  chemically treated genomic DNA (Homo sapiens) CpG-island No: 2863
tttagtttttttttaaattttgggattttatttttaagttttatgttggcgcgggaagttttcggggtcggtttttcgtattttaggtcgtttcgcgtcgaggttttaggttttcgtcggtttcgggtcggtatcgcggtttttattttcggtttttgtaggatcgtattttcgttttttattcgttttttattagtttcggaggtttcgtgggtgtttagtagcgcgaattttagtagtacgaatagcgtagtcgttatgatttttatttttcgtcggttttataatttttaatcgttgtcgtcgtcgttcgcggtcgttataaaaagcggcggaggcgcggatcgggcgcgcgtacgtacggcgttatttcgggggcggggcgagcgtcggggacgtcggtcgtttcgtttgcgtacgcgcgtatacgttcgtatgtacgcgtcggtttcggtaggtttacgttacggaattcgggcggcggcgtacgtgattcggcgttgttaggaaacgggagtggggtttgcggggacgcggttggagtttgcgta

SEQ ID NO: 2864 - DNA, 551 bp, Artificial Sequence
  chemically treated genomic DNA (Homo sapiens) CpG-island No: 2864
tacgcaaactccaaccgcgtccccgcaaaccccactcccgtttcctaacaacgccgaatcacgtacgccgccgcccgaattccgtaacgtaaacctaccgaaaccgacgcgtacatacgaacgtatacgcgcgtacgcaaacgaaacgaccgacgtccccgacgctcgccccgcccccgaaataacgccgtacgtacgcgcgcccgatccgcgcctccgccgctttttataacgaccgcgaacgacgacgacaacgattaaaaattataaaaccgacgaaaaataaaaatcataacgactacgctattcgtactactaaaattcgcgctactaaacacccacgaaacctccgaaactaataaaaaacgaataaaaaacgaaaatacgatcctacaaaaaccgaaaataaaaaccgcgataccgacccgaaaccgacgaaaacctaaaacctcgacgcgaaacgacctaaaatacgaaaaaccgaccccgaaaacttcccgcgccaacataaaacttaaaaataaaatcccaaaatttaaaaaaaaactaaa

SEQ ID NO: 2865 - DNA, 553 bp, Artificial Sequence
  chemically treated genomic DNA (Homo sapiens) CpG-island No: 2865
cggcgtcgtcgagtatcgttcgttttagtcgattagtttcgtcggttattgggtttagtttagaggagaggagggaaaggtcgcggaggtcgcgaggagacggttggggcgttagcggtcggttgtcgtttagttgtgttgttcggattaaggaaggagaagtgggaggagcggggagtttagcggtttaggacgacgacgttcgttatattcgggatttttcggtcgtggcggtcgtagcgtcggtagttcgggttttagtttttgtttttgtggtgatttcgtcgcgtttcgacgtcgtttttgttttcgtttcgttcgtcgttttcgttaatttcgtcgtcggggatatgtttaatttttgaagtcggaggaacgggttagttagattgcgttcgataggtgatggggagcggcggtcgggttgggtagtcgtcgggtgggcgagttggcgcggggtatttgttgatttgggaagggttaggatcgcgattaatggtgagttgggggtcggaggagtaggaaggtttagtttagggagagtaattggaaa

SEQ ID NO: 2866 - DNA, 553 bp, Artificial Sequence
  chemically treated genomic DNA (Homo sapiens) CpG-island No: 2866
tttccaattactctccctaaactaaaccttcctactcctccgacccccaactcaccattaatcgcgatcctaacccttcccaaatcaacaaataccccgcgccaactcgcccacccgacgactacccaacccgaccgccgctccccatcacctatcgaacgcaatctaactaacccgttcctccgacttcaaaaattaaacatatccccgacgacgaaattaacgaaaacgacgaacgaaacgaaaacaaaaacgacgtcgaaacgcgacgaaatcaccacaaaaacaaaaactaaaacccgaactaccgacgctacgaccgccacgaccgaaaaatcccgaatataacgaacgtcgtcgtcctaaaccgctaaactccccgctcctcccacttctccttccttaatccgaacaacacaactaaacgacaaccgaccgctaacgccccaaccgtctcctcgcgacctccgcgacctttccctcctctcctctaaactaaacccaataaccgacgaaactaatcgactaaaacgaacgatactcgacgacgccg

SEQ ID NO: 2867 - DNA, 553 bp, Artificial Sequence
  chemically treated genomic DNA (Homo sapiens) CpG-island No: 2867
tttttaattattttttttgaattaggtttttttattttttcgatttttaatttattattgatcgcgattttggttttttttaagttaataggtatttcgcgttagttcgtttattcggcggttgtttagttcggtcgtcgttttttattatttgtcgggcgtagtttgattggttcgttttttcggttttaggggttggatatgttttcggcggcggggttggcgggggcggcgggcgggacggggataggggcgacgtcgaagcgcggcggagttattatagaggtaggggttgaggttcgagttgtcggcgttgcgatcgttacggtcggagggtttcggatgtggcgagcgtcgtcgttttgagtcgttgagtttttcgttttttttatttttttttttttggttcgggtagtataattaggcggtagtcggtcgttggcgttttagtcgttttttcgcggttttcgcggtttttttttttttttttttaggttaggtttagtagtcgacggggttggtcggttgaggcgggcggtgttcggcggcgtcg

SEQ ID NO: 2868 - DNA, 553 bp, Artificial Sequence
  chemically treated genomic DNA (Homo sapiens) CpG-island No: 2868
cgacgccgccgaacaccgcccgcctcaaccgaccaaccccgtcgactactaaacctaacctaaaaaaaaaaaaaaaaaaaccgcgaaaaccgcgaaaaaacgactaaaacgccaacgaccgactaccgcctaattatactacccgaaccaaaaaaaaaaaaataaaaaaaacgaaaaactcaacgactcaaaacgacgacgctcgccacatccgaaaccctccgaccgtaacgatcgcaacgccgacaactcgaacctcaacccctacctctataataactccgccgcgcttcgacgtcgcccctatccccgtcccgcccgccgcccccgccaaccccgccgccgaaaacatatccaacccctaaaaccgaaaaaacgaaccaatcaaactacgcccgacaaataataaaaaacgacgaccgaactaaacaaccgccgaataaacgaactaacgcgaaatacctattaacttaaaaaaaaccaaaatcgcgatcaataataaattaaaaatcgaaaaaataaaaaaacctaattcaaaaaaaataattaaaaa

SEQ ID NO: 2869 - DNA, 1090 bp, Artificial Sequence
  chemically treated genomic DNA (Homo sapiens) CpG-island No: 2869
ttatttcgttttttaagaaagaattcggttcgaaatttgcgtgtttcgggtgcgtttggttatgtcgtatttattttttaatttttcgttttaatatcgttttttttatttttatttaatttaattcgggttttgtataatttttttagatttttttatttgcgtttttttttttcgggttcggcgtttttttttttattttattggaaaattcgtttcgggttttttttacgtttgtttttttttttcgatttttcgttttaacgcgggggtttagtacgtcgttttttttttttttgtttttttagggaggaggcgagaggaggcgaaaggaaggaaattttagtacgggttttcgggtcggtttttggggcgtttaagcgggttgcggcggttagtttcgggcggcgatttcgggtcggattttgcgcgcgtttatcgtttttttttcggagcgggtgcgtcggggagaggggagagttggcggtttgttattgttggttttcggtttcggttcggttcgcgcgttttgcggtgtttacgggttcggtttggcgttttttttttcggtcgcgtcgttttttttcgttagtttcgcgtcgttcgtttttaattcgagtttttcgcggttattgcggggagttcgagtcgtcggcgcgggagttgtcggcgttgcggtgttttcgtttcgtcgtttgtcgaggaggtttcggttgagggggtcgcgcgggtttcggagcggcgtcgtcgagcggcgggggtttgtaggggcgttttcgttgtttcgttaatttttcgtttatcgtcgtcgtcggagggggttgggaagtcgtttgggtatatacgtgtcgttttcgttggggtcgcggagttgcgggggagatgcgggtcgttgtcggcgtcgtttcggggcgtttcgtttcgttttagttttcggcgttttgacgtcgttttcgttttatagttttttttttcgggaggggcgtagattcgatcgtttttagtttcgagttttcgtcgtcgcgagggggtcgtttttggattcgtgtaattcgtttttttttttttattttttttttttttttttttt

SEQ ID NO: 2870 - DNA, 1090 bp, Artificial Sequence
  chemically treated genomic DNA (Homo sapiens) CpG-island No: 2870
aaaaaaaaaaaaaaaaaaaaataaaaaaaaaaaaacgaattacacgaatccaaaaacgaccccctcgcgacgacgaaaactcgaaactaaaaacgatcgaatctacgcccctcccgaaaaaaaaaactataaaacgaaaacgacgtcaaaacgccgaaaactaaaacgaaacgaaacgccccgaaacgacgccgacaacgacccgcatctcccccgcaactccgcgaccccaacgaaaacgacacgtatatacccaaacgacttcccaaccccctccgacgacgacgataaacgaaaaattaacgaaacaacgaaaacgcccctacaaacccccgccgctcgacgacgccgctccgaaacccgcgcgaccccctcaaccgaaacctcctcgacaaacgacgaaacgaaaacaccgcaacgccgacaactcccgcgccgacgactcgaactccccgcaataaccgcgaaaaactcgaattaaaaacgaacgacgcgaaactaacgaaaaaaaacgacgcgaccgaaaaaaaaaacgccaaaccgaacccgtaaacaccgcaaaacgcgcgaaccgaaccgaaaccgaaaaccaacaataacaaaccgccaactctcccctctccccgacgcacccgctccgaaaaaaaaacgataaacgcgcgcaaaatccgacccgaaatcgccgcccgaaactaaccgccgcaacccgcttaaacgccccaaaaaccgacccgaaaacccgtactaaaatttccttcctttcgcctcctctcgcctcctccctaaaaaaacaaaaaaaaaaaaaacgacgtactaaacccccgcgttaaaacgaaaaatcgaaaaaaaaaaacaaacgtaaaaaaaacccgaaacgaattttccaataaaataaaaaaaaaaacgccgaacccgaaaaaaaaaaacgcaaataaaaaaatctaaaaaaattatacaaaacccgaattaaattaaataaaaataaaaaaaacgatattaaaacgaaaaattaaaaaataaatacgacataaccaaacgcacccgaaacacgcaaatttcgaaccgaattctttcttaaaaaacgaaataa

SEQ ID NO: 2871 - DNA, 1090 bp, Artificial Sequence
  chemically treated genomic DNA (Homo sapiens) CpG-island No: 2871
aaaaaaaaaaaaaaaagaaaatagaaaaaaagaggcggattatacggatttaaaggcggttttttcgcggcggcggaggttcgggattgggggcgatcgggtttgcgtttttttcggggagggaggttgtggggcgggggcggcgttagagcgtcgggggttggggcgaggcggagcgtttcgaggcggcgtcggtagcggttcgtatttttttcgtagtttcgcggttttaacggaggcggtacgtgtgtgtttaggcgattttttagtttttttcgacggcggcggtggacgaggggttaacggggtagcgggggcgtttttgtaggttttcgtcgttcggcggcgtcgtttcggggttcgcgcggtttttttagtcggggttttttcggtagacggcggggcgggggtatcgtagcgtcgatagttttcgcgtcgacggttcgggtttttcgtagtggtcgcggggagttcgggttgggggcgggcggcgcggagttggcggagaggggcggcgcggtcggaggggggggcgttaggtcgggttcgtgggtatcgtaggacgcgcggatcgagtcggagtcgggaattagtaatgataagtcgttagttttttttttttttcggcgtattcgtttcgggaggggggcggtgggcgcgcgtaaaattcggttcggagtcgtcgttcgggattggtcgtcgtaattcgtttgagcgttttaggagtcggttcgaaaattcgtgttggagttttttttttttcgttttttttcgttttttttttggaaaagtagagagagggaaagcgacgtgttggattttcgcgttggagcggggagtcggggaagggagataggcgtaaggaagattcggagcggattttttagtgaagtaaaaggaaaggcgtcgagttcggggaaggagggcgtaaatggggagatttggaagggttgtgtaaaattcgagttggattagataaagatgggagaaacggtgttggagcggggggttggggggtagatgcgatatggttaaacgtattcggggtacgtaaatttcgggtcggatttttttttgggagacggagtaa

SEQ ID NO: 2872 - DNA, 1090 bp, Artificial Sequence
  chemically treated genomic DNA (Homo sapiens) CpG-island No: 2872
ttactccgtctcccaaaaaaaaatccgacccgaaatttacgtaccccgaatacgtttaaccatatcgcatctaccccccaaccccccgctccaacaccgtttctcccatctttatctaatccaactcgaattttacacaacccttccaaatctccccatttacgccctccttccccgaactcgacgcctttccttttacttcactaaaaaatccgctccgaatcttccttacgcctatctcccttccccgactccccgctccaacgcgaaaatccaacacgtcgctttccctctctctacttttccaaaaaaaaaacgaaaaaaaacgaaaaaaaaaaaactccaacacgaattttcgaaccgactcctaaaacgctcaaacgaattacgacgaccaatcccgaacgacgactccgaaccgaattttacgcgcgcccaccgcccccctcccgaaacgaatacgccgaaaaaaaaaaaaaactaacgacttatcattactaattcccgactccgactcgatccgcgcgtcctacgatacccacgaacccgacctaacgcccccccctccgaccgcgccgcccctctccgccaactccgcgccgcccgcccccaacccgaactccccgcgaccactacgaaaaacccgaaccgtcgacgcgaaaactatcgacgctacgatacccccgccccgccgtctaccgaaaaaaccccgactaaaaaaaccgcgcgaaccccgaaacgacgccgccgaacgacgaaaacctacaaaaacgcccccgctaccccgttaacccctcgtccaccgccgccgtcgaaaaaaactaaaaaatcgcctaaacacacacgtaccgcctccgttaaaaccgcgaaactacgaaaaaaatacgaaccgctaccgacgccgcctcgaaacgctccgcctcgccccaacccccgacgctctaacgccgcccccgccccacaacctccctccccgaaaaaaacgcaaacccgatcgcccccaatcccgaacctccgccgccgcgaaaaaaccgcctttaaatccgtataatccgcctctttttttctattttctttttttttttttttt

SEQ ID NO: 2873 - DNA, 691 bp, Artificial Sequence
  chemically treated genomic DNA (Homo sapiens) CpG-island No: 2873
cgggttcgtcgagtcgtaggagagatacgttgggtcgattttagagcggcgttggataggtgagtgtttgcgggtttagggcgaggggcgaagtcgtatttgggttaggtgtgcggggcgcgcggaagaggggaggcgggaaggatgggaggtcggggtttgttttggtcgcgagggcggaggggacgttggagtcgcgcggggtatcgtatttgagcgggaggggcgtcgggggtagttcgtattttatttttattggcgaggggttcgggaggggcggtttttacggagttttcggggcgcgggggtgcggacgggcgatcgtagggtgtttggcggggggaggggatagcgagtgtgttcgcgcgcgcgttagtttttgtggggaagcggcgtcgcggtgtttgcgtgttttcggtgcgtgtgcgcgcgggtttttggcgttttgtttgtgtaggtgtttgggtgtgagcggagggggtgcgtgtgcgtgtgcgcgtcgcgcgtcggtttcgggttttagaggattcgtgtcggggattggtattataggatgttgggcgagggggttgtttttttttgggaggtagtggcgcgggggatggggaggggttcgtttgggtgttaagtcggtcgtagttcggggggcgtcgttgttaggaagagggggtgtagttaggtagtatttttt

SEQ ID NO: 2874 - DNA, 691 bp, Artificial Sequence
  chemically treated genomic DNA (Homo sapiens) CpG-island No: 2874
aaaaaatactacctaactacaccccctcttcctaacaacgacgccccccgaactacgaccgacttaacacccaaacgaacccctccccatcccccgcgccactacctcccaaaaaaaaacaaccccctcgcccaacatcctataataccaatccccgacacgaatcctctaaaacccgaaaccgacgcgcgacgcgcacacgcacacgcaccccctccgctcacacccaaacacctacacaaacaaaacgccaaaaacccgcgcgcacacgcaccgaaaacacgcaaacaccgcgacgccgcttccccacaaaaactaacgcgcgcgcgaacacactcgctatcccctccccccgccaaacaccctacgatcgcccgtccgcacccccgcgccccgaaaactccgtaaaaaccgcccctcccgaacccctcgccaataaaaataaaatacgaactacccccgacgcccctcccgctcaaatacgataccccgcgcgactccaacgtcccctccgccctcgcgaccaaaacaaaccccgacctcccatccttcccgcctcccctcttccgcgcgccccgcacacctaacccaaatacgacttcgcccctcgccctaaacccgcaaacactcacctatccaacgccgctctaaaatcgacccaacgtatctctcctacgactcgacgaacccg

SEQ ID NO: 2875 - DNA, 691 bp, Artificial Sequence
  chemically treated genomic DNA (Homo sapiens) CpG-island No: 2875
agaaggtgttgtttggttgtattttttttttttgatagcggcgtttttcggattgcggtcggtttgatatttagacggatttttttttatttttcgcgttattgttttttagagaaaaataattttttcgtttagtattttgtggtgttaattttcgatacggattttttggggttcggggtcggcgcgcggcgcgtatacgtatacgtatttttttcgtttatatttagatatttatataaatagggcgttaaggattcgcgcgtatacgtatcggggatacgtaggtatcgcggcgtcgtttttttataaaggttggcgcgcgcgcgggtatattcgttgtttttttttttcgttaggtattttgcggtcgttcgttcgtattttcgcgtttcgggagtttcgtgggggtcgtttttttcgggtttttcgttagtgggggtgaggtgcgggttgttttcgacgtttttttcgtttaggtgcggtgtttcgcgcggttttagcgtttttttcgttttcgcggttaggataggtttcggttttttatttttttcgttttttttttttcgcgcgtttcgtatatttggtttaggtgcggtttcgtttttcgttttgggttcgtagatatttatttgtttagcgtcgttttggggtcggtttagcgtgttttttttgcggttcggcgaattcg

SEQ ID NO: 2876 - DNA, 691 bp, Artificial Sequence
  chemically treated genomic DNA (Homo sapiens) CpG-island No: 2876
cgaattcgccgaaccgcaaaaaaaacacgctaaaccgaccccaaaacgacgctaaacaaataaatatctacgaacccaaaacgaaaaacgaaaccgcacctaaaccaaatatacgaaacgcgcgaaaaaaaaaaaacgaaaaaaataaaaaaccgaaacctatcctaaccgcgaaaacgaaaaaaacgctaaaaccgcgcgaaacaccgcacctaaacgaaaaaaacgtcgaaaacaacccgcacctcacccccactaacgaaaaacccgaaaaaaacgacccccacgaaactcccgaaacgcgaaaatacgaacgaacgaccgcaaaatacctaacgaaaaaaaaaaacaacgaatatacccgcgcgcgcgccaacctttataaaaaaacgacgccgcgatacctacgtatccccgatacgtatacgcgcgaatccttaacgccctatttatataaatatctaaatataaacgaaaaaaatacgtatacgtatacgcgccgcgcgccgaccccgaaccccaaaaaatccgtatcgaaaattaacaccacaaaatactaaacgaaaaaattatttttctctaaaaaacaataacgcgaaaaataaaaaaaaatccgtctaaatatcaaaccgaccgcaatccgaaaaacgccgctatcaaaaaaaaaaaatacaaccaaacaacaccttct

SEQ ID NO: 2877 - DNA, 1216 bp, Artificial Sequence
  chemically treated genomic DNA (Homo sapiens) CpG-island No: 2877
gttaatcgcgagcgtaggtaggtttatagatttatacgggttatgtttatttacgtttttacgacggttaatcgtgagtgcgggtaggtttatagatttatacgggttatgtttatttaggtttttacgacggttaattgcgagtgcgggtaggtttatagatttatacgggttatgtttatttacgtttttacgacggttaatcgcgagtgcgggtaggtttatagatttattcgggttatgtttatggggttttttacgacggttagtcgcgagtgcgggtaggtttatagatttatacgggttatgtttgtggggttttttacgacggttagttgcgagtgcgggtaggtttatagatttatacgggttatgtttatggggttttttacgacggttaatcgcgaatgcgggtaggtttatagatttatatgggttatgtttatttatatttttacgatggttaatcgcgagtgcgggtaggtttatagatttatacgggttatgtttatttaggtttttacgacggttaatcgcgagtgcgggtaggtttatagatttatacgggttatgtttatttaggtttttataacggttaatcgcgagtgcgggtaggtttatagatttatacgggttatgtttatggggttttttacgacggttaatcgcgaatgcgggtaggtttatagatttatatgggttatgtttatttatatttttacgatggttaatcgcgagtgcgggtaggtttatagatttatacgggttatgtttatttaggtttttacgatggttaatcgcgagtgcgggtaggtttatagatttatacgggttatgtttatttaggtttttacgacggttaatcgtgagtataggtaggtttatagatttatacgggttatgtttatggggttttttacgacggttaatcgcgagcgcgggtaggtttatagatttatacgggttatgtttatttatgtttttacgacggttaatcgtgagtataggtaggtttatagatttatacgggttatgtttatttaggtttttacgacggttaatcgcgagcgtaggtaggtttatagatttatacgggttatgtttatttatgtttttacgacggttaatcgcgagcgtaggtaggtttatagatgttttcgtaaagagaagagttttgttgtaggattgtttttttgtgaggtaatttttgtttaga

SEQ ID NO: 2878 - DNA, 1216 bp, Artificial Sequence
  chemically treated genomic DNA (Homo sapiens) CpG-island No: 2878
tctaaacaaaaattacctcacaaaaaaacaatcctacaacaaaactcttctctttacgaaaacatctataaacctacctacgctcgcgattaaccgtcgtaaaaacataaataaacataacccgtataaatctataaacctacctacgctcgcgattaaccgtcgtaaaaacctaaataaacataacccgtataaatctataaacctacctatactcacgattaaccgtcgtaaaaacataaataaacataacccgtataaatctataaacctacccgcgctcgcgattaaccgtcgtaaaaaaccccataaacataacccgtataaatctataaacctacctatactcacgattaaccgtcgtaaaaacctaaataaacataacccgtataaatctataaacctacccgcactcgcgattaaccatcgtaaaaacctaaataaacataacccgtataaatctataaacctacccgcactcgcgattaaccatcgtaaaaatataaataaacataacccatataaatctataaacctacccgcattcgcgattaaccgtcgtaaaaaaccccataaacataacccgtataaatctataaacctacccgcactcgcgattaaccgttataaaaacctaaataaacataacccgtataaatctataaacctacccgcactcgcgattaaccgtcgtaaaaacctaaataaacataacccgtataaatctataaacctacccgcactcgcgattaaccatcgtaaaaatataaataaacataacccatataaatctataaacctacccgcattcgcgattaaccgtcgtaaaaaaccccataaacataacccgtataaatctataaacctacccgcactcgcaactaaccgtcgtaaaaaaccccacaaacataacccgtataaatctataaacctacccgcactcgcgactaaccgtcgtaaaaaaccccataaacataacccgaataaatctataaacctacccgcactcgcgattaaccgtcgtaaaaacgtaaataaacataacccgtataaatctataaacctacccgcactcgcaattaaccgtcgtaaaaacctaaataaacataacccgtataaatctataaacctacccgcactcacgattaaccgtcgtaaaaacgtaaataaacataacccgtataaatctataaacctacctacgctcgcgattaac

SEQ ID NO: 2879 - DNA, 1216 bp, Artificial Sequence
  chemically treated genomic DNA (Homo sapiens) CpG-island No: 2879
tttgagtaagggttattttataggaaggtagttttgtagtaagatttttttttttacggagatatttgtgaatttgtttgcgttcgcggttggtcgtcgtagaagtatggataagtatagttcgtgtgaatttgtgaatttgtttgcgttcgcggttggtcgtcgtagaagtttggataagtatagttcgtgtgaatttgtgaatttgtttgtgtttacggttggtcgtcgtagaagtatggataagtatagttcgtgtgaatttgtgaatttgttcgcgttcgcggttggtcgtcgtagaaggttttataagtatagttcgtgtgaatttgtgaatttgtttgtgtttacggttggtcgtcgtagaagtttggataagtatagttcgtgtgaatttgtgaatttgttcgtattcgcggttggttatcgtagaagtttggataagtatagttcgtgtgaatttgtgaatttgttcgtattcgcggttggttatcgtagaagtgtggataagtatagtttatgtgaatttgtgaatttgttcgtattcgcggttggtcgtcgtagaaggttttataagtatagttcgtgtgaatttgtgaatttgttcgtattcgcggttggtcgttgtagaagtttggataagtatagttcgtgtgaatttgtgaatttgttcgtattcgcggttggtcgtcgtagaagtttggataagtatagttcgtgtgaatttgtgaatttgttcgtattcgcggttggttatcgtagaagtgtggataagtatagtttatgtgaatttgtgaatttgttcgtattcgcggttggtcgtcgtagaaggttttataagtatagttcgtgtgaatttgtgaatttgttcgtattcgtagttggtcgtcgtagaaggttttataagtatagttcgtgtgaatttgtgaatttgttcgtattcgcggttggtcgtcgtagaaggttttataagtatagttcgggtgaatttgtgaatttgttcgtattcgcggttggtcgtcgtagaagcgtggataagtatagttcgtgtgaatttgtgaatttgttcgtattcgtagttggtcgtcgtagaagtttagataagtatagttcgtgtgaatttgtgaatttgttcgtatttacggttggtcgtcgtagaagcgtggataagtatagttcgtgtgaatttgtgaatttgtttgcgttcgcggttggt

SEQ ID NO: 2880 - DNA, 1216 bp, Artificial Sequence
  chemically treated genomic DNA (Homo sapiens) CpG-island No: 2880
accaaccgcgaacgcaaacaaattcacaaattcacacgaactatacttatccacgcttctacgacgaccaaccgtaaatacgaacaaattcacaaattcacacgaactatacttatctaaacttctacgacgaccaactacgaatacgaacaaattcacaaattcacacgaactatacttatccacgcttctacgacgaccaaccgcgaatacgaacaaattcacaaattcacccgaactatacttataaaaccttctacgacgaccaaccgcgaatacgaacaaattcacaaattcacacgaactatacttataaaaccttctacgacgaccaactacgaatacgaacaaattcacaaattcacacgaactatacttataaaaccttctacgacgaccaaccgcgaatacgaacaaattcacaaattcacataaactatacttatccacacttctacgataaccaaccgcgaatacgaacaaattcacaaattcacacgaactatacttatccaaacttctacgacgaccaaccgcgaatacgaacaaattcacaaattcacacgaactatacttatccaaacttctacaacgaccaaccgcgaatacgaacaaattcacaaattcacacgaactatacttataaaaccttctacgacgaccaaccgcgaatacgaacaaattcacaaattcacataaactatacttatccacacttctacgataaccaaccgcgaatacgaacaaattcacaaattcacacgaactatacttatccaaacttctacgataaccaaccgcgaatacgaacaaattcacaaattcacacgaactatacttatccaaacttctacgacgaccaaccgtaaacacaaacaaattcacaaattcacacgaactatacttataaaaccttctacgacgaccaaccgcgaacgcgaacaaattcacaaattcacacgaactatacttatccatacttctacgacgaccaaccgtaaacacaaacaaattcacaaattcacacgaactatacttatccaaacttctacgacgaccaaccgcgaacgcaaacaaattcacaaattcacacgaactatacttatccatacttctacgacgaccaaccgcgaacgcaaacaaattcacaaatatctccgtaaaaaaaaaaatcttactacaaaactaccttcctataaaataacccttactcaaa

SEQ ID NO: 2881 - DNA, 887 bp, Artificial Sequence
  chemically treated genomic DNA (Homo sapiens) CpG-island No: 2881
cgggacggacgttttagatcgggttttcgtcggttgtttcgttttcggttttattcgcggtttcgggtttcgcgtttcgatcgagtcgttttcgcgtagtaggaggttttcggtatttcgtaggcgtcggttcggcgagtttcgtagttcgcggtagttttggaagtatacggtttacgtttgtttttcgttgagcggttgttcgtaggtatttagttttttttttaggtatagttcgttagggtttcggtcgttttgcgttcgtcgcggacgtcgtcgtagttgttcgttcgggttatggcggggtcgttatcgtttttcgcgcgtcggattcgcgtttatgtagtcgcgtttttcgtcgcgtagggttagtttggtcgtttcgtttcgcgcgagcgttttaggttgggggcggggcggcgacgggggcggggcgcggagggcgcggggggcggggcgcggagggggagggacgcggggcggggcggggagtggagggcgcgcggggagaggttcggagggggacgggtgaggggtagggcggggcgcgggtaggtgcggaggggttggggtttagggttggggacgcgggggcgcggggtcgaggtcggggtgcgaattttttcggggtgttgggtaggatcggggggagggttgggggttgtagatatgggttagggttcgcgcgttcggatacgcggtgatattttcggcgttttttcgtagatttagacggtcgatgtttataaaagttcgggtcggtatttagttcgggatattgcggtgatcgcggggggtttgggaggtttgtcgttgggaacgcgggagggagtcgggaggagttgagtagataaagttcgtagtggttttttcgagtttcgggtaag

SEQ ID NO: 2882 - DNA, 887 bp, Artificial Sequence
  chemically treated genomic DNA (Homo sapiens) CpG-island No: 2882
cttacccgaaactcgaaaaaaccactacgaactttatctactcaactcctcccgactccctcccgcgttcccaacgacaaacctcccaaaccccccgcgatcaccgcaatatcccgaactaaataccgacccgaacttttataaacatcgaccgtctaaatctacgaaaaaacgccgaaaatatcaccgcgtatccgaacgcgcgaaccctaacccatatctacaacccccaaccctccccccgatcctacccaacaccccgaaaaaattcgcaccccgacctcgaccccgcgcccccgcgtccccaaccctaaaccccaacccctccgcacctacccgcgccccgccctacccctcacccgtccccctccgaacctctccccgcgcgccctccactccccgccccgccccgcgtccctccccctccgcgccccgccccccgcgccctccgcgccccgcccccgtcgccgccccgcccccaacctaaaacgctcgcgcgaaacgaaacgaccaaactaaccctacgcgacgaaaaacgcgactacataaacgcgaatccgacgcgcgaaaaacgataacgaccccgccataacccgaacgaacaactacgacgacgtccgcgacgaacgcaaaacgaccgaaaccctaacgaactatacctaaaaaaaaaactaaatacctacgaacaaccgctcaacgaaaaacaaacgtaaaccgtatacttccaaaactaccgcgaactacgaaactcgccgaaccgacgcctacgaaataccgaaaacctcctactacgcgaaaacgactcgatcgaaacgcgaaacccgaaaccgcgaataaaaccgaaaacgaaacaaccgacgaaaacccgatctaaaacgtccgtcccg

SEQ ID NO: 2883 - DNA, 887 bp, Artificial Sequence
  chemically treated genomic DNA (Homo sapiens) CpG-island No: 2883
tttgttcggggttcggggaggttattgcgggttttgtttgtttagtttttttcggttttttttcgcgtttttagcggtaaattttttaggtttttcgcggttatcgtagtgtttcgggttggatgtcggttcgggtttttgtgggtatcggtcgtttgggtttgcgggggagcgtcgggggtgttatcgcgtgttcgagcgcgcgggttttggtttatgtttgtagtttttaatttttttttcggttttgtttagtatttcggaggggttcgtatttcggtttcggtttcgcgttttcgcgtttttagttttgagttttagttttttcgtatttattcgcgtttcgttttgttttttattcgttttttttcgggttttttttcgcgcgttttttatttttcgtttcgtttcgcgttttttttttttcgcgtttcgtttttcgcgtttttcgcgtttcgttttcgtcgtcgtttcgtttttaatttgaggcgttcgcgcggggcggggcggttaggttgattttgcgcggcggaaggcgcggttgtatggacgcgggttcggcgcgcgggaggcgatgacggtttcgttatggttcgggcgggtagttgcggcggcgttcgcggcgggcgtaaggcggtcggagttttggcgagttgtatttggaggaggagttgaatgtttacgagtagtcgtttaacgaggagtaggcgtgggtcgtgtgtttttagggttgtcgcgggttgcggggttcgtcgggtcggcgtttgcgggatatcggggattttttgttgcgcggggacggttcggtcggggcgcgggattcgaggtcgcgggtgaggtcgggggcggggtagtcggcggggattcggtttggggcgttcgtttcg

SEQ ID NO: 2884 - DNA, 887 bp, Artificial Sequence
  chemically treated genomic DNA (Homo sapiens) CpG-island No: 2884
cgaaacgaacgccccaaaccgaatccccgccgactaccccgcccccgacctcacccgcgacctcgaatcccgcgccccgaccgaaccgtccccgcgcaacaaaaaatccccgatatcccgcaaacgccgacccgacgaaccccgcaacccgcgacaaccctaaaaacacacgacccacgcctactcctcgttaaacgactactcgtaaacattcaactcctcctccaaatacaactcgccaaaactccgaccgccttacgcccgccgcgaacgccgccgcaactacccgcccgaaccataacgaaaccgtcatcgcctcccgcgcgccgaacccgcgtccatacaaccgcgccttccgccgcgcaaaatcaacctaaccgccccgccccgcgcgaacgcctcaaattaaaaacgaaacgacgacgaaaacgaaacgcgaaaaacgcgaaaaacgaaacgcgaaaaaaaaaaaacgcgaaacgaaacgaaaaataaaaaacgcgcgaaaaaaaacccgaaaaaaaacgaataaaaaacaaaacgaaacgcgaataaatacgaaaaaactaaaactcaaaactaaaaacgcgaaaacgcgaaaccgaaaccgaaatacgaacccctccgaaatactaaacaaaaccgaaaaaaaaattaaaaactacaaacataaaccaaaacccgcgcgctcgaacacgcgataacacccccgacgctcccccgcaaacccaaacgaccgatacccacaaaaacccgaaccgacatccaacccgaaacactacgataaccgcgaaaaacctaaaaaatttaccgctaaaaacgcgaaaaaaaaccgaaaaaaactaaacaaacaaaacccgcaataacctccccgaaccccgaacaaa

SEQ ID NO: 2885 - DNA, 662 bp, Artificial Sequence
  chemically treated genomic DNA (Homo sapiens) CpG-island No: 2885
cgcgagacgttttcgcggattatatcgcggcggtaaagttaaacgtaaaaattattttatcgcgcgtaggcgttttttttaggattaatatggttacgacgtaaggtttcgatttgaggggcgtggtttggtcgtcgttagttaacgggtgtgcgcgtttggtcgtagttaataggaaggtagcgcgggttcgggcgtagggagtcgtcgtcggggttgtaggcgttaaggttatgttcgattcgtgggtttcgaatttcgtttcgggttaggatttagggggtcgtcggagggtttgggtcgagttgttgggtaggtgggcgcggtaggtcgcgggagtgggcggcgttcggttcgggacggtttcgtcggtttttcgattttttttcgttagagttttcgtcggtcggattttcggacgtcgcgttcggggggttgtgcggggtgggcgttcggttggggcggcgcggttgtttcggattcggttttttttgcgtttgggcggacgtttattagatcgtcgttcgcggggcgtttttttttttttcgaacgtcgttttcgtcggtcgttttgttaggcgggtttggggtgcgcggtttggggttttttttagcgtagaggtcgtttttcgttagtcgttttcgggtttttttgtttcggg

SEQ ID NO: 2886 - DNA, 662 bp, Artificial Sequence
  chemically treated genomic DNA (Homo sapiens) CpG-island No: 2886
cccgaaacaaaaaaacccgaaaacgactaacgaaaaacgacctctacgctaaaaaaaaccccaaaccgcgcaccccaaacccgcctaacaaaacgaccgacgaaaacgacgttcgaaaaaaaaaaaaacgccccgcgaacgacgatctaataaacgtccgcccaaacgcaaaaaaaaccgaatccgaaacaaccgcgccgccccaaccgaacgcccaccccgcacaaccccccgaacgcgacgtccgaaaatccgaccgacgaaaactctaacgaaaaaaaatcgaaaaaccgacgaaaccgtcccgaaccgaacgccgcccactcccgcgacctaccgcgcccacctacccaacaactcgacccaaaccctccgacgaccccctaaatcctaacccgaaacgaaattcgaaacccacgaatcgaacataaccttaacgcctacaaccccgacgacgactccctacgcccgaacccgcgctaccttcctattaactacgaccaaacgcgcacacccgttaactaacgacgaccaaaccacgcccctcaaatcgaaaccttacgtcgtaaccatattaatcctaaaaaaaacgcctacgcgcgataaaataatttttacgtttaactttaccgccgcgatataatccgcgaaaacgtctcgcg

SEQ ID NO: 2887 - DNA, 662 bp, Artificial Sequence
  chemically treated genomic DNA (Homo sapiens) CpG-island No: 2887
ttcgaggtaggggagttcggggacggttggcgaggggcggtttttgcgttgaggggagttttaggtcgcgtattttaggttcgtttgatagggcggtcggcgggggcggcgttcgggaaagaagggagcgtttcgcgggcggcggtttggtgggcgttcgtttaggcgtaggaggggtcgggttcgaggtagtcgcgtcgttttagtcgggcgtttatttcgtatagtttttcgggcgcggcgttcggggattcgatcggcggaggttttggcgggaagggatcggggaatcggcgaaatcgtttcgggtcggacgtcgtttattttcgcggtttgtcgcgtttatttatttagtagttcggtttaggtttttcggcggttttttgggttttggttcgaggcggagttcgggatttacgagtcggatatggttttggcgtttatagtttcggcggcggttttttgcgttcgagttcgcgttgtttttttattggttgcggttaggcgcgtatattcgttggttggcggcggttaggttacgttttttaggtcgaggttttgcgtcgtggttatgttggttttgggggaggcgtttgcgcgcggtgaggtagtttttgcgtttggttttgtcgtcgcggtgtagttcgcgggggcgtttcgcg

SEQ ID NO: 2888 - DNA, 662 bp, Artificial Sequence
  chemically treated genomic DNA (Homo sapiens) CpG-island No: 2888
cgcgaaacgcccccgcgaactacaccgcgacgacaaaaccaaacgcaaaaactacctcaccgcgcgcaaacgcctcccccaaaaccaacataaccacgacgcaaaacctcgacctaaaaaacgtaacctaaccgccgccaaccaacgaatatacgcgcctaaccgcaaccaataaaaaaacaacgcgaactcgaacgcaaaaaaccgccgccgaaactataaacgccaaaaccatatccgactcgtaaatcccgaactccgcctcgaaccaaaacccaaaaaaccgccgaaaaacctaaaccgaactactaaataaataaacgcgacaaaccgcgaaaataaacgacgtccgacccgaaacgatttcgccgattccccgatcccttcccgccaaaacctccgccgatcgaatccccgaacgccgcgcccgaaaaactatacgaaataaacgcccgactaaaacgacgcgactacctcgaacccgacccctcctacgcctaaacgaacgcccaccaaaccgccgcccgcgaaacgctcccttctttcccgaacgccgcccccgccgaccgccctatcaaacgaacctaaaatacgcgacctaaaactcccctcaacgcaaaaaccgcccctcgccaaccgtccccgaactcccctacctcgaa

SEQ ID NO: 2889 - DNA, 1296 bp, Artificial Sequence
  chemically treated genomic DNA (Homo sapiens) CpG-island No: 2889
ttcgatttattttaaaggcgtgtcgagtgggaaggtaatattttgattttttaaacgttgcggttagcggttttttttacggtaggcgtttttaggttttttcgtagggtcgggatttcgggcggcgcgcggtttttgggacgtcgagggaggtcgggtttatagcgttcggagcgcggatagcggttatagttcgtcgtttagaagcggcgtcgttcggggcggagggcggagtcgagcgcgcgtttcgtttcgtttcgtttcgtttcgtagttttagtttagcgcgcgtattaaggcggggcggcgcgcgggttcgtgcgcgtgttcggggttaggaggcggtggcggcgagcgcgggtcgcgcgtgcgcgttgcggttgggcgaggggcggcgcgggcgcgcgtttgttagtgatagcgggcggggtaggggtcggagatggtggcggcggtagttttttcgatatgaggtagcggtcgcgggggatacggcggcgggcgcggcggcggtcgtatttttagttcggggaggcggttttcggcgtgggcgcgggcgggcgggcgtttcggtcggcgtcgcgggagttcggttttgcggtagcgtttgtatcgtcgttcggcgaggggttcgcgttcgtggttttacgcgttcggtttcgggatagttgcggtcgcggcgggagcggcggcgtattcggggggaagtaggttttattagacgggtcgcgtcgacgggtttcgcgtattcgtagttcggggcgtttttatttttagcgttcgtcgtcgcgggtagggtcggttcggagcgcggggggcggtcggggagcgcgggtcgggggcgttcgtcgaagttcgttgtttcgggtcggggtcggggtcggggtcggtcgcgcgtcgtttttgacgtatcggagcgcggtttttgtaggatggagggtttcgcgtcgttagcggagttgtttgtgcgtaggcggttcgcggggttgggagcgtttaaggtttgaattttttttcggagtcgtagttggaggaggcgagcgcgcgaggaggagaagtcgcgcggcgcggaggttattttcggggcgagaggcgcggaaggcgagcgagtaaagcggtttcggagttacggcggttacgcggcggggattttcgggcgttttaggttcgtttcgagcggttttcgtgcgtttcgaaggtgggggcggtgggggcggtgggagtatcgttgagtcgggaattataggaatagatggtgtttgtttaggtcgcgtgttggagtcgttttttaggatag

SEQ ID NO: 2890 - DNA, 1296 bp, Artificial Sequence
  chemically treated genomic DNA (Homo sapiens) CpG-island No: 2890
ctatcctaaaaaacgactccaacacgcgacctaaacaaacaccatctattcctataattcccgactcaacgatactcccaccgcccccaccgcccccaccttcgaaacgcacgaaaaccgctcgaaacgaacctaaaacgcccgaaaatccccgccgcgtaaccgccgtaactccgaaaccgctttactcgctcgccttccgcgcctctcgccccgaaaataacctccgcgccgcgcgacttctcctcctcgcgcgctcgcctcctccaactacgactccgaaaaaaaattcaaaccttaaacgctcccaaccccgcgaaccgcctacgcacaaacaactccgctaacgacgcgaaaccctccatcctacaaaaaccgcgctccgatacgtcaaaaacgacgcgcgaccgaccccgaccccgaccccgacccgaaacaacgaacttcgacgaacgcccccgacccgcgctccccgaccgccccccgcgctccgaaccgaccctacccgcgacgacgaacgctaaaaataaaaacgccccgaactacgaatacgcgaaacccgtcgacgcgacccgtctaataaaacctacttccccccgaatacgccgccgctcccgccgcgaccgcaactatcccgaaaccgaacgcgtaaaaccacgaacgcgaacccctcgccgaacgacgatacaaacgctaccgcaaaaccgaactcccgcgacgccgaccgaaacgcccgcccgcccgcgcccacgccgaaaaccgcctccccgaactaaaaatacgaccgccgccgcgcccgccgccgtatcccccgcgaccgctacctcatatcgaaaaaactaccgccgccaccatctccgacccctaccccgcccgctatcactaacaaacgcgcgcccgcgccgcccctcgcccaaccgcaacgcgcacgcgcgacccgcgctcgccgccaccgcctcctaaccccgaacacgcgcacgaacccgcgcgccgccccgccttaatacgcgcgctaaactaaaactacgaaacgaaacgaaacgaaacgaaacgcgcgctcgactccgccctccgccccgaacgacgccgcttctaaacgacgaactataaccgctatccgcgctccgaacgctataaacccgacctccctcgacgtcccaaaaaccgcgcgccgcccgaaatcccgaccctacgaaaaaacctaaaaacgcctaccgtaaaaaaaaccgctaaccgcaacgtttaaaaaatcaaaatattaccttcccactcgacacgcctttaaaataaatcgaa

SEQ ID NO: 2891 - DNA, 1296 bp, Artificial Sequence
  chemically treated genomic DNA (Homo sapiens) CpG-island No: 2891
ttgttttaaggggcggttttagtacgcgatttggataggtattatttgtttttgtggttttcggtttagcggtgtttttatcgtttttatcgtttttattttcgaggcgtacgagaatcgttcgggacggatttagaacgttcgggggttttcgtcgcgtggtcgtcgtggtttcgggatcgttttgttcgttcgtttttcgcgtttttcgtttcgagggtggttttcgcgtcgcgcggtttttttttttcgcgcgttcgttttttttagttgcggtttcggagggaagtttagattttgagcgtttttagtttcgcgagtcgtttgcgtataaataatttcgttggcggcgcggagttttttattttgtaggagtcgcgtttcgatgcgttaaaggcggcgcgcggtcggtttcggtttcgatttcgattcggagtagcgagtttcggcgggcgttttcggttcgcgtttttcggtcgtttttcgcgtttcgggtcggttttgttcgcggcggcgggcgttgggggtgggggcgtttcgggttgcgagtgcgcggagttcgtcggcgcggttcgtttagtggggtttgttttttttcgagtgcgtcgtcgttttcgtcgcggtcgtagttgtttcgggatcgagcgcgtggaattacggacgcgggtttttcgtcgggcggcggtgtagacgttgtcgtagagtcgggttttcgcgacgtcggtcgggacgttcgttcgttcgcgtttacgtcgggggtcgttttttcgagttagagatgcggtcgtcgtcgcgttcgtcgtcgtgtttttcgcggtcgttgttttatgtcggaagagttgtcgtcgttattattttcggtttttgtttcgttcgttgttattgatagacgcgcgttcgcgtcgtttttcgtttagtcgtagcgcgtacgcgcggttcgcgttcgtcgttatcgttttttggtttcggatacgcgtacgggttcgcgcgtcgtttcgttttggtgcgcgcgttgggttggggttgcggggcggggcggggcggggcggggcgcgcgttcggtttcgtttttcgtttcgggcggcgtcgtttttaggcggcgggttgtggtcgttgttcgcgtttcgggcgttgtgggttcggtttttttcggcgttttagaggtcgcgcgtcgttcggggtttcgattttgcggagagatttgaaggcgtttgtcgtggaagaagtcgttggtcgtaacgtttgggaaattaaaatgttgtttttttattcggtacgtttttgggataaatcgaa

SEQ ID NO: 2892 - DNA, 1296 bp, Artificial Sequence
  chemically treated genomic DNA (Homo sapiens) CpG-island No: 2892
ttcgatttatcccaaaaacgtaccgaataaaaaaacaacattttaatttcccaaacgttacgaccaacgacttcttccacgacaaacgccttcaaatctctccgcaaaatcgaaaccccgaacgacgcgcgacctctaaaacgccgaaaaaaaccgaacccacaacgcccgaaacgcgaacaacgaccacaacccgccgcctaaaaacgacgccgcccgaaacgaaaaacgaaaccgaacgcgcgccccgccccgccccgccccgccccgcaaccccaacccaacgcgcgcaccaaaacgaaacgacgcgcgaacccgtacgcgtatccgaaaccaaaaaacgataacgacgaacgcgaaccgcgcgtacgcgctacgactaaacgaaaaacgacgcgaacgcgcgtctatcaataacaacgaacgaaacaaaaaccgaaaataataacgacgacaactcttccgacataaaacaacgaccgcgaaaaacacgacgacgaacgcgacgacgaccgcatctctaactcgaaaaaacgacccccgacgtaaacgcgaacgaacgaacgtcccgaccgacgtcgcgaaaacccgactctacgacaacgtctacaccgccgcccgacgaaaaacccgcgtccgtaattccacgcgctcgatcccgaaacaactacgaccgcgacgaaaacgacgacgcactcgaaaaaaaacaaaccccactaaacgaaccgcgccgacgaactccgcgcactcgcaacccgaaacgcccccacccccaacgcccgccgccgcgaacaaaaccgacccgaaacgcgaaaaacgaccgaaaaacgcgaaccgaaaacgcccgccgaaactcgctactccgaatcgaaatcgaaaccgaaaccgaccgcgcgccgcctttaacgcatcgaaacgcgactcctacaaaataaaaaactccgcgccgccaacgaaattatttatacgcaaacgactcgcgaaactaaaaacgctcaaaatctaaacttccctccgaaaccgcaactaaaaaaaacgaacgcgcgaaaaaaaaaaaccgcgcgacgcgaaaaccaccctcgaaacgaaaaacgcgaaaaacgaacgaacaaaacgatcccgaaaccacgacgaccacgcgacgaaaacccccgaacgttctaaatccgtcccgaacgattctcgtacgcctcgaaaataaaaacgataaaaacgataaaaacaccgctaaaccgaaaaccacaaaaacaaataatacctatccaaatcgcgtactaaaaccgccccttaaaacaa

SEQ ID NO: 2893 - DNA, 755 bp, Artificial Sequence
  chemically treated genomic DNA (Homo sapiens) CpG-island No: 2893
cgttcgaatttttatacgttgttttcgagggggttattattcgattttgcggatagggatcgatttcgcggtcgtttagttgtgatagtgtcggtcggttcgtttcgcgtatgcgtattgtttttttttcgggttcggtttcgtttttttcgggttgcgcgtttcggatcgagttcgggattggggttagcgtaggcgtagacgtagacgtttagcggcggcgtttttagaacgttgcgttcgggagagtttcggggtcggagtcgcgtgggcgttgggggcggggcgggcgtttattgtttgagtcggatggtagagtcgttttttcgttagtttttagcgttggttcgcgtttttgggtttcgagtttagcgacgcgtaagtttcgtggtcgttagcgtcggttttgttttttcgttgttgattttcgtcgttttacgtcgcggatttagttttcgggttttgcggtcgttgtcggtgggatggggagggtcgcgaatttttgtttttttaggtatttatcgcgtggttgggagggcgttaggaggtcgaggtcggggttgttatgcgttttcggtgttttatttcgtaggtcggttcgtttcgtgggttgtggggtagacgatcgggaagtttcgagatttttagattttcgatcgggatcgaaaaggttttgaatttgtgtagtgatttgttattgagttcgggaggttttggagatttgggtgacggaagaacgtttaaggtcgattgtt

SEQ ID NO: 2894 - DNA, 755 bp, Artificial Sequence
  chemically treated genomic DNA (Homo sapiens) CpG-island No: 2894
aacaatcgaccttaaacgttcttccgtcacccaaatctccaaaacctcccgaactcaataacaaatcactacacaaattcaaaaccttttcgatcccgatcgaaaatctaaaaatctcgaaacttcccgatcgtctaccccacaacccacgaaacgaaccgacctacgaaataaaacaccgaaaacgcataacaaccccgacctcgacctcctaacgccctcccaaccacgcgataaatacctaaaaaaacaaaaattcgcgaccctccccatcccaccgacaacgaccgcaaaacccgaaaactaaatccgcgacgtaaaacgacgaaaatcaacaacgaaaaaacaaaaccgacgctaacgaccacgaaacttacgcgtcgctaaactcgaaacccaaaaacgcgaaccaacgctaaaaactaacgaaaaaacgactctaccatccgactcaaacaataaacgcccgccccgcccccaacgcccacgcgactccgaccccgaaactctcccgaacgcaacgttctaaaaacgccgccgctaaacgtctacgtctacgcctacgctaaccccaatcccgaactcgatccgaaacgcgcaacccgaaaaaaacgaaaccgaacccgaaaaaaaaacaatacgcatacgcgaaacgaaccgaccgacactatcacaactaaacgaccgcgaaatcgatccctatccgcaaaatcgaataataaccccctcgaaaacaacgtataaaaattcgaacg

SEQ ID NO: 2895 - DNA, 755 bp, Artificial Sequence
  chemically treated genomic DNA (Homo sapiens) CpG-island No: 2895
agtagtcggttttgggcgttttttcgttatttaggtttttagaatttttcggatttaatggtaagttattgtataagtttagggttttttcggtttcgatcgaggatttggagatttcggggtttttcggtcgtttgttttatagtttacgaggcggatcgatttgcggggtgaggtatcgggagcgtatggtagtttcggtttcggttttttggcgtttttttagttacgcggtgaatgtttgagaggatagaggttcgcggttttttttattttatcggtagcgatcgtaaagttcgggagttgagttcgcggcgtgaagcggcggaggttagtagcgagggggtagggtcggcgttggcggttacggagtttgcgcgtcgttgggttcggaatttagggacgcgagttagcgttgggagttggcggagagacggttttgttattcggtttaggtagtgggcgttcgtttcgtttttagcgtttacgcgatttcggtttcgaggttttttcgagcgtagcgttttggaagcgtcgtcgttaagcgtttgcgtttgcgtttgcgttgattttagtttcggattcggttcgaggcgcgtagttcggagggggcggggtcgagttcgaagggaaggtagtgcgtatgcgcggggcgagtcggtcggtattgttatagttgagcggtcgcgagatcggtttttgttcgtagggtcgggtagtggttttttcggggatagcgtgtgaggattcgggcg

SEQ ID NO: 2896 - DNA, 755 bp, Artificial Sequence
  chemically treated genomic DNA (Homo sapiens) CpG-island No: 2896
cgcccgaatcctcacacgctatccccgaaaaaaccactacccgaccctacgaacaaaaaccgatctcgcgaccgctcaactataacaataccgaccgactcgccccgcgcatacgcactaccttcccttcgaactcgaccccgccccctccgaactacgcgcctcgaaccgaatccgaaactaaaatcaacgcaaacgcaaacgcaaacgcttaacgacgacgcttccaaaacgctacgctcgaaaaaacctcgaaaccgaaatcgcgtaaacgctaaaaacgaaacgaacgcccactacctaaaccgaataacaaaaccgtctctccgccaactcccaacgctaactcgcgtccctaaattccgaacccaacgacgcgcaaactccgtaaccgccaacgccgaccctaccccctcgctactaacctccgccgcttcacgccgcgaactcaactcccgaactttacgatcgctaccgataaaataaaaaaaaccgcgaacctctatcctctcaaacattcaccgcgtaactaaaaaaacgccaaaaaaccgaaaccgaaactaccatacgctcccgatacctcaccccgcaaatcgatccgcctcgtaaactataaaacaaacgaccgaaaaaccccgaaatctccaaatcctcgatcgaaaccgaaaaaaccctaaacttatacaataacttaccattaaatccgaaaaattctaaaaacctaaataacgaaaaaacgcccaaaaccgactact

SEQ ID NO: 2897 - DNA, 738 bp, Artificial Sequence
  chemically treated genomic DNA (Homo sapiens) CpG-island No: 2897
tagaagattttaaatgcggagtttgtttaagatggcggttacgattacgtcgcgataagacggtttcgagttcggtgtgttcgagtttggagttcgtcggatcgtattaatacggggattttttttttgttagttttaagacggcgttatcgtttttaaaggttatgttcgtcgtcgggatggcggtcgtacgtttttcgatatcgttcgtttttagattatttaaaatggcggcggttgcggggcggtacggggcggggttgcgtcgggggaagggacgcggcgcggggtatgttgggttacgcgcgggttgtcgggaacggggcggagcgcggttgcgtcggcgcgtcgaggggagaggtagtagtcgcgatggtgagcgggcgtgggggaggggcggtcgggtcgggtcggaagtagtaaattgaggttacgttttcgtcgatttttgttttcgtgtttacgtcggttcgtcgtttttaggacgtgttttttatgattcggcgttataagattattatttttacggacgttaaggagtttagtacggtgttcgaattgaagcgtatcgtcgagggtatttttaagcggttttttgacgagtagcggttgtataaggtgggtttcgcgggcgggtcgaggggagcgggtattcggcgtcgggtacggggttgacgtttacgttgttcgcgatgtaaatagtagcggtcggcgacgtttgcgggcgttcgagtcgcg

SEQ ID NO: 2898 - DNA, 738 bp, Artificial Sequence
  chemically treated genomic DNA (Homo sapiens) CpG-island No: 2898
cgcgactcgaacgcccgcaaacgtcgccgaccgctactatttacatcgcgaacaacgtaaacgtcaaccccgtacccgacgccgaatacccgctcccctcgacccgcccgcgaaacccaccttatacaaccgctactcgtcaaaaaaccgcttaaaaataccctcgacgatacgcttcaattcgaacaccgtactaaactccttaacgtccgtaaaaataataatcttataacgccgaatcataaaaaacacgtcctaaaaacgacgaaccgacgtaaacacgaaaacaaaaatcgacgaaaacgtaacctcaatttactacttccgacccgacccgaccgcccctcccccacgcccgctcaccatcgcgactactacctctcccctcgacgcgccgacgcaaccgcgctccgccccgttcccgacaacccgcgcgtaacccaacataccccgcgccgcgtcccttcccccgacgcaaccccgccccgtaccgccccgcaaccgccgccattttaaataatctaaaaacgaacgatatcgaaaaacgtacgaccgccatcccgacgacgaacataacctttaaaaacgataacgccgtcttaaaactaacaaaaaaaaaatccccgtattaatacgatccgacgaactccaaactcgaacacaccgaactcgaaaccgtcttatcgcgacgtaatcgtaaccgccatcttaaacaaactccgcatttaaaatcttcta

SEQ ID NO: 2899 - DNA, 738 bp, Artificial Sequence
  chemically treated genomic DNA (Homo sapiens) CpG-island No: 2899
cgcggttcgggcgttcgtaggcgtcgtcggtcgttattgtttatatcgcggatagcgtaggcgttagtttcgtgttcggcgtcgggtattcgtttttttcggttcgttcgcgggatttattttgtatagtcgttgttcgttaggaggtcgtttgaggatgttttcgacgatgcgttttagttcgaatatcgtgttggattttttggcgttcgtgaagatggtggttttgtggcgtcggattatgaggaatacgttttgggggcggcgggtcggcgtgagtacgaaggtagagatcgacgaggacgtaattttaatttgttgttttcggttcggttcggtcgttttttttttacgttcgtttattatcgcggttgttgttttttttttcgacgcgtcggcgtagtcgcgtttcgtttcgttttcggtagttcgcgcgtggtttagtatgtttcgcgtcgcgttttttttttcggcgtagtttcgtttcgtgtcgtttcgtagtcgtcgttattttaagtgatttggaagcgggcggtatcgaggggcgtgcggtcgttatttcgacggcgggtatggtttttggaggcggtggcgtcgttttgggattggtagaggggaggttttcgtgttggtgcggttcggcgggttttaagttcgggtatatcgagttcggggtcgttttgtcgcggcgtagtcgtggtcgttattttgggtaggtttcgtatttggggttttttg

SEQ ID NO: 2900 - DNA, 738 bp, Artificial Sequence
  chemically treated genomic DNA (Homo sapiens) CpG-island No: 2900
caaaaaaccccaaatacgaaacctacccaaaataacgaccacgactacgccgcgacaaaacgaccccgaactcgatatacccgaacttaaaacccgccgaaccgcaccaacacgaaaacctcccctctaccaatcccaaaacgacgccaccgcctccaaaaaccatacccgccgtcgaaataacgaccgcacgcccctcgataccgcccgcttccaaatcacttaaaataacgacgactacgaaacgacacgaaacgaaactacgccgaaaaaaaaaacgcgacgcgaaacatactaaaccacgcgcgaactaccgaaaacgaaacgaaacgcgactacgccgacgcgtcgaaaaaaaaaacaacaaccgcgataataaacgaacgtaaaaaaaaaacgaccgaaccgaaccgaaaacaacaaattaaaattacgtcctcgtcgatctctaccttcgtactcacgccgacccgccgcccccaaaacgtattcctcataatccgacgccacaaaaccaccatcttcacgaacgccaaaaaatccaacacgatattcgaactaaaacgcatcgtcgaaaacatcctcaaacgacctcctaacgaacaacgactatacaaaataaatcccgcgaacgaaccgaaaaaaacgaatacccgacgccgaacacgaaactaacgcctacgctatccgcgatataaacaataacgaccgacgacgcctacgaacgcccgaaccgcg

SEQ ID NO: 2901 - DNA, 1632 bp, Artificial Sequence
  chemically treated genomic DNA (Homo sapiens) CpG-island No: 2901
gggcggttcgcggggtcggtttcgtagtcgcgatagttcgtgcggtcgtttcggtatttcgggcgcggcgagtacggttaagggtagttcgaacggcgagtgcgggcgcggcgagtcgtagtgtagtttcgcggggttcgagggttcggcgcgggggtttaaggtgtcgttttcgtgtcgcggggcggtttcggggttcgcgtcggggtcggggtcggcggaggaggcgggtagcgaggaggcgggttcggcgggggagtcgcgcggtagttaggttagttttatgtagcgttagttcggcgcgtttttgtagtcgggcgttaataagttttcgttgcggatgttcggtagttagaaggtcgtggagcgcgagtaggagcgcgttaagtcggcgggggtttggattatttattcgtatagcgattttaggtatcgttttcgggagggtcggtcggcgcgagggggttcggggagtcgggcgcgcggggagtcgtttttggagcgtttggggagggcggggcggcgcgtcgggtcggtgatttcggggtttttcggtgatttcgggcgtgttcgggattcgtttcggagtgatttcggcgcgcgaggtttcgtttttgggggggtttttcgggtgatcgcggagcgttttttttttacgtatttcgatatttttcgttttgcggcgcggcgggtggggtgggtcgtagggttagggtttgagcgtagaggggtagagaggacgaatagaggggaacgtgggttttagagaggcggcggagcgggagggaggaggaacgaagggcgttcgggaaggacgcgttttagggaggtcgggggagagggggttaagcggtttttacggcgtttattcgcgtttcgtttgcgaggaggcgcgttcggggtcgcgggtttggaaagcgtgcgggtttttaggttgtgttttcgggagtcgttttattcgagtcgcgggcggtgcgcgtatgcggcggtgggtgtgtagacgtcgttgtggatttagtcggttaatgcgtggaaggttcggagtagggtcggcgcggggttatcgttattgatgtttgcggtcgtggtttttgggttgtgcgtgttgtggtcggagagcgagatcggcgcgtgttttcgtgggttgtgtgtgaataggggttcgtgatcgcggcggggttttcggggcgcgagtttgtggtcggagaggtgtgtttttaggagtgtgtttgcgtggtggtcgcgggcgtgtgcgttttcggtgggtttattttggtgggacgtgtggtttgtgtgtgttgggattaggtggcgggcgtgcgcgtgtacgttcggggtcggtgtgtatcggtgggtagtagtgtgagtcgtaggtaggttttatatacgcgattatggagggatgcgtgtgtgtttgtgtatttacgagtggggtgtgaggtggggtgtggagggtgtaggtggagggtgtaggtggggttcgtcgggttagcgaggtcgggcgcgcgggacgggcgcggttttagtattacggatagcgcgtcggatttgggaagtttgcggttttttcgtttgtttttttttttttaggtttgggcgttttaggatagtttttacggattttggattttt

SEQ ID NO: 2902 - DNA, 1632 bp, Artificial Sequence
  chemically treated genomic DNA (Homo sapiens) CpG-island No: 2902
aaaaatccaaaatccgtaaaaactatcctaaaacgcccaaacctaaaaaaaaaaaaacaaacgaaaaaaccgcaaacttcccaaatccgacgcgctatccgtaatactaaaaccgcgcccgtcccgcgcgcccgacctcgctaacccgacgaaccccacctacaccctccacctacaccctccacaccccacctcacaccccactcgtaaatacacaaacacacacgcatccctccataatcgcgtatataaaacctacctacgactcacactactacccaccgatacacaccgaccccgaacgtacacgcgcacgcccgccacctaatcccaacacacacaaaccacacgtcccaccaaaataaacccaccgaaaacgcacacgcccgcgaccaccacgcaaacacactcctaaaaacacacctctccgaccacaaactcgcgccccgaaaaccccgccgcgatcacgaacccctattcacacacaacccacgaaaacacgcgccgatctcgctctccgaccacaacacgcacaacccaaaaaccacgaccgcaaacatcaataacgataaccccgcgccgaccctactccgaaccttccacgcattaaccgactaaatccacaacgacgtctacacacccaccgccgcatacgcgcaccgcccgcgactcgaataaaacgactcccgaaaacacaacctaaaaacccgcacgctttccaaacccgcgaccccgaacgcgcctcctcgcaaacgaaacgcgaataaacgccgtaaaaaccgcttaaccccctctcccccgacctccctaaaacgcgtccttcccgaacgcccttcgttcctcctccctcccgctccgccgcctctctaaaacccacgttcccctctattcgtcctctctacccctctacgctcaaaccctaaccctacgacccaccccacccgccgcgccgcaaaacgaaaaatatcgaaatacgtaaaaaaaaaacgctccgcgatcacccgaaaaacccccccaaaaacgaaacctcgcgcgccgaaatcactccgaaacgaatcccgaacacgcccgaaatcaccgaaaaaccccgaaatcaccgacccgacgcgccgccccgccctccccaaacgctccaaaaacgactccccgcgcgcccgactccccgaaccccctcgcgccgaccgaccctcccgaaaacgatacctaaaatcgctatacgaataaataatccaaacccccgccgacttaacgcgctcctactcgcgctccacgaccttctaactaccgaacatccgcaacgaaaacttattaacgcccgactacaaaaacgcgccgaactaacgctacataaaactaacctaactaccgcgcgactcccccgccgaacccgcctcctcgctacccgcctcctccgccgaccccgaccccgacgcgaaccccgaaaccgccccgcgacacgaaaacgacaccttaaacccccgcgccgaaccctcgaaccccgcgaaactacactacgactcgccgcgcccgcactcgccgttcgaactacccttaaccgtactcgccgcgcccgaaataccgaaacgaccgcacgaactatcgcgactacgaaaccgaccccgcgaaccgccc

SEQ ID NO: 2903 - DNA, 1632 bp, Artificial Sequence
  chemically treated genomic DNA (Homo sapiens) CpG-island No: 2903
gggggtttagggttcgtgggggttgttttggggcgtttaggtttggaggaggagagataggcgggaaaatcgtaggttttttaggttcggcgcgttgttcgtggtgttgaaatcgcgttcgtttcgcgcgttcggtttcgttagttcggcgggttttatttatattttttatttgtattttttatattttattttatattttattcgtggatatataaatatatacgtatttttttatggtcgcgtgtgtgagatttgtttgcggtttatattattgtttatcggtgtatatcggtttcgggcgtatacgcgtacgttcgttatttggttttaatatatataaattatacgttttattaaaataaatttatcggaggcgtatacgttcgcgattattacgtaaatatatttttggagatatattttttcggttataggttcgcgtttcgggaatttcgtcgcggttacgggtttttgtttatatatagtttacggggatacgcgtcggtttcgtttttcggttatagtacgtatagtttaggaattacgatcgtaaatattagtggcggtggtttcgcgtcggttttgtttcgagttttttacgtattagtcggttggatttatagcggcgtttatatatttatcgtcgtatgcgcgtatcgttcgcggttcgggtggagcggttttcggggatatagtttggggattcgtacgttttttaggttcgcggtttcgggcgcgttttttcgtaggcggggcgcgggtggacgtcgtgggagtcgtttaattttttttttttcggtttttttggggcgcgtttttttcgggcgtttttcgttttttttttttttcgtttcgtcgtttttttggggtttacgtttttttttattcgttttttttgtttttttgcgtttagattttggttttgcggtttattttattcgtcgcgtcgtagggcggaggatgtcggggtgcgtgggaggggggcgtttcgcggttattcggggagtttttttagaggcggagtttcgcgcgtcggggttatttcggggcgggtttcggatacgttcgaggttatcgaggagtttcgaggttatcggttcggcgcgtcgtttcgttttttttaggcgttttaaggacggtttttcgcgcgttcggtttttcgggttttttcgcgtcgatcggttttttcggaggcggtatttgaagtcgttgtacgggtggatgatttaggttttcgtcgatttgacgcgtttttgttcgcgttttacggttttttggttgtcgaatattcgtagcgagaatttgttgacgttcggttgtaggagcgcgtcgaattggcgttgtatgaagttggtttggttgtcgcgcggttttttcgtcgggttcgttttttcgttgttcgtttttttcgtcggtttcggtttcggcgcgggtttcgaggtcgtttcgcggtacgagaacgatattttgggttttcgcgtcgggttttcgggtttcgcggggttgtattgcggttcgtcgcgttcgtattcgtcgttcgggttgtttttggtcgtgttcgtcgcgttcggggtgtcggggcggtcgtacgagttgtcgcggttgcggagtcggtttcgcgggtcgttt

SEQ ID NO: 2904 - DNA, 1632 bp, Artificial Sequence
  chemically treated genomic DNA (Homo sapiens) CpG-island No: 2904
aaacgacccgcgaaaccgactccgcaaccgcgacaactcgtacgaccgccccgacaccccgaacgcgacgaacacgaccaaaaacaacccgaacgacgaatacgaacgcgacgaaccgcaatacaaccccgcgaaacccgaaaacccgacgcgaaaacccaaaatatcgttctcgtaccgcgaaacgacctcgaaacccgcgccgaaaccgaaaccgacgaaaaaaacgaacaacgaaaaaacgaacccgacgaaaaaaccgcgcgacaaccaaaccaacttcatacaacgccaattcgacgcgctcctacaaccgaacgtcaacaaattctcgctacgaatattcgacaaccaaaaaaccgtaaaacgcgaacaaaaacgcgtcaaatcgacgaaaacctaaatcatccacccgtacaacgacttcaaataccgcctccgaaaaaaccgatcgacgcgaaaaaacccgaaaaaccgaacgcgcgaaaaaccgtccttaaaacgcctaaaaaaaacgaaacgacgcgccgaaccgataacctcgaaactcctcgataacctcgaacgtatccgaaacccgccccgaaataaccccgacgcgcgaaactccgcctctaaaaaaactccccgaataaccgcgaaacgcccccctcccacgcaccccgacatcctccgccctacgacgcgacgaataaaataaaccgcaaaaccaaaatctaaacgcaaaaaaacaaaaaaaacgaataaaaaaaaacgtaaaccccaaaaaaacgacgaaacgaaaaaaaaaaaaaacgaaaaacgcccgaaaaaaacgcgccccaaaaaaaccgaaaaaaaaaaaattaaacgactcccacgacgtccacccgcgccccgcctacgaaaaaacgcgcccgaaaccgcgaacctaaaaaacgtacgaatccccaaactatatccccgaaaaccgctccacccgaaccgcgaacgatacgcgcatacgacgataaatatataaacgccgctataaatccaaccgactaatacgtaaaaaactcgaaacaaaaccgacgcgaaaccaccgccactaatatttacgatcgtaattcctaaactatacgtactataaccgaaaaacgaaaccgacgcgtatccccgtaaactatatataaacaaaaacccgtaaccgcgacgaaattcccgaaacgcgaacctataaccgaaaaaatatatctccaaaaatatatttacgtaataatcgcgaacgtatacgcctccgataaatttattttaataaaacgtataatttatatatattaaaaccaaataacgaacgtacgcgtatacgcccgaaaccgatatacaccgataaacaataatataaaccgcaaacaaatctcacacacgcgaccataaaaaaatacgtatatatttatatatccacgaataaaatataaaataaaatataaaaaatacaaataaaaaatataaataaaacccgccgaactaacgaaaccgaacgcgcgaaacgaacgcgatttcaacaccacgaacaacgcgccgaacctaaaaaacctacgattttcccgcctatctctcctcctccaaacctaaacgccccaaaacaacccccacgaaccctaaaccccc

SEQ ID NO: 2905 - DNA, 531 bp, Artificial Sequence
  chemically treated genomic DNA (Homo sapiens) CpG-island No: 2905
ttttttttgcgtttttggcgttttgtttcggttttttttttttttttttttttttttagtgcgtttttcgtttcgggcgagaatacgtttttcgtcggcgtgtttagattcgttttcgttttcggagttttcggagttttcggcgtttcgattagttcgggtttgcgtttttaagggtcggcggcggggggcggggtttcggcgtttcgttttgttcgtttttttttttgacgtttttttttttttttttagtttttttatcgttttttttcgtcgtcgtttgggtcggtttcgcgtttttttcgcggttttcgttcgttcgtttgttcgtcgtttttatggcgttcggggttttcgttgtacggggttattaggattttcggcgtttttttttttttttcgttttgttttttttttcgtcgcgcggattcgggcgttttcggcgtttagtttttgagttcgcgtttttaggtcggcggggggggaggggaagagaggggattttgggattttcgttttttttattcggtt

SEQ ID NO: 2906 - DNA, 531 bp, Artificial Sequence
  chemically treated genomic DNA (Homo sapiens) CpG-island No: 2906
aaccgaataaaaaaaacgaaaatcccaaaatcccctctcttcccctccccccccgccgacctaaaaacgcgaactcaaaaactaaacgccgaaaacgcccgaatccgcgcgacgaaaaaaaaaacaaaacgaaaaaaaaaaaaaaacgccgaaaatcctaataaccccgtacaacgaaaaccccgaacgccataaaaacgacgaacaaacgaacgaacgaaaaccgcgaaaaaaacgcgaaaccgacccaaacgacgacgaaaaaaaacgataaaaaaactaaaaaaaaaaaaaaaaacgtcaaaaaaaaaaacgaacaaaacgaaacgccgaaaccccgccccccgccgccgacccttaaaaacgcaaacccgaactaatcgaaacgccgaaaactccgaaaactccgaaaacgaaaacgaatctaaacacgccgacgaaaaacgtattctcgcccgaaacgaaaaacgcactaaaaaaaaaaaaaaaaaaaaaaaaaaccgaaacaaaacgccaaaaacgcaaaaaaaa

SEQ ID NO: 2907 - DNA, 531 bp, Artificial Sequence
  chemically treated genomic DNA (Homo sapiens) CpG-island No: 2907
ggtcgggtggggggggcgggggttttagggtttttttttttttttttttttttcgtcggtttggggacgcgagtttaaaagttgggcgtcgagaacgttcgggttcgcgcggcgggagagggggtagggcgggggaggggaagggacgtcgagggttttagtggtttcgtgtagcggggatttcgggcgttatgggggcggcgggtaggcgggcgggcgggggtcgcggagggggcgcggagtcggtttaagcggcggcggagggaggcggtggaggggttggggagggaggaagggacgttagggggaggggcgggtagggcggggcgtcgggatttcgtttttcgtcgtcggtttttaaaggcgtaggttcgggttggtcggggcgtcgggggtttcgggggtttcgggggcggaggcgggtttgggtacgtcggcggggagcgtgttttcgttcgagacgagaggcgtattggagaggagagaaggggagagagaggtcggggtagagcgttagagacgtagagagag

SEQ ID NO: 2908 - DNA, 531 bp, Artificial Sequence
  chemically treated genomic DNA (Homo sapiens) CpG-island No: 2908
ctctctctacgtctctaacgctctaccccgacctctctctccccttctctcctctccaatacgcctctcgtctcgaacgaaaacacgctccccgccgacgtacccaaacccgcctccgcccccgaaacccccgaaacccccgacgccccgaccaacccgaacctacgcctttaaaaaccgacgacgaaaaacgaaatcccgacgccccgccctacccgcccctccccctaacgtcccttcctccctccccaacccctccaccgcctccctccgccgccgcttaaaccgactccgcgccccctccgcgacccccgcccgcccgcctacccgccgcccccataacgcccgaaatccccgctacacgaaaccactaaaaccctcgacgtcccttcccctcccccgccctaccccctctcccgccgcgcgaacccgaacgttctcgacgcccaacttttaaactcgcgtccccaaaccgacgaaaaaaaaaaaaaaaaaaaaaaaccctaaaacccccgccccccccacccgacc

SEQ ID NO: 2909 - DNA, 776 bp, Artificial Sequence
  chemically treated genomic DNA (Homo sapiens) CpG-island No: 2909
ttcgcggtcgagtttatttcggcggtatttttgaaatcggtttaggagtcgtcgttaggggtttcgttagagtattcgtaggattcgatcgaagtttttttttttttttatagttgcgacgattgcggtaggagttttcggttggagcgttttttgcgggtttattagcggtagtatatcggggagcggttttttatttgcgtcgagtgcgggaagaatttcggtaagaagacgtatttggtggcgtattcgcgcgtgtatttcggcgagcggtttttcgtttgcgaggagtgcggtcgtcgttttttttagggtagttatttggcggcgtatcggcgcgattacgttttcgatcggtttttcgtgtgtttcgattgcggtaaggtttttcgttataaattttatttggcggcgtatcggcgtatttatatcggcgagaagttttacgtttgtttcgattgcggtaaagtttttagttagaagtttaatttggtgtcgtatcggcgtatttatacgggcgagcggttttacgtttgtttcgattgcgatcgtagttttagttagaagtttaattttattatttatcgtaagagttatattcgggacggcgttttttgttgtgttatttgtggttagattttcgacgacgaggagagatttttggtttattagaagaagtacgatgtttgagacggtgggcggggtcgtgttggttgagagagggttggggtttttcgtggtgggagtcgtagtgggttgggggtgtttgtttagtg

SEQ ID NO: 2910 - DNA, 776 bp, Artificial Sequence
  chemically treated genomic DNA (Homo sapiens) CpG-island No: 2910
cactaaacaaacacccccaacccactacgactcccaccacgaaaaaccccaaccctctctcaaccaacacgaccccgcccaccgtctcaaacatcgtacttcttctaataaaccaaaaatctctcctcgtcgtcgaaaatctaaccacaaataacacaacaaaaaacgccgtcccgaatataactcttacgataaataataaaattaaacttctaactaaaactacgatcgcaatcgaaacaaacgtaaaaccgctcgcccgtataaatacgccgatacgacaccaaattaaacttctaactaaaaactttaccgcaatcgaaacaaacgtaaaacttctcgccgatataaatacgccgatacgccgccaaataaaatttataacgaaaaaccttaccgcaatcgaaacacacgaaaaaccgatcgaaaacgtaatcgcgccgatacgccgccaaataactaccctaaaaaaaacgacgaccgcactcctcgcaaacgaaaaaccgctcgccgaaatacacgcgcgaatacgccaccaaatacgtcttcttaccgaaattcttcccgcactcgacgcaaataaaaaaccgctccccgatatactaccgctaataaacccgcaaaaaacgctccaaccgaaaactcctaccgcaatcgtcgcaactataaaaaaaaaaaaaaacttcgatcgaatcctacgaatactctaacgaaacccctaacgacgactcctaaaccgatttcaaaaataccgccgaaataaactcgaccgcgaa

SEQ ID NO: 2911 - DNA, 776 bp, Artificial Sequence
  chemically treated genomic DNA (Homo sapiens) CpG-island No: 2911
tattaggtaggtatttttagtttattgcgatttttattacgaaggattttagtttttttttagttaatacggtttcgtttatcgttttagatatcgtgttttttttggtgggttaggagttttttttcgtcgtcgaaggtttggttatagatggtatagtagaaggcgtcgtttcggatgtggtttttgcggtgggtgatgaggttggatttttggttgaagttgcggtcgtagtcgggataggcgtagggtcgttcgttcgtgtggatgcgtcggtgcgatattaggttggatttttggttgaaggttttgtcgtagtcggggtagacgtagggtttttcgtcggtgtggatgcgtcggtgcgtcgttaggtagggtttgtggcggaaggttttgtcgtagtcgggatatacgaagggtcgatcgggggcgtggtcgcgtcgatgcgtcgttagatggttgttttgggagaagcggcggtcgtatttttcgtaggcgaagggtcgttcgtcggagtgtacgcgcgagtgcgttattaggtgcgtttttttgtcgaagtttttttcgtattcggcgtaggtgaagggtcgtttttcggtgtgttgtcgttggtgggttcgtaggaagcgttttagtcggaagtttttgtcgtagtcgtcgtagttgtagagggaggggggggtttcgatcgggttttgcgggtgttttggcggggtttttggcggcggtttttgggtcggttttagaggtatcgtcggggtgggttcggtcgcgga

SEQ ID NO: 2912 - DNA, 776 bp, Artificial Sequence
  chemically treated genomic DNA (Homo sapiens) CpG-island No: 2912
tccgcgaccgaacccaccccgacgatacctctaaaaccgacccaaaaaccgccgccaaaaaccccgccaaaacacccgcaaaacccgatcgaaacccccccctccctctacaactacgacgactacgacaaaaacttccgactaaaacgcttcctacgaacccaccaacgacaacacaccgaaaaacgacccttcacctacgccgaatacgaaaaaaacttcgacaaaaaaacgcacctaataacgcactcgcgcgtacactccgacgaacgacccttcgcctacgaaaaatacgaccgccgcttctcccaaaacaaccatctaacgacgcatcgacgcgaccacgcccccgatcgacccttcgtatatcccgactacgacaaaaccttccgccacaaaccctacctaacgacgcaccgacgcatccacaccgacgaaaaaccctacgtctaccccgactacgacaaaaccttcaaccaaaaatccaacctaatatcgcaccgacgcatccacacgaacgaacgaccctacgcctatcccgactacgaccgcaacttcaaccaaaaatccaacctcatcacccaccgcaaaaaccacatccgaaacgacgccttctactataccatctataaccaaaccttcgacgacgaaaaaaaactcctaacccaccaaaaaaaacacgatatctaaaacgataaacgaaaccgtattaactaaaaaaaaactaaaatccttcgtaataaaaatcgcaataaactaaaaatacctacctaata

SEQ ID NO: 2913 - DNA, 640 bp, Artificial Sequence
  chemically treated genomic DNA (Homo sapiens) CpG-island No: 2913
gtttttttagtttttttttaatttagaagtttggttaaacgtgtcgttttttttataacgttaacggagttggaacgtagcgttcggaggataattggttacggggaggaggggagaatttcgcggttcggagtacggcggttgaggtttaatttagttcgcgtttaattttattcggtgttaggaaggcgtgtggatttaaagttttaggtcgcggtgttaggttcggaggagtagagtcgcgcgtggttgggggtaggtcgtaaataaatcgacgggaggagggggaaggggtaacggcgaggcgggtggggtaaaataaaaggtaggatttcgttttaatttttcggcgttagttcgtagtcggttttattttatcgaggattagatgttgttttcggcgcggcgttttcgttcgggtcggaatatcgaaggttttaatatttttggagttcggagtttataaggttatcggtttcgcgattttcgttttatagcgttttatttgaattcgtaatttgggtttcgggcgtcgcggtcgggcgcgtttagttcggtttttttgttgaagagtttttggaatagcgtaggggttatgttagttacggttaggtaggggtcgtttcgttgggcgtttgtt

SEQ ID NO: 2914 - DNA, 640 bp, Artificial Sequence
  chemically treated genomic DNA (Homo sapiens) CpG-island No: 2914
aacaaacgcccaacgaaacgacccctacctaaccgtaactaacataacccctacgctattccaaaaactcttcaacaaaaaaaccgaactaaacgcgcccgaccgcgacgcccgaaacccaaattacgaattcaaataaaacgctataaaacgaaaatcgcgaaaccgataaccttataaactccgaactccaaaaatattaaaaccttcgatattccgacccgaacgaaaacgccgcgccgaaaacaacatctaatcctcgataaaataaaaccgactacgaactaacgccgaaaaattaaaacgaaatcctaccttttattttaccccacccgcctcgccgttaccccttccccctcctcccgtcgatttatttacgacctacccccaaccacgcgcgactctactcctccgaacctaacaccgcgacctaaaactttaaatccacacgccttcctaacaccgaataaaattaaacgcgaactaaattaaacctcaaccgccgtactccgaaccgcgaaattctcccctcctccccgtaaccaattatcctccgaacgctacgttccaactccgttaacgttataaaaaaaacgacacgtttaaccaaacttctaaattaaaaaaaaactaaaaaaac

SEQ ID NO: 2915 - DNA, 640 bp, Artificial Sequence
  chemically treated genomic DNA (Homo sapiens) CpG-island No: 2915
agtaagcgtttagcggagcgatttttgtttggtcgtggttagtatggtttttacgttgttttagaagttttttagtaagaggatcgggttgggcgcgttcggtcgcgacgttcgggatttagattgcgggtttaggtagggcgttgtggggcgggggtcgcggagtcgatggttttgtgggtttcgggttttaggggtgttggggttttcggtgtttcgattcgagcggaagcgtcgcgtcgagagtagtatttggttttcggtggggtggagtcggttgcgggttagcgtcgaagggttggagcgaggttttattttttattttattttattcgtttcgtcgttgtttttttttttttttttcgtcggtttgtttacgatttgtttttagttacgcgcgattttgttttttcggatttagtatcgcggtttgagattttgggtttatacgtttttttggtatcgagtagagttgggcgcgggttggattggattttagtcgtcgtatttcgggtcgcgaagtttttttttttttttcgtgattagttgtttttcgggcgttgcgttttagtttcgttggcgttgtggagagagcggtacgtttggttaagtttttgagttgagagaaggttggaggagt

SEQ ID NO: 2916 - DNA, 640 bp, Artificial Sequence
  chemically treated genomic DNA (Homo sapiens) CpG-island No: 2916
actcctccaaccttctctcaactcaaaaacttaaccaaacgtaccgctctctccacaacgccaacgaaactaaaacgcaacgcccgaaaaacaactaatcacgaaaaaaaaaaaaaaacttcgcgacccgaaatacgacgactaaaatccaatccaacccgcgcccaactctactcgataccaaaaaaacgtataaacccaaaatctcaaaccgcgatactaaatccgaaaaaacaaaatcgcgcgtaactaaaaacaaatcgtaaacaaaccgacgaaaaaaaaaaaaaaaaacaacgacgaaacgaataaaataaaataaaaaataaaacctcgctccaacccttcgacgctaacccgcaaccgactccaccccaccgaaaaccaaatactactctcgacgcgacgcttccgctcgaatcgaaacaccgaaaaccccaacacccctaaaacccgaaacccacaaaaccatcgactccgcgacccccgccccacaacgccctacctaaacccgcaatctaaatcccgaacgtcgcgaccgaacgcgcccaacccgatcctcttactaaaaaacttctaaaacaacgtaaaaaccatactaaccacgaccaaacaaaaatcgctccgctaaacgcttact

SEQ ID NO: 2917 - DNA, 660 bp, Artificial Sequence
  chemically treated genomic DNA (Homo sapiens) CpG-island No: 2917
cggttttacggtttcgcgttttttatttagttttcgattttaataattcgtattttttttttagtatttattttcgcggttcgcgtttttttttcgggtttcgtttttaatgtttcgcgtttttttttcgggtttgttagtatttaaatattcgggacggcggtggtacgtattttcgggtttacgttatgggagaaggaatgtacgacgtcgtcgggtcgtacgttaaacgttatcgtcgtgggttcggatatcgttttcgtcggttttagcgttacggtttttaggagtagcgcggtttataagttcgcgtcgacgtcgttttatttttcgttgggcgtcgttatgttggattagggtttttagggtaggggcgggtagacggggcgcggcgagggatacgtggagcgttcgtcggaggttacgtcggcgtcggttgtttacgtgattcggtacgtttcgttttgtttatcgttcggggttattattttgggggcgggattttgtcgagggggcgggatttttgtcgagggggcggggtcgtcgagggggcggggtcgtcgagggggcggtttcgtattttagggattttgcgtagttcggcgatttttggagggttttttaggtggtaatggagttcgttttggggttttagggttt

SEQ ID NO: 2918 - DNA, 660 bp, Artificial Sequence
  chemically treated genomic DNA (Homo sapiens) CpG-island No: 2918
aaaccctaaaaccccaaaacgaactccattaccacctaaaaaaccctccaaaaatcgccgaactacgcaaaatccctaaaatacgaaaccgccccctcgacgaccccgccccctcgacgaccccgccccctcgacaaaaatcccgccccctcgacaaaatcccgcccccaaaataataaccccgaacgataaacaaaacgaaacgtaccgaatcacgtaaacaaccgacgccgacgtaacctccgacgaacgctccacgtatccctcgccgcgccccgtctacccgcccctaccctaaaaaccctaatccaacataacgacgcccaacgaaaaataaaacgacgtcgacgcgaacttataaaccgcgctactcctaaaaaccgtaacgctaaaaccgacgaaaacgatatccgaacccacgacgataacgtttaacgtacgacccgacgacgtcgtacattccttctcccataacgtaaacccgaaaatacgtaccaccgccgtcccgaatatttaaatactaacaaacccgaaaaaaaaacgcgaaacattaaaaacgaaacccgaaaaaaaaacgcgaaccgcgaaaataaatactaaaaaaaaaatacgaattattaaaatcgaaaactaaataaaaaacgcgaaaccgtaaaaccg

SEQ ID NO: 2919 - DNA, 660 bp, Artificial Sequence
  chemically treated genomic DNA (Homo sapiens) CpG-island No: 2919
ggattttgagattttaaaacgaattttattattatttgagggattttttaaggatcgtcgggttacgtagggtttttagggtacgaggtcgttttttcggcggtttcgttttttcggcggtttcgttttttcggtaaaagtttcgttttttcgataaagtttcgtttttaagatggtggtttcgggcggtggatagggcggggcgtgtcgggttacgtggatagtcgacgtcgacgtggttttcggcggacgttttacgtgtttttcgtcgcgtttcgtttattcgtttttgttttgaggattttagtttaatatggcggcgtttagcggagggtggaacggcgtcggcgcgagtttgtgggtcgcgttgtttttaggggtcgtggcgttgaggtcggcggaggcggtgttcgagtttacgacggtggcgtttgacgtgcggttcggcggcgtcgtgtatttttttttttataacgtgggttcgggggtacgtgttatcgtcgtttcggatatttgagtgttggtaggttcggggagggggcgcggagtattgggggcggggttcgaggagggggcgcggatcgcggaggtgggtattgaagaaggggtgcggattgttagggtcggaggttgagtggggggcgcgggatcgtgaggtcg

SEQ ID NO: 2920 - DNA, 660 bp, Artificial Sequence
  chemically treated genomic DNA (Homo sapiens) CpG-island No: 2920
cgacctcacgatcccgcgccccccactcaacctccgaccctaacaatccgcaccccttcttcaatacccacctccgcgatccgcgccccctcctcgaaccccgcccccaatactccgcgccccctccccgaacctaccaacactcaaatatccgaaacgacgataacacgtacccccgaacccacgttataaaaaaaaaaatacacgacgccgccgaaccgcacgtcaaacgccaccgtcgtaaactcgaacaccgcctccgccgacctcaacgccacgacccctaaaaacaacgcgacccacaaactcgcgccgacgccgttccaccctccgctaaacgccgccatattaaactaaaatcctcaaaacaaaaacgaataaacgaaacgcgacgaaaaacacgtaaaacgtccgccgaaaaccacgtcgacgtcgactatccacgtaacccgacacgccccgccctatccaccgcccgaaaccaccatcttaaaaacgaaactttatcgaaaaaacgaaacttttaccgaaaaaacgaaaccgccgaaaaaacgaaaccgccgaaaaaacgacctcgtaccctaaaaaccctacgtaacccgacgatccttaaaaaatccctcaaataataataaaattcgttttaaaatctcaaaatcc

SEQ ID NO: 2921 - DNA, 558 bp, Artificial Sequence
  chemically treated genomic DNA (Homo sapiens) CpG-island No: 2921
gcgtggtgtttatcggagtgggggtgtttattgtatttcgcgtggtggttatcggagtgggggtgtttattttatttcgcgtggtgtttatcggagtggggtgtttattttattttacgcggtgtttatcggagtgggggtgtttattttatttcgcgtggtgtttatcggagtgggggtgtttattttatttcgcgtggtgtttatcggagtggggtgtttattttattttacgcggtgtttatcggagtggggtgtttattttattttacgcggtgtttatcggagtgggggtgtttattttatttcgcgtggtgtttatcggagtggggtgtttattttatttcgcgtggtgtttatcggagtggggtgtttattttattttacgcggtgtttatcggagtgggggtgtttattttatttcgcgtggtgtttatcggagtggggtgtttattttatttcgcgtggtgtttatcggagtggggtgtttattttattttacgcggtgtttatcggagtgggggtgtttattttatttcgcgtagtgttgattagttt

SEQ ID NO: 2922 - DNA, 558 bp, Artificial Sequence
  chemically treated genomic DNA (Homo sapiens) CpG-island No: 2922
aaactaatcaacactacgcgaaataaaataaacacccccactccgataaacaccgcgtaaaataaaataaacaccccactccgataaacaccacgcgaaataaaataaacaccccactccgataaacaccacgcgaaataaaataaacacccccactccgataaacaccgcgtaaaataaaataaacaccccactccgataaacaccacgcgaaataaaataaacaccccactccgataaacaccacgcgaaataaaataaacacccccactccgataaacaccgcgtaaaataaaataaacaccccactccgataaacaccgcgtaaaataaaataaacaccccactccgataaacaccacgcgaaataaaataaacacccccactccgataaacaccacgcgaaataaaataaacacccccactccgataaacaccgcgtaaaataaaataaacaccccactccgataaacaccacgcgaaataaaataaacacccccactccgataaccaccacgcgaaatacaataaacacccccactccgataaacaccacgc

SEQ ID NO: 2923 - DNA, 558 bp, Artificial Sequence
  chemically treated genomic DNA (Homo sapiens) CpG-island No: 2923
gaattgattaatattgcgcgggataaggtggatatttttatttcgataaatatcgcgtgggataaggtggatattttatttcgataaatattacgcgggataaggtggatattttatttcgataaatattacgcgggataaggtggatatttttatttcgataaatatcgcgtgggataaggtggatattttatttcgataaatattacgcgggataaggtggatattttatttcgataaatattacgcgggataaggtggatatttttatttcgataaatatcgcgtgggataaggtggatattttatttcgataaatatcgcgtgggataaggtggatattttatttcgataaatattacgcgggataaggtggatatttttatttcgataaatattacgcgggataaggtggatatttttatttcgataaatatcgcgtgggataaggtggatattttatttcgataaatattacgcgggataaggtggatatttttatttcgataattattacgcgggatatagtggatatttttatttcgataaatattacgt

SEQ ID NO: 2924 - DNA, 558 bp, Artificial Sequence
  chemically treated genomic DNA (Homo sapiens) CpG-island No: 2924
acgtaatatttatcgaaataaaaatatccactatatcccgcgtaataattatcgaaataaaaatatccaccttatcccgcgtaatatttatcgaaataaaatatccaccttatcccacgcgatatttatcgaaataaaaatatccaccttatcccgcgtaatatttatcgaaataaaaatatccaccttatcccgcgtaatatttatcgaaataaaatatccaccttatcccacgcgatatttatcgaaataaaatatccaccttatcccacgcgatatttatcgaaataaaaatatccaccttatcccgcgtaatatttatcgaaataaaatatccaccttatcccgcgtaatatttatcgaaataaaatatccaccttatcccacgcgatatttatcgaaataaaaatatccaccttatcccgcgtaatatttatcgaaataaaatatccaccttatcccgcgtaatatttatcgaaataaaatatccaccttatcccacgcgatatttatcgaaataaaaatatccaccttatcccgcgcaatattaatcaattc

SEQ ID NO: 2925 - DNA, 552 bp, Artificial Sequence
  chemically treated genomic DNA (Homo sapiens) CpG-island No: 2925
gggatcgcggggcgcggcgcggtgcggggggcgcggcgcgggggggcggcggcgggtgggggggtagtttcggcgttcgggaggtggtaaagtgagtttggatttttggcgcggttttttcgttttttttttttttttatttcggcgaggtttgtcgttcggttttttttcgttttatcgcgattaaaaaatacggtttaattaaatattcgtggttgtgacgttggcgagagaagttgttagcgggtggggggtggggggaaagaagaggaaaatcgagtcggcggttgcggtcgggtatcgtatggcgttagagaatttcggcggcgagcgggatttgcgtttgggtcgtcgttttttcgttcgcggtttcgggatcgttattttgaaaaggagtttcgaggtttggcgttcggcgcgcgatcgggatttcgcgtttagtttcggggattcggtcggcgttttttattcgcgagcggttcgcgagttatttttaggtttcgggaaatttttaagagggtttggggggtggggggagtaaaaaggggaggg

SEQ ID NO: 2926 - DNA, 552 bp, Artificial Sequence
  chemically treated genomic DNA (Homo sapiens) CpG-island No: 2926
ccctcccctttttactccccccaccccccaaaccctcttaaaaatttcccgaaacctaaaaataactcgcgaaccgctcgcgaataaaaaacgccgaccgaatccccgaaactaaacgcgaaatcccgatcgcgcgccgaacgccaaacctcgaaactccttttcaaaataacgatcccgaaaccgcgaacgaaaaaacgacgacccaaacgcaaatcccgctcgccgccgaaattctctaacgccatacgatacccgaccgcaaccgccgactcgattttcctcttctttccccccaccccccacccgctaacaacttctctcgccaacgtcacaaccacgaatatttaattaaaccgtattttttaatcgcgataaaacgaaaaaaaaccgaacgacaaacctcgccgaaataaaaaaaaaaaaaaaacgaaaaaaccgcgccaaaaatccaaactcactttaccacctcccgaacgccgaaactacccccccacccgccgccgcccccccgcgccgcgccccccgcaccgcgccgcgccccgcgatccc

SEQ ID NO: 2927 - DNA, 552 bp, Artificial Sequence
  chemically treated genomic DNA (Homo sapiens) CpG-island No: 2927
tttttttttttttattttttttattttttagatttttttgaaagtttttcggggtttgagagtggttcgcgggtcgttcgcgggtggggggcgtcggtcgggttttcggagttggacgcggggtttcgatcgcgcgtcgggcgttaggtttcgggatttttttttaaagtaacggtttcgggatcgcgggcggggaggcggcggtttaggcgtaggtttcgttcgtcgtcgaagttttttagcgttatacgatgttcggtcgtagtcgtcggttcggttttttttttttttttttttattttttattcgttgatagtttttttcgttaacgttatagttacggatatttaattagatcgtattttttaatcgcgatggggcgagaaggaatcgggcggtaggtttcgtcgagatggggagggggaggggacgggggggtcgcgttaagagtttaaatttattttgttatttttcggacgtcgaagttgtttttttattcgtcgtcgttttttcgcgtcgcgtttttcgtatcgcgtcgcgtttcgcgatttt

SEQ ID NO: 2928 - DNA, 552 bp, Artificial Sequence
  chemically treated genomic DNA (Homo sapiens) CpG-island No: 2928
aaaatcgcgaaacgcgacgcgatacgaaaaacgcgacgcgaaaaaacgacgacgaataaaaaaacaacttcgacgtccgaaaaataacaaaataaatttaaactcttaacgcgacccccccgtcccctccccctccccatctcgacgaaacctaccgcccgattccttctcgccccatcgcgattaaaaaatacgatctaattaaatatccgtaactataacgttaacgaaaaaaactatcaacgaataaaaaataaaaaaaaaaaaaaaaaaaaccgaaccgacgactacgaccgaacatcgtataacgctaaaaaacttcgacgacgaacgaaacctacgcctaaaccgccgcctccccgcccgcgatcccgaaaccgttactttaaaaaaaaatcccgaaacctaacgcccgacgcgcgatcgaaaccccgcgtccaactccgaaaacccgaccgacgccccccacccgcgaacgacccgcgaaccactctcaaaccccgaaaaactttcaaaaaaatctaaaaaataaaaaaaataaaaaaaaaaaaa

SEQ ID NO: 2929 - DNA, 637 bp, Artificial Sequence
  chemically treated genomic DNA (Homo sapiens) CpG-island No: 2929
gcggtcgggcggcgggggcggggaaggggcgggcgcggaggcggtgtcgtagttcgagtcggagttcgagtcggatttcgaggcgacgggagtcgaataggagtcgtcgttgaagttatcgtcgggtgtttagcgtcgtcgtcgttttcgagttttttcgcgtttttgttcgcgggcggtcggtgggtagcgggcgttatggtcgcgtcggagtcgttgcggtcgcgtttgtgtcgtttggtgcgcggagagtagggttacggtttttatttgtacggcgagaagggtcgtcgcgggtagtttattcggcgcgtggaattcggttttttcgtcgaggtcgtcgcgttgcgcgttggggatcgtttggtcgaggttaacggcgttaacgtggagggcgagacgtattattaggtgggggttagcgttcgttttcggttcgtcgtttttttttcgagcgcgtttttttggggcgagtaggggtcgtacgggggttcgagggggttttcgcggggaggacgcggacgttgtcgggaggtagcggttcggcgttttcggagtttcggcgtaggaagtttagttttgtacgggggtgggggggggtattttggtagggaggggttcgtattgcggtttttgg

SEQ ID NO: 2930 - DNA, 637 bp, Artificial Sequence
  chemically treated genomic DNA (Homo sapiens) CpG-island No: 2930
ccaaaaaccgcaatacgaacccctccctaccaaaatacccccccccacccccgtacaaaactaaacttcctacgccgaaactccgaaaacgccgaaccgctacctcccgacaacgtccgcgtcctccccgcgaaaaccccctcgaacccccgtacgacccctactcgccccaaaaaaacgcgctcgaaaaaaaaacgacgaaccgaaaacgaacgctaacccccacctaataatacgtctcgccctccacgttaacgccgttaacctcgaccaaacgatccccaacgcgcaacgcgacgacctcgacgaaaaaaccgaattccacgcgccgaataaactacccgcgacgacccttctcgccgtacaaataaaaaccgtaaccctactctccgcgcaccaaacgacacaaacgcgaccgcaacgactccgacgcgaccataacgcccgctacccaccgaccgcccgcgaacaaaaacgcgaaaaaactcgaaaacgacgacgacgctaaacacccgacgataacttcaacgacgactcctattcgactcccgtcgcctcgaaatccgactcgaactccgactcgaactacgacaccgcctccgcgcccgccccttccccgcccccgccgcccgaccgc

SEQ ID NO: 2931 - DNA, 637 bp, Artificial Sequence
  chemically treated genomic DNA (Homo sapiens) CpG-island No: 2931
ttaggagtcgtagtgcgggtttttttttgttaggatgtttttttttattttcgtgtaggattgagttttttgcgtcgggatttcgaaggcgtcgggtcgttgtttttcgataacgttcgcgtttttttcgcgggagttttttcgggttttcgtgcgatttttgttcgttttagggggacgcgttcggggagggggcggcgggtcgggggcgagcgttggtttttatttggtggtgcgtttcgttttttacgttgacgtcgttgatttcgattaggcggtttttagcgcgtagcgcggcggtttcggcgggggaatcgggttttacgcgtcggatgaattgttcgcggcggtttttttcgtcgtgtaggtggaagtcgtagttttgtttttcgcgtattaagcggtataggcgcggtcgtagcggtttcggcgcggttatggcgttcgttgtttatcggtcgttcgcgggtaggggcgcgggggagttcgggggcggcggcggcgttgggtattcggcggtggttttagcggcggtttttgttcggttttcgtcgtttcgggattcggttcgggtttcggttcgggttgcggtatcgttttcgcgttcgtttttttttcgttttcgtcgttcggtcgt

SEQ ID NO: 2932 - DNA, 637 bp, Artificial Sequence
  chemically treated genomic DNA (Homo sapiens) CpG-island No: 2932
acgaccgaacgacgaaaacgaaaaaaaaacgaacgcgaaaacgataccgcaacccgaaccgaaacccgaaccgaatcccgaaacgacgaaaaccgaacaaaaaccgccgctaaaaccaccgccgaatacccaacgccgccgccgcccccgaactcccccgcgcccctacccgcgaacgaccgataaacaacgaacgccataaccgcgccgaaaccgctacgaccgcgcctataccgcttaatacgcgaaaaacaaaactacgacttccacctacacgacgaaaaaaaccgccgcgaacaattcatccgacgcgtaaaacccgattcccccgccgaaaccgccgcgctacgcgctaaaaaccgcctaatcgaaatcaacgacgtcaacgtaaaaaacgaaacgcaccaccaaataaaaaccaacgctcgcccccgacccgccgccccctccccgaacgcgtccccctaaaacgaacaaaaatcgcacgaaaacccgaaaaaactcccgcgaaaaaaacgcgaacgttatcgaaaaacaacgacccgacgccttcgaaatcccgacgcaaaaaactcaatcctacacgaaaataaaaaaaaacatcctaacaaaaaaaaacccgcactacgactcctaa

SEQ ID NO: 2933 - DNA, 948 bp, Artificial Sequence
  chemically treated genomic DNA (Homo sapiens) CpG-island No: 2933
agcggagcggagcgttcgaaatttagtttttgcggatcgtaatttttgggaaaaaggcgtaaggtgggaacgtagggtcgtacgtgggaatcgttcgcggttgtcgggtttgtagtttttgttcgcgtagttgggagtcgtaggaggcggttcgggattttagtttgtagtttttatttcgtttttttttacgttttagttacggcgcggcgttatttgttgtagtttttttttttcggagaggttcgggtttttttttatattttcgcggtttagtttcgggttttaggtttcggtttcgggttagtattttcgcgtttaaggcggttatgtcggatttttgcggattatatatttcggcggtttatgcggtttcgttacgtgatgtaaggatcgtcggttttttcgttagagggcggtatagaattataatttttagtaagtttttaaggcggtttttcgcgtaatgtcgttatcggaagtgcgggtcgcgttttcggcggcgtttcggggttaggggggtgcgttttttttcgcgtcggggcggttcggagcgcggtggcgcggcgcggggtaagtggcggtttttacggggtaagtggcggtttttacggggtagcggtttagagaggcggatttcgtagtgttcgggtttcgggtttttattcgcgtttattgtaattcgatttcggagtttcgagtattttttagttttaagttatggcgggtgcgaacgggtttttgttgtaggcggtttcgtgatagtttttgttttatatgggtagaggagagacggtaaacgtcggggtttttaggatttcgcggcggtagttttaattcgtgtattgagtcgggcggggcgggcggtagcgtttgagtagagagttttttagattaggtttggtgtttttcgggtttttttaggtgtttgtttgcgagttggttagt

SEQ ID NO: 2934 - DNA, 948 bp, Artificial Sequence
  chemically treated genomic DNA (Homo sapiens) CpG-island No: 2934
actaaccaactcgcaaacaaacacctaaaaaaacccgaaaaacaccaaacctaatctaaaaaactctctactcaaacgctaccgcccgccccgcccgactcaatacacgaattaaaactaccgccgcgaaatcctaaaaaccccgacgtttaccgtctctcctctacccatataaaacaaaaactatcacgaaaccgcctacaacaaaaacccgttcgcacccgccataacttaaaactaaaaaatactcgaaactccgaaatcgaattacaataaacgcgaataaaaacccgaaacccgaacactacgaaatccgcctctctaaaccgctaccccgtaaaaaccgccacttaccccgtaaaaaccgccacttaccccgcgccgcgccaccgcgctccgaaccgccccgacgcgaaaaaaaacgcacccccctaaccccgaaacgccgccgaaaacgcgacccgcacttccgataacgacattacgcgaaaaaccgccttaaaaacttactaaaaattataattctataccgccctctaacgaaaaaaccgacgatccttacatcacgtaacgaaaccgcataaaccgccgaaatatataatccgcaaaaatccgacataaccgccttaaacgcgaaaatactaacccgaaaccgaaacctaaaacccgaaactaaaccgcgaaaatataaaaaaaaacccgaacctctccgaaaaaaaaaaactacaacaaataacgccgcgccgtaactaaaacgtaaaaaaaaacgaaataaaaactacaaactaaaatcccgaaccgcctcctacgactcccaactacgcgaacaaaaactacaaacccgacaaccgcgaacgattcccacgtacgaccctacgttcccaccttacgcctttttcccaaaaattacgatccgcaaaaactaaatttcgaacgctccgctccgct

SEQ ID NO: 2935 - DNA, 948 bp, Artificial Sequence
  chemically treated genomic DNA (Homo sapiens) CpG-island No: 2935
gttgattagttcgtaaataggtatttaggaaagttcgggagatattaggtttggtttagagagttttttatttagacgttgtcgttcgtttcgttcgatttagtgtacgggttaggattgtcgtcgcgaagttttgggagtttcgacgtttgtcgttttttttttatttatgtgaagtaggagttgttacggagtcgtttgtagtagagattcgttcgtattcgttatgatttaaaattaagggatgttcggagtttcggagtcgggttgtagtgggcgcgggtgagggttcgggattcggatattgcggggttcgtttttttaggtcgttgtttcgtggggatcgttatttgtttcgtggggatcgttatttatttcgcgtcgcgttatcgcgtttcgggtcgtttcgacgcggagaaaggcgtatttttttggtttcgggacgtcgtcggaagcgcgattcgtattttcggtagcggtattgcgcggagggtcgttttgggagtttgttgggagttgtagttttgtgtcgttttttggcggaaaggtcggcgatttttgtattacgtgacggggtcgtatgggtcgtcgggatgtgtagttcgtaggagttcggtatgatcgttttgagcgcgaggatgttgattcggagtcggagtttgggattcggggttgggtcgcgggggtgtagggaggagttcgggttttttcggagaagagaggttgtagtaggtagcgtcgcgtcgtggttggagcgtgggaggaggcgggataggggttgtaggttggagtttcgggtcgttttttgcggtttttagttgcgcgggtaggggttgtaaattcggtagtcgcgaacggtttttacgtgcggttttgcgtttttattttgcgttttttttttaaagattgcggttcgtaggggttgggtttcgggcgtttcgtttcgtt

SEQ ID NO: 2936 - DNA, 948 bp, Artificial Sequence
  chemically treated genomic DNA (Homo sapiens) CpG-island No: 2936
aacgaaacgaaacgcccgaaacccaacccctacgaaccgcaatctttaaaaaaaaaacgcaaaataaaaacgcaaaaccgcacgtaaaaaccgttcgcgactaccgaatttacaacccctacccgcgcaactaaaaaccgcaaaaaacgacccgaaactccaacctacaacccctatcccgcctcctcccacgctccaaccacgacgcgacgctacctactacaacctctcttctccgaaaaaacccgaactcctccctacacccccgcgacccaaccccgaatcccaaactccgactccgaatcaacatcctcgcgctcaaaacgatcataccgaactcctacgaactacacatcccgacgacccatacgaccccgtcacgtaatacaaaaatcgccgacctttccgccaaaaaacgacacaaaactacaactcccaacaaactcccaaaacgaccctccgcgcaataccgctaccgaaaatacgaatcgcgcttccgacgacgtcccgaaaccaaaaaaatacgcctttctccgcgtcgaaacgacccgaaacgcgataacgcgacgcgaaataaataacgatccccacgaaacaaataacgatccccacgaaacaacgacctaaaaaaacgaaccccgcaatatccgaatcccgaaccctcacccgcgcccactacaacccgactccgaaactccgaacatcccttaattttaaatcataacgaatacgaacgaatctctactacaaacgactccgtaacaactcctacttcacataaataaaaaaaaaacgacaaacgtcgaaactcccaaaacttcgcgacgacaatcctaacccgtacactaaatcgaacgaaacgaacgacaacgtctaaataaaaaactctctaaaccaaacctaatatctcccgaactttcctaaatacctatttacgaactaatcaac

SEQ ID NO: 2937 - DNA, 840 bp, Artificial Sequence
  chemically treated genomic DNA (Homo sapiens) CpG-island No: 2937
tttagttgcgttatttggtcgaagttagtgaagcggcgcgggcggtcgcgtacgaaacgggtttattggcggttagcggtatttagttgggcgaggcgtattagtgtcgtggtcgtcgttagcgttattagtagttatcgcgtttaggtttcgagtcgtagtacgcgttagcgtttttttttgtgttaagtacgggtttcggttacggcgaagtgtacggcgaatagtagtaggtatatttgtggggggcgcggttaggagggcgggagggacgttgtcggggcggggttttgcgagggggcgggacgttgtcggggcggggttttgcgagggggcgggacgttgtcggggcggggttttacgagggggcgggacgttgtcggggcggggttttgcgagggggcgggacgttgcgagggggcggggcgttgcgaggggtgagacgttgtcggggcggggtttcgcgagggggcgggacgttgtcggtgggaggcgcggggtttggtcggggacgggcgtatcgaggtgagtagaggtagcgagaggttcgcgttgaggcggcgtagcgtaaaggggcggacgttgagggcggttagggcgcggtcggtcgtcgggaattcgaggcgtagcgtgacggcggcgtgtagttttacggtcgggttgtagcgcgtgagttttaggaatatagcgcggtttttgcgtagagggtgcgggttagtaggagcgggtggtagggcgggagttgcggggatcgcgtagtgtaggcgtggttgaggggttgtggaagtcgtttaggttagcgggggtcggaggagtgagggtgggtttttggttggtgat

SEQ ID NO: 2938 - DNA, 840 bp, Artificial Sequence
  chemically treated genomic DNA (Homo sapiens) CpG-island No: 2938
atcaccaaccaaaaacccaccctcactcctccgacccccgctaacctaaacgacttccacaacccctcaaccacgcctacactacgcgatccccgcaactcccgccctaccacccgctcctactaacccgcaccctctacgcaaaaaccgcgctatattcctaaaactcacgcgctacaacccgaccgtaaaactacacgccgccgtcacgctacgcctcgaattcccgacgaccgaccgcgccctaaccgccctcaacgtccgcccctttacgctacgccgcctcaacgcgaacctctcgctacctctactcacctcgatacgcccgtccccgaccaaaccccgcgcctcccaccgacaacgtcccgccccctcgcgaaaccccgccccgacaacgtctcacccctcgcaacgccccgccccctcgcaacgtcccgccccctcgcaaaaccccgccccgacaacgtcccgccccctcgtaaaaccccgccccgacaacgtcccgccccctcgcaaaaccccgccccgacaacgtcccgccccctcgcaaaaccccgccccgacaacgtccctcccgccctcctaaccgcgccccccacaaatatacctactactattcgccgtacacttcgccgtaaccgaaacccgtacttaacacaaaaaaaaacgctaacgcgtactacgactcgaaacctaaacgcgataactactaataacgctaacgacgaccacgacactaatacgcctcgcccaactaaataccgctaaccgccaataaacccgtttcgtacgcgaccgcccgcgccgcttcactaacttcgaccaaataacgcaactaaa

SEQ ID NO: 2939 - DNA, 840 bp, Artificial Sequence
  chemically treated genomic DNA (Homo sapiens) CpG-island No: 2939
gttattagttaggagtttatttttattttttcggttttcgttggtttaggcggtttttatagttttttagttacgtttgtattgcgcggttttcgtagttttcgttttgttattcgtttttattgattcgtattttttgcgtaggagtcgcgttgtgtttttggagtttacgcgttatagttcggtcgtggggttgtacgtcgtcgttacgttgcgtttcgagttttcggcggtcggtcgcgttttggtcgtttttagcgttcgtttttttgcgttgcgtcgttttagcgcgggtttttcgttgtttttgtttatttcggtacgttcgttttcggttagatttcgcgttttttatcggtagcgtttcgttttttcgcggggtttcgtttcggtagcgttttatttttcgtagcgtttcgttttttcgtagcgtttcgttttttcgtagggtttcgtttcggtagcgtttcgttttttcgtagggtttcgtttcggtagcgtttcgttttttcgtagggtttcgtttcggtagcgtttcgttttttcgtagggtttcgtttcggtagcgtttttttcgtttttttgatcgcgttttttataggtgtgtttgttgttgttcgtcgtgtatttcgtcgtggtcgaggttcgtatttggtatagggaagggcgttggcgcgtgttgcggttcggagtttgggcgcggtggttgttggtggcgttgacggcggttacggtattggtacgtttcgtttagttgggtgtcgttgatcgttagtggattcgtttcgtgcgcggtcgttcgcgtcgttttattagtttcgattaggtggcgtagttgag

SEQ ID NO: 2940 - DNA, 840 bp, Artificial Sequence
  chemically treated genomic DNA (Homo sapiens) CpG-island No: 2940
ctcaactacgccacctaatcgaaactaataaaacgacgcgaacgaccgcgcacgaaacgaatccactaacgatcaacgacacccaactaaacgaaacgtaccaataccgtaaccgccgtcaacgccaccaacaaccaccgcgcccaaactccgaaccgcaacacgcgccaacgcccttccctataccaaatacgaacctcgaccacgacgaaatacacgacgaacaacaacaaacacacctataaaaaacgcgatcaaaaaaacgaaaaaaacgctaccgaaacgaaaccctacgaaaaaacgaaacgctaccgaaacgaaaccctacgaaaaaacgaaacgctaccgaaacgaaaccctacgaaaaaacgaaacgctaccgaaacgaaaccctacgaaaaaacgaaacgctacgaaaaaacgaaacgctacgaaaaataaaacgctaccgaaacgaaaccccgcgaaaaaacgaaacgctaccgataaaaaacgcgaaatctaaccgaaaacgaacgtaccgaaataaacaaaaacaacgaaaaacccgcgctaaaacgacgcaacgcaaaaaaacgaacgctaaaaacgaccaaaacgcgaccgaccgccgaaaactcgaaacgcaacgtaacgacgacgtacaaccccacgaccgaactataacgcgtaaactccaaaaacacaacgcgactcctacgcaaaaaatacgaatcaataaaaacgaataacaaaacgaaaactacgaaaaccgcgcaatacaaacgtaactaaaaaactataaaaaccgcctaaaccaacgaaaaccgaaaaaataaaaataaactcctaactaataac

SEQ ID NO: 2941 - DNA, 916 bp, Artificial Sequence
  chemically treated genomic DNA (Homo sapiens) CpG-island No: 2941
ggtttcggtttcggtttcgtttttattttcgttttcgcggaattttaggttcgcgcgtgcgtattggtagtagggaatttttagtttcgtcgtagagagcgggagggggcgtgagaggggagtttcgtgcgcgtttagtcggtttcgcgtgcgttgttaggacgatcgggcggggtcgcggggtcgtcggtcgtttattgcgtttgcgcgggggtgttcgttatttgcgtcggggttttttcgtcgcgcgttagtagaagaggggatgtcgcgtttagcgcgtatgcgtcggttttattcgatatttttcgtttttcgtttttaatttatttattttgagggtcggggaatttttattcgtcgtagtgcgtatgggggcggggcggggaaatcggtttaaatcggagtggggtttgtcgaggaggtggcgggggagggagcgagagcggggttttttcgaggtttttatttcggttttcgtcgttgttttagtaatcgggcgcgcgggtcgtagtgcgcgggcggcggcggtttcggggaagtcgggtggttttgcgtttgcgcggggtttcgcgtttgtagtcggggttttttttcgagtatcggggggacggcgggggagtagaggatgggcgcgggggagcgggtgttggggaggaagagatcgtgggggaagagacggcgcgggaggaaagaaggggaggaggggtgggtgtcgaggagggggcggtgggggaaaacgtaatgggtagggattgtagggaggggtgtagggagaggcgagtttggggatgcgcgttagggagggggtgacgggggagagcgtagagggagggggacgataaaggcggagggggatgggagggggagtttagggagtagagaagggatatggataaggagaggggtatattgg

SEQ ID NO: 2942 - DNA, 916 bp, Artificial Sequence
  chemically treated genomic DNA (Homo sapiens) CpG-island No: 2942
ccaatatacccctctccttatccatatcccttctctactccctaaactccccctcccatccccctccgcctttatcgtccccctccctctacgctctcccccgtcaccccctccctaacgcgcatccccaaactcgcctctccctacacccctccctacaatccctacccattacgttttcccccaccgccccctcctcgacacccacccctcctccccttctttcctcccgcgccgtctcttcccccacgatctcttcctccccaacacccgctcccccgcgcccatcctctactcccccgccgtccccccgatactcgaaaaaaaaccccgactacaaacgcgaaaccccgcgcaaacgcaaaaccacccgacttccccgaaaccgccgccgcccgcgcactacgacccgcgcgcccgattactaaaacaacgacgaaaaccgaaataaaaacctcgaaaaaaccccgctctcgctccctcccccgccacctcctcgacaaaccccactccgatttaaaccgatttccccgccccgcccccatacgcactacgacgaataaaaattccccgaccctcaaaataaataaattaaaaacgaaaaacgaaaaatatcgaataaaaccgacgcatacgcgctaaacgcgacatcccctcttctactaacgcgcgacgaaaaaaccccgacgcaaataacgaacacccccgcgcaaacgcaataaacgaccgacgaccccgcgaccccgcccgatcgtcctaacaacgcacgcgaaaccgactaaacgcgcacgaaactcccctctcacgccccctcccgctctctacgacgaaactaaaaattccctactaccaatacgcacgcgcgaacctaaaattccgcgaaaacgaaaataaaaacgaaaccgaaaccgaaacc

SEQ ID NO: 2943 - DNA, 916 bp, Artificial Sequence
  chemically treated genomic DNA (Homo sapiens) CpG-island No: 2943
ttagtgtatttttttttttgtttatattttttttttattttttaagtttttttttttattttttttcgtttttgtcgtttttttttttttacgttttttttcgttattttttttttggcgcgtatttttaggttcgtttttttttgtatttttttttatagtttttatttattgcgtttttttttatcgtttttttttcggtatttatttttttttttttttttttttttcgcgtcgtttttttttttacggtttttttttttttagtattcgttttttcgcgtttattttttattttttcgtcgttttttcggtgttcgagggggaatttcggttgtaggcgcggagtttcgcgtaggcgtagagttattcggttttttcgaggtcgtcgtcgttcgcgtattgcggttcgcgcgttcggttgttaaggtaacggcgggggtcggagtgggaatttcgggaagatttcgttttcgttttttttttcgttattttttcggtaaattttatttcggtttgaatcggttttttcgtttcgtttttatgcgtattgcggcgggtgaggatttttcggtttttagggtgggtgggttgggggcggggggcggggggtgtcgggtggggtcgacgtatgcgcgttgggcgcggtatttttttttttgttggcgcgcgacgggaaagtttcggcgtaaatggcgagtattttcgcgtaggcgtagtgagcgatcggcggtttcgcggtttcgttcggtcgttttggtaacgtacgcggggtcggttgggcgcgtacggaattttttttttacgttttttttcgttttttgcggcggagttggggattttttgttgttagtgcgtacgcgcgagtttgggatttcgcgggggcgggggtgggggcggggtcggggtcggggtt

SEQ ID NO: 2944 - DNA, 916 bp, Artificial Sequence
  chemically treated genomic DNA (Homo sapiens) CpG-island No: 2944
aaccccgaccccgaccccgcccccacccccgcccccgcgaaatcccaaactcgcgcgtacgcactaacaacaaaaaatccccaactccgccgcaaaaaacgaaaaaaaacgtaaaaaaaaaattccgtacgcgcccaaccgaccccgcgtacgttaccaaaacgaccgaacgaaaccgcgaaaccgccgatcgctcactacgcctacgcgaaaatactcgccatttacgccgaaactttcccgtcgcgcgccaacaaaaaaaaaaataccgcgcccaacgcgcatacgtcgaccccacccgacaccccccgccccccgcccccaacccacccaccctaaaaaccgaaaaatcctcacccgccgcaatacgcataaaaacgaaacgaaaaaaccgattcaaaccgaaataaaatttaccgaaaaaataacgaaaaaaaaaacgaaaacgaaatcttcccgaaattcccactccgacccccgccgttaccttaacaaccgaacgcgcgaaccgcaatacgcgaacgacgacgacctcgaaaaaaccgaataactctacgcctacgcgaaactccgcgcctacaaccgaaattccccctcgaacaccgaaaaaacgacgaaaaaataaaaaataaacgcgaaaaaacgaatactaaaaaaaaaaaaaccgtaaaaaaaaaaacgacgcgaaaaaaaaaaaaaaaaaaaaaaataaataccgaaaaaaaaacgataaaaaaaaacgcaataaataaaaactataaaaaaaaatacaaaaaaaaacgaacctaaaaatacgcgccaaaaaaaaaataacgaaaaaaaacgtaaaaaaaaaaaaacgacaaaaacgaaaaaaaataaaaaaaaaaacttaaaaaataaaaaaaaaatataaacaaaaaaaaaaatacactaa

SEQ ID NO: 2945 - DNA, 1027 bp, Artificial Sequence
  chemically treated genomic DNA (Homo sapiens) CpG-island No: 2945
attcgcgatagtcggcgaggggcgttagggagtttaaggtacgcgttaattttttgcggtcgcgtcgcgttttgcgttgttagacgttcgttgttatggcgttagggaggggataagagtttaggattttagcgcgcgtcgtaatttgtgcggttacgttcggttcgcgttgagagagcgtttggtagttagcgggtggacgcgttttttagcggagggtataaagtttggtcgtaggtacgtaggatatttagaacggagcgatggggacgtcgcgggtcgtaatacggattttgtttgggtgttagttcgggtttatagcgcggtcgaggcgtattttgcgttatatattgtttttttattggagaaagcgggacggtcgttacggacggcgtaatttttgcgtgcgtcgcggatcgacgtttgagggcgttagtagggttcgatttttttgtttcgttttcgtttttgttttcgggttcggttagcgtcgcggtttttggtttcgtttttatacgggttcgtaagtaggtatcgttttcgattttgtttttagtttcggttcgggttcggttttcgcgagtacggcgcgcgttttcggtttttgtggtcgcgcgttggtttggaggttgatttggaggtttatttggaggtcgagttgattcggtaggttttgcgcgggtaatatggcggcgttcggcgagcggggtcgtttttacggcgggaattttttttttttgtcggggggcgcgcgtttcgagatgatggacgatttggcgatcgacgcgcggggtcggggcgcggggcggagagacgcggtcgtttcggtttcgacgttagtttaggcgtcgattttcgatttttttgtcgtcgaggacgtttttcggaggcggtcgtgtcgggtttgcgtcgattttaagacgtggatgcggacgtagtagaaggtgtagttttttgttcgattttttttagtttcgcgtagtttttgttttcgttttcgtttaggtatttcggtagagttttttag

SEQ ID NO: 2946 - DNA, 1027 bp, Artificial Sequence
  chemically treated genomic DNA (Homo sapiens) CpG-island No: 2946
ctaaaaaactctaccgaaatacctaaacgaaaacgaaaacaaaaactacgcgaaactaaaaaaaatcgaacaaaaaactacaccttctactacgtccgcatccacgtcttaaaatcgacgcaaacccgacacgaccgcctccgaaaaacgtcctcgacgacaaaaaaatcgaaaatcgacgcctaaactaacgtcgaaaccgaaacgaccgcgtctctccgccccgcgccccgaccccgcgcgtcgatcgccaaatcgtccatcatctcgaaacgcgcgccccccgacaaaaaaaaaaaattcccgccgtaaaaacgaccccgctcgccgaacgccgccatattacccgcgcaaaacctaccgaatcaactcgacctccaaataaacctccaaatcaacctccaaaccaacgcgcgaccacaaaaaccgaaaacgcgcgccgtactcgcgaaaaccgaacccgaaccgaaactaaaaacaaaatcgaaaacgatacctacttacgaacccgtataaaaacgaaaccaaaaaccgcgacgctaaccgaacccgaaaacaaaaacgaaaacgaaacaaaaaaatcgaaccctactaacgccctcaaacgtcgatccgcgacgcacgcaaaaattacgccgtccgtaacgaccgtcccgctttctccaataaaaaaacaatatataacgcaaaatacgcctcgaccgcgctataaacccgaactaacacccaaacaaaatccgtattacgacccgcgacgtccccatcgctccgttctaaatatcctacgtacctacgaccaaactttataccctccgctaaaaaacgcgtccacccgctaactaccaaacgctctctcaacgcgaaccgaacgtaaccgcacaaattacgacgcgcgctaaaatcctaaactcttatcccctccctaacgccataacaacgaacgtctaacaacgcaaaacgcgacgcgaccgcaaaaaattaacgcgtaccttaaactccctaacgcccctcgccgactatcgcgaat

SEQ ID NO: 2947 - DNA, 1027 bp, Artificial Sequence
  chemically treated genomic DNA (Homo sapiens) CpG-island No: 2947
ttgggaagttttgtcggggtatttgggcgggggcggggataggggttgcgcggggttgggagaaatcgggtagggaattgtattttttgttgcgttcgtatttacgttttgaagtcgacgtaggttcggtacggtcgttttcgggaggcgttttcggcgataggagaatcggaggtcggcgtttgggttggcgtcgaggtcgaggcggtcgcgttttttcgtttcgcgtttcggtttcgcgcgtcggtcgttaggtcgtttattatttcggagcgcgcgtttttcggtaggaagaagaggttttcgtcgtggaagcggtttcgttcgtcgggcgtcgttatgttgttcgcgtaaggtttgtcgggttagttcggtttttagatgagtttttaggttagtttttaggttagcgcgcggttataggagtcggaggcgcgcgtcgtgttcgcgggggtcgggttcgagtcggggttgggggtagagtcgggggcggtgtttgtttgcgggttcgtgtggaggcggagttagaggtcgcggcgttggtcgggttcgaggataggggcggggacggagtaggagggtcggattttgttggcgtttttaggcgtcgattcgcggcgtacgtaggggttgcgtcgttcgtggcggtcgtttcgttttttttagtaaaagagtagtgtgtggcgtaaggtgcgtttcggtcgcgttgtggattcgagttgatatttaggtaaagttcgtgttgcggttcgcgacgtttttatcgtttcgttttgagtgttttgcgtgtttgcggttaggttttgtgtttttcgttgaggggcgcgtttattcgttggttgttaagcgtttttttaacgcgggtcgggcgtgatcgtatagattgcggcgcgcgttagggttttgggtttttgttttttttttggcgttatggtaacgggcgtttggtaacgtagggcgcggcgcggtcgtagagggttggcgcgtgttttgggttttttggcgtttttcgtcggttgtcgcggat

SEQ ID NO: 2948 - DNA, 1027 bp, Artificial Sequence
  chemically treated genomic DNA (Homo sapiens) CpG-island No: 2948
atccgcgacaaccgacgaaaaacgccaaaaaacccaaaacacgcgccaaccctctacgaccgcgccgcgccctacgttaccaaacgcccgttaccataacgccaaaaaaaaaacaaaaacccaaaaccctaacgcgcgccgcaatctatacgatcacgcccgacccgcgttaaaaaaacgcttaacaaccaacgaataaacgcgcccctcaacgaaaaacacaaaacctaaccgcaaacacgcaaaacactcaaaacgaaacgataaaaacgtcgcgaaccgcaacacgaactttacctaaatatcaactcgaatccacaacgcgaccgaaacgcaccttacgccacacactactcttttactaaaaaaaacgaaacgaccgccacgaacgacgcaacccctacgtacgccgcgaatcgacgcctaaaaacgccaacaaaatccgaccctcctactccgtccccgcccctatcctcgaacccgaccaacgccgcgacctctaactccgcctccacacgaacccgcaaacaaacaccgcccccgactctacccccaaccccgactcgaacccgacccccgcgaacacgacgcgcgcctccgactcctataaccgcgcgctaacctaaaaactaacctaaaaactcatctaaaaaccgaactaacccgacaaaccttacgcgaacaacataacgacgcccgacgaacgaaaccgcttccacgacgaaaacctcttcttcctaccgaaaaacgcgcgctccgaaataataaacgacctaacgaccgacgcgcgaaaccgaaacgcgaaacgaaaaaacgcgaccgcctcgacctcgacgccaacccaaacgccgacctccgattctcctatcgccgaaaacgcctcccgaaaacgaccgtaccgaacctacgtcgacttcaaaacgtaaatacgaacgcaacaaaaaatacaattccctacccgatttctcccaaccccgcgcaacccctatccccgcccccgcccaaataccccgacaaaacttcccaa

SEQ ID NO: 2949 - DNA, 1161 bp, Artificial Sequence
  chemically treated genomic DNA (Homo sapiens) CpG-island No: 2949
aacgtagggataggtttaggggcgtgggcgttcgaggcgggttcgtagaggtcgggtcgtcgtagggttttgagcgtcgcgtcgtacgtaggtgttttttatcgtcgttttcgggtttatcgttaacgagggttacgtgaatatcgatagcggtttcgagttgcgttgcgtgtttaacgggaacgcgggcgtttgtcgtttcggcgtcgcgttgggtttcggagtttttttcgtttgcgtcgtttttttgttgttcgatgtgcgtttttagtaaattagtagcgttcgcgatcgtcggcgcgcggtgttgttggatttgggttttttaggtgggcggggtcggggcggtgagcgcggagagtttttcgggtgggcggggagggggcggggtttgggcggggaatatcgttggagtttttagttgggcgtggtcgtgacgaggggcggggattgaggtagggagtgttaatgggtttttcgggtgggcggggagggggcggagtttggacggggagcgtcgcgggattttttaggtaggcggggttcgggtttgggcggagtttgggcgcggaacgggtttggcgttttcgggtgggcggggttagcgtaggagagggaggcgggatttcgcgttacgcggcgagtttaggcgaggcgttttaagtttcgggtttatcgattttttttttttcgggcgaggtcgtcgtgggttatcgcgtggagcgtcgttttgacgcgtcgtattgttcgtaggattttggttttttttgtggttcgtgggtttttgtttttttattaattagtggtagcgtacggcgttagggtcggttacgacgtaggcgggggacgcggcgcgggtcgttatcgtttttagttttttttttatttttagttgggtgagtgcggggttcgggagggcggggcgaaggggcgggcgttcggttgatttcggttgatttcgttgatttcgtttcgcgtaggtggcgtttatcgtgaaggttttgtagcggtttcgtttgggtatcgatatgttatttttcgttatcgaatagttgagtatcggggcgagttaggtttatttcggttattcggtgggtagcggcgtggagggtatcgagatttattagagttcgttttttatcgagattttggatattagtt

SEQ ID NO: 2950 - DNA, 1161 bp, Artificial Sequence
  chemically treated genomic DNA (Homo sapiens) CpG-island No: 2950
aactaatatccaaaatctcgataaaaaacgaactctaataaatctcgataccctccacgccgctacccaccgaataaccgaaataaacctaactcgccccgatactcaactattcgataacgaaaaataacatatcgatacccaaacgaaaccgctacaaaaccttcacgataaacgccacctacgcgaaacgaaatcaacgaaatcaaccgaaatcaaccgaacgcccgccccttcgccccgccctcccgaaccccgcactcacccaactaaaaataaaaaaaaaactaaaaacgataacgacccgcgccgcgtcccccgcctacgtcgtaaccgaccctaacgccgtacgctaccactaattaataaaaaaacaaaaacccacgaaccacaaaaaaaaccaaaatcctacgaacaatacgacgcgtcaaaacgacgctccacgcgataacccacgacgacctcgcccgaaaaaaaaaaaatcgataaacccgaaacttaaaacgcctcgcctaaactcgccgcgtaacgcgaaatcccgcctccctctcctacgctaaccccgcccacccgaaaacgccaaacccgttccgcgcccaaactccgcccaaacccgaaccccgcctacctaaaaaatcccgcgacgctccccgtccaaactccgccccctccccgcccacccgaaaaacccattaacactccctacctcaatccccgcccctcgtcacgaccacgcccaactaaaaactccaacgatattccccgcccaaaccccgccccctccccgcccacccgaaaaactctccgcgctcaccgccccgaccccgcccacctaaaaaacccaaatccaacaacaccgcgcgccgacgatcgcgaacgctactaatttactaaaaacgcacatcgaacaacaaaaaaacgacgcaaacgaaaaaaactccgaaacccaacgcgacgccgaaacgacaaacgcccgcgttcccgttaaacacgcaacgcaactcgaaaccgctatcgatattcacgtaaccctcgttaacgataaacccgaaaacgacgataaaaaacacctacgtacgacgcgacgctcaaaaccctacgacgacccgacctctacgaacccgcctcgaacgcccacgcccctaaacctatccctacgtt

SEQ ID NO: 2951 - DNA, 1161 bp, Artificial Sequence
  chemically treated genomic DNA (Homo sapiens) CpG-island No: 2951
ggttggtgtttagggtttcggtgaagggcgggttttggtaggtttcggtgttttttacgtcgttgtttatcggatagtcggggtaggtttggttcgtttcggtgtttagttgttcggtggcgaagagtgatatgtcggtgtttaggcggaatcgttgtagggtttttacggtgagcgttatttgcgcggggcggggttagcggggttagtcgggattagtcgagcgttcgttttttcgtttcgttttttcgggtttcgtatttatttagttgaggatggagaagaagttgaaggcgatggcggttcgcgtcgcgtttttcgtttgcgtcgtggtcggttttggcgtcgtgcgttgttattgattggtgaggaagtagaagtttacgaattataggaaggattagagttttgcgaatagtgcggcgcgttagggcgacgttttacgcggtggtttacggcggtttcgttcggaggaggaaaggtcggtgggttcgaggtttggggcgtttcgtttgggttcgtcgcgtggcgcgaggtttcgttttttttttttgcgttgatttcgtttattcgggagcgttagattcgtttcgcgtttaggtttcgtttagattcgggtttcgtttatttagaaagtttcgcggcgtttttcgtttaggtttcgtttttttttcgtttattcgggaggtttattgatattttttgttttagttttcgtttttcgttacggttacgtttagttggaaattttagcggtgtttttcgtttaggtttcgtttttttttcgtttattcggaaggtttttcgcgtttatcgtttcggtttcgtttatttgagaagtttaggtttagtaatatcgcgcgtcggcggtcgcggacgttgttgatttgttggaagcgtatatcgagtagtaggaaggcggcgtaggcgaggaaggtttcgaggtttagcgcgacgtcgaagcggtaggcgttcgcgttttcgttgaatacgtagcgtagttcggggtcgttgtcggtgtttacgtagttttcgttgacgatgggttcgaagacggcgatggagaatatttgcgtgcggcgcggcgtttagggttttgcggcgattcgatttttgcgagttcgtttcgagcgtttacgtttttgggtttgtttttgcgtt

SEQ ID NO: 2952 - DNA, 1161 bp, Artificial Sequence
  chemically treated genomic DNA (Homo sapiens) CpG-island No: 2952
aacgcaaaaacaaacccaaaaacgtaaacgctcgaaacgaactcgcaaaaatcgaatcgccgcaaaaccctaaacgccgcgccgcacgcaaatattctccatcgccgtcttcgaacccatcgtcaacgaaaactacgtaaacaccgacaacgaccccgaactacgctacgtattcaacgaaaacgcgaacgcctaccgcttcgacgtcgcgctaaacctcgaaaccttcctcgcctacgccgccttcctactactcgatatacgcttccaacaaatcaacaacgtccgcgaccgccgacgcgcgatattactaaacctaaacttctcaaataaacgaaaccgaaacgataaacgcgaaaaaccttccgaataaacgaaaaaaaaacgaaacctaaacgaaaaacaccgctaaaatttccaactaaacgtaaccgtaacgaaaaacgaaaactaaaacaaaaaatatcaataaacctcccgaataaacgaaaaaaaaacgaaacctaaacgaaaaacgccgcgaaactttctaaataaacgaaacccgaatctaaacgaaacctaaacgcgaaacgaatctaacgctcccgaataaacgaaatcaacgcaaaaaaaaaaaacgaaacctcgcgccacgcgacgaacccaaacgaaacgccccaaacctcgaacccaccgacctttcctcctccgaacgaaaccgccgtaaaccaccgcgtaaaacgtcgccctaacgcgccgcactattcgcaaaactctaatccttcctataattcgtaaacttctacttcctcaccaatcaataacaacgcacgacgccaaaaccgaccacgacgcaaacgaaaaacgcgacgcgaaccgccatcgccttcaacttcttctccatcctcaactaaataaatacgaaacccgaaaaaacgaaacgaaaaaacgaacgctcgactaatcccgactaaccccgctaaccccgccccgcgcaaataacgctcaccgtaaaaaccctacaacgattccgcctaaacaccgacatatcactcttcgccaccgaacaactaaacaccgaaacgaaccaaacctaccccgactatccgataaacaacgacgtaaaaaacaccgaaacctaccaaaacccgcccttcaccgaaaccctaaacaccaacc

SEQ ID NO: 2953 - DNA, 708 bp, Artificial Sequence
  chemically treated genomic DNA (Homo sapiens) CpG-island No: 2953
tttcgtcgttagtcgtacggtcgggatttcgttttgggtggttttattaggtttttttcggaagtcggcgtcgtcgggtttacggtcggattttagtgaggtaaagtttttattcggtcgtcgggagtttcgttgttttcgggtcgcgttttcggcgtttcgtatttggcgtagtttttcgcggtatacggcgtagtagcgttgttcgtagagtattcgtattttggtagagtagcggtagtatatcgggtggtcgtagcggttttagcgtcgtggtttttaggttttcgtagtatagtacgtagttttcgttttttcgtttaggagttgtcgtcgttttcgtttttatgttcgcgcgtcgtttttcggcgtttttcggtcgtcgttatggttcgggattcggtttttttttcggtcggtcgtggcgtcgagcggtttggttttcggcgggttcgtttttttcgggtaaacgttatcgttttatttagtaacgggttcgttcggcgtaagtgcgcgtcgcgattttcgttttagcgcggcgtcggttagagcggtggttttgatagaggtcgttttattatgagtcgatcgttcgaaggttcgcgcggttacgcggttagtttcgggtttttttgggttacgcgtgttacgttaatattcgtcgggttttacgaattggcgttgttagatgaaatacggtataattgg

SEQ ID NO: 2954 - DNA, 708 bp, Artificial Sequence
  chemically treated genomic DNA (Homo sapiens) CpG-island No: 2954
ccaattataccgtatttcatctaacaacgccaattcgtaaaacccgacgaatattaacgtaacacgcgtaacccaaaaaaacccgaaactaaccgcgtaaccgcgcgaaccttcgaacgatcgactcataataaaacgacctctatcaaaaccaccgctctaaccgacgccgcgctaaaacgaaaatcgcgacgcgcacttacgccgaacgaacccgttactaaataaaacgataacgtttacccgaaaaaaacgaacccgccgaaaaccaaaccgctcgacgccacgaccgaccgaaaaaaaaaccgaatcccgaaccataacgacgaccgaaaaacgccgaaaaacgacgcgcgaacataaaaacgaaaacgacgacaactcctaaacgaaaaaacgaaaactacgtactatactacgaaaacctaaaaaccacgacgctaaaaccgctacgaccacccgatatactaccgctactctaccaaaatacgaatactctacgaacaacgctactacgccgtataccgcgaaaaactacgccaaatacgaaacgccgaaaacgcgacccgaaaacaacgaaactcccgacgaccgaataaaaactttacctcactaaaatccgaccgtaaacccgacgacgccgacttccgaaaaaaacctaataaaaccacccaaaacgaaatcccgaccgtacgactaacgacgaaa

SEQ ID NO: 2955 - DNA, 708 bp, Artificial Sequence
  chemically treated genomic DNA (Homo sapiens) CpG-island No: 2955
ttagttgtgtcgtgttttatttgataacgttagttcgtggagttcggcgagtgttgacgtgatacgcgtggtttagaggagttcggggttggtcgcgtggtcgcgcggattttcgagcggtcggtttatggtagagcggtttttattagggttatcgttttagtcggcgtcgcgttgaggcggaagtcgcgacgcgtatttgcgtcgggcgggttcgttgttgggtggggcggtgacgtttgttcggaaggggcgggttcgtcgggagttaggtcgttcggcgttacgatcggtcgagaggggggtcggatttcggattatggcggcggtcggggggcgtcgaggggcggcgcgcggatatggaggcggaggcggcggtagtttttgagcgggaaggcgggagttgcgtgttgtgttgcggagatttggaggttacggcgttggggtcgttgcgattattcggtgtgttatcgttgttttattaagatgcgggtgttttgcgagtagcgttattgcgtcgtgtgtcgcgaggagttgcgttaggtgcggggcgtcgggggcgcggttcgggggtagcggggttttcggcgatcggatggggattttgttttattgaggttcggtcgtgggttcggcggcgtcggttttcgagagaggtttggtggggttatttagggcggggtttcggtcgtgcggttgacggcgggg

SEQ ID NO: 2956 - DNA, 708 bp, Artificial Sequence
  chemically treated genomic DNA (Homo sapiens) CpG-island No: 2956
ccccgccgtcaaccgcacgaccgaaaccccgccctaaataaccccaccaaacctctctcgaaaaccgacgccgccgaacccacgaccgaacctcaataaaacaaaatccccatccgatcgccgaaaaccccgctacccccgaaccgcgcccccgacgccccgcacctaacgcaactcctcgcgacacacgacgcaataacgctactcgcaaaacacccgcatcttaataaaacaacgataacacaccgaataatcgcaacgaccccaacgccgtaacctccaaatctccgcaacacaacacgcaactcccgccttcccgctcaaaaactaccgccgcctccgcctccatatccgcgcgccgcccctcgacgccccccgaccgccgccataatccgaaatccgacccccctctcgaccgatcgtaacgccgaacgacctaactcccgacgaacccgccccttccgaacaaacgtcaccgccccacccaacaacgaacccgcccgacgcaaatacgcgtcgcgacttccgcctcaacgcgacgccgactaaaacgataaccctaataaaaaccgctctaccataaaccgaccgctcgaaaatccgcgcgaccacgcgaccaaccccgaactcctctaaaccacgcgtatcacgtcaacactcgccgaactccacgaactaacgttatcaaataaaacacgacacaactaa

SEQ ID NO: 2957 - DNA, 699 bp, Artificial Sequence
  chemically treated genomic DNA (Homo sapiens) CpG-island No: 2957
cggttcgtttttagttttttgcgtttcggtatttgggcgttttaattttattgcgcgtttaaatttagtcgagtcggttcgtggttcgtttcgtcgggcggtcgtcgacgcgagcgttttggcgtggcgtttaggggagcggggggttttcgcgagtcggtcgcggttggtattgttgttgtttttgtttttgttgtcgttgtttttcggcgcgtggtataagtacgtggcgagttttcgttattatacggtgggtcgcgtcgttggtttgtttatggggttgcgtcgtttattttatttgtggcgtcgcgcgttgcgcgcggtcgtcgggtttttggttagggatattttttttttcgaattcgtagttcgcgaggttttttttttgttgttttcgtgggtttaggagttgtgggagacgcgacgtaggagtttttaggtagggattttcgttcgtgcgtttcggagttcgcgcgttttagagtttgcgttggaatcggagtttttggattttagcggagttggttaggtacgtgagaggggagaggtttggatcgtcgcgggtaagggggtttcgggaggtttgagtcggagtacggagtcgcgcgtttagggggtattttcgggtttttttattttttgtttcgcgtttagaagagttttttttgggtaggttcgattttggtattcgggggcggt

SEQ ID NO: 2958 - DNA, 699 bp, Artificial Sequence
  chemically treated genomic DNA (Homo sapiens) CpG-island No: 2958
accgcccccgaataccaaaatcgaacctacccaaaaaaaactcttctaaacgcgaaacaaaaaataaaaaaacccgaaaataccccctaaacgcgcgactccgtactccgactcaaacctcccgaaacccccttacccgcgacgatccaaacctctcccctctcacgtacctaaccaactccgctaaaatccaaaaactccgattccaacgcaaactctaaaacgcgcgaactccgaaacgcacgaacgaaaatccctacctaaaaactcctacgtcgcgtctcccacaactcctaaacccacgaaaacaacaaaaaaaaaacctcgcgaactacgaattcgaaaaaaaaaatatccctaaccaaaaacccgacgaccgcgcgcaacgcgcgacgccacaaataaaataaacgacgcaaccccataaacaaaccaacgacgcgacccaccgtataataacgaaaactcgccacgtacttataccacgcgccgaaaaacaacgacaacaaaaacaaaaacaacaacaataccaaccgcgaccgactcgcgaaaaccccccgctcccctaaacgccacgccaaaacgctcgcgtcgacgaccgcccgacgaaacgaaccacgaaccgactcgactaaatttaaacgcgcaataaaattaaaacgcccaaataccgaaacgcaaaaaactaaaaacgaaccg

SEQ ID NO: 2959 - DNA, 699 bp, Artificial Sequence
  chemically treated genomic DNA (Homo sapiens) CpG-island No: 2959
atcgttttcgggtgttagggtcgagtttgtttagggaaagtttttttgggcgcggagtagggaatggaagggttcgagggtgttttttgaacgcgcggtttcgtgtttcggtttagatttttcgagatttttttgttcgcggcggtttaggtttttttttttttacgtatttggttagtttcgttgaagtttagggatttcggttttagcgtaggttttggggcgcgcgggtttcggggcgtacggacggggatttttgtttgggagtttttgcgtcgcgttttttatagtttttgaatttacgagggtagtaggagaggagtttcgcgggttgcgggttcgggggagagggtgtttttggttaggggttcggcggtcgcgcgtagcgcgcggcgttatagatagggtgagcgacgtagttttatgagtaggttagcggcgcggtttatcgtgtggtagcggggattcgttacgtgtttgtattacgcgtcggagggtagcggtagtaggagtagaagtagtagtagtgttagtcgcggtcggttcgcgggagtttttcgtttttttgggcgttacgttagggcgttcgcgtcgacggtcgttcggcggggcgggttacgaatcggttcggttgggtttgggcgcgtagtggagttgggacgtttaggtatcggagcgtaggaggttggaggcgagtcg

SEQ ID NO: 2960 - DNA, 699 bp, Artificial Sequence
  chemically treated genomic DNA (Homo sapiens) CpG-island No: 2960
cgactcgcctccaacctcctacgctccgatacctaaacgtcccaactccactacgcgcccaaacccaaccgaaccgattcgtaacccgccccgccgaacgaccgtcgacgcgaacgccctaacgtaacgcccaaaaaaacgaaaaactcccgcgaaccgaccgcgactaacactactactacttctactcctactaccgctaccctccgacgcgtaatacaaacacgtaacgaatccccgctaccacacgataaaccgcgccgctaacctactcataaaactacgtcgctcaccctatctataacgccgcgcgctacgcgcgaccgccgaacccctaaccaaaaacaccctctcccccgaacccgcaacccgcgaaactcctctcctactaccctcgtaaattcaaaaactataaaaaacgcgacgcaaaaactcccaaacaaaaatccccgtccgtacgccccgaaacccgcgcgccccaaaacctacgctaaaaccgaaatccctaaacttcaacgaaactaaccaaatacgtaaaaaaaaaaaaacctaaaccgccgcgaacaaaaaaatctcgaaaaatctaaaccgaaacacgaaaccgcgcgttcaaaaaacaccctcgaacccttccattccctactccgcgcccaaaaaaactttccctaaacaaactcgaccctaacacccgaaaacgat

SEQ ID NO: 2961 - DNA, 1057 bp, Artificial Sequence
  chemically treated genomic DNA (Homo sapiens) CpG-island No: 2961
ttttgtcgcgttggagtatattagagtgggtttgttcggcgcgtacgcgttttcggtgggcggtgtcgagtatcgtagcgtagtatatagtagtaacgtgagtattaataggttggatatcgcgtagatggtaatgattaagtaaatattgatatttattagcgtcgtttttggatttatagcgtttgtcgacgttttcgacgaagtttgtggcgtttggtcgttttttattagcgataatagtatcgttgtcgtggtcgttagcgcgggtttatcgtggttttttattagtattagaaggcggtggtgcggcgcgtttatttcgtttagagggcgcgtcgtgttgatttcgttagtgtatagttttacgcggaacgggatgcgcgcgtcgatcgtcgttagttgtaatttatacgaaagttacgtattgtagttcgaatcggcgtttatcgcgcgtattttcgttattacgtggtttgtatttatcgatcgcggtattagttcgtttattgtgtttttcgcgttgttagtttcgggcgttagtagcgtcggagcgttgtcgttttcgtttagtacgaatatttgtagcgttacgttgttgtttagaggcggtacgttagagtcgcgcgcgtttatttggaattgtaatagttttagtttttcgtggtttaacggttgtagcgcgtatattttgtcgtttttcgcgtgtatcgatacgtagttcgatagcgtacgttcgtttattcgtcgttttattagcgagtaggagattagcgcgtttttttgtgcgttcgcgttttgagtagatatcgtgaagatgtggtagttcggcggattgtttttttttacgaatatcgtgtattcgggttgcgcgaacgtcggcgcgttgtcgtttacgtcggttatttttatcgatacgttggtcgtggtttatagcgaaggcgagttttcgtttcgcgcggttattattagtttataggttgatacgttttcgcggtttagggcgttgtttagtattaatgagtagtagtttttgtaggtggatattagtttgaag

SEQ ID NO: 2962 - DNA, 1057 bp, Artificial Sequence
  chemically treated genomic DNA (Homo sapiens) CpG-island No: 2962
cttcaaactaatatccacctacaaaaactactactcattaatactaaacaacgccctaaaccgcgaaaacgtatcaacctataaactaataataaccgcgcgaaacgaaaactcgccttcgctataaaccacgaccaacgtatcgataaaaataaccgacgtaaacgacaacgcgccgacgttcgcgcaacccgaatacacgatattcgtaaaaaaaaacaatccgccgaactaccacatcttcacgatatctactcaaaacgcgaacgcacaaaaaaacgcgctaatctcctactcgctaataaaacgacgaataaacgaacgtacgctatcgaactacgtatcgatacacgcgaaaaacgacaaaatatacgcgctacaaccgttaaaccacgaaaaactaaaactattacaattccaaataaacgcgcgcgactctaacgtaccgcctctaaacaacaacgtaacgctacaaatattcgtactaaacgaaaacgacaacgctccgacgctactaacgcccgaaactaacaacgcgaaaaacacaataaacgaactaataccgcgatcgataaatacaaaccacgtaataacgaaaatacgcgcgataaacgccgattcgaactacaatacgtaactttcgtataaattacaactaacgacgatcgacgcgcgcatcccgttccgcgtaaaactatacactaacgaaatcaacacgacgcgccctctaaacgaaataaacgcgccgcaccaccgccttctaatactaataaaaaaccacgataaacccgcgctaacgaccacgacaacgatactattatcgctaataaaaaacgaccaaacgccacaaacttcgtcgaaaacgtcgacaaacgctataaatccaaaaacgacgctaataaatatcaatatttacttaatcattaccatctacgcgatatccaacctattaatactcacgttactactatatactacgctacgatactcgacaccgcccaccgaaaacgcgtacgcgccgaacaaacccactctaatatactccaacgcgacaaaa

SEQ ID NO: 2963 - DNA, 1057 bp, Artificial Sequence
  chemically treated genomic DNA (Homo sapiens) CpG-island No: 2963
ttttaagttggtgtttatttataagaattattatttattagtgttggatagcgttttggatcgcgagagcgtattagtttatgaattggtggtgatcgcgcgggacgggggttcgttttcgttgtgggttacggttagcgtgtcggtgggggtggtcgacgtgaacgataacgcgtcggcgttcgcgtagttcgagtatacggtgttcgtgaaggaaaataattcgtcgggttgttatatttttacggtgtttgtttaggacgcggacgtataggagaacgcgttggttttttattcgttggtggagcggcgggtgggcgagcgtgcgttgtcgagttacgtgtcggtgtacgcggagagcggtaaggtgtacgcgttgtagtcgttggattacgaggagttggagttgttgtagttttaggtgagcgcgcgcgattttggcgtgtcgtttttgggtagtaacgtgacgttgtaggtgttcgtgttggacgagaacgataacgtttcggcgttgttgacgttcggggttggtagcgcgggaggtatagtgagcgagttgatgtcgcggtcggtgggtgtaggttacgtggtggcgaaggtgcgcgcggtggacgtcgattcgggttataatgcgtggttttcgtatgaattgtagttggcggcggtcggcgcgcgtatttcgtttcgcgtggggttgtatattggcgagattagtacgacgcgttttttggacgaggtggacgcgtcgtattatcgttttttggtgttggtgaaggattacggtgagttcgcgttgacggttacggtaacggtgttgttgtcgttggtggagagcggttaagcgttataggtttcgtcgagggcgtcggtaggcgttgtgggtttagaagcggcgttggtggatgttaatgtttatttgattattgttatttgcgcggtgtttagtttgttggtgtttacgttgttgttgtatattgcgttgcggtgttcggtatcgtttatcgagggcgcgtgcgcgtcgggtaagtttattttagtgtgttttagcgcggtaggg

SEQ ID NO: 2964 - DNA, 1057 bp, Artificial Sequence
  chemically treated genomic DNA (Homo sapiens) CpG-island No: 2964
ccctaccgcgctaaaacacactaaaataaacttacccgacgcgcacgcgccctcgataaacgataccgaacaccgcaacgcaatatacaacaacaacgtaaacaccaacaaactaaacaccgcgcaaataacaataatcaaataaacattaacatccaccaacgccgcttctaaacccacaacgcctaccgacgccctcgacgaaacctataacgcttaaccgctctccaccaacgacaacaacaccgttaccgtaaccgtcaacgcgaactcaccgtaatccttcaccaacaccaaaaaacgataatacgacgcgtccacctcgtccaaaaaacgcgtcgtactaatctcgccaatatacaaccccacgcgaaacgaaatacgcgcgccgaccgccgccaactacaattcatacgaaaaccacgcattataacccgaatcgacgtccaccgcgcgcaccttcgccaccacgtaacctacacccaccgaccgcgacatcaactcgctcactatacctcccgcgctaccaaccccgaacgtcaacaacgccgaaacgttatcgttctcgtccaacacgaacacctacaacgtcacgttactacccaaaaacgacacgccaaaatcgcgcgcgctcacctaaaactacaacaactccaactcctcgtaatccaacgactacaacgcgtacaccttaccgctctccgcgtacaccgacacgtaactcgacaacgcacgctcgcccacccgccgctccaccaacgaataaaaaaccaacgcgttctcctatacgtccgcgtcctaaacaaacaccgtaaaaatataacaacccgacgaattattttccttcacgaacaccgtatactcgaactacgcgaacgccgacgcgttatcgttcacgtcgaccacccccaccgacacgctaaccgtaacccacaacgaaaacgaacccccgtcccgcgcgatcaccaccaattcataaactaatacgctctcgcgatccaaaacgctatccaacactaataaataataattcttataaataaacaccaacttaaaa

SEQ ID NO: 2965 - DNA, 1047 bp, Artificial Sequence
  chemically treated genomic DNA (Homo sapiens) CpG-island No: 2965
tcggcgcgtatcggtttacggtgggcggcgttgagtaacgtagcgtagtgtatagtagtagcgtgagtattagtaggttggatatcgtatagatggcgatgatgaggtatacgttaatatttattagagtcgtttcgggatttatagcgtttattgaggttcgcgacgacgtttttggggtttggtcgttttttattagcgatattagtatcgtggtcgtggacgttagcgcgggtttatcgtggttttttattagtattagtaggcggtggcgcggagcgttcgttttatttaggatgcgtgtcgtgttgatttcgttagtgtatagttttacgtggaacgggatgtgcgcgtcgatcgtcgtcggttgtaattcgtaggatagttaagcgttatagtcggagttagcgtttatcgcgcgtattttcgttattacgtggttcgtatttatcgatcgcggtattaattcgttaattgcgttttttgcgttgttagtcggagtcgttagtagtgtcggcgcgttgtcgttttcgtttagtacgaatatttgtagcgttacgttgttgtttagaggcggtacgtcggcgtcgcgcgcgtttatttggaattgtagtagttttagtttttcgtggtttagcggttgtagcgcgtatattttgtcgtttttcgcgtgtatcgatacgtagttcgatagtgcgtgttcgtttattcgtcgttttattagcgagtaggatattagcgcgtttttttgcgcgttcgcgttttatgtcgatatcgtgaagatgtggtagttcggcgggttgtttttttttacgaatattgtgtattcgggttgcgcgaacgtaggcgtattgtcgtttacgtcggttatttttacggatattttagtcgtggtttatagcgaaggcgagtttttatttcgcgtagttattattagtttataggtcgatacgttttcgcggtttagggcgttgtttagtattaacgagtagtaatttttgtaggtggatattagtttgaagggaatatgaggtgttagtgagtaga

SEQ ID NO: 2966 - DNA, 1047 bp, Artificial Sequence
  chemically treated genomic DNA (Homo sapiens) CpG-island No: 2966
tctactcactaacacctcatattcccttcaaactaatatccacctacaaaaattactactcgttaatactaaacaacgccctaaaccgcgaaaacgtatcgacctataaactaataataactacgcgaaataaaaactcgccttcgctataaaccacgactaaaatatccgtaaaaataaccgacgtaaacgacaatacgcctacgttcgcgcaacccgaatacacaatattcgtaaaaaaaaacaacccgccgaactaccacatcttcacgatatcgacataaaacgcgaacgcgcaaaaaaacgcgctaatatcctactcgctaataaaacgacgaataaacgaacacgcactatcgaactacgtatcgatacacgcgaaaaacgacaaaatatacgcgctacaaccgctaaaccacgaaaaactaaaactactacaattccaaataaacgcgcgcgacgccgacgtaccgcctctaaacaacaacgtaacgctacaaatattcgtactaaacgaaaacgacaacgcgccgacactactaacgactccgactaacaacgcaaaaaacgcaattaacgaattaataccgcgatcgataaatacgaaccacgtaataacgaaaatacgcgcgataaacgctaactccgactataacgcttaactatcctacgaattacaaccgacgacgatcgacgcgcacatcccgttccacgtaaaactatacactaacgaaatcaacacgacacgcatcctaaataaaacgaacgctccgcgccaccgcctactaatactaataaaaaaccacgataaacccgcgctaacgtccacgaccacgatactaatatcgctaataaaaaacgaccaaaccccaaaaacgtcgtcgcgaacctcaataaacgctataaatcccgaaacgactctaataaatattaacgtatacctcatcatcgccatctatacgatatccaacctactaatactcacgctactactatacactacgctacgttactcaacgccgcccaccgtaaaccgatacgcgccga

SEQ ID NO: 2967 - DNA, 1047 bp, Artificial Sequence
  chemically treated genomic DNA (Homo sapiens) CpG-island No: 2967
tttgtttattgatattttatgttttttttaagttggtgtttatttataagaattattattcgttggtgttggatagcgttttggatcgcgagagcgtgtcggtttatgagttggtggtgattgcgcgggatgggggttcgttttcgttgtgggttacggttagagtgttcgtggaggtggtcgacgtgaacgataatgcgtttgcgttcgcgtagttcgagtatatagtgttcgtgaaggagaataattcgtcgggttgttatatttttacggtgtcggtatgggacgcggacgcgtagaagaacgcgttggtgttttattcgttggtggagcggcgggtgggcgagtacgtattgtcgagttacgtgtcggtgtacgcggagagcggtaaggtgtacgcgttgtagtcgttagattacgaggagttggagttgttgtagttttaggtgagcgcgcgcgacgtcggcgtgtcgtttttgggtagtaacgtgacgttgtaggtgttcgtgttggacgagaacgataacgcgtcggtattgttggcgatttcggttggtagcgtaggaggcgtagttagcgagttggtatcgcggtcggtgggtgcgggttacgtggtggcgaaagtgcgcgcggtggacgttgatttcggttataacgtttggttgttttacgagttgtaatcggcggcggtcggcgcgtatatttcgttttacgtggggttgtatattggcgagattagtacgatacgtattttggatgaggcggacgtttcgcgttatcgtttgttggtgttggtgaaggattacggtgagttcgcgttgacgtttacggttacggtgttggtgtcgttggtggagaacggttaggttttaaagacgtcgtcgcgggttttagtgggcgttgtggatttcgaagcggttttggtggatattaacgtgtattttattatcgttatttgtgcggtgtttagtttgttggtgtttacgttgttgttgtatattgcgttgcgttgtttagcgtcgtttatcgtgagtcggtgcgcgtcgg

SEQ ID NO: 2968 - DNA, 1047 bp, Artificial Sequence
  chemically treated genomic DNA (Homo sapiens) CpG-island No: 2968
ccgacgcgcaccgactcacgataaacgacgctaaacaacgcaacgcaatatacaacaacaacgtaaacaccaacaaactaaacaccgcacaaataacgataataaaatacacgttaatatccaccaaaaccgcttcgaaatccacaacgcccactaaaacccgcgacgacgtctttaaaacctaaccgttctccaccaacgacaccaacaccgtaaccgtaaacgtcaacgcgaactcaccgtaatccttcaccaacaccaacaaacgataacgcgaaacgtccgcctcatccaaaatacgtatcgtactaatctcgccaatatacaaccccacgtaaaacgaaatatacgcgccgaccgccgccgattacaactcgtaaaacaaccaaacgttataaccgaaatcaacgtccaccgcgcgcactttcgccaccacgtaacccgcacccaccgaccgcgataccaactcgctaactacgcctcctacgctaccaaccgaaatcgccaacaataccgacgcgttatcgttctcgtccaacacgaacacctacaacgtcacgttactacccaaaaacgacacgccgacgtcgcgcgcgctcacctaaaactacaacaactccaactcctcgtaatctaacgactacaacgcgtacaccttaccgctctccgcgtacaccgacacgtaactcgacaatacgtactcgcccacccgccgctccaccaacgaataaaacaccaacgcgttcttctacgcgtccgcgtcccataccgacaccgtaaaaatataacaacccgacgaattattctccttcacgaacactatatactcgaactacgcgaacgcaaacgcattatcgttcacgtcgaccacctccacgaacactctaaccgtaacccacaacgaaaacgaacccccatcccgcgcaatcaccaccaactcataaaccgacacgctctcgcgatccaaaacgctatccaacaccaacgaataataattcttataaataaacaccaacttaaaaaaaacataaaatatcaataaacaaa

SEQ ID NO: 2969 - DNA, 1228 bp, Artificial Sequence
  chemically treated genomic DNA (Homo sapiens) CpG-island No: 2969
tagcgtgggttttttcggcgcgtacgcgtttttagtgggcgttgtcgattattatagcgtcgtatatagtagtagcgtgagtattaggaggttggatattacgtagatggcgatgattaggtatacgttgatatttattagcgtagtttttgggttcgcggcgttcgttaaagttcgggaagaggtttttggcgtttgttcgttttttattaacgatattagtacggtggtcgtggtcgttagcgtcggtttatcgtgattttttattagtattagaagtcggtggcgcggcgagtttgtttcgtttagggtacgcgttgtgtttatttcgttcgtgtatagttttacgcggaacgggatgcgcgagtcgttcgtcgtcggttgtaatttatatgaaagttacgcgttgtagtttgagttcgtatttattgcgcgtattttcgttattacgtggttcgtatttatcgatcgcggtattagtttgttaattgcgtttttcgcgttgttagtttgagtcgttagtagtgtcggcgcgttgtcgttttcgtttagtacgaatatttgtagcgttacgttgttgtttagaggcggtacgttcgtatcgcgcgcgtttatttggaattgtagtagttttagtttttcgtggtttaacggttgtagcgcgtatattttgtcgtttttcgcgtgtatcgatacgtagttcgatagcgcgcggtcgtttaatcgtcgttttattagcgagtaggatattagcgcgtttttttgcgcgttcgcgtttcgcgtcgatattgtgaagatgtggtagtttggtgggttgtttttttttacgaatacggtgtattcgggttgtgcgaacgtaggcgtattgtcgtttacgtcggttatttttacggatattttggtcgtggtttatagagaaggcgaatttttatttcgcgtagttattattagtttataggtttatacgttttcgcggtttagggcgttgtttagtattaacgagtagtaatttttgaaggtggatattagtttgaagggaacgtggggcgttagcgagtaggttatttgttcgttgatatttgagttacggttagatacgttgattagggtaatgatcgtgttgggttgagcgttttttcgtattgggagggataaggaagttacggcgattttaggagagttatcgttggtgtttaagatttttatttagattgtatagtgatttgtt

SEQ ID NO: 2970 - DNA, 1228 bp, Artificial Sequence
  chemically treated genomic DNA (Homo sapiens) CpG-island No: 2970
aacaaatcactatacaatctaaataaaaatcttaaacaccaacgataactctcctaaaatcgccgtaacttccttatccctcccaatacgaaaaaacgctcaacccaacacgatcattaccctaatcaacgtatctaaccgtaactcaaatatcaacgaacaaataacctactcgctaacgccccacgttcccttcaaactaatatccaccttcaaaaattactactcgttaatactaaacaacgccctaaaccgcgaaaacgtataaacctataaactaataataactacgcgaaataaaaattcgccttctctataaaccacgaccaaaatatccgtaaaaataaccgacgtaaacgacaatacgcctacgttcgcacaacccgaatacaccgtattcgtaaaaaaaaacaacccaccaaactaccacatcttcacaatatcgacgcgaaacgcgaacgcgcaaaaaaacgcgctaatatcctactcgctaataaaacgacgattaaacgaccgcgcgctatcgaactacgtatcgatacacgcgaaaaacgacaaaatatacgcgctacaaccgttaaaccacgaaaaactaaaactactacaattccaaataaacgcgcgcgatacgaacgtaccgcctctaaacaacaacgtaacgctacaaatattcgtactaaacgaaaacgacaacgcgccgacactactaacgactcaaactaacaacgcgaaaaacgcaattaacaaactaataccgcgatcgataaatacgaaccacgtaataacgaaaatacgcgcaataaatacgaactcaaactacaacgcgtaactttcatataaattacaaccgacgacgaacgactcgcgcatcccgttccgcgtaaaactatacacgaacgaaataaacacaacgcgtaccctaaacgaaacaaactcgccgcgccaccgacttctaatactaataaaaaatcacgataaaccgacgctaacgaccacgaccaccgtactaatatcgttaataaaaaacgaacaaacgccaaaaacctcttcccgaactttaacgaacgccgcgaacccaaaaactacgctaataaatatcaacgtatacctaatcatcgccatctacgtaatatccaacctcctaatactcacgctactactatatacgacgctataataatcgacaacgcccactaaaaacgcgtacgcgccgaaaaaacccacgcta

SEQ ID NO: 2971 - DNA, 1228 bp, Artificial Sequence
  chemically treated genomic DNA (Homo sapiens) CpG-island No: 2971
ggtaggttattgtatagtttgggtggaaattttggatattaacgataatttttttgaagtcgtcgtgatttttttgttttttttagtacgagaggacgtttagtttagtacggttattgttttgattagcgtgtttgatcgtgatttaggtgttaacggataggtgatttgttcgttgacgttttacgttttttttaagttggtgtttatttttaagaattattattcgttggtgttggatagcgttttggatcgcgagaacgtgtgggtttatgaattggtggtgattgcgcgggatgggggttcgttttttttgtgggttacggttagggtattcgtggaggtggtcgacgtgaacgataatgcgtttgcgttcgtatagttcgagtatatcgtgttcgtgaaggagaataatttattaggttgttatatttttatagtgtcggcgcgggacgcggacgcgtaggagaacgcgttggtgttttattcgttggtggagcggcggttgggcgatcgcgcgttgtcgagttacgtgtcggtgtacgcggagagcggtaaggtgtacgcgttgtagtcgttggattacgaggagttggagttgttatagttttaggtgagcgcgcgcgatgcgggcgtgtcgtttttgagtagtaacgtgacgttgtaggtgttcgtgttggacgagaacgataacgcgtcggtattgttggcgatttaggttggtagcgcgggaggcgtagttaataagttagtatcgcggtcggtgggtgcgggttacgtggtggcgaaggtgcgcgtagtggatgcggatttaggttataacgcgtggtttttatatgaattgtagtcggcggcgggcggttcgcgtatttcgtttcgcgtggggttgtatacgggcgagataagtataacgcgtgttttggacgaggtagattcgtcgcgttatcgatttttagtattggtgaaggattacggtgagtcggcgttgacggttacggttatcgtgttggtgtcgttggtggagagcggataggcgttaaaggttttttttcggattttggcgggcgtcgcgagtttagaggttgcgttggtggatgttaacgtgtatttgattatcgttatttgcgtggtgtttagttttttggtatttacgttgttgttgtatacggcgttgtggtggtcggtaacgtttattgagggcgcgtgcgcgtcggggaagtttacgttg

SEQ ID NO: 2972 - DNA, 1228 bp, Artificial Sequence
  chemically treated genomic DNA (Homo sapiens) CpG-island No: 2972
caacgtaaacttccccgacgcgcacgcgccctcaataaacgttaccgaccaccacaacgccgtatacaacaacaacgtaaataccaaaaaactaaacaccacgcaaataacgataatcaaatacacgttaacatccaccaacgcaacctctaaactcgcgacgcccgccaaaatccgaaaaaaaacctttaacgcctatccgctctccaccaacgacaccaacacgataaccgtaaccgtcaacgccgactcaccgtaatccttcaccaatactaaaaatcgataacgcgacgaatctacctcgtccaaaacacgcgttatacttatctcgcccgtatacaaccccacgcgaaacgaaatacgcgaaccgcccgccgccgactacaattcatataaaaaccacgcgttataacctaaatccgcatccactacgcgcaccttcgccaccacgtaacccgcacccaccgaccgcgatactaacttattaactacgcctcccgcgctaccaacctaaatcgccaacaataccgacgcgttatcgttctcgtccaacacgaacacctacaacgtcacgttactactcaaaaacgacacgcccgcatcgcgcgcgctcacctaaaactataacaactccaactcctcgtaatccaacgactacaacgcgtacaccttaccgctctccgcgtacaccgacacgtaactcgacaacgcgcgatcgcccaaccgccgctccaccaacgaataaaacaccaacgcgttctcctacgcgtccgcgtcccgcgccgacactataaaaatataacaacctaataaattattctccttcacgaacacgatatactcgaactatacgaacgcaaacgcattatcgttcacgtcgaccacctccacgaataccctaaccgtaacccacaaaaaaaacgaacccccatcccgcgcaatcaccaccaattcataaacccacacgttctcgcgatccaaaacgctatccaacaccaacgaataataattcttaaaaataaacaccaacttaaaaaaaacgtaaaacgtcaacgaacaaatcacctatccgttaacacctaaatcacgatcaaacacgctaatcaaaacaataaccgtactaaactaaacgtcctctcgtactaaaaaaaacaaaaaaatcacgacgacttcaaaaaaattatcgttaatatccaaaatttccacccaaactatacaataacctacc

SEQ ID NO: 2973 - DNA, 529 bp, Artificial Sequence
  chemically treated genomic DNA (Homo sapiens) CpG-island No: 2973
tgaatatcgtattagtttatttatagcgtcgttagtttatttaaggcgttagtagcgtagataaagttgtcgttttagtattaatatttggtagcgttatattgttgtttagaggcggtatgttcgcgtcgcgcgtttttatttagaattgtagtagttttagtttttcgtagtttagtggttgtaacgcgtattttttgtcgtttttcgcgtgtatttatatatagttagatagcgcgtattcgtttattcgttgttttattaacgagtaggatattagtacgtttttttgcgcgtttcggtttcgcgcggatattgtgaagtcgtggtagtttcgcgggttgttattttttacgaatattatgtattcgggttgttggaacgttagggtattgtggtttattgttcggttatttttacggattcgatggttgtggttaataatgaaagcgagtttttatttcgagcgattattaataatggatagatttgtttttttggtttagggcgttgtggagtattaacgaat

SEQ ID NO: 2974 - DNA, 529 bp, Artificial Sequence
  chemically treated genomic DNA (Homo sapiens) CpG-island No: 2974
attcgttaatactccacaacgccctaaaccaaaaaaacaaatctatccattattaataatcgctcgaaataaaaactcgctttcattattaaccacaaccatcgaatccgtaaaaataaccgaacaataaaccacaataccctaacgttccaacaacccgaatacataatattcgtaaaaaataacaacccgcgaaactaccacgacttcacaatatccgcgcgaaaccgaaacgcgcaaaaaaacgtactaatatcctactcgttaataaaacaacgaataaacgaatacgcgctatctaactatatataaatacacgcgaaaaacgacaaaaaatacgcgttacaaccactaaactacgaaaaactaaaactactacaattctaaataaaaacgcgcgacgcgaacataccgcctctaaacaacaatataacgctaccaaatattaatactaaaacgacaactttatctacgctactaacgccttaaataaactaacgacgctataaataaactaatacgatattca

SEQ ID NO: 2975 - DNA, 529 bp, Artificial Sequence
  chemically treated genomic DNA (Homo sapiens) CpG-island No: 2975
attcgttggtattttatagcgttttggattaagagagtaaatttatttattgttggtaatcgttcggaatggggattcgtttttattgttggttatagttatcgggttcgtggaagtggtcgaatagtgaattataatgttttggcgttttagtagttcgagtatatggtgttcgtgaaaggtaataattcgcggggttgttacgattttatagtgttcgcgcgggatcgggacgcgtaggagaacgtgttggtgttttattcgttgatggaatagcgggtgggcgagtgcgcgttgtttagttatgtgtgggtgtacgcggagagcggtaagaggtacgcgttgtagttattggattacgaggagttggagttgttgtagttttaggtgagagcgcgcgacgcgggtatgtcgtttttgagtagtaatgtgacgttgttaggtattagtgttggaacgataattttgtttgcgttgttggcgttttgggtgggttggcggcgttgtgagtgagttggtgcggtattta

SEQ ID NO: 2976 - DNA, 529 bp, Artificial Sequence
  chemically treated genomic DNA (Homo sapiens) CpG-island No: 2976
taaataccgcaccaactcactcacaacgccgccaacccacccaaaacgccaacaacgcaaacaaaattatcgttccaacactaatacctaacaacgtcacattactactcaaaaacgacatacccgcgtcgcgcgctctcacctaaaactacaacaactccaactcctcgtaatccaataactacaacgcgtacctcttaccgctctccgcgtacacccacacataactaaacaacgcgcactcgcccacccgctattccatcaacgaataaaacaccaacacgttctcctacgcgtcccgatcccgcgcgaacactataaaatcgtaacaaccccgcgaattattacctttcacgaacaccatatactcgaactactaaaacgccaaaacattataattcactattcgaccacttccacgaacccgataactataaccaacaataaaaacgaatccccattccgaacgattaccaacaataaataaatttactctcttaatccaaaacgctataaaataccaacgaat

SEQ ID NO: 2977 - DNA, 1060 bp, Artificial Sequence
  chemically treated genomic DNA (Homo sapiens) CpG-island No: 2977
tatatgcgttttcggtgggcgtcgtcgagtattttagtgtagtgtatagtagtagcgtgagtattagtaagttggatatcgcgtagatggcgatgattaggtatacgttgatatttattagggttatttcgggcgttacgtttattgaagttcgcgacgaggttttgggtgtttggttgttttttataagcgatataagtatagtggtcgtggtcgttagcgacggttcgttatggttttttattagtattagtaggcgttggcgtggcgagttagttttatttagagcgcgcgtcgtattgatttcgttcgtgtatagttttacgcgaaacgggatgcgtgtattaatcgtcgtcgattgtaatttatacgatagttacgcgttgtatttagagttagcgtttattgcgcgtattttagttattacgtgattcgtaattatcgatcgtagtattagtttattgattgtatcgttcgcgttgttagcgggagacgttagtagcgcgggagcgttgtcgttttcgtttagtacgaatatttgtagcgttaagttgttgtttagaggcggtacgtttttatcgcgcgcgtttatttggaattgtagtagttttagtttttcgtggtttagcggttgtagcgcgtatattttgtcgtttttcgcgtgtatcgatacgtagttcgatagcgagcgttcgtttaatcgtcgttttattagagagtaggatattagggcgtttttttgcgcgttcgcgttttacgtagatatcgtgaagatgtggtagtttggcgggttgtttttttttacgaatatcgtgtattcggattgcgcgaacgtaggcgcgttgtcgtttacgtcggttatttttatagatacgttggtcgtggtttatagcggaggcgagttttcgtttcgcgcggttattattagtttataggtcgatattttttcgcggtttagagcgttgtttagtattaatgagtagtaatttttgtaggtggatattagtttgaacggaacgtgaggcgttagagagtaggtgatttgttcgttggtttttga

SEQ ID NO: 2978 - DNA, 1060 bp, Artificial Sequence
  chemically treated genomic DNA (Homo sapiens) CpG-island No: 2978
tcaaaaaccaacgaacaaatcacctactctctaacgcctcacgttccgttcaaactaatatccacctacaaaaattactactcattaatactaaacaacgctctaaaccgcgaaaaaatatcgacctataaactaataataaccgcgcgaaacgaaaactcgcctccgctataaaccacgaccaacgtatctataaaaataaccgacgtaaacgacaacgcgcctacgttcgcgcaatccgaatacacgatattcgtaaaaaaaaacaacccgccaaactaccacatcttcacgatatctacgtaaaacgcgaacgcgcaaaaaaacgccctaatatcctactctctaataaaacgacgattaaacgaacgctcgctatcgaactacgtatcgatacacgcgaaaaacgacaaaatatacgcgctacaaccgctaaaccacgaaaaactaaaactactacaattccaaataaacgcgcgcgataaaaacgtaccgcctctaaacaacaacttaacgctacaaatattcgtactaaacgaaaacgacaacgctcccgcgctactaacgtctcccgctaacaacgcgaacgatacaatcaataaactaatactacgatcgataattacgaatcacgtaataactaaaatacgcgcaataaacgctaactctaaatacaacgcgtaactatcgtataaattacaatcgacgacgattaatacacgcatcccgtttcgcgtaaaactatacacgaacgaaatcaatacgacgcgcgctctaaataaaactaactcgccacgccaacgcctactaatactaataaaaaaccataacgaaccgtcgctaacgaccacgaccactatacttatatcgcttataaaaaacaaccaaacacccaaaacctcgtcgcgaacttcaataaacgtaacgcccgaaataaccctaataaatatcaacgtatacctaatcatcgccatctacgcgatatccaacttactaatactcacgctactactatacactacactaaaatactcgacgacgcccaccgaaaacgcatata

SEQ ID NO: 2979 - DNA, 1060 bp, Artificial Sequence
  chemically treated genomic DNA (Homo sapiens) CpG-island No: 2979
ttaggagttaacggataggttatttgttttttgacgttttacgtttcgtttaagttggtgtttatttataagaattattatttattggtgttggatagcgttttggatcgcgagagggtgtcggtttatgagttggtggtgatcgcgcgggacgggggttcgttttcgttgtgggttacggttagcgtgtttgtggaggtggtcgacgtgaacgataacgcgtttgcgttcgcgtagttcgagtatacggtgttcgtgaaggagaataattcgttaggttgttatatttttacggtgtttgcgtgggacgcggacgcgtaggagaacgttttggtgttttattttttggtggagcggcggttgggcgagcgttcgttgtcgagttacgtgtcggtgtacgcggagagcggtaaggtgtacgcgttgtagtcgttggattacgaggagttggagttgttatagttttaggtgagcgcgcgcgatgggggcgtgtcgtttttgggtagtaatttgacgttgtaggtgttcgtgttggacgagaacgataacgttttcgcgttgttggcgtttttcgttggtagcgcgggcggtgtagttagtgagttggtgttgcggtcggtggttgcgggttacgtggtggttaaggtgcgcgtagtggacgttgattttggatataacgcgtggttgtcgtatgaattgtagtcggcggcggttggtgtacgtatttcgtttcgcgtggggttgtatacgggcgagattagtacgacgcgcgttttggatgagattgattcgttacgttagcgtttattggtgttggtgaaggattatggcgagtcgtcgttgacggttacggttattgtgtttgtgtcgtttgtggagggtagttaggtatttaaggtttcgtcgcgggttttagtgggcgtggcgttcgaggtggttttggtggatgttaacgtgtatttgattatcgttatttgcgcggtgtttagtttgttggtgtttacgttgttgttgtatattgtattgaggtgttcggcggcgtttatcgagggcgtatgtg

SEQ ID NO: 2980 - DNA, 1060 bp, Artificial Sequence
  chemically treated genomic DNA (Homo sapiens) CpG-island No: 2980
cacatacgccctcgataaacgccgccgaacacctcaatacaatatacaacaacaacgtaaacaccaacaaactaaacaccgcgcaaataacgataatcaaatacacgttaacatccaccaaaaccacctcgaacgccacgcccactaaaacccgcgacgaaaccttaaatacctaactaccctccacaaacgacacaaacacaataaccgtaaccgtcaacgacgactcgccataatccttcaccaacaccaataaacgctaacgtaacgaatcaatctcatccaaaacgcgcgtcgtactaatctcgcccgtatacaaccccacgcgaaacgaaatacgtacaccaaccgccgccgactacaattcatacgacaaccacgcgttatatccaaaatcaacgtccactacgcgcaccttaaccaccacgtaacccgcaaccaccgaccgcaacaccaactcactaactacaccgcccgcgctaccaacgaaaaacgccaacaacgcgaaaacgttatcgttctcgtccaacacgaacacctacaacgtcaaattactacccaaaaacgacacgcccccatcgcgcgcgctcacctaaaactataacaactccaactcctcgtaatccaacgactacaacgcgtacaccttaccgctctccgcgtacaccgacacgtaactcgacaacgaacgctcgcccaaccgccgctccaccaaaaaataaaacaccaaaacgttctcctacgcgtccgcgtcccacgcaaacaccgtaaaaatataacaacctaacgaattattctccttcacgaacaccgtatactcgaactacgcgaacgcaaacgcgttatcgttcacgtcgaccacctccacaaacacgctaaccgtaacccacaacgaaaacgaacccccgtcccgcgcgatcaccaccaactcataaaccgacaccctctcgcgatccaaaacgctatccaacaccaataaataataattcttataaataaacaccaacttaaacgaaacgtaaaacgtcaaaaaacaaataacctatccgttaactcctaa

SEQ ID NO: 2981 - DNA, 1084 bp, Artificial Sequence
  chemically treated genomic DNA (Homo sapiens) CpG-island No: 2981
ttatcgcgttagaatatattagcgtcggtttgttaggcgcgtattcgttttcggtgggtatcgtcgagtatcgtagtatagtgtatagtagtagcgtgagaattaataggttagatatcgcgtagatggcgatgattaggtatacgttgatatttattagcgttatttcggggttcgtggtatttattgacgttcgcgacgatgattttggcgtttggtcgttttttattagcgatattagtatagtggtcgtggtcgttagcgttggtttttcgtggttttttattagtattagtaggcgttggcgcggtgcgttcgtttcgtttagggtacgcgttgtgttgatttcgttcgtgtatagttttacgcggaacgggatgttcgcgttggtcgtttttggttgtagttcgtatgaaagttacgcgttgtagttcgagtcggcgtttattgcgcgtattttttttattattacgtcggcgtttatcgatcgtagtattatttcgtttattgcgtcgttagtgttttttattcgaggtgttagtagcgtcggcgtattgtcgttttcgtttagtacgaatatttgtagcgttacgttgttgtttagaggcggtacgttcgcgtcgcgcgcgtttatttggaattgtagtagttttagtttttcgtggtttaacggttgtagcgcgtatattttgtcgtttttcgcgtgtattgatacgtagttcgatagcgagcgttcgtttaatcgtcgttttattagcgagtaggatattagggcgtttttttgcgcgttagcgtttcgcgtagatatcgtgaagatgtggtagttcggcgggttgtttttttttacgaatatcgtgtattcggattgcgcgaacgttggtgcgttgtcgtttacgtcggttatttttatagatattttggtcgtggtttatagtgaaggcgagttttcgtttcgcgcggtaattattagttcgtaggcggatatattttcgcggtttagagttttgtttagtattaacgagtagtaatttttgtaggtggatattagtttgaaggggacgtggggcgttagggagtaggtaat

SEQ ID NO: 2982 - DNA, 1084 bp, Artificial Sequence
  chemically treated genomic DNA (Homo sapiens) CpG-island No: 2982
attacctactccctaacgccccacgtccccttcaaactaatatccacctacaaaaattactactcgttaatactaaacaaaactctaaaccgcgaaaatatatccgcctacgaactaataattaccgcgcgaaacgaaaactcgccttcactataaaccacgaccaaaatatctataaaaataaccgacgtaaacgacaacgcaccaacgttcgcgcaatccgaatacacgatattcgtaaaaaaaaacaacccgccgaactaccacatcttcacgatatctacgcgaaacgctaacgcgcaaaaaaacgccctaatatcctactcgctaataaaacgacgattaaacgaacgctcgctatcgaactacgtatcaatacacgcgaaaaacgacaaaatatacgcgctacaaccgttaaaccacgaaaaactaaaactactacaattccaaataaacgcgcgcgacgcgaacgtaccgcctctaaacaacaacgtaacgctacaaatattcgtactaaacgaaaacgacaatacgccgacgctactaacacctcgaataaaaaacactaacgacgcaataaacgaaataatactacgatcgataaacgccgacgtaataataaaaaaaatacgcgcaataaacgccgactcgaactacaacgcgtaactttcatacgaactacaaccaaaaacgaccaacgcgaacatcccgttccgcgtaaaactatacacgaacgaaatcaacacaacgcgtaccctaaacgaaacgaacgcaccgcgccaacgcctactaatactaataaaaaaccacgaaaaaccaacgctaacgaccacgaccactatactaatatcgctaataaaaaacgaccaaacgccaaaatcatcgtcgcgaacgtcaataaataccacgaaccccgaaataacgctaataaatatcaacgtatacctaatcatcgccatctacgcgatatctaacctattaattctcacgctactactatacactatactacgatactcgacgatacccaccgaaaacgaatacgcgcctaacaaaccgacgctaatatattctaacgcgataa

SEQ ID NO: 2983 - DNA, 1084 bp, Artificial Sequence
  chemically treated genomic DNA (Homo sapiens) CpG-island No: 2983
gttatttgttttttgacgttttacgttttttttaagttggtgtttatttataagaattattattcgttggtgttggatagagttttggatcgcgagagtgtgttcgtttacgagttggtggttatcgcgcgggacgggggttcgtttttattgtgggttacggttagggtgtttgtggaggtggtcgacgtgaacgataacgtattagcgttcgcgtagttcgagtatacggtgttcgtgaaggagaataattcgtcgggttgttatatttttacggtgtttgcgcgggacgttgacgcgtaggagaacgttttggtgttttattcgttggtggagcggcggttgggcgagcgttcgttgtcgagttacgtgttagtgtacgcggagagcggtaaggtgtacgcgttgtagtcgttggattacgaggagttggagttgttatagttttaggtgagcgcgcgcgacgcgggcgtgtcgtttttgggtagtaacgtgacgttgtaggtgttcgtgttggacgagaacgataatgcgtcggcgttgttgatatttcggatgaggggtattgacggcgtagtgagcgagatggtgttgcggtcggtgggcgtcggcgtagtggtggggaaggtgcgcgtagtggacgtcgattcgggttataacgcgtggtttttatacgagttgtagttagaaacggttagcgcgagtatttcgtttcgcgtggggttgtatacgggcgagattagtataacgcgtgttttggacgaaacggacgtatcgcgttagcgtttattggtgttggtgaaagattacggggagttagcgttgacggttacggttattgtgttggtgtcgttggtggagagcggttaggcgttaaagttatcgtcgcgggcgttagtgggtgttacgggtttcgaggtgacgttggtggatgttaacgtgtatttgattatcgttatttgcgcggtgtttagtttgttggtttttacgttgttgttgtatattgtgttgcggtgttcggcgatgtttatcgagggcgagtgcgcgtttggtaagtcgacgttggtgtgttttagcgcggtgg

SEQ ID NO: 2984 - DNA, 1084 bp, Artificial Sequence
  chemically treated genomic DNA (Homo sapiens) CpG-island No: 2984
ccaccgcgctaaaacacaccaacgtcgacttaccaaacgcgcactcgccctcgataaacatcgccgaacaccgcaacacaatatacaacaacaacgtaaaaaccaacaaactaaacaccgcgcaaataacgataatcaaatacacgttaacatccaccaacgtcacctcgaaacccgtaacacccactaacgcccgcgacgataactttaacgcctaaccgctctccaccaacgacaccaacacaataaccgtaaccgtcaacgctaactccccgtaatctttcaccaacaccaataaacgctaacgcgatacgtccgtttcgtccaaaacacgcgttatactaatctcgcccgtatacaaccccacgcgaaacgaaatactcgcgctaaccgtttctaactacaactcgtataaaaaccacgcgttataacccgaatcgacgtccactacgcgcaccttccccaccactacgccgacgcccaccgaccgcaacaccatctcgctcactacgccgtcaatacccctcatccgaaatatcaacaacgccgacgcattatcgttctcgtccaacacgaacacctacaacgtcacgttactacccaaaaacgacacgcccgcgtcgcgcgcgctcacctaaaactataacaactccaactcctcgtaatccaacgactacaacgcgtacaccttaccgctctccgcgtacactaacacgtaactcgacaacgaacgctcgcccaaccgccgctccaccaacgaataaaacaccaaaacgttctcctacgcgtcaacgtcccgcgcaaacaccgtaaaaatataacaacccgacgaattattctccttcacgaacaccgtatactcgaactacgcgaacgctaatacgttatcgttcacgtcgaccacctccacaaacaccctaaccgtaacccacaataaaaacgaacccccgtcccgcgcgataaccaccaactcgtaaacgaacacactctcgcgatccaaaactctatccaacaccaacgaataataattcttataaataaacaccaacttaaaaaaaacgtaaaacgtcaaaaaacaaataac

SEQ ID NO: 2985 - DNA, 950 bp, Artificial Sequence
  chemically treated genomic DNA (Homo sapiens) CpG-island No: 2985
tcgcgtagatggcgatgattaggtatacgttgatatttattagcgtcgttttcggatttaaaacgttagtcgattgtttcgatgacgtttttggagtttggtcgttttttattagcgatattagaatcgtggtcgtggcggttagcgtaggtttattatgattttttattaggattagtagacggtggcgcggagagttcgtttcgtttaggatacgagtggtgttgatttcgttcgtgtatagttttacgcggaacgggatgcgagggttgtttgtagttggttgtagtttatacgaaagttacgcgttgtagttcgagtcggcgtttattgcgcgtattttcgttattacgtggttcgcgtttatagatcgcggtattagtttgttcgttgcgttattagtgttatttattcgaggttttagtagtgtcggcgcgttgttattttcgtttagtacgaatatttgtagcgttacgttgttgtttagaggcggtacgttcgcgtcgcgcgcgtttatttggaattgtagtagttttagtttttcgtggtttagcggttgtagcgcgtatattttgtcgtttttcgtgtgtatcgaaatgtagttcgatagcgagcgttcgtttattcgtcgttttataagcgagtaggatattagcgcgtttttttgcgcgttcgcgtttcgcgtagatatcgtgaagatgtggtagttcggcgggttgtttttttttacgaatatcgtgtattcgggttgcgcgaacgtcggagtattgtcgtttacgtcggttatttttatagataagttggcggtggtttatagcgaaggcgagttttcgtttcgcgcggttattattaatttataggtcgatattttttcgcggtttagggcgttgtttagtattaacgagtagtaatttttgaaggtggatattagtttgaaggggatatggggt

SEQ ID NO: 2986 - DNA, 950 bp, Artificial Sequence
  chemically treated genomic DNA (Homo sapiens) CpG-island No: 2986
accccatatccccttcaaactaatatccaccttcaaaaattactactcgttaatactaaacaacgccctaaaccgcgaaaaaatatcgacctataaattaataataaccgcgcgaaacgaaaactcgccttcgctataaaccaccgccaacttatctataaaaataaccgacgtaaacgacaatactccgacgttcgcgcaacccgaatacacgatattcgtaaaaaaaaacaacccgccgaactaccacatcttcacgatatctacgcgaaacgcgaacgcgcaaaaaaacgcgctaatatcctactcgcttataaaacgacgaataaacgaacgctcgctatcgaactacatttcgatacacacgaaaaacgacaaaatatacgcgctacaaccgctaaaccacgaaaaactaaaactactacaattccaaataaacgcgcgcgacgcgaacgtaccgcctctaaacaacaacgtaacgctacaaatattcgtactaaacgaaaataacaacgcgccgacactactaaaacctcgaataaataacactaataacgcaacgaacaaactaataccgcgatctataaacgcgaaccacgtaataacgaaaatacgcgcaataaacgccgactcgaactacaacgcgtaactttcgtataaactacaaccaactacaaacaaccctcgcatcccgttccgcgtaaaactatacacgaacgaaatcaacaccactcgtatcctaaacgaaacgaactctccgcgccaccgtctactaatcctaataaaaaatcataataaacctacgctaaccgccacgaccacgattctaatatcgctaataaaaaacgaccaaactccaaaaacgtcatcgaaacaatcgactaacgttttaaatccgaaaacgacgctaataaatatcaacgtatacctaatcatcgccatctacgcga

SEQ ID NO: 2987 - DNA, 950 bp, Artificial Sequence
  chemically treated genomic DNA (Homo sapiens) CpG-island No: 2987
gttttatgttttttttaagttggtgtttatttttaagaattattattcgttggtgttggatagcgttttggatcgcgagagagtgtcggtttatgagttggtggtaatcgcgcgggacgggggttcgttttcgttgtgggttatcgttagtttgtttgtggaggtggtcgacgtgaacgataatgtttcggcgttcgcgtagttcgagtatacggtgttcgtgaaggagaataattcgtcgggttgttatatttttacggtgtttgcgcgagacgcggacgcgtaggagaacgcgttggtgttttattcgtttgtggagcggcgggtgggcgagcgttcgttgtcgagttatatttcggtgtatacggagagcggtaaggtgtacgcgttgtagtcgttggattacgaggagttagagttgttgtagttttaggtgagcgcgcgcgacgcgggcgtgtcgtttttgggtagtaacgtgacgttgtaggtgttcgtgttggacgagaatgataacgcgtcggtattgttggagtttcgggtgggtggtattggtggcgtagcgagtaagttggtgtcgcggtttgtgggcgcgggttacgtggtagcgaaggtgcgcgtagtggacgtcgattcgggttataacgcgtggttttcgtatgagttgtagttagttgtaagtagttttcgtatttcgtttcgcgtggggttgtatacgggcgagattagtattattcgtgttttggacgaagcggatttttcgcgttatcgtttgttggttttggtgaaggattatggtgaatttgcgttgatcgttacggttacggttttggtgtcgttggtggagagcggttaggttttaaaagcgttatcgaggtagtcggttggcgttttgggttcggaagcggcgttggtggatgttaacgtgtatttgattatcgttatttgcgcgg

SEQ ID NO: 2988 - DNA, 950 bp, Artificial Sequence
  chemically treated genomic DNA (Homo sapiens) CpG-island No: 2988
ccgcgcaaataacgataatcaaatacacgttaacatccaccaacgccgcttccgaacccaaaacgccaaccgactacctcgataacgcttttaaaacctaaccgctctccaccaacgacaccaaaaccgtaaccgtaacgatcaacgcaaattcaccataatccttcaccaaaaccaacaaacgataacgcgaaaaatccgcttcgtccaaaacacgaataatactaatctcgcccgtatacaaccccacgcgaaacgaaatacgaaaactacttacaactaactacaactcatacgaaaaccacgcgttataacccgaatcgacgtccactacgcgcaccttcgctaccacgtaacccgcgcccacaaaccgcgacaccaacttactcgctacgccaccaataccacccacccgaaactccaacaataccgacgcgttatcattctcgtccaacacgaacacctacaacgtcacgttactacccaaaaacgacacgcccgcgtcgcgcgcgctcacctaaaactacaacaactctaactcctcgtaatccaacgactacaacgcgtacaccttaccgctctccgtatacaccgaaatataactcgacaacgaacgctcgcccacccgccgctccacaaacgaataaaacaccaacgcgttctcctacgcgtccgcgtctcgcgcaaacaccgtaaaaatataacaacccgacgaattattctccttcacgaacaccgtatactcgaactacgcgaacgccgaaacattatcgttcacgtcgaccacctccacaaacaaactaacgataacccacaacgaaaacgaacccccgtcccgcgcgattaccaccaactcataaaccgacactctctcgcgatccaaaacgctatccaacaccaacgaataataattcttaaaaataaacaccaacttaaaaaaaacataaaac

SEQ ID NO: 2989 - DNA, 1139 bp, Artificial Sequence
  chemically treated genomic DNA (Homo sapiens) CpG-island No: 2989
ttgagtatcgtaacgtcgtgtatagtagtagggtaagtattaatagattggatatcgcgtagatggcgatgattaggtatacgttgatatttattagttcggtttttgggtttgtaatgtttaacgatgttcgcgacgacgtttttggtgtttggtcgttttttattagcgatattagtacggtggttgtggttgttagcgagggtttttcgtggttttttataagtattagaaggcggtggcgcggtgcgttcgttttatttagggttcgtgtcgtgttgattttattagtgtatagttttacgcggaacgggatgttcgtatcggtcgttatcggttgtaatttatacgaaagttacgcgttgtagtttgagttagcgttaattgtacgtattttcgttattatatggttcgcgtttatagatcgcggtataagtttttttattgcgttattagtgttatttattcgaggcgttagtagtgtcggcgcgttgtcgttttcgtttagtacgaatatttgtagcgttacgttgttgtttagaggcggtacgttcgtatcgcgcgcgtttatttggaattgtaatagttttagtttttcgtggtttaacggttgtagcgcgtatattttgtcgtttttcgcgtgtattgatacgtagttcgatagcgcgcgttcgtttattcgtagttttattagcgagtaggatattagcgcgtttttttgcgcgttcgcgtttttcgtcgatatagtgaagatgtggtagttcggcgggttgtttttttttacgaatatcgtatattcgggttgcgcgaacgtcggggcgttgtcgtttacgtcggttatttttacggatacgttagtagtggtttatagagaaggcgagttttcgtttcgcgcggtaattattagtttataggcggatatattttcgcggtttagagcgttgtttagtattaatgaatagtaatttttgaaggtggatattaatttgaagggaacgcggggcgttagggagtaggtaatttgttcgttgattttaaaatttcggttaaatacgttaattaatgtgatgacggtatttggttgggcgttttttggaatagggagagatagggaagtgagagttaattgtggagtattg

SEQ ID NO: 2990 - DNA, 1139 bp, Artificial Sequence
  chemically treated genomic DNA (Homo sapiens) CpG-island No: 2990
caatactccacaattaactctcacttccctatctctccctattccaaaaaacgcccaaccaaataccgtcatcacattaattaacgtatttaaccgaaattttaaaatcaacgaacaaattacctactccctaacgccccgcgttcccttcaaattaatatccaccttcaaaaattactattcattaatactaaacaacgctctaaaccgcgaaaatatatccgcctataaactaataattaccgcgcgaaacgaaaactcgccttctctataaaccactactaacgtatccgtaaaaataaccgacgtaaacgacaacgccccgacgttcgcgcaacccgaatatacgatattcgtaaaaaaaaacaacccgccgaactaccacatcttcactatatcgacgaaaaacgcgaacgcgcaaaaaaacgcgctaatatcctactcgctaataaaactacgaataaacgaacgcgcgctatcgaactacgtatcaatacacgcgaaaaacgacaaaatatacgcgctacaaccgttaaaccacgaaaaactaaaactattacaattccaaataaacgcgcgcgatacgaacgtaccgcctctaaacaacaacgtaacgctacaaatattcgtactaaacgaaaacgacaacgcgccgacactactaacgcctcgaataaataacactaataacgcaataaaaaaacttataccgcgatctataaacgcgaaccatataataacgaaaatacgtacaattaacgctaactcaaactacaacgcgtaactttcgtataaattacaaccgataacgaccgatacgaacatcccgttccgcgtaaaactatacactaataaaatcaacacgacacgaaccctaaataaaacgaacgcaccgcgccaccgccttctaatacttataaaaaaccacgaaaaaccctcgctaacaaccacaaccaccgtactaatatcgctaataaaaaacgaccaaacaccaaaaacgtcgtcgcgaacatcgttaaacattacaaacccaaaaaccgaactaataaatatcaacgtatacctaatcatcgccatctacgcgatatccaatctattaatacttaccctactactatacacgacgttacgatactcaa

SEQ ID NO: 2991 - DNA, 1139 bp, Artificial Sequence
  chemically treated genomic DNA (Homo sapiens) CpG-island No: 2991
taatgttttatagttgatttttatttttttgtttttttttattttagaggacgtttaattaggtatcgttattatattgattagcgtgtttgatcgagattttggagttaacggataggttatttgttttttgacgtttcgcgttttttttaagttggtgtttatttttaagaattattatttattggtgttggatagcgttttggatcgcgagagtgtgttcgtttatgagttggtggttatcgcgcgggacgggggttcgttttttttgtgggttattgttagcgtgttcgtggaggtggtcgacgtgaacgataacgtttcggcgttcgcgtagttcgagtatacggtgttcgtgaaggagaataattcgtcgggttgttatatttttattgtgtcggcgggggacgcggacgcgtagaagaacgcgttggtgttttattcgttggtggagttgcgggtgggcgagcgcgcgttgtcgagttacgtgttagtgtacgcggagagcggtaaggtgtacgcgttgtagtcgttggattacgaggagttggagttgttgtagttttaggtgagcgcgcgcgatgcgggcgtgtcgtttttgggtagtaacgtgacgttgtaggtgttcgtgttggacgagaacgataacgcgtcggtattgttggcgtttcgggtgggtggtattggtggcgtagtgagagagtttgtgtcgcggtttgtgggcgcgggttatgtggtggcgaaggtacgtgtagttgacgttgatttaggttataacgcgtggttttcgtatgagttgtaatcggtggcggtcggtgcgagtatttcgtttcgcgtggggttgtatattggtgagattagtacgatacgagttttagatgagacggacgtatcgcgttatcgttttttggtgtttgtgaaggattacggggagttttcgttgatagttatagttatcgtgttggtgtcgttggtggaaagcggttaggtattaaaggcgtcgtcgcgggtatcgttgggtattgtaggtttagagatcgagttggtggatgttaacgtgtatttgattatcgttatttgcgcggtgtttagtttgttggtgtttattttgttgttgtatacggcgttgcggtgtttag

SEQ ID NO: 2992 - DNA, 1139 bp, Artificial Sequence
  chemically treated genomic DNA (Homo sapiens) CpG-island No: 2992
ctaaacaccgcaacgccgtatacaacaacaaaataaacaccaacaaactaaacaccgcgcaaataacgataatcaaatacacgttaacatccaccaactcgatctctaaacctacaatacccaacgatacccgcgacgacgcctttaatacctaaccgctttccaccaacgacaccaacacgataactataactatcaacgaaaactccccgtaatccttcacaaacaccaaaaaacgataacgcgatacgtccgtctcatctaaaactcgtatcgtactaatctcaccaatatacaaccccacgcgaaacgaaatactcgcaccgaccgccaccgattacaactcatacgaaaaccacgcgttataacctaaatcaacgtcaactacacgtaccttcgccaccacataacccgcgcccacaaaccgcgacacaaactctctcactacgccaccaataccacccacccgaaacgccaacaataccgacgcgttatcgttctcgtccaacacgaacacctacaacgtcacgttactacccaaaaacgacacgcccgcatcgcgcgcgctcacctaaaactacaacaactccaactcctcgtaatccaacgactacaacgcgtacaccttaccgctctccgcgtacactaacacgtaactcgacaacgcgcgctcgcccacccgcaactccaccaacgaataaaacaccaacgcgttcttctacgcgtccgcgtcccccgccgacacaataaaaatataacaacccgacgaattattctccttcacgaacaccgtatactcgaactacgcgaacgccgaaacgttatcgttcacgtcgaccacctccacgaacacgctaacaataacccacaaaaaaaacgaacccccgtcccgcgcgataaccaccaactcataaacgaacacactctcgcgatccaaaacgctatccaacaccaataaataataattcttaaaaataaacaccaacttaaaaaaaacgcgaaacgtcaaaaaacaaataacctatccgttaactccaaaatctcgatcaaacacgctaatcaatataataacgatacctaattaaacgtcctctaaaataaaaaaaaacaaaaaaataaaaatcaactataaaacatta

SEQ ID NO: 2993 - DNA, 1151 bp, Artificial Sequence
  chemically treated genomic DNA (Homo sapiens) CpG-island No: 2993
tcgtcgtgtacgcgttttcggtgggtggcgtcgagtatcgtagcgttgtgtatagtagtagcgtgaggattagtaggttggatatcgcgtagatggcgatgattaggtatacgttgatatttattagcgtcgtttttgggttcgcggcgtttatcgacgttcgtgatgacgtttttggagtttggttattttttattagcgatattagaatcgtggtcgtcgttgttagcgtcggtttatcgtggttttttattagtattagtagtcggtggcgcggagagttcgtttcgtttaggatacgagtggtgttgatttcgttcgtgtatagttttacgcgaaacgggaagcgagcgttgtttgtcgggggttgtagtttatacgaaagttacgcgttgtagtttgagtcggcgttaattgcgcgtattttcgttattatttggtttgtatttagtgatcgcggtattagttcgtttattgtattattagtattatttattcgaggcgttagtagcgtcggcgcgttgtcgttttcgtttagtacgaatatttgtagcgttacgttgttgtttagaggcggtacgttcgcgtcgcgcgcgtttatttgaaattgtagtagttttagtttttcgtggtttagcggttgtagcgcgtatattttgtcgtttttcgcgtgtatcgaaatgtagttcgataacgcgcgttcgtttattcgtcgttttattagcgagtaggatattagcgcgtttttttgcgcgttcgcgtttcgcgtagatatcgtgaagatgtggtagttcggcgggttgtttttttttacgaatattgtgtattcgggttgcgcgaacgtcggagtattgttatttatgtcggttatttttatagataagttggcggtggtttatagcgaaggcgagttttcgtttcgcgcggttattattaatttataggtcgatacgttttcgcggtttagggtattgtttagtattaacgagtagtaatttttgaaggtggatattagtttgaaagggacgtgaggcgttagcgagtagtttatttgttcgttggtatttgaatcgaggtcgtttacgttaattagggcgatgatagtattaaattgagcgtttttacgtataggtaaggataaggaagttagt

SEQ ID NO: 2994 - DNA, 1151 bp, Artificial Sequence
  chemically treated genomic DNA (Homo sapiens) CpG-island No: 2994
actaacttccttatccttacctatacgtaaaaacgctcaatttaatactatcatcgccctaattaacgtaaacgacctcgattcaaataccaacgaacaaataaactactcgctaacgcctcacgtccctttcaaactaatatccaccttcaaaaattactactcgttaatactaaacaataccctaaaccgcgaaaacgtatcgacctataaattaataataaccgcgcgaaacgaaaactcgccttcgctataaaccaccgccaacttatctataaaaataaccgacataaataacaatactccgacgttcgcgcaacccgaatacacaatattcgtaaaaaaaaacaacccgccgaactaccacatcttcacgatatctacgcgaaacgcgaacgcgcaaaaaaacgcgctaatatcctactcgctaataaaacgacgaataaacgaacgcgcgttatcgaactacatttcgatacacgcgaaaaacgacaaaatatacgcgctacaaccgctaaaccacgaaaaactaaaactactacaatttcaaataaacgcgcgcgacgcgaacgtaccgcctctaaacaacaacgtaacgctacaaatattcgtactaaacgaaaacgacaacgcgccgacgctactaacgcctcgaataaataatactaataatacaataaacgaactaataccgcgatcactaaatacaaaccaaataataacgaaaatacgcgcaattaacgccgactcaaactacaacgcgtaactttcgtataaactacaacccccgacaaacaacgctcgcttcccgtttcgcgtaaaactatacacgaacgaaatcaacaccactcgtatcctaaacgaaacgaactctccgcgccaccgactactaatactaataaaaaaccacgataaaccgacgctaacaacgacgaccacgattctaatatcgctaataaaaaataaccaaactccaaaaacgtcatcacgaacgtcgataaacgccgcgaacccaaaaacgacgctaataaatatcaacgtatacctaatcatcgccatctacgcgatatccaacctactaatcctcacgctactactatacacaacgctacgatactcgacgccacccaccgaaaacgcgtacacgacga

SEQ ID NO: 2995 - DNA, 1151 bp, Artificial Sequence
  chemically treated genomic DNA (Homo sapiens) CpG-island No: 2995
attgatttttttatttttgtttgtacgtgaagacgtttaatttggtattgttatcgttttaattagcgtgaacgatttcgatttaggtgttaacgggtaggtgaattgttcgttgacgttttacgttttttttaagttggtgtttatttttaagaattattattcgttggtgttggatagtgttttggatcgcgagagcgtgtcggtttatgagttggtggtaatcgcgcgggacgggggttcgttttcgttgtgggttatcgttagtttgtttgtggaggtggtcgatatgaatgataatgtttcggcgttcgcgtagttcgagtatatagtgttcgtgaaggagaataattcgtcgggttgttatatttttacggtgtttgcgcgagacgcggacgcgtaggagaacgcgttggtgttttattcgttggtggagcggcgggtgggcgagcgcgcgttgtcgagttatatttcggtgtacgcggagagcggtaaggtgtacgcgttgtagtcgttggattacgaggagttagagttgttgtagttttaggtgagcgcgcgcgacgcgggcgtgtcgtttttgggtagtaacgtgacgttgtaggtgttcgtgttggacgagaacgataacgcgtcggcgttgttggcgtttcgggtgggtggtattggtggtgtagtgagcgagttggtgtcgcggttattgggtgtaggttaagtggtggcgaaggtgcgcgtagttgacgtcgatttaggttataacgcgtggttttcgtatgagttgtagttttcggtaagtagcgttcgtttttcgtttcgcgtggggttgtatacgggcgagattagtattattcgtgttttggacgaagcggatttttcgcgttatcggttgttggtgttggtgaaagattacggtgagtcggcgttgatagcgacggttacggttttggtgtcgttggtggagagtggttaggttttaaaggcgttattacgggcgtcggtgggcgtcgcgggtttagaggcggcgttggtggatgttaacgtgtatttgattatcgttatttgcgcggtatttagtttgttggtttttacgttattgttgtatatagcgttgcggtgttcggcgttatttatcgagggcgcgtgtacggcgg

SEQ ID NO: 2996 - DNA, 1151 bp, Artificial Sequence
  chemically treated genomic DNA (Homo sapiens) CpG-island No: 2996
ccgccgtacacgcgccctcgataaataacgccgaacaccgcaacgctatatacaacaataacgtaaaaaccaacaaactaaataccgcgcaaataacgataatcaaatacacgttaacatccaccaacgccgcctctaaacccgcgacgcccaccgacgcccgtaataacgcctttaaaacctaaccactctccaccaacgacaccaaaaccgtaaccgtcgctatcaacgccgactcaccgtaatctttcaccaacaccaacaaccgataacgcgaaaaatccgcttcgtccaaaacacgaataatactaatctcgcccgtatacaaccccacgcgaaacgaaaaacgaacgctacttaccgaaaactacaactcatacgaaaaccacgcgttataacctaaatcgacgtcaactacgcgcaccttcgccaccacttaacctacacccaataaccgcgacaccaactcgctcactacaccaccaataccacccacccgaaacgccaacaacgccgacgcgttatcgttctcgtccaacacgaacacctacaacgtcacgttactacccaaaaacgacacgcccgcgtcgcgcgcgctcacctaaaactacaacaactctaactcctcgtaatccaacgactacaacgcgtacaccttaccgctctccgcgtacaccgaaatataactcgacaacgcgcgctcgcccacccgccgctccaccaacgaataaaacaccaacgcgttctcctacgcgtccgcgtctcgcgcaaacaccgtaaaaatataacaacccgacgaattattctccttcacgaacactatatactcgaactacgcgaacgccgaaacattatcattcatatcgaccacctccacaaacaaactaacgataacccacaacgaaaacgaacccccgtcccgcgcgattaccaccaactcataaaccgacacgctctcgcgatccaaaacactatccaacaccaacgaataataattcttaaaaataaacaccaacttaaaaaaaacgtaaaacgtcaacgaacaattcacctacccgttaacacctaaatcgaaatcgttcacgctaattaaaacgataacaataccaaattaaacgtcttcacgtacaaacaaaaataaaaaaatcaat

SEQ ID NO: 2997 - DNA, 746 bp, Artificial Sequence
  chemically treated genomic DNA (Homo sapiens) CpG-island No: 2997
tgttgatttcgtttgtgtatagttttacgcggaacgggatgcgcgtattgttaggcgttggttgtagtttatacgaaagttaagcgttgtagttcgaattagggtttattgcgcgtattttcgttattacgtggttcgtatttattgatttcggtattagttcgtttattgcgtcgtcggtgttatttattcgaggtattagtagcgtcggcgcgttgtcgttttcgtttagtacgaatatttgtagcgttacgttgttgtttagaggcggtacgttcgcgtcgcgcgcgtttatttggaattgtagtagttttattttttcgtggtttagcggttgtagcgcgtatattttgtcgtttttcgcgtgtatcgaaacgtaattcgatagcgggcgttcgtttattcgtcgttttattagcgagtaggatattagggcgtttttttgcgcgttcgcgtttcgtgtagatatcgtgaagatgtggtagtttggcgggttgtttttttttacgaatacggtatattggggttgcgcgaacgtcggagcgttgtcgtttacgtcggttatttttatagatacgttggcggtggtttatagcgaaggcgagttttcgtttcgcgcggttattattagtttatagatcgatacgttttcgcggtttagggcgttgtttagtattaacgagtagtaatttttgaaggtggatattagtttgaagggaacgtggggtattagggagtaggttatt

SEQ ID NO: 2998 - DNA, 746 bp, Artificial Sequence
  chemically treated genomic DNA (Homo sapiens) CpG-island No: 2998
aataacctactccctaataccccacgttcccttcaaactaatatccaccttcaaaaattactactcgttaatactaaacaacgccctaaaccgcgaaaacgtatcgatctataaactaataataaccgcgcgaaacgaaaactcgccttcgctataaaccaccgccaacgtatctataaaaataaccgacgtaaacgacaacgctccgacgttcgcgcaaccccaatataccgtattcgtaaaaaaaaacaacccgccaaactaccacatcttcacgatatctacacgaaacgcgaacgcgcaaaaaaacgccctaatatcctactcgctaataaaacgacgaataaacgaacgcccgctatcgaattacgtttcgatacacgcgaaaaacgacaaaatatacgcgctacaaccgctaaaccacgaaaaaataaaactactacaattccaaataaacgcgcgcgacgcgaacgtaccgcctctaaacaacaacgtaacgctacaaatattcgtactaaacgaaaacgacaacgcgccgacgctactaatacctcgaataaataacaccgacgacgcaataaacgaactaataccgaaatcaataaatacgaaccacgtaataacgaaaatacgcgcaataaaccctaattcgaactacaacgcttaactttcgtataaactacaaccaacgcctaacaatacgcgcatcccgttccgcgtaaaactatacacaaacgaaatcaaca

SEQ ID NO: 2999 - DNA, 746 bp, Artificial Sequence
  chemically treated genomic DNA (Homo sapiens) CpG-island No: 2999
ggtgatttgttttttaatgttttacgttttttttaagttggtgtttatttttaagaattattattcgttggtgttggatagcgttttggatcgcgagagcgtgtcggtttatgagttggtggtgatcgcgcgggacgggggttcgttttcgttgtgggttatcgttagcgtgtttgtggaagtggtcgacgtgaacgataacgtttcggcgttcgcgtagttttagtatatcgtgttcgtgaaggagaataattcgttaggttgttatatttttacggtgtttgtacgggacgcggacgcgtaggagaacgttttggtgttttattcgttggtggagcggcgggtgggcgagcgttcgttgtcgagttacgtttcggtgtacgcggagagcggtaaggtgtacgcgttgtagtcgttggattacgaggaagtggagttgttgtagttttaggtgagcgcgcgcgacgcgggcgtgtcgtttttgggtagtaacgtgacgttgtaggtgttcgtgttggacgagaacgataacgcgtcggcgttgttggtgtttcgagtgggtggtatcggcggcgtagtgagcgagttggtgtcgaggttagtgggtgcgggttacgtggtggcgaaggtgcgcgtagtggattttgattcgggttataacgtttggttttcgtatgagttgtagttagcgtttggtagtgcgcgtatttcgtttcgcgtggggttgtatataggcgagattagta

SEQ ID NO: 3000 - DNA, 746 bp, Artificial Sequence
  chemically treated genomic DNA (Homo sapiens) CpG-island No: 3000
tactaatctcgcctatatacaaccccacgcgaaacgaaatacgcgcactaccaaacgctaactacaactcatacgaaaaccaaacgttataacccgaatcaaaatccactacgcgcaccttcgccaccacgtaacccgcacccactaacctcgacaccaactcgctcactacgccgccgataccacccactcgaaacaccaacaacgccgacgcgttatcgttctcgtccaacacgaacacctacaacgtcacgttactacccaaaaacgacacgcccgcgtcgcgcgcgctcacctaaaactacaacaactccacttcctcgtaatccaacgactacaacgcgtacaccttaccgctctccgcgtacaccgaaacgtaactcgacaacgaacgctcgcccacccgccgctccaccaacgaataaaacaccaaaacgttctcctacgcgtccgcgtcccgtacaaacaccgtaaaaatataacaacctaacgaattattctccttcacgaacacgatatactaaaactacgcgaacgccgaaacgttatcgttcacgtcgaccacttccacaaacacgctaacgataacccacaacgaaaacgaacccccgtcccgcgcgatcaccaccaactcataaaccgacacgctctcgcgatccaaaacgctatccaacaccaacgaataataattcttaaaaataaacaccaacttaaaaaaaacgtaaaacattaaaaaacaaatcacc

SEQ ID NO: 3001 - DNA, 1015 bp, Artificial Sequence
  chemically treated genomic DNA (Homo sapiens) CpG-island No: 3001
gtacgcgttttcggtgggtagcgtagagtatcgtagcgcggtgtatagtagtagcgtgagtattaaaaggttggatatcgcgtagatggtaatgattaggtatacgttgatatttattagcgtagtatcgggatttatagcgtttattaacgttcgtgaggaggtttttggcgtttgtttattttttataagtgatattagtatagtggtcgtggtcgttagcgcgggttcgtcgtggttttttattagtattagtaggcggtggcgcggagcgttcgtttcgtttagggtacgcgttgtgttgatttcgttagtgtatagttttacgcggaacgggatgcgcgcgttattagttttcggttgtagttcgtacgaaagttacgcgttgtagttcgagttagtatttatcgcgcgtatttttgttattacgtggtttatatttatcgattatggtattagttcgtttattgcgttattagtgttattcgttcgaggcgttagtagtgttggcgcgttgtcgttttcgtttagtacgaatatttgtagcgttacgttgttgtttagaggtggtacgtcggtatcgcgagcggttatttgaaattgtagtagttttagtttttcgtggtttagcggttgtagcgcgtatattttgtcgtttttcgtatgtatcgaaacgtagttcgatagcgcgcgtttttttattcgtcgttttattagcgagtaggatattagcgcgtttttttgcgcgttcgcgttttacgtagatatagtgaagatgtggtagttcggcgggttgtttttttttacgaatattgtgtattcgggttgcgcgaacgtcggagcgttgtcgtttatattagttatttttatagaaatattggtcgtggtttatagcgaaggcgagttttcgtttcgcgcggttattattagtttataggttgatacgttttcgcggtttagggtattgtttagtattaacgagtagtaatttttgaaggtggatattagtttgaag

SEQ ID NO: 3002 - DNA, 1015 bp, Artificial Sequence
  chemically treated genomic DNA (Homo sapiens) CpG-island No: 3002
cttcaaactaatatccaccttcaaaaattactactcgttaatactaaacaataccctaaaccgcgaaaacgtatcaacctataaactaataataaccgcgcgaaacgaaaactcgccttcgctataaaccacgaccaatatttctataaaaataactaatataaacgacaacgctccgacgttcgcgcaacccgaatacacaatattcgtaaaaaaaaacaacccgccgaactaccacatcttcactatatctacgtaaaacgcgaacgcgcaaaaaaacgcgctaatatcctactcgctaataaaacgacgaataaaaaaacgcgcgctatcgaactacgtttcgatacatacgaaaaacgacaaaatatacgcgctacaaccgctaaaccacgaaaaactaaaactactacaatttcaaataaccgctcgcgataccgacgtaccacctctaaacaacaacgtaacgctacaaatattcgtactaaacgaaaacgacaacgcgccaacactactaacgcctcgaacgaataacactaataacgcaataaacgaactaataccataatcgataaatataaaccacgtaataacaaaaatacgcgcgataaatactaactcgaactacaacgcgtaactttcgtacgaactacaaccgaaaactaataacgcgcgcatcccgttccgcgtaaaactatacactaacgaaatcaacacaacgcgtaccctaaacgaaacgaacgctccgcgccaccgcctactaatactaataaaaaaccacgacgaacccgcgctaacgaccacgaccactatactaatatcacttataaaaaataaacaaacgccaaaaacctcctcacgaacgttaataaacgctataaatcccgatactacgctaataaatatcaacgtatacctaatcattaccatctacgcgatatccaaccttttaatactcacgctactactatacaccgcgctacgatactctacgctacccaccgaaaacgcgtac

SEQ ID NO: 3003 - DNA, 1015 bp, Artificial Sequence
  chemically treated genomic DNA (Homo sapiens) CpG-island No: 3003
ttttaagttggtgtttatttttaagaattattattcgttggtgttggatagtgttttggatcgcgagagcgtgttagtttatgagttggtggtgatcgcgcgagacgggggttcgttttcgttgtgggttacggttagtgtttttgtggaggtggttgatgtgaacgataacgtttcggcgttcgcgtagttcgagtatatagtgttcgtgaaggagaataattcgtcgggttgttatatttttattgtgtttgcgtgggacgcggacgcgtaggagaacgcgttggtgttttattcgttggtagagcggcgggtaggggagcgcgcgttgtcgagttacgtttcggtgtatgcggagagcggtaaggtgtacgcgttgtagtcgttggattacgaggagttagagttgttgtagttttaggtgatcgttcgcgatgtcggcgtgttatttttgggtagtaacgtgacgttgtaggtgttcgtgttggacgaaaacgataacgcgttagtattgttagcgtttcgggcgggtggtattggtggcgtagtgagcgagttggtgttatggtcggtgggtgtgggttacgtggtggtaaaggtgcgcgcggtggatgttgattcgggttataacgcgtggttttcgtacgagttgtagtcggggattggtggcgcgcgtatttcgtttcgcgtggggttgtatattggcgagattagtataacgcgtgttttggacgaaacggacgtttcgcgttatcgtttattggtattggtgaaggattacggcgagttcgcgttgacggttacggttattgtgttggtgttatttgtggagagtggataggcgttaaaggtttttttacgggcgttggtgggcgttgtgggtttcgatgttgcgttggtggatgttaacgtatatttgattattgttatttgcgcggtgtttagttttttggtgtttacgttgttgttgtatatcgcgttgcggtgttttgcgttgtttatcgagggcgcgtgt

SEQ ID NO: 3004 - DNA, 1015 bp, Artificial Sequence
  chemically treated genomic DNA (Homo sapiens) CpG-island No: 3004
acacgcgccctcgataaacaacgcaaaacaccgcaacgcgatatacaacaacaacgtaaacaccaaaaaactaaacaccgcgcaaataacaataatcaaatatacgttaacatccaccaacgcaacatcgaaacccacaacgcccaccaacgcccgtaaaaaaacctttaacgcctatccactctccacaaataacaccaacacaataaccgtaaccgtcaacgcgaactcgccgtaatccttcaccaataccaataaacgataacgcgaaacgtccgtttcgtccaaaacacgcgttatactaatctcgccaatatacaaccccacgcgaaacgaaatacgcgcgccaccaatccccgactacaactcgtacgaaaaccacgcgttataacccgaatcaacatccaccgcgcgcacctttaccaccacgtaacccacacccaccgaccataacaccaactcgctcactacgccaccaataccacccgcccgaaacgctaacaatactaacgcgttatcgttttcgtccaacacgaacacctacaacgtcacgttactacccaaaaataacacgccgacatcgcgaacgatcacctaaaactacaacaactctaactcctcgtaatccaacgactacaacgcgtacaccttaccgctctccgcatacaccgaaacgtaactcgacaacgcgcgctcccctacccgccgctctaccaacgaataaaacaccaacgcgttctcctacgcgtccgcgtcccacgcaaacacaataaaaatataacaacccgacgaattattctccttcacgaacactatatactcgaactacgcgaacgccgaaacgttatcgttcacatcaaccacctccacaaaaacactaaccgtaacccacaacgaaaacgaacccccgtctcgcgcgatcaccaccaactcataaactaacacgctctcgcgatccaaaacactatccaacaccaacgaataataattcttaaaaataaacaccaacttaaaa

SEQ ID NO: 3005 - DNA, 743 bp, Artificial Sequence
  chemically treated genomic DNA (Homo sapiens) CpG-island No: 3005
gcgcggggcgtttatttcgtttagggtacgggtcgtgttgatttttttcgtgtatagttttacgcgaaacgggatgcgcgtatcgtcggttttaggttgtagtttatacgaaagttacgcgttgtagtttgagtttgtatttattgcgcgtattttcgttattacgtggttcgtatttattgatcgcggtattagttcgtttattgcgttatcgatgttatttattcgaggtattagtagtgtcggcgcgttgtcgttttcgtttagtacgaatatttgtagcgttacgttgttgtttagaggcggtacgttcgtatcgcgcgtatttatttggaattgtagtagttttagtttttcgtggtttagcggttgtagcgcgtatattttgtcgtttttcgcgtgtatcgatacgtagttcgatagcgcgcgtttttttattcgtcgttttattagcgagtaggatattagggcgtttttttgcgcgttcgcgtttcgcgtagatatcgtgaagatgtggtagttcggcgggttgtttttttttacgaatatcgtgtattcggattgcgagaatgtcggcgtattgtcgtttacgtcggttatttttacggatacgttggtcgtggtttatagtgaaggcgagttttcgtttcgagtagttattattagtttataggtcgatacgttttcgcggtttagagggttgtttagtattaatgagtagtaatttttgaaggtggatatta

SEQ ID NO: 3006 - DNA, 743 bp, Artificial Sequence
  chemically treated genomic DNA (Homo sapiens) CpG-island No: 3006
taatatccaccttcaaaaattactactcattaatactaaacaaccctctaaaccgcgaaaacgtatcgacctataaactaataataactactcgaaacgaaaactcgccttcactataaaccacgaccaacgtatccgtaaaaataaccgacgtaaacgacaatacgccgacattctcgcaatccgaatacacgatattcgtaaaaaaaaacaacccgccgaactaccacatcttcacgatatctacgcgaaacgcgaacgcgcaaaaaaacgccctaatatcctactcgctaataaaacgacgaataaaaaaacgcgcgctatcgaactacgtatcgatacacgcgaaaaacgacaaaatatacgcgctacaaccgctaaaccacgaaaaactaaaactactacaattccaaataaatacgcgcgatacgaacgtaccgcctctaaacaacaacgtaacgctacaaatattcgtactaaacgaaaacgacaacgcgccgacactactaatacctcgaataaataacatcgataacgcaataaacgaactaataccgcgatcaataaatacgaaccacgtaataacgaaaatacgcgcaataaatacaaactcaaactacaacgcgtaactttcgtataaactacaacctaaaaccgacgatacgcgcatcccgtttcgcgtaaaactatacacgaaaaaaatcaacacgacccgtaccctaaacgaaataaacgccccgcgc

SEQ ID NO: 3007 - DNA, 743 bp, Artificial Sequence
  chemically treated genomic DNA (Homo sapiens) CpG-island No: 3007
tggtgtttatttttaagaattattatttattggtgttggatagttttttggatcgcgagagcgtgtcggtttatgagttggtggtgattgttcgggacgggggttcgtttttattgtgggttacggttagcgtgttcgtggaggtggtcgacgtgaacgataatgcgtcggtattttcgtagttcgagtatacggtgttcgtgaaggagaataattcgtcgggttgttatatttttacggtgtttgcgcgggacgcggacgcgtaggagaacgttttggtgttttattcgttggtggaacggcgggtgggggagcgcgcgttgtcgagttacgtgtcggtatacgcggagagcggtaaggtgtacgcgttgtagtcgttggattacgaggagttagagttgttgtagttttaggtgagtgcgcgcgatgcgggcgtgtcgtttttgggtagtaacgtgacgttgtaggtgttcgtgttggacgagaacgataacgcgtcggtattgttgatgtttcgggtgggtggtatcggtggcgtagtgagcgagttggtgtcgcggttagtgggtgcgggttacgtggtagcgaaggtgcgcgtagtggatgtagatttaggttataacgcgtggttttcgtatgagttgtagtttgggatcggcggtgcgcgtatttcgtttcgcgtggggttgtatacgggagagattagtacgattcgtgttttggacgaggtggacgtttcgcgt

SEQ ID NO: 3008 - DNA, 743 bp, Artificial Sequence
  chemically treated genomic DNA (Homo sapiens) CpG-island No: 3008
acgcgaaacgtccacctcgtccaaaacacgaatcgtactaatctctcccgtatacaaccccacgcgaaacgaaatacgcgcaccgccgatcccaaactacaactcatacgaaaaccacgcgttataacctaaatctacatccactacgcgcaccttcgctaccacgtaacccgcacccactaaccgcgacaccaactcgctcactacgccaccgataccacccacccgaaacatcaacaataccgacgcgttatcgttctcgtccaacacgaacacctacaacgtcacgttactacccaaaaacgacacgcccgcatcgcgcgcactcacctaaaactacaacaactctaactcctcgtaatccaacgactacaacgcgtacaccttaccgctctccgcgtataccgacacgtaactcgacaacgcgcgctcccccacccgccgttccaccaacgaataaaacaccaaaacgttctcctacgcgtccgcgtcccgcgcaaacaccgtaaaaatataacaacccgacgaattattctccttcacgaacaccgtatactcgaactacgaaaataccgacgcattatcgttcacgtcgaccacctccacgaacacgctaaccgtaacccacaataaaaacgaacccccgtcccgaacaatcaccaccaactcataaaccgacacgctctcgcgatccaaaaaactatccaacaccaataaataataattcttaaaaataaacacca

SEQ ID NO: 3009 - DNA, 1166 bp, Artificial Sequence
  chemically treated genomic DNA (Homo sapiens) CpG-island No: 3009
cgcgcgcgtattttcggtgggtggtatcgagtatcgtagcgtagtgtatagtagtatcgtgagtattaataggttggatatcgcgtagatggcgatgattaggtatacgttgatatttattagcgtagtttttgagttcgcggcgtttatttacgttcgcgacgaggttttgggtgtttggttattttttattaacgatattaatacggtggtcgtggttgttaacgttggttcgtcgtggttttttattagtacgagtaggcggtgtcgaggggagttagtttcgtttagggtacgtgtcgtgttgattttattcgtgtatagttttacgcggaacgggatgcgagcgttgttagtatttagttgaagttcgtacgaaagttacgcgttgtagtttgagttagcgtttattgcgcgtattttcgttattacgtgttttgtatttatcgattacggtattagtttatttattgcgttagtagcggtgttagttttaggcgttaatagtgtcggcgcgttgtcgttttcgtttagtacgaatatttgtagcgttacgttgttgtttagaggcggtacgttcgtatttcgcgcgtttatttggaattgtagtagttttattttttcgtggtttagcggttgtagcgcgtatattttgtcgtttttcgcgtgtatcgaaacgtagttcgataacgcgcgttcgtttattcgtcgttttattagcgagtaggatattagcgcgtttttttgcgcgttcgtattttacgttgatatcgtgaagatgtggtagttcggcgggttgtttttttttacgaatattgtgtatttaggttgtgcgaacgtcggcgcgttgtcgtttacgtcggttatttcgatggatacgttggtggtggtttatagtgaaggcgagttttcgtttcgtgcggttattattagtttataggttgatacgttttcgcggtttagggcgttgtttagtattaacgagtagtaatttttgaaggtggatattagtttgaaagggacgtggggcgttagggagtaggtgatatgtttattcgtattagagtcgcgattcgatatcgtgatgagagtaatgatagtgtttagggaagcgttttttgagatgggaagtgagagagacgttattgagatttttggtgtgttat

SEQ ID NO: 3010 - DNA, 1166 bp, Artificial Sequence
  chemically treated genomic DNA (Homo sapiens) CpG-island No: 3010
ataacacaccaaaaatctcaataacgtctctctcacttcccatctcaaaaaacgcttccctaaacactatcattactctcatcacgatatcgaatcgcgactctaatacgaataaacatatcacctactccctaacgccccacgtccctttcaaactaatatccaccttcaaaaattactactcgttaatactaaacaacgccctaaaccgcgaaaacgtatcaacctataaactaataataaccgcacgaaacgaaaactcgccttcactataaaccaccaccaacgtatccatcgaaataaccgacgtaaacgacaacgcgccgacgttcgcacaacctaaatacacaatattcgtaaaaaaaaacaacccgccgaactaccacatcttcacgatatcaacgtaaaatacgaacgcgcaaaaaaacgcgctaatatcctactcgctaataaaacgacgaataaacgaacgcgcgttatcgaactacgtttcgatacacgcgaaaaacgacaaaatatacgcgctacaaccgctaaaccacgaaaaaataaaactactacaattccaaataaacgcgcgaaatacgaacgtaccgcctctaaacaacaacgtaacgctacaaatattcgtactaaacgaaaacgacaacgcgccgacactattaacgcctaaaactaacaccgctactaacgcaataaataaactaataccgtaatcgataaatacaaaacacgtaataacgaaaatacgcgcaataaacgctaactcaaactacaacgcgtaactttcgtacgaacttcaactaaatactaacaacgctcgcatcccgttccgcgtaaaactatacacgaataaaatcaacacgacacgtaccctaaacgaaactaactcccctcgacaccgcctactcgtactaataaaaaaccacgacgaaccaacgttaacaaccacgaccaccgtattaatatcgttaataaaaaataaccaaacacccaaaacctcgtcgcgaacgtaaataaacgccgcgaactcaaaaactacgctaataaatatcaacgtatacctaatcatcgccatctacgcgatatccaacctattaatactcacgatactactatacactacgctacgatactcgataccacccaccgaaaatacgcgcgcg

SEQ ID NO: 3011 - DNA, 1166 bp, Artificial Sequence
  chemically treated genomic DNA (Homo sapiens) CpG-island No: 3011
ataatatattagaagttttaataacgttttttttattttttattttagagaacgtttttttgggtattgttattgtttttattacggtgtcggatcgcgattttggtacgaatggatatgttatttgttttttgacgttttacgttttttttaagttggtgtttatttttaagaattattattcgttggtgttggatagcgttttggatcgcgagagcgtgttagtttatgagttggtggtgatcgtacgggacgggggttcgtttttattgtgggttattattagcgtgtttatcgaggtggtcgacgtgaacgataacgcgtcggcgttcgtatagtttgagtatatagtattcgtgaaggagaataattcgtcgggttgttatatttttacggtgttagcgtgggatgcggacgcgtaggagaacgcgttggtgttttattcgttggtggagcggcgggtgggcgagcgcgcgttgtcgagttacgtttcggtgtacgcggagagcggtaaggtgtacgcgttgtagtcgttggattacgaggaagtggagttgttgtagttttaggtgagcgcgcgggatgcgggcgtgtcgtttttgggtagtaacgtgacgttgtaggtgttcgtgttggacgagaacgataacgcgtcggtattgttggcgtttagggttggtatcgttgttggcgtagtgagtgagttggtgtcgtggtcggtgggtgtagggtacgtggtggcgaaggtgcgcgtagtggacgttgatttaggttataacgcgtggttttcgtacgagttttagttgggtattggtagcgttcgtatttcgtttcgcgtggggttatatacgggtgagattagtacgatacgtgttttagacgaggttgatttttttcgatatcgtttattcgtgttggtgaaggattacggcgaattagcgttgatagttacggttatcgtgttagtgtcgttggtggaaagtggttaggtatttaaggtttcgtcgcgggcgtgggtgggcgtcgcgggtttagaggttacgttggtggatgttaacgtgtatttgattatcgttatttgcgcggtatttagtttgttggtgtttacggtgttgttgtatattgcgttgcggtgttcggtgttatttatcgagggtgcgcgcgcg

SEQ ID NO: 3012 - DNA, 1166 bp, Artificial Sequence
  chemically treated genomic DNA (Homo sapiens) CpG-island No: 3012
cgcgcgcgcaccctcgataaataacaccgaacaccgcaacgcaatatacaacaacaccgtaaacaccaacaaactaaataccgcgcaaataacgataatcaaatacacgttaacatccaccaacgtaacctctaaacccgcgacgcccacccacgcccgcgacgaaaccttaaatacctaaccactttccaccaacgacactaacacgataaccgtaactatcaacgctaattcgccgtaatccttcaccaacacgaataaacgatatcgaaaaaaatcaacctcgtctaaaacacgtatcgtactaatctcacccgtatataaccccacgcgaaacgaaatacgaacgctaccaatacccaactaaaactcgtacgaaaaccacgcgttataacctaaatcaacgtccactacgcgcaccttcgccaccacgtaccctacacccaccgaccacgacaccaactcactcactacgccaacaacgataccaaccctaaacgccaacaataccgacgcgttatcgttctcgtccaacacgaacacctacaacgtcacgttactacccaaaaacgacacgcccgcatcccgcgcgctcacctaaaactacaacaactccacttcctcgtaatccaacgactacaacgcgtacaccttaccgctctccgcgtacaccgaaacgtaactcgacaacgcgcgctcgcccacccgccgctccaccaacgaataaaacaccaacgcgttctcctacgcgtccgcatcccacgctaacaccgtaaaaatataacaacccgacgaattattctccttcacgaatactatatactcaaactatacgaacgccgacgcgttatcgttcacgtcgaccacctcgataaacacgctaataataacccacaataaaaacgaacccccgtcccgtacgatcaccaccaactcataaactaacacgctctcgcgatccaaaacgctatccaacaccaacgaataataattcttaaaaataaacaccaacttaaaaaaaacgtaaaacgtcaaaaaacaaataacatatccattcgtaccaaaatcgcgatccgacaccgtaataaaaacaataacaatacccaaaaaaacgttctctaaaataaaaaataaaaaaaacgttattaaaacttctaatatattat

SEQ ID NO: 3013 - DNA, 974 bp, Artificial Sequence
  chemically treated genomic DNA (Homo sapiens) CpG-island No: 3013
atatcgcgtagatggcgatgattaggtatacgttgatatttattagcgtcgtttttgggttcgcgatatttatcgacgttcgcgaagacgtttttggcgtttggtcgttttttattagagatataagtatagtggtcgtggttgttagcgtcggtttatcgtgattttttattagtattagaaggcggtagcgcgataagttagtttcgtttaggatacgagtcgtgttgatttcgttcgtgtatagttttacgcggaacgggatgcgcgcgtcgtttgttgtcggttgtagtttataggatagttacgcgttgtagttcgagtcggcgtttattgcgcgtattttcgttattatatgattcgtatttattaatcgcggtattagtttattgattgtattaatagtgttatttattcgaggcgttagtagcgtcggcgcgttgtcgttttcgtttagtacgaatatttgtagcgttacgttgttgtttagaggcggtacgttcgtatttcgcgcgtttatttggaattgtagtagttttagtttttcgtggtttaggggttgtagtgcgtatattttgtcgtttttcgcgtgtattgatacgtagttcgatagcgcgcgttcgtttattcgtcgttttattagcgaataggatattagcgcgtttttttgcgcgttcgcgtttcgcgtagatatcgtgaagatgtggtagttcggcgggttgtttttttttacgaatattgtgtattcgggttgcgcgaacgtaggcgcgttgttatttacgtcggttatttttacggatattttggtcgtggtttatagcgaaggcgagttttcgtttcgcgcggttattattagtttatagatcgataggttttcgcgatttagggcgttgtttaatattaacgagtagtaatttttgaaggtggatattagtttgaaggggacgtggggtattaaggagtaagttatttgt

SEQ ID NO: 3014 - DNA, 974 bp, Artificial Sequence
  chemically treated genomic DNA (Homo sapiens) CpG-island No: 3014
acaaataacttactccttaataccccacgtccccttcaaactaatatccaccttcaaaaattactactcgttaatattaaacaacgccctaaatcgcgaaaacctatcgatctataaactaataataaccgcgcgaaacgaaaactcgccttcgctataaaccacgaccaaaatatccgtaaaaataaccgacgtaaataacaacgcgcctacgttcgcgcaacccgaatacacaatattcgtaaaaaaaaacaacccgccgaactaccacatcttcacgatatctacgcgaaacgcgaacgcgcaaaaaaacgcgctaatatcctattcgctaataaaacgacgaataaacgaacgcgcgctatcgaactacgtatcaatacacgcgaaaaacgacaaaatatacgcactacaacccctaaaccacgaaaaactaaaactactacaattccaaataaacgcgcgaaatacgaacgtaccgcctctaaacaacaacgtaacgctacaaatattcgtactaaacgaaaacgacaacgcgccgacgctactaacgcctcgaataaataacactattaatacaatcaataaactaataccgcgattaataaatacgaatcatataataacgaaaatacgcgcaataaacgccgactcgaactacaacgcgtaactatcctataaactacaaccgacaacaaacgacgcgcgcatcccgttccgcgtaaaactatacacgaacgaaatcaacacgactcgtatcctaaacgaaactaacttatcgcgctaccgccttctaatactaataaaaaatcacgataaaccgacgctaacaaccacgaccactatacttatatctctaataaaaaacgaccaaacgccaaaaacgtcttcgcgaacgtcgataaatatcgcgaacccaaaaacgacgctaataaatatcaacgtatacctaatcatcgccatctacgcgatat

SEQ ID NO: 3015 - DNA, 974 bp, Artificial Sequence
  chemically treated genomic DNA (Homo sapiens) CpG-island No: 3015
gtaggtgatttgttttttaatgttttacgttttttttaagttggtgtttatttttaagaattattattcgttggtgttggatagcgttttggatcgcgagagtttgtcggtttatgagttggtggtgatcgcgcgggacgggggttcgttttcgttgtgggttacggttagggtgttcgtggaggtggtcgacgtgaatgataacgcgtttgcgttcgcgtagttcgagtatatagtattcgtgaaggagaataattcgtcgggttgttatatttttacggtgtttgcgcgggacgcggacgcgtaggagaacgcgttggtgttttattcgttggtggaacggcgggtgggcgagcgcgcgttgtcgaattacgtgttagtgtacgcggagagcggtaaggtgtacgtattgtagtttttggattacgaggagttggagttgttgtagttttaggtgagcgcgcgggatgcgggcgtgtcgtttttgggtagtaacgtgacgttgtaggtgttcgtgttggacgagaacgataacgcgtcggcgttgttggcgtttcgagtgggtggtattattggtgtagttagtgagttggtgtcgcgattggtgggtgcgggttatgtggtggcgaaggtgcgcgtagtggacgtcgattcgggttataacgcgtggttgttttatgaattgtagtcggtagtaggcggcgcgcgtatttcgtttcgcgtggggttgtatacgggcgagattagtacgattcgtgttttggacgaggttgatttgtcgcgttatcgttttttggtgttagtgaaggattacggtgagtcggcgttgatagttacggttattgtgtttgtatttttggtggagagcggttaggcgttaaaggcgttttcgcgggcgtcggtgggtgtcgcgggtttagaggcggcgttggtggatgttaacgtgtatttgattatcgttatttgcgcggtgt

SEQ ID NO: 3016 - DNA, 974 bp, Artificial Sequence
  chemically treated genomic DNA (Homo sapiens) CpG-island No: 3016
acaccgcgcaaataacgataatcaaatacacgttaacatccaccaacgccgcctctaaacccgcgacacccaccgacgcccgcgaaaacgcctttaacgcctaaccgctctccaccaaaaatacaaacacaataaccgtaactatcaacgccgactcaccgtaatccttcactaacaccaaaaaacgataacgcgacaaatcaacctcgtccaaaacacgaatcgtactaatctcgcccgtatacaaccccacgcgaaacgaaatacgcgcgccgcctactaccgactacaattcataaaacaaccacgcgttataacccgaatcgacgtccactacgcgcaccttcgccaccacataacccgcacccaccaatcgcgacaccaactcactaactacaccaataataccacccactcgaaacgccaacaacgccgacgcgttatcgttctcgtccaacacgaacacctacaacgtcacgttactacccaaaaacgacacgcccgcatcccgcgcgctcacctaaaactacaacaactccaactcctcgtaatccaaaaactacaatacgtacaccttaccgctctccgcgtacactaacacgtaattcgacaacgcgcgctcgcccacccgccgttccaccaacgaataaaacaccaacgcgttctcctacgcgtccgcgtcccgcgcaaacaccgtaaaaatataacaacccgacgaattattctccttcacgaatactatatactcgaactacgcgaacgcaaacgcgttatcattcacgtcgaccacctccacgaacaccctaaccgtaacccacaacgaaaacgaacccccgtcccgcgcgatcaccaccaactcataaaccgacaaactctcgcgatccaaaacgctatccaacaccaacgaataataattcttaaaaataaacaccaacttaaaaaaaacgtaaaacattaaaaaacaaatcacctac

SEQ ID NO: 3017 - DNA, 585 bp, Artificial Sequence
  chemically treated genomic DNA (Homo sapiens) CpG-island No: 3017
ggtagcgtttttaagcgtttggatattttcgatcgttagggtattttgtatcgttttagtatttatattaagatgttttttgttcgcgagtttttcgagaggttggtgttcgtttttcgcgataagtttgagtattttaatagttattattattcggttttcggtaaggttattttggttcggtatcgcgttaatgtttttcgggaggttttgcggatcggttttggggtgcgttttttcgagttcgtttagtatttgttggacgtgtatcggttcgtggggatggatatttattgggattatgttagtcggttttgtagtttttgttttatcgattacgatttcgtaggtaagttcgagagtatggaggacgatgttaatttttttttgagttttattcgcgcgtcgcggaatttgattttttttcggtttaaggatcggtattcgtaggaggcgcggattatagcgaggatcgtttattagtatttcgtttaattttcggttttgtaaaggtagcgtatttacgatttttattatatggattatttgatgtttaattattttaagttttttgtagatttgtat

SEQ ID NO: 3018 - DNA, 585 bp, Artificial Sequence
  chemically treated genomic DNA (Homo sapiens) CpG-island No: 3018
atacaaatctacaaaaaacttaaaataattaaacatcaaataatccatataataaaaatcgtaaatacgctacctttacaaaaccgaaaattaaacgaaatactaataaacgatcctcgctataatccgcgcctcctacgaataccgatccttaaaccgaaaaaaaatcaaattccgcgacgcgcgaataaaactcaaaaaaaaattaacatcgtcctccatactctcgaacttacctacgaaatcgtaatcgataaaacaaaaactacaaaaccgactaacataatcccaataaatatccatccccacgaaccgatacacgtccaacaaatactaaacgaactcgaaaaaacgcaccccaaaaccgatccgcaaaacctcccgaaaaacattaacgcgataccgaaccaaaataaccttaccgaaaaccgaataataataactattaaaatactcaaacttatcgcgaaaaacgaacaccaacctctcgaaaaactcgcgaacaaaaaacatcttaatataaatactaaaacgatacaaaataccctaacgatcgaaaatatccaaacgcttaaaaacgctacc

SEQ ID NO: 3019 - DNA, 585 bp, Artificial Sequence
  chemically treated genomic DNA (Homo sapiens) CpG-island No: 3019
gtatagatttgtaaagggtttggaatagttgaatattaggtaatttatgtagtagaagtcgtaggtgcgttgtttttgtagggtcgagagttgggcgaagtattggtgggcgattttcgttgtggttcgcgttttttgcgagtgtcggtttttgaatcgggggaaggttaggtttcgcggcgcgcggatgaggtttaggaagaagttggtatcgttttttatgttttcgaatttgtttacgaaatcgtagtcgatgaggtaggggttgtagagtcggttgatatggttttagtgaatgtttatttttacgggtcggtgtacgtttagtaggtattggacgaattcgggaaaacgtattttagagtcggttcgtagggtttttcgagaggtattggcgcggtatcgggttaggatggttttgtcgaagatcgggtgatagtagttgttggggtgtttaaatttgtcgcggaaggcggatattagtttttcgaagggttcgcggataaagagtattttggtgtaggtgttgagacggtgtaagatattttggcggtcgaaggtgtttaggcgtttgagagcgttgtt

SEQ ID NO: 3020 - DNA, 585 bp, Artificial Sequence
  chemically treated genomic DNA (Homo sapiens) CpG-island No: 3020
aacaacgctctcaaacgcctaaacaccttcgaccgccaaaatatcttacaccgtctcaacacctacaccaaaatactctttatccgcgaacccttcgaaaaactaatatccgccttccgcgacaaatttaaacaccccaacaactactatcacccgatcttcgacaaaaccatcctaacccgataccgcgccaatacctctcgaaaaaccctacgaaccgactctaaaatacgttttcccgaattcgtccaatacctactaaacgtacaccgacccgtaaaaataaacattcactaaaaccatatcaaccgactctacaacccctacctcatcgactacgatttcgtaaacaaattcgaaaacataaaaaacgataccaacttcttcctaaacctcatccgcgcgccgcgaaacctaaccttcccccgattcaaaaaccgacactcgcaaaaaacgcgaaccacaacgaaaatcgcccaccaatacttcgcccaactctcgaccctacaaaaacaacgcacctacgacttctactacataaattacctaatattcaactattccaaaccctttacaaatctatac

SEQ ID NO: 3021 - DNA, 550 bp, Artificial Sequence
  chemically treated genomic DNA (Homo sapiens) CpG-island No: 3021
gtcgttagggggcgtttaggttcggtcggagtcggcggtcgggatttaggcgtcgtttcggttcgtgcgtattcgtttcgcggttttagtcggttttcggttcgggcgtttttggagttaggcgggggcgtagtgtcggttagtcgcgcgtttcgttttttaggagtcgggaaatggtcgtcgaggaggaggaggaggtacgggcggggcgtaaaggaaataggaggaagaggaaggggaggaggagtgggagtgggagaaaaggaggaaggggcggtcgaagcggagattggggaggggcgttcggggcgcggatttcggtcgcggggagttttggttgtcgtcgtttttatcgcgtcgcgcgcgtaaaggaaatggcgcgtttagtcgcgagcggtcggttcggtgttttagcgcgtttttttttcgcggcggtcgatcgcgtgttcgtagacgttacgggagaggggtagcggggtagagattttgggagggcggttagggagcgggggaggggcggtttggttttcggtttcgttttagtttcgat

SEQ ID NO: 3022 - DNA, 550 bp, Artificial Sequence
  chemically treated genomic DNA (Homo sapiens) CpG-island No: 3022
atcgaaactaaaacgaaaccgaaaaccaaaccgcccctcccccgctccctaaccgccctcccaaaatctctaccccgctacccctctcccgtaacgtctacgaacacgcgatcgaccgccgcgaaaaaaaaacgcgctaaaacaccgaaccgaccgctcgcgactaaacgcgccatttcctttacgcgcgcgacgcgataaaaacgacgacaaccaaaactccccgcgaccgaaatccgcgccccgaacgcccctccccaatctccgcttcgaccgccccttcctccttttctcccactcccactcctcctccccttcctcttcctcctatttcctttacgccccgcccgtacctcctcctcctcctcgacgaccatttcccgactcctaaaaaacgaaacgcgcgactaaccgacactacgcccccgcctaactccaaaaacgcccgaaccgaaaaccgactaaaaccgcgaaacgaatacgcacgaaccgaaacgacgcctaaatcccgaccgccgactccgaccgaacctaaacgccccctaacgac

SEQ ID NO: 3023 - DNA, 550 bp, Artificial Sequence
  chemically treated genomic DNA (Homo sapiens) CpG-island No: 3023
gtcggggttggagcggagtcgggggttaggtcgtttttttttcgttttttggtcgtttttttagggtttttgtttcgttgtttttttttcgtgacgtttgcggatacgcggtcggtcgtcgcgggggagggacgcgttggggtatcgggtcgatcgttcgcggttagacgcgttattttttttacgcgcgcggcgcgatggagacggcggtagttaagatttttcgcggtcgaggttcgcgtttcggacgtttttttttagttttcgtttcggtcgttttttttttttttttttttatttttattttttttttttttttttttttttttgttttttttgcgtttcgttcgtgtttttttttttttttcggcgattatttttcggtttttaggaaacggagcgcgcgattggtcggtattgcgttttcgtttggttttagggacgttcgggtcggagatcggttgggatcgcggggcgggtgcgtacgggtcggaacggcgtttgggtttcgatcgtcggtttcggtcgggtttggacgttttttagcggt

SEQ ID NO: 3024 - DNA, 550 bp, Artificial Sequence
  chemically treated genomic DNA (Homo sapiens) CpG-island No: 3024
accgctaaaaaacgtccaaacccgaccgaaaccgacgatcgaaacccaaacgccgttccgacccgtacgcacccgccccgcgatcccaaccgatctccgacccgaacgtccctaaaaccaaacgaaaacgcaataccgaccaatcgcgcgctccgtttcctaaaaaccgaaaaataatcgccgaaaaaaaaaaaaaaacacgaacgaaacgcaaaaaaaacaaaaaaaaaaaaaaaaaaaaaaaaaataaaaataaaaaaaaaaaaaaaaaaaacgaccgaaacgaaaactaaaaaaaaacgtccgaaacgcgaacctcgaccgcgaaaaatcttaactaccgccgtctccatcgcgccgcgcgcgtaaaaaaaataacgcgtctaaccgcgaacgatcgacccgataccccaacgcgtccctcccccgcgacgaccgaccgcgtatccgcaaacgtcacgaaaaaaaaacaacgaaacaaaaaccctaaaaaaacgaccaaaaaacgaaaaaaaaacgacctaacccccgactccgctccaaccccgac

SEQ ID NO: 3025 - DNA, 959 bp, Artificial Sequence
  chemically treated genomic DNA (Homo sapiens) CpG-island No: 3025
tttcgagttcggaggaggttcgggcgtcgcgtggtcggtcggcggggggcggggggttgggtcgcggagggcgttggggtttgggcgtatcgttttcgggagggttttggtcgcggtttcggcgggaaggcgcgggtttcgggagaggcgggtggggatcgttcggcgaaaggaggggaaacggcgcgtttttgtcgttaggcgcgggcgcgcggagttaattgcgattttaattttttgtttcgcggcgtagtcgagtttcgagttaggagtcgtcgcgcgcgttcgttcgcgttgggtaatttggggtcggatcgttgttttttacgttcgggttgggtcgcggcgaggcgttggttaggggttggagtggggggttggttttttttttagtaatcgagggaggtcgtcggagagagaggagggaggagaggaggtgggagcggcgggagggtagtcggagagcggcgcgaggaggaggcggcggcggcggaggcggcggtcgcgaagaggggaggaggcgaggggagggtggggaggggaggtttcggcgcgtcgcgtcgcgaggggtcgcgtgaagcgggggtcggggcgggaggggtgggtggggggagggttgggggcgagagagaaagtaattttaggacgagatcggagcgattcgcgtagcgagtataggcggcgaagttgcgttcggcgttcgagatcggtagttgcgtggggcgggggttgcgttcgagttcgatttgtcggtttcgaggtaagtttagcgcgggcggttatcgtttagagtcgcgtaattttgtttcgaagtggttgcgatatcgagaaagtcgttcggttagggtttggatttgggcgggggcggtcgttttgtttttttgttgggcggcgggggttggcggcgcgggggtgtttagtataaaggtttggtgtaagagtggggttgtttacgtggg

SEQ ID NO: 3026 - DNA, 959 bp, Artificial Sequence
  chemically treated genomic DNA (Homo sapiens) CpG-island No: 3026
cccacgtaaacaaccccactcttacaccaaacctttatactaaacacccccgcgccgccaacccccgccgcccaacaaaaaaacaaaacgaccgcccccgcccaaatccaaaccctaaccgaacgactttctcgatatcgcaaccacttcgaaacaaaattacgcgactctaaacgataaccgcccgcgctaaacttacctcgaaaccgacaaatcgaactcgaacgcaacccccgccccacgcaactaccgatctcgaacgccgaacgcaacttcgccgcctatactcgctacgcgaatcgctccgatctcgtcctaaaattactttctctctcgcccccaaccctccccccacccacccctcccgccccgacccccgcttcacgcgacccctcgcgacgcgacgcgccgaaacctcccctccccaccctcccctcgcctcctcccctcttcgcgaccgccgcctccgccgccgccgcctcctcctcgcgccgctctccgactaccctcccgccgctcccacctcctctcctccctcctctctctccgacgacctccctcgattactaaaaaaaaaaccaaccccccactccaacccctaaccaacgcctcgccgcgacccaacccgaacgtaaaaaacaacgatccgaccccaaattacccaacgcgaacgaacgcgcgcgacgactcctaactcgaaactcgactacgccgcgaaacaaaaaattaaaatcgcaattaactccgcgcgcccgcgcctaacgacaaaaacgcgccgtttcccctcctttcgccgaacgatccccacccgcctctcccgaaacccgcgccttcccgccgaaaccgcgaccaaaaccctcccgaaaacgatacgcccaaaccccaacgccctccgcgacccaaccccccgccccccgccgaccgaccacgcgacgcccgaacctcctccgaactcgaaa

SEQ ID NO: 3027 - DNA, 959 bp, Artificial Sequence
  chemically treated genomic DNA (Homo sapiens) CpG-island No: 3027
tttacgtgggtaattttatttttgtattaggtttttgtgttgggtattttcgcgtcgttagttttcgtcgtttagtagagggataaagcggtcgttttcgtttaggtttagattttggtcgggcgattttttcggtatcgtagttatttcggggtagggttgcgcggttttgagcggtggtcgttcgcgttgagtttatttcggagtcggtagatcgggttcgggcgtagttttcgttttacgtagttgtcggtttcgggcgtcgggcgtagtttcgtcgtttatgttcgttgcgcgggtcgtttcggtttcgttttggagttattttttttttcgtttttaattttttttttatttatttttttcgtttcggttttcgttttacgcggtttttcgcggcgcggcgcgtcggggttttttttttttatttttttttcgttttttttttttttcgcggtcgtcgttttcgtcgtcgtcgtttttttttcgcgtcgtttttcggttgttttttcgtcgtttttatttttttttttttttttttttttttcggcggtttttttcgattgttggagagaaaattagttttttattttagtttttagttagcgtttcgtcgcggtttagttcggacgtaaagggtagcgattcggttttaaattatttagcgcgaacgggcgcgcgcggcgatttttggttcggggttcggttgcgtcgcggggtagaggattagagtcgtaattagtttcgcgcgttcgcgtttggcgataaaaacgcgtcgtttttttttttttcgtcgggcgatttttattcgtttttttcgaagttcgcgttttttcgtcggggtcgcggttaggattttttcgggagcggtgcgtttaggttttagcgtttttcgcggtttagtttttcgtttttcgtcggtcggttacgcggcgttcgggtttttttcgggttcgggg

SEQ ID NO: 3028 - DNA, 959 bp, Artificial Sequence
  chemically treated genomic DNA (Homo sapiens) CpG-island No: 3028
ccccgaacccgaaaaaaacccgaacgccgcgtaaccgaccgacgaaaaacgaaaaactaaaccgcgaaaaacgctaaaacctaaacgcaccgctcccgaaaaaatcctaaccgcgaccccgacgaaaaaacgcgaacttcgaaaaaaacgaataaaaatcgcccgacgaaaaaaaaaaaaacgacgcgtttttatcgccaaacgcgaacgcgcgaaactaattacgactctaatcctctaccccgcgacgcaaccgaaccccgaaccaaaaatcgccgcgcgcgcccgttcgcgctaaataatttaaaaccgaatcgctaccctttacgtccgaactaaaccgcgacgaaacgctaactaaaaactaaaataaaaaactaattttctctccaacaatcgaaaaaaaccgccgaaaaaaaaaaaaaaaaaaaaaaaaataaaaacgacgaaaaaacaaccgaaaaacgacgcgaaaaaaaaacgacgacgacgaaaacgacgaccgcgaaaaaaaaaaaaaacgaaaaaaaaataaaaaaaaaaaaccccgacgcgccgcgccgcgaaaaaccgcgtaaaacgaaaaccgaaacgaaaaaaataaataaaaaaaaaattaaaaacgaaaaaaaaaataactccaaaacgaaaccgaaacgacccgcgcaacgaacataaacgacgaaactacgcccgacgcccgaaaccgacaactacgtaaaacgaaaactacgcccgaacccgatctaccgactccgaaataaactcaacgcgaacgaccaccgctcaaaaccgcgcaaccctaccccgaaataactacgataccgaaaaaatcgcccgaccaaaatctaaacctaaacgaaaacgaccgctttatccctctactaaacgacgaaaactaacgacgcgaaaatacccaacacaaaaacctaatacaaaaataaaattacccacgtaaa

SEQ ID NO: 3029 - DNA, 507 bp, Artificial Sequence
  chemically treated genomic DNA (Homo sapiens) CpG-island No: 3029
atttttttcggtgggtttgtatacgggcgaggtgcgtacggcgcgagttttgttggatagagacgcgtttaagtagagtttcgtggtggtcgtttaggattacggttagttttcgtttttcgttattgttacgtttatcgtggtcgtggtcgataggattttcgatattttggtcgatttgggtagtttcgagtttttcgttaaatttaacgattcggattttattttgtatttggtggtggcggcggtcgcggttttttgcgtttttttggttttcgttatcgtgttgttggcgtataggttgcggcgttggtataagttacgtttgttataggtttcgggaggcggtttagcgagtatgttcggttcgtattttgtgggcgtggacggggttcgggtttttttgtagatttatttttacgaggttttttttattgcggattcgcggaagagttatttgatttttttttagtttaattatgcggatatatttattagttaggagag

SEQ ID NO: 3030 - DNA, 507 bp, Artificial Sequence
  chemically treated genomic DNA (Homo sapiens) CpG-island No: 3030
ctctcctaactaataaatatatccgcataattaaactaaaaaaaaatcaaataactcttccgcgaatccgcaataaaaaaaacctcgtaaaaataaatctacaaaaaaacccgaaccccgtccacgcccacaaaatacgaaccgaacatactcgctaaaccgcctcccgaaacctataacaaacgtaacttataccaacgccgcaacctatacgccaacaacacgataacgaaaaccaaaaaaacgcaaaaaaccgcgaccgccgccaccaccaaatacaaaataaaatccgaatcgttaaatttaacgaaaaactcgaaactacccaaatcgaccaaaatatcgaaaatcctatcgaccacgaccacgataaacgtaacaataacgaaaaacgaaaactaaccgtaatcctaaacgaccaccacgaaactctacttaaacgcgtctctatccaacaaaactcgcgccgtacgcacctcgcccgtatacaaacccaccgaaaaaaat

SEQ ID NO: 3031 - DNA, 507 bp, Artificial Sequence
  chemically treated genomic DNA (Homo sapiens) CpG-island No: 3031
tttttttggttgatgagtgtgttcgtatagttgggttgggggaaaattaggtggttttttcgcgagttcgtagtgagggagatttcgtgggaataggtttgtaggaaagttcgaatttcgtttacgtttataaagtgcgaatcgggtatgttcgttaagtcgtttttcgaagtttgtagtagacgtgatttgtgttagcgtcgtagtttgtgcgttagtagtacgatgacgaaggttaggaagacgtaggagatcgcggtcgtcgttattattaggtatagagtgaggttcgaatcgttgggtttggcggagggttcgaggttgtttaggtcggttaggatgtcggagattttgtcggttacggttacggtgagcgtgatagtggcggagagcgggggttggtcgtggttttggacggttattacgagattttgtttgagcgcgtttttgtttagtagggttcgcgtcgtgcgtatttcgttcgtgtgtagatttatcgagaagagt

SEQ ID NO: 3032 - DNA, 507 bp, Artificial Sequence
  chemically treated genomic DNA (Homo sapiens) CpG-island No: 3032
actcttctcgataaatctacacacgaacgaaatacgcacgacgcgaaccctactaaacaaaaacgcgctcaaacaaaatctcgtaataaccgtccaaaaccacgaccaacccccgctctccgccactatcacgctcaccgtaaccgtaaccgacaaaatctccgacatcctaaccgacctaaacaacctcgaaccctccgccaaacccaacgattcgaacctcactctatacctaataataacgacgaccgcgatctcctacgtcttcctaaccttcgtcatcgtactactaacgcacaaactacgacgctaacacaaatcacgtctactacaaacttcgaaaaacgacttaacgaacatacccgattcgcactttataaacgtaaacgaaattcgaactttcctacaaacctattcccacgaaatctccctcactacgaactcgcgaaaaaaccacctaattttcccccaacccaactatacgaacacactcatcaaccaaaaaaa

SEQ ID NO: 3033 - DNA, 538 bp, Artificial Sequence
  chemically treated genomic DNA (Homo sapiens) CpG-island No: 3033
atttttttcggtgggtttgtatacgggcgaggtgcgtacggcgcgagttttgttggatagagacgcgtttaagtagagtttcgtggtggtcgtttaggattacggttagtttttttttttcgttattgttacgtttatcgtggtcgtggtcgataggattttcgatattttggtcgatttgggtagtttcgagtttttcgttaaatttaacgattcggattttattttgtatttggtggtggcggtggtcgcggttttttgcgtttttttggttttcgttatcgtgttgttggcgtttaggttgcggcgttggtataagttacgtttgttgtaggtttcgggaggcggtttggcgagtacgttcggttcgtattttgtgggcgcggacggggttcgggtttttttgtagatttatttttacgaggttttttttattgcggattcgcggaagagttatttgatttttttttagtttaattatgcggatacgtttattagttaggagagttgtgagaaaagcgagttttttttgataatt

SEQ ID NO: 3034 - DNA, 538 bp, Artificial Sequence
  chemically treated genomic DNA (Homo sapiens) CpG-island No: 3034
aattatcaaaaaaaactcgcttttctcacaactctcctaactaataaacgtatccgcataattaaactaaaaaaaaatcaaataactcttccgcgaatccgcaataaaaaaaacctcgtaaaaataaatctacaaaaaaacccgaaccccgtccgcgcccacaaaatacgaaccgaacgtactcgccaaaccgcctcccgaaacctacaacaaacgtaacttataccaacgccgcaacctaaacgccaacaacacgataacgaaaaccaaaaaaacgcaaaaaaccgcgaccaccgccaccaccaaatacaaaataaaatccgaatcgttaaatttaacgaaaaactcgaaactacccaaatcgaccaaaatatcgaaaatcctatcgaccacgaccacgataaacgtaacaataacgaaaaaaaaaaactaaccgtaatcctaaacgaccaccacgaaactctacttaaacgcgtctctatccaacaaaactcgcgccgtacgcacctcgcccgtatacaaacccaccgaaaaaaat

SEQ ID NO: 3035 - DNA, 538 bp, Artificial Sequence
  chemically treated genomic DNA (Homo sapiens) CpG-island No: 3035
agttattagaagaggttcgttttttttatagtttttttggttgatgagcgtgttcgtatagttgggttgggggaaaattaggtggttttttcgcgagttcgtagtgagggagatttcgtgggaataggtttgtaggaaagttcgaatttcgttcgcgtttataaagtgcgagtcgggcgtattcgttaagtcgtttttcgaagtttgtagtaggcgtgatttgtgttagcgtcgtagtttgagcgttagtagtacgatgacgaaggttaggaagacgtaggagatcgcggttatcgttattattaggtatagagtgaggttcgaatcgttgggtttggcggagggttcgaggttgtttaggtcggttaggatgtcggggattttgtcggttacggttacggtgagcgtgatagtggcggagagagggggttggtcgtggttttggacggttattacgaggttttgtttgagcgcgtttttgtttagtagggttcgcgtcgtgcgtatttcgttcgtgtgtagatttatcgagaagagt

SEQ ID NO: 3036 - DNA, 538 bp, Artificial Sequence
  chemically treated genomic DNA (Homo sapiens) CpG-island No: 3036
actcttctcgataaatctacacacgaacgaaatacgcacgacgcgaaccctactaaacaaaaacgcgctcaaacaaaacctcgtaataaccgtccaaaaccacgaccaaccccctctctccgccactatcacgctcaccgtaaccgtaaccgacaaaatccccgacatcctaaccgacctaaacaacctcgaaccctccgccaaacccaacgattcgaacctcactctatacctaataataacgataaccgcgatctcctacgtcttcctaaccttcgtcatcgtactactaacgctcaaactacgacgctaacacaaatcacgcctactacaaacttcgaaaaacgacttaacgaatacgcccgactcgcactttataaacgcgaacgaaattcgaactttcctacaaacctattcccacgaaatctccctcactacgaactcgcgaaaaaaccacctaattttcccccaacccaactatacgaacacgctcatcaaccaaaaaaactataaaaaaaacgaacctcttctaataact

SEQ ID NO: 3037 - DNA, 507 bp, Artificial Sequence
  chemically treated genomic DNA (Homo sapiens) CpG-island No: 3037
gcgaggtgcgtacggcgcgcgttttgttggatagagacgcgtttaagtagagtttagtggtggtcgtttaggattacggttagtttttttttttcgttattgttacgtttatcgtggtcgtggtcgataggattttcgatattttggtcgatttgggtagtttcgagtttttcgttaaatttaacgattcggattttattttgtatttggtggtggcggtggtcgcggttttttgcgtttttttggttttcgttatcgtgttgttggcgtttagattgtagcgttggtataagttacgtttgttgtaggtttcgggaggtggtttagcgagtatgttcggttcgtattttgtgggcgtggaaggggttcgggtttttttgtagatttatttttacgaggttttatttattgtagattcgcgtaagagttatttgatttttttttagtttaattatgtcgatacgtttattaattaggagagttatgagaaaagcgagttttttttga

SEQ ID NO: 3038 - DNA, 507 bp, Artificial Sequence
  chemically treated genomic DNA (Homo sapiens) CpG-island No: 3038
tcaaaaaaaactcgcttttctcataactctcctaattaataaacgtatcgacataattaaactaaaaaaaaatcaaataactcttacgcgaatctacaataaataaaacctcgtaaaaataaatctacaaaaaaacccgaaccccttccacgcccacaaaatacgaaccgaacatactcgctaaaccacctcccgaaacctacaacaaacgtaacttataccaacgctacaatctaaacgccaacaacacgataacgaaaaccaaaaaaacgcaaaaaaccgcgaccaccgccaccaccaaatacaaaataaaatccgaatcgttaaatttaacgaaaaactcgaaactacccaaatcgaccaaaatatcgaaaatcctatcgaccacgaccacgataaacgtaacaataacgaaaaaaaaaaactaaccgtaatcctaaacgaccaccactaaactctacttaaacgcgtctctatccaacaaaacgcgcgccgtacgcacctcgc

SEQ ID NO: 3039 - DNA, 507 bp, Artificial Sequence
  chemically treated genomic DNA (Homo sapiens) CpG-island No: 3039
ttagaagaggttcgttttttttatagtttttttggttgataagcgtgtcggtatagttgggttgggggaaaattagatgatttttacgcgagtttgtagtgagtgagatttcgtgggaataggtttgtaggaaagttcgaattttttttacgtttataaagtgcgagtcgggtatgttcgttaagttatttttcgaagtttgtagtaggcgtgatttgtgttagcgttgtagtttgagcgttagtagtacgatgacgaaggttaggaagacgtaggagatcgcggttatcgttattattaggtatagagtgaggttcgaatcgttgggtttggcggagggttcgaggttgtttaggtcggttaggatgtcggggattttgtcggttacggttacggtgagcgtgatagtggcggagagagggggttggtcgtggttttggacggttattattaggttttgtttgagcgcgtttttgtttagtagggcgcgcgtcgtgcgtatttcgt

SEQ ID NO: 3040 - DNA, 507 bp, Artificial Sequence
  chemically treated genomic DNA (Homo sapiens) CpG-island No: 3040
acgaaatacgcacgacgcgcgccctactaaacaaaaacgcgctcaaacaaaacctaataataaccgtccaaaaccacgaccaaccccctctctccgccactatcacgctcaccgtaaccgtaaccgacaaaatccccgacatcctaaccgacctaaacaacctcgaaccctccgccaaacccaacgattcgaacctcactctatacctaataataacgataaccgcgatctcctacgtcttcctaaccttcgtcatcgtactactaacgctcaaactacaacgctaacacaaatcacgcctactacaaacttcgaaaaataacttaacgaacatacccgactcgcactttataaacgtaaaaaaaattcgaactttcctacaaacctattcccacgaaatctcactcactacaaactcgcgtaaaaatcatctaattttcccccaacccaactataccgacacgcttatcaaccaaaaaaactataaaaaaaacgaacctcttctaa

SEQ ID NO: 3041 - DNA, 568 bp, Artificial Sequence
  chemically treated genomic DNA (Homo sapiens) CpG-island No: 3041
ggtgtcgttatacgtgttagtgagcgcgtagagcggggtggtgttcgcgtagcgcgtttttgattacgagtagttgcgcgttttcgcgtttacgttgtaggttcgcgattacggttcgtttacgtttagcgttaacgtgagtttgcgcgtgttggtgggagatcgtaatgataacgtatcgcgggtgttgtatttagttttgggttttgacggtttcgcgtttttcgatatggtatttcgttttgtagagttcggttatttagtgattaaggtggtagcggtggacgtcgattcgggatataacgtttggttgttttattacgtgttgtaggttagtgagttcggattttttagtttggggttgcgtattggggaggtgcgtacggttcgagttttaggcgatagggacgtagttcgttagcgtttgttggtcgttgtgcgtgacggtggatagtcgttattttttgttatcgttacgttttatttggttttcgtagataatttgtaagagatattgttagattttagcgatcgttttgtattttttgatttttaggttgaattgtag

SEQ ID NO: 3042 - DNA, 568 bp, Artificial Sequence
  chemically treated genomic DNA (Homo sapiens) CpG-island No: 3042
ctacaattcaacctaaaaatcaaaaaatacaaaacgatcgctaaaatctaacaatatctcttacaaattatctacgaaaaccaaataaaacgtaacgataacaaaaaataacgactatccaccgtcacgcacaacgaccaacaaacgctaacgaactacgtccctatcgcctaaaactcgaaccgtacgcacctccccaatacgcaaccccaaactaaaaaatccgaactcactaacctacaacacgtaataaaacaaccaaacgttatatcccgaatcgacgtccaccgctaccaccttaatcactaaataaccgaactctacaaaacgaaataccatatcgaaaaacgcgaaaccgtcaaaacccaaaactaaatacaacacccgcgatacgttatcattacgatctcccaccaacacgcgcaaactcacgttaacgctaaacgtaaacgaaccgtaatcgcgaacctacaacgtaaacgcgaaaacgcgcaactactcgtaatcaaaaacgcgctacgcgaacaccaccccgctctacgcgctcactaacacgtataacgacacc

SEQ ID NO: 3043 - DNA, 568 bp, Artificial Sequence
  chemically treated genomic DNA (Homo sapiens) CpG-island No: 3043
ttgtagtttagtttgggggttagagagtatagggcggtcgttgaggtttggtagtattttttgtaagttgtttgcgaagattagatgaagcgtggcggtggtagagagtggcggttgtttatcgttacgtatagcgattagtaggcgttggcgggttgcgtttttgtcgtttaaggttcgagtcgtgcgtatttttttagtgcgtagttttaggttgaagagttcgggtttattggtttgtagtacgtggtaggatagttaggcgttgtgtttcgagtcggcgtttatcgttattattttagttattaggtagtcgggttttgtagagcgaggtattatatcgaagaacgcggagtcgttaggatttagagttgggtatagtattcgcggtgcgttgttattgcggttttttattaatacgcgtaggtttacgttggcgttgagcgtgggcgagtcgtggtcgcgggtttgtagcgtgagcgcgaaggcgcgtagttgttcgtgattaaaggcgcgttgcgcgaatattatttcgttttgcgcgtttattgatacgtatgacgatatt

SEQ ID NO: 3044 - DNA, 568 bp, Artificial Sequence
  chemically treated genomic DNA (Homo sapiens) CpG-island No: 3044
aatatcgtcatacgtatcaataaacgcgcaaaacgaaataatattcgcgcaacgcgcctttaatcacgaacaactacgcgccttcgcgctcacgctacaaacccgcgaccacgactcgcccacgctcaacgccaacgtaaacctacgcgtattaataaaaaaccgcaataacaacgcaccgcgaatactatacccaactctaaatcctaacgactccgcgttcttcgatataatacctcgctctacaaaacccgactacctaataactaaaataataacgataaacgccgactcgaaacacaacgcctaactatcctaccacgtactacaaaccaataaacccgaactcttcaacctaaaactacgcactaaaaaaatacgcacgactcgaaccttaaacgacaaaaacgcaacccgccaacgcctactaatcgctatacgtaacgataaacaaccgccactctctaccaccgccacgcttcatctaatcttcgcaaacaacttacaaaaaatactaccaaacctcaacgaccgccctatactctctaacccccaaactaaactacaa

SEQ ID NO: 3045 - DNA, 507 bp, Artificial Sequence
  chemically treated genomic DNA (Homo sapiens) CpG-island No: 3045
acgttaatgataacgcgtcggttttcggatagttagtttatttggtttacgtgttagaaaataattagtcgggtgtttttatagcgtaagttagtgtttttgatttagatttcgggtttaacggtcgtgttttttatttttttattgttagcgatttggagttacgaacgttgtcgttttacgtgttcgtgagcgcgtagagcggggtggtgttcgcgtagcgcgttttcgattacgagtagttgcgtattttcgagtttacgttgtaggttcgcgattagggttcgttcgcgtttagcgttaatgtgagtttgcgcgtgttggtgggcgatcgtaacgataacgtatcgcgggtgttgtattttgcgttgggtttcgacggtttcgcgtttttcgatatagtgtcgcgggtcgcgtagttaggttatttggtgattaaggtggtggtcgtggacgcggattcggggtataatgtttggttgttttattacgtggtgtaggttagtg

SEQ ID NO: 3046 - DNA, 507 bp, Artificial Sequence
  chemically treated genomic DNA (Homo sapiens) CpG-island No: 3046
cactaacctacaccacgtaataaaacaaccaaacattataccccgaatccgcgtccacgaccaccaccttaatcaccaaataacctaactacgcgacccgcgacactatatcgaaaaacgcgaaaccgtcgaaacccaacgcaaaatacaacacccgcgatacgttatcgttacgatcgcccaccaacacgcgcaaactcacattaacgctaaacgcgaacgaaccctaatcgcgaacctacaacgtaaactcgaaaatacgcaactactcgtaatcgaaaacgcgctacgcgaacaccaccccgctctacgcgctcacgaacacgtaaaacgacaacgttcgtaactccaaatcgctaacaataaaaaaataaaaaacacgaccgttaaacccgaaatctaaatcaaaaacactaacttacgctataaaaacacccgactaattattttctaacacgtaaaccaaataaactaactatccgaaaaccgacgcgttatcattaacgt

SEQ ID NO: 3047 - DNA, 507 bp, Artificial Sequence
  chemically treated genomic DNA (Homo sapiens) CpG-island No: 3047
tattggtttgtattacgtggtaggatagttaggtattgtgtttcgagttcgcgtttacggttattattttggttattaggtagtttggttgcgcggttcgcggtattgtgtcgaagagcgcggagtcgtcgggatttagcgtagggtatagtattcgcggtgcgttgtcgttacggtcgtttattaatacgcgtaggtttatattggcgttgagcgcgggcgagttttggtcgcgggtttgtagcgtgagttcgaaggtgcgtagttgttcgtggtcgaaggcgcgttgcgcgaatattatttcgttttgcgcgtttacggatacgtaggacgatagcgttcgtgattttaggtcgttggtaatgagagagtaggagatacggtcgttgagttcgaagtttgggttagaggtattgatttgcgttatggaggtattcggttggttgttttttggtacgtggattaggtaggttgattgttcgaaaatcggcgcgttgttattgacgt

SEQ ID NO: 3048 - DNA, 507 bp, Artificial Sequence
  chemically treated genomic DNA (Homo sapiens) CpG-island No: 3048
acgtcaataacaacgcgccgattttcgaacaatcaacctacctaatccacgtaccaaaaaacaaccaaccgaatacctccataacgcaaatcaatacctctaacccaaacttcgaactcaacgaccgtatctcctactctctcattaccaacgacctaaaatcacgaacgctatcgtcctacgtatccgtaaacgcgcaaaacgaaataatattcgcgcaacgcgccttcgaccacgaacaactacgcaccttcgaactcacgctacaaacccgcgaccaaaactcgcccgcgctcaacgccaatataaacctacgcgtattaataaacgaccgtaacgacaacgcaccgcgaatactataccctacgctaaatcccgacgactccgcgctcttcgacacaataccgcgaaccgcgcaaccaaactacctaataaccaaaataataaccgtaaacgcgaactcgaaacacaatacctaactatcctaccacgtaatacaaaccaata

SEQ ID NO: 3049 - DNA, 613 bp, Artificial Sequence
  chemically treated genomic DNA (Homo sapiens) CpG-island No: 3049
ggcgcggtttcgtaggcgggaggcgatgttgtcgacgttattgttgttattattattacggagagatggggcggggcgggagtatcgggtttttttcggaagttttttttgagtttatttagtgtttggggtcgcggcgatcgatgatagttgggcgtcggtcgagtttttttcgggtcgcgcgggggcgtatgcgcggggtcgcgggatcgatcggtcgcgttcgggttttttcgtattcgttcgatttcgttttttcggttcgttgttcggtaatttttgttcggcgcgtttttattggttggcggcggttcgggtttcggtcgcgcgtggttatttggttagcgcgggttcggcgtggtcgggggtttggtttcgggcgcgggtcgatgtcgtttcgtatttgatttttttcggcgcggggagggggttcgagaggatggagagagttggattattttggaagaaaattttattgattcgttttttattttggggacgtacggttttagcggcggggggcgagggtacggttgggtgggggtaggggcggttaggatttttttttcggatatgtacggattttttgatcgtcgtttcggttatttttttg

SEQ ID NO: 3050 - DNA, 613 bp, Artificial Sequence
  chemically treated genomic DNA (Homo sapiens) CpG-island No: 3050
caaaaaaataaccgaaacgacgatcaaaaaatccgtacatatccgaaaaaaaaatcctaaccgcccctacccccacccaaccgtaccctcgccccccgccgctaaaaccgtacgtccccaaaataaaaaacgaatcaataaaattttcttccaaaataatccaactctctccatcctctcgaaccccctccccgcgccgaaaaaaatcaaatacgaaacgacatcgacccgcgcccgaaaccaaacccccgaccacgccgaacccgcgctaaccaaataaccacgcgcgaccgaaacccgaaccgccgccaaccaataaaaacgcgccgaacaaaaattaccgaacaacgaaccgaaaaaacgaaatcgaacgaatacgaaaaaacccgaacgcgaccgatcgatcccgcgaccccgcgcatacgcccccgcgcgacccgaaaaaaactcgaccgacgcccaactatcatcgatcgccgcgaccccaaacactaaataaactcaaaaaaaacttccgaaaaaaacccgatactcccgccccgccccatctctccgtaataataataacaacaataacgtcgacaacatcgcctcccgcctacgaaaccgcgcc

SEQ ID NO: 3051 - DNA, 613 bp, Artificial Sequence
  chemically treated genomic DNA (Homo sapiens) CpG-island No: 3051
tagggagatggtcggggcggcggttagggggttcgtgtatgttcgggaggaaggttttggtcgtttttgtttttatttagtcgtattttcgtttttcgtcgttggaatcgtgcgtttttaagataagagacgggttaataaagtttttttttaagatggtttagttttttttattttttcgggtttttttttcgcgtcgggaaaggttagatgcgaggcggtatcgattcgcgttcggagttaggttttcggttacgtcgagttcgcgttgattaagtgattacgcgcggtcggggttcgggtcgtcgttagttaatgggagcgcgtcgggtagaggttgtcgggtaacgagtcgggggggcggggtcgggcgggtgcggggaggttcgagcgcggtcgatcgatttcgcggtttcgcgtatgcgttttcgcgcggttcggagggggttcggtcggcgtttagttgttatcgatcgtcgcggttttaggtattgaataagtttaggaagggttttcgggaagggttcggtgttttcgtttcgttttattttttcgtaatagtaatggtagtaatagcgtcggtagtatcgtttttcgtttgcgggatcgcgtt

SEQ ID NO: 3052 - DNA, 613 bp, Artificial Sequence
  chemically treated genomic DNA (Homo sapiens) CpG-island No: 3052
aacgcgatcccgcaaacgaaaaacgatactaccgacgctattactaccattactattacgaaaaaataaaacgaaacgaaaacaccgaacccttcccgaaaacccttcctaaacttattcaatacctaaaaccgcgacgatcgataacaactaaacgccgaccgaaccccctccgaaccgcgcgaaaacgcatacgcgaaaccgcgaaatcgatcgaccgcgctcgaacctccccgcacccgcccgaccccgcccccccgactcgttacccgacaacctctacccgacgcgctcccattaactaacgacgacccgaaccccgaccgcgcgtaatcacttaatcaacgcgaactcgacgtaaccgaaaacctaactccgaacgcgaatcgataccgcctcgcatctaacctttcccgacgcgaaaaaaaaacccgaaaaaataaaaaaaactaaaccatcttaaaaaaaaactttattaacccgtctcttatcttaaaaacgcacgattccaacgacgaaaaacgaaaatacgactaaataaaaacaaaaacgaccaaaaccttcctcccgaacatacacgaaccccctaaccgccgccccgaccatctcccta

SEQ ID NO: 3053 - DNA, 561 bp, Artificial Sequence
  chemically treated genomic DNA (Homo sapiens) CpG-island No: 3053
tcgaagtcggggttcgttttcgtttgtattttcgtttagggttttcgcgatcgcgcgtttcgcggtgggcggggtttgtcggttgtattttcgttcggtttttaagtttcggcgtttatttcgcgcgtggttattttttttttttttgagattttgagtaggagtcggtcgttttttagttttagcgcgcggacgcggtcgatgtagtgcgttaggcggtcgttgagttcgcgtagttttttttttttttgtagtcgcgataggcgcgtgggcgatagcggcgtggcgggttcgttcgcgcggtcgggtagcggcgtggttatggtggcggcggttcgcggtttgcgttgttttcgacggcggttcgggttcggcgggtttatttaattcgcgtcgtcggttgtaagatggcgtcgcgtcgcgtcgcgttcgtcgttcgtcgcggcggggtagtttgggattggtagttcgatcgtcgggcgcgcgcggggtacgtcggaagttgaagttttcgtttagttttcgtttcgtagaggcgttgattttagagatagatttttt

SEQ ID NO: 3054 - DNA, 561 bp, Artificial Sequence
  chemically treated genomic DNA (Homo sapiens) CpG-island No: 3054
aaaaaatctatctctaaaatcaacgcctctacgaaacgaaaactaaacgaaaacttcaacttccgacgtaccccgcgcgcgcccgacgatcgaactaccaatcccaaactaccccgccgcgacgaacgacgaacgcgacgcgacgcgacgccatcttacaaccgacgacgcgaattaaataaacccgccgaacccgaaccgccgtcgaaaacaacgcaaaccgcgaaccgccgccaccataaccacgccgctacccgaccgcgcgaacgaacccgccacgccgctatcgcccacgcgcctatcgcgactacaaaaaaaaaaaaaactacgcgaactcaacgaccgcctaacgcactacatcgaccgcgtccgcgcgctaaaactaaaaaacgaccgactcctactcaaaatctcaaaaaaaaaaaaaataaccacgcgcgaaataaacgccgaaacttaaaaaccgaacgaaaatacaaccgacaaaccccgcccaccgcgaaacgcgcgatcgcgaaaaccctaaacgaaaatacaaacgaaaacgaaccccgacttcga

SEQ ID NO: 3055 - DNA, 561 bp, Artificial Sequence
  chemically treated genomic DNA (Homo sapiens) CpG-island No: 3055
aggaagtttgtttttggagttagcgtttttgcgaagcgagagttggacggagattttaattttcggcgtgtttcgcgcgcgttcggcggtcggattattagttttaggttgtttcgtcgcggcgggcggcgggcgcggcgcggcgcggcgttattttgtagtcggcggcgcggattgaatgagttcgtcgagttcgggtcgtcgtcgggagtagcgtaggtcgcgagtcgtcgttattatggttacgtcgttgttcggtcgcgcgggcgggttcgttacgtcgttgtcgtttacgcgtttgtcgcggttgtaggagaaggaggagttgcgcgagtttaacgatcgtttggcgtattatatcgatcgcgttcgcgcgttggagttggagaacgatcggtttttgtttaagattttagagaaggaggaggtgattacgcgcgaggtgggcgtcggggtttaggggtcgggcgggggtgtagtcggtaggtttcgtttatcgcggggcgcgcgatcgcggggattttgggcgggggtgtagacggggacgggtttcggtttcgg

SEQ ID NO: 3056 - DNA, 561 bp, Artificial Sequence
  chemically treated genomic DNA (Homo sapiens) CpG-island No: 3056
ccgaaaccgaaacccgtccccgtctacacccccgcccaaaatccccgcgatcgcgcgccccgcgataaacgaaacctaccgactacacccccgcccgacccctaaaccccgacgcccacctcgcgcgtaatcacctcctccttctctaaaatcttaaacaaaaaccgatcgttctccaactccaacgcgcgaacgcgatcgatataatacgccaaacgatcgttaaactcgcgcaactcctccttctcctacaaccgcgacaaacgcgtaaacgacaacgacgtaacgaacccgcccgcgcgaccgaacaacgacgtaaccataataacgacgactcgcgacctacgctactcccgacgacgacccgaactcgacgaactcattcaatccgcgccgccgactacaaaataacgccgcgccgcgccgcgcccgccgcccgccgcgacgaaacaacctaaaactaataatccgaccgccgaacgcgcgcgaaacacgccgaaaattaaaatctccgtccaactctcgcttcgcaaaaacgctaactccaaaaacaaacttcct

SEQ ID NO: 3057 - DNA, 601 bp, Artificial Sequence
  chemically treated genomic DNA (Homo sapiens) CpG-island No: 3057
agaggggaagagtcgtgggagttgggagaggagggaaagaggggaagagtcgtgggagttggtagaggagggaaagggggagtcgaacgtgaagggcgaagggcggggcggggtaggagagtcggggtatagagtaggtaggtgttaatggtatgggaaggaagagtaagaagtggggtaagaaggtgtcgcggtacgaggggaaggtgagatttaagaaggtgtcggttaagaagttggtgtcggcgtggaaggagaaggtgtggggcgaggaaataacgaagggcgaggaaagatttcgaggcgaagagatagtttttatcgagaaggggtagggcgaggaggaggggcgttattagagggcgggacggggcgacgggttcgcgcgggaagaattaatcgtcgagaattcggggaaggaacgggtttataaagattaagtggaggagtaggggcgcggttaggagcggaagtagagtgaggagtaagtttcgggcgagaaacgggggttcggtcgggagtaagagtaggggcggggtcgggagtaagagtaggggcggggttcggagacgggcgagattaggtatagtatttagttttt

SEQ ID NO: 3058 - DNA, 601 bp, Artificial Sequence
  chemically treated genomic DNA (Homo sapiens) CpG-island No: 3058
aaaaactaaatactatacctaatctcgcccgtctccgaaccccgcccctactcttactcccgaccccgcccctactcttactcccgaccgaacccccgtttctcgcccgaaacttactcctcactctacttccgctcctaaccgcgcccctactcctccacttaatctttataaacccgttccttccccgaattctcgacgattaattcttcccgcgcgaacccgtcgccccgtcccgccctctaataacgcccctcctcctcgccctaccccttctcgataaaaactatctcttcgcctcgaaatctttcctcgcccttcgttatttcctcgccccacaccttctccttccacgccgacaccaacttcttaaccgacaccttcttaaatctcaccttcccctcgtaccgcgacaccttcttaccccacttcttactcttccttcccataccattaacacctacctactctataccccgactctcctaccccgccccgcccttcgcccttcacgttcgactccccctttccctcctctaccaactcccacgactcttcccctctttccctcctctcccaactcccacgactcttcccctct

SEQ ID NO: 3059 - DNA, 601 bp, Artificial Sequence
  chemically treated genomic DNA (Homo sapiens) CpG-island No: 3059
aggggttgggtattgtatttggtttcgttcgttttcgggtttcgtttttgtttttgttttcggtttcgtttttgtttttgttttcggtcgggttttcgtttttcgttcggggtttgttttttattttgttttcgtttttgatcgcgtttttatttttttatttggtttttatggattcgtttttttttcgggttttcggcgattggtttttttcgcgcgggttcgtcgtttcgtttcgttttttggtaacgtttttttttttcgttttgttttttttcgatgaaaattgttttttcgtttcgggattttttttcgtttttcgttgttttttcgttttatattttttttttttacgtcggtattagttttttagtcggtatttttttgagttttatttttttttcgtatcgcgatatttttttgttttattttttattttttttttttatgttattaatatttgtttgttttatatttcgatttttttgtttcgtttcgtttttcgttttttacgttcggtttttttttttttttttttgttagtttttacgattttttttttttttttttttttttttagtttttacgatttttttttttt

SEQ ID NO: 3060 - DNA, 601 bp, Artificial Sequence
  chemically treated genomic DNA (Homo sapiens) CpG-island No: 3060
aaaaaaaaaaaatcgtaaaaactaaaaaaaaaaaaaaaaaaaaaaaaaatcgtaaaaactaacaaaaaaaaaaaaaaaaaaaccgaacgtaaaaaacgaaaaacgaaacgaaacaaaaaaatcgaaatataaaacaaacaaatattaataacataaaaaaaaaaaataaaaaataaaacaaaaaaatatcgcgatacgaaaaaaaaataaaactcaaaaaaataccgactaaaaaactaataccgacgtaaaaaaaaaaaatataaaacgaaaaaacaacgaaaaacgaaaaaaaatcccgaaacgaaaaaacaattttcatcgaaaaaaaacaaaacgaaaaaaaaaaacgttaccaaaaaacgaaacgaaacgacgaacccgcgcgaaaaaaaccaatcgccgaaaacccgaaaaaaaaacgaatccataaaaaccaaataaaaaaataaaaacgcgatcaaaaacgaaaacaaaataaaaaacaaaccccgaacgaaaaacgaaaacccgaccgaaaacaaaaacaaaaacgaaaccgaaaacaaaaacaaaaacgaaacccgaaaacgaacgaaaccaaatacaatacccaacccct

SEQ ID NO: 3061 - DNA, 956 bp, Artificial Sequence
  chemically treated genomic DNA (Homo sapiens) CpG-island No: 3061
cggtcgtagttttagtcgggtcgcgttcgcgagaaatagcggagaggttttagtaggcgggcgtcgtcggataggtttatcgttcgcgtcggtttcggggaatcgttttttcgcgttcgtagtatttgttcgcggcgcggattttatatcgcggtcgttcgttttaggggaggagtgagttcgttttagcggcgttaattcggggattcggggtaagggttcggggttattcgtcgtcgggcgcgttttttattcggaaagcggcgacggtttttaagttgggttgcggagtgggaggcgcgtcgagttttaagtagataatgcgggagaagggtgatgcgtagggaggaggggttcgtaaagttgaggttttcgcgtcgttcggttatttattcgtgtcgttcgtttttgaagtttcgcgtagttttcgatttttttttggggttcgttttatcgagcggtcgtaggggacgggtcgcgtttcgtatttcgatttttttttaaattataaaattttttttaatttcgttaattaagttgcgtttttatcgtgcggttttcggggttttttcgcgggtcgagtcgagatagttttttattttcgtcgcggagaaagataataggttgtttttttttcggcggcggtagtagcggttgcggttaaagcggcggtaatcgaggcgagtaatgggtacggcggtttcggtcgagtcgaggggttttatcgttgttgtttcggtttcgcgatagttttgtacgtagttttagttatttcgcgtatcggttataagtcgttcgggggtggtcggggtacgtaagagggtagtaacgtttgcgagttttttcgtgagtatacgcggagtaagggttgcgagttgggattgtacggtagagttgtttatttcgttttacgagattaatagtaaggtatttgggcggggcgtttaggttgttaa

SEQ ID NO: 3062 - DNA, 956 bp, Artificial Sequence
  chemically treated genomic DNA (Homo sapiens) CpG-island No: 3062
ttaacaacctaaacgccccgcccaaataccttactattaatctcgtaaaacgaaataaacaactctaccgtacaatcccaactcgcaacccttactccgcgtatactcacgaaaaaactcgcaaacgttactaccctcttacgtaccccgaccacccccgaacgacttataaccgatacgcgaaataactaaaactacgtacaaaactatcgcgaaaccgaaacaacaacgataaaacccctcgactcgaccgaaaccgccgtacccattactcgcctcgattaccgccgctttaaccgcaaccgctactaccgccgccgaaaaaaaaacaacctattatctttctccgcgacgaaaataaaaaactatctcgactcgacccgcgaaaaaaccccgaaaaccgcacgataaaaacgcaacttaattaacgaaattaaaaaaaattttataatttaaaaaaaaatcgaaatacgaaacgcgacccgtcccctacgaccgctcgataaaacgaaccccaaaaaaaaatcgaaaactacgcgaaacttcaaaaacgaacgacacgaataaataaccgaacgacgcgaaaacctcaactttacgaacccctcctccctacgcatcacccttctcccgcattatctacttaaaactcgacgcgcctcccactccgcaacccaacttaaaaaccgtcgccgctttccgaataaaaaacgcgcccgacgacgaataaccccgaacccttaccccgaatccccgaattaacgccgctaaaacgaactcactcctcccctaaaacgaacgaccgcgatataaaatccgcgccgcgaacaaatactacgaacgcgaaaaaacgattccccgaaaccgacgcgaacgataaacctatccgacgacgcccgcctactaaaacctctccgctatttctcgcgaacgcgacccgactaaaactacgaccg

SEQ ID NO: 3063 - DNA, 956 bp, Artificial Sequence
  chemically treated genomic DNA (Homo sapiens) CpG-island No: 3063
ttagtaatttgagcgtttcgtttaggtgttttattattggtttcgtggagcgggatgggtagttttgtcgtgtaattttagttcgtagtttttgtttcgcgtgtatttacgggaggattcgtagacgttattgtttttttgcgtgtttcggttattttcgggcggtttgtagtcggtgcgcggggtggttggggttacgtgtagagttgtcgcggagtcggaatagtagcggtgaagtttttcggttcggtcgagatcgtcgtgtttattgttcgtttcggttgtcgtcgttttagtcgtagtcgttgttgtcgtcgtcgggggagaggtagtttattgttttttttcgcggcgaaggtgaggagttgtttcggttcggttcgcgggggagtttcgggagtcgtacggtgagagcgtaatttagttggcggagttgggggaagttttgtgatttgaggaggggtcggggtgcggagcgcggttcgttttttgcggtcgttcggtggggcgggttttagaggagggtcgggggttgcgcggggttttaggggcgggcggtacggatgggtagtcgggcggcgcggggattttagttttgcggattttttttttttgcgtattatttttttttcgtattgtttgtttggggttcggcgcgttttttatttcgtagtttaatttgggggtcgtcgtcgtttttcggatggggggcgcgttcggcggcggatggtttcgaatttttgtttcgggttttcgggttggcgtcgttggggcggatttattttttttttggggcgggcggtcgcggtgtggagttcgcgtcgcgaataagtgttgcgggcgcgagggagcggtttttcggggtcgacgcggacggtaaatttgttcggcggcgttcgtttgttggggttttttcgttgtttttcgcgggcgcggttcggttgaaattgcgatcg

SEQ ID NO: 3064 - DNA, 956 bp, Artificial Sequence
  chemically treated genomic DNA (Homo sapiens) CpG-island No: 3064
cgatcgcaatttcaaccgaaccgcgcccgcgaaaaacaacgaaaaaaccccaacaaacgaacgccgccgaacaaatttaccgtccgcgtcgaccccgaaaaaccgctccctcgcgcccgcaacacttattcgcgacgcgaactccacaccgcgaccgcccgccccaaaaaaaaaataaatccgccccaacgacgccaacccgaaaacccgaaacaaaaattcgaaaccatccgccgccgaacgcgccccccatccgaaaaacgacgacgacccccaaattaaactacgaaataaaaaacgcgccgaaccccaaacaaacaatacgaaaaaaaaataatacgcaaaaaaaaaaaatccgcaaaactaaaatccccgcgccgcccgactacccatccgtaccgcccgcccctaaaaccccgcgcaacccccgaccctcctctaaaacccgccccaccgaacgaccgcaaaaaacgaaccgcgctccgcaccccgacccctcctcaaatcacaaaacttcccccaactccgccaactaaattacgctctcaccgtacgactcccgaaactcccccgcgaaccgaaccgaaacaactcctcaccttcgccgcgaaaaaaaacaataaactacctctcccccgacgacgacaacaacgactacgactaaaacgacgacaaccgaaacgaacaataaacacgacgatctcgaccgaaccgaaaaacttcaccgctactattccgactccgcgacaactctacacgtaaccccaaccaccccgcgcaccgactacaaaccgcccgaaaataaccgaaacacgcaaaaaaacaataacgtctacgaatcctcccgtaaatacacgcgaaacaaaaactacgaactaaaattacacgacaaaactacccatcccgctccacgaaaccaataataaaacacctaaacgaaacgctcaaattactaa

SEQ ID NO: 3065 - DNA, 855 bp, Artificial Sequence
  chemically treated genomic DNA (Homo sapiens) CpG-island No: 3065
gtttaggtcgcgttttttagtttcgcggttttaggttttcgttcgttcgaggcggagttcgggaggtcggggcggggtttcgggtcggttatttatttgggttgttagttattttagtttcgcgaatagttggtgtcgttggtgtcgtcgtcgtcgtcgtcgtcgtcgtcgtcgtttagtcgagatttcggggttttgcggtttattatttttttcgatacgatatggttaagcgtcgtcgtttagagaagcgcgagtcgttattcgaatcggtcgtcgttaatatttcgtttcggttcggggttgagaaggaagtcgagaaggaggaggaggaggaggcggcggcgggcgggggaagaggacgatcgtttcgggtttcgtttgagttcgtagtataggacgaggaggcgggagcggcgcggtgagagagaggcggatgaaggggaggcgacgttttttttagggttttgcgcggtttacgtcgtcggggttttcgaggaggaggacgacgaggaataggcggtggcggtagttttttacgtttatacggttattgttttttcgtttttcggtttcgttcgtcgcgtcgtcgttgtcgtacggtatgttgggagcgagaggcggggtcggtttcgtcgtgtttgcggagagaggcgggttttgtcggcggggcggggtcgatagtaggtcgtttcgttttttacggttttaggtttttggacggcgaagaggtttgggcgtacggtgacgaattttaagacgggatttttattattgcggttatatattttttttttaaatgtttttcggaaagtatcggaggttaggtagttaggtgtaaataggcgtttaatt

SEQ ID NO: 3066 - DNA, 855 bp, Artificial Sequence
  chemically treated genomic DNA (Homo sapiens) CpG-island No: 3066
aattaaacgcctatttacacctaactacctaacctccgatactttccgaaaaacatttaaaaaaaaaatatataaccgcaataataaaaatcccgtcttaaaattcgtcaccgtacgcccaaacctcttcgccgtccaaaaacctaaaaccgtaaaaaacgaaacgacctactatcgaccccgccccgccgacaaaacccgcctctctccgcaaacacgacgaaaccgaccccgcctctcgctcccaacataccgtacgacaacgacgacgcgacgaacgaaaccgaaaaacgaaaaaacaataaccgtataaacgtaaaaaactaccgccaccgcctattcctcgtcgtcctcctcctcgaaaaccccgacgacgtaaaccgcgcaaaaccctaaaaaaaacgtcgcctccccttcatccgcctctctctcaccgcgccgctcccgcctcctcgtcctatactacgaactcaaacgaaacccgaaacgatcgtcctcttcccccgcccgccgccgcctcctcctcctcctccttctcgacttccttctcaaccccgaaccgaaacgaaatattaacgacgaccgattcgaataacgactcgcgcttctctaaacgacgacgcttaaccatatcgtatcgaaaaaaataataaaccgcaaaaccccgaaatctcgactaaacgacgacgacgacgacgacgacgacgacgacaccaacgacaccaactattcgcgaaactaaaataactaacaacccaaataaataaccgacccgaaaccccgccccgacctcccgaactccgcctcgaacgaacgaaaacctaaaaccgcgaaactaaaaaacgcgacctaaac

SEQ ID NO: 3067 - DNA, 855 bp, Artificial Sequence
  chemically treated genomic DNA (Homo sapiens) CpG-island No: 3067
gattggacgtttgtttatatttgattgtttggttttcggtgtttttcgggaagtatttgggagaaaagtgtgtggtcgtagtagtggagatttcgttttaggattcgttatcgtacgtttagattttttcgtcgtttaagagtttggggtcgtggggagcggggcggtttgttatcggtttcgtttcgtcgataggattcgttttttttcgtaggtacggcggggtcgatttcgtttttcgtttttagtatgtcgtgcgatagcggcggcgcggcgagcggagtcgggaggcggggaagtagtggtcgtgtgagcgtgaggagttgtcgttatcgtttgtttttcgtcgttttttttttcgggggtttcggcgacgtgggtcgcgtagggttttggaagagacgtcgttttttttttattcgttttttttttatcgcgtcgttttcgttttttcgttttgtgttgcgggtttaggcggaattcgaaacggtcgtttttttttttcgttcgtcgtcgtttttttttttttttttttttcggttttttttttagtttcgggtcggagcggggtgttggcggcggtcggttcgggtggcgattcgcgtttttttgggcggcggcgtttggttatatcgtgtcggggaaggtaatgagtcgtagagtttcggggtttcggttgagcggcggcggcggcggcggcggcggcggcggtattaacggtattaattattcgcggagttggaatgattggtaatttaggtgggtgatcggttcgggatttcgtttcgatttttcgggtttcgtttcgggcgggcggaggtttagggtcgcggggttgggaggcgcggtttaggt

SEQ ID NO: 3068 - DNA, 855 bp, Artificial Sequence
  chemically treated genomic DNA (Homo sapiens) CpG-island No: 3068
acctaaaccgcgcctcccaaccccgcgaccctaaacctccgcccgcccgaaacgaaacccgaaaaatcgaaacgaaatcccgaaccgatcacccacctaaattaccaatcattccaactccgcgaataattaataccgttaataccgccgccgccgccgccgccgccgccgccgctcaaccgaaaccccgaaactctacgactcattaccttccccgacacgatataaccaaacgccgccgcccaaaaaaacgcgaatcgccacccgaaccgaccgccgccaacaccccgctccgacccgaaactaaaaaaaaaaccgaaaaaaaaaaaaaaaaaaaaacgacgacgaacgaaaaaaaaaaacgaccgtttcgaattccgcctaaacccgcaacacaaaacgaaaaaacgaaaacgacgcgataaaaaaaaaacgaataaaaaaaaaacgacgtctcttccaaaaccctacgcgacccacgtcgccgaaacccccgaaaaaaaaaacgacgaaaaacaaacgataacgacaactcctcacgctcacacgaccactacttccccgcctcccgactccgctcgccgcgccgccgctatcgcacgacatactaaaaacgaaaaacgaaatcgaccccgccgtacctacgaaaaaaaacgaatcctatcgacgaaacgaaaccgataacaaaccgccccgctccccacgaccccaaactcttaaacgacgaaaaaatctaaacgtacgataacgaatcctaaaacgaaatctccactactacgaccacacacttttctcccaaatacttcccgaaaaacaccgaaaaccaaacaatcaaatataaacaaacgtccaatc

SEQ ID NO: 3069 - DNA, 990 bp, Artificial Sequence
  chemically treated genomic DNA (Homo sapiens) CpG-island No: 3069
tcggttcgcgtttcgtatttacgtacggagtggtaggttacgagtttggttgttttttcgggtatcgggtaggtggggaagagcggtttgagtaggtaggtggcgaagattagggttacgatgtattgcgatgaaggtcggatgatgagtagttcgatttagagtttgaggaaggcgggtagcgagtcgtagacgtttagtatgtaggcgtagtcgtcgttcgatttggagatggtggtgtttagtttcgcgtagtagagcgcgtttacgatggagaagacgtcgtacgcggtttatattattagcgttagtttcggcgagtttgtttttttgagtacgttcgtgggcgttacgaagatgttcgagtttatgatggcgattacgatgacggttacgtttttgagtagcgtgatgtttttttgtagggttacgttttcgttttcgtttgtcggcgtcgcgtcgttcgcgcgtttggcggttattattttttttcgcgtttttttttttttttcggttatcggggtcgttagcgcgcgtcgtttcgggttcgtattcgttatgttttgtttatcggtcgggtttgggatattcgggagtcgtagtcgagcgaggattgtgcgcgtcgttcgtcgttcgtcgttcgtagttgcgttaggaatttcgttcgcgtcgttttttaggtttcggtttattggtttcgtttatcgttcgcggttttttttcgattcgtggttcggtcgcggtttttagtttcgttttttcgatttagttcggagtacgtgcgtcgttcggtttagtttggtaggcgatttttaggttcgcgtggttttcgaaggttttcgtatttttgcgttatggagatttcggtttcgcgatttattttttcggcgttcgcgttattttagttcgttttttcgggtgcgtttgggcggggtttggtagttagggcgagtttttttatttattggttcgtagtttttcgttaagttt

SEQ ID NO: 3070 - DNA, 990 bp, Artificial Sequence
  chemically treated genomic DNA (Homo sapiens) CpG-island No: 3070
aaacttaacgaaaaactacgaaccaataaataaaaaaactcgccctaactaccaaaccccgcccaaacgcacccgaaaaaacgaactaaaataacgcgaacgccgaaaaaataaatcgcgaaaccgaaatctccataacgcaaaaatacgaaaaccttcgaaaaccacgcgaacctaaaaatcgcctaccaaactaaaccgaacgacgcacgtactccgaactaaatcgaaaaaacgaaactaaaaaccgcgaccgaaccacgaatcgaaaaaaaaccgcgaacgataaacgaaaccaataaaccgaaacctaaaaaacgacgcgaacgaaattcctaacgcaactacgaacgacgaacgacgaacgacgcgcacaatcctcgctcgactacgactcccgaatatcccaaacccgaccgataaacaaaacataacgaatacgaacccgaaacgacgcgcgctaacgaccccgataaccgaaaaaaaaaaaaaaacgcgaaaaaaaataataaccgccaaacgcgcgaacgacgcgacgccgacaaacgaaaacgaaaacgtaaccctacaaaaaaacatcacgctactcaaaaacgtaaccgtcatcgtaatcgccatcataaactcgaacatcttcgtaacgcccacgaacgtactcaaaaaaacaaactcgccgaaactaacgctaataatataaaccgcgtacgacgtcttctccatcgtaaacgcgctctactacgcgaaactaaacaccaccatctccaaatcgaacgacgactacgcctacatactaaacgtctacgactcgctacccgccttcctcaaactctaaatcgaactactcatcatccgaccttcatcgcaatacatcgtaaccctaatcttcgccacctacctactcaaaccgctcttccccacctacccgatacccgaaaaaacaaccaaactcgtaacctaccactccgtacgtaaatacgaaacgcgaaccga

SEQ ID NO: 3071 - DNA, 990 bp, Artificial Sequence
  chemically treated genomic DNA (Homo sapiens) CpG-island No: 3071
aggtttgacgagaggttgcgggttagtgggtgaaggggttcgttttgattgttaggtttcgtttaggcgtattcgggaggacgggttgggatgacgcgggcgtcgggggggtaggtcgcgaggtcggggtttttatggcgtaggagtacgggggttttcgaggattacgcgggtttgggaatcgtttgttaggttaggtcggacgacgtacgtgtttcgagttgggtcgagggggcggggttgagggtcgcggtcgggttacgggtcggggaggagtcgcggacggtgggcggggttagtgggtcggggtttaaaaggcggcgcgggcggggtttttgacgtagttgcgggcggcgggcggcgagcggcgcgtataattttcgttcggttgcggttttcgggtgttttaggttcggtcggtaagtagagtatggcgggtgcgggttcgaagcggcgcgcgttagcggtttcggtggtcgaggagaaggaagaggcgcgggagaagatgatggtcgttaagcgcgcggacggcgcggcgtcggtaggcgagggcgagggcgtgattttgtaggggaatattacgttatttaagggcgtggtcgttatcgtggtcgttattatgagttcgggtattttcgtgacgtttacgggcgtgtttaaggaggtaggttcgtcggggttggcgttggtggtgtgggtcgcgtgcggcgttttttttatcgtgggcgcgttttgttacgcggagttgggtattattatttttaaatcgggcggcgattacgtttatatgttggacgtttacggttcgttgttcgttttttttaagttttggatcgagttgtttattattcggtttttatcgtagtatatcgtggttttggttttcgttatttatttgtttaagtcgtttttttttatttgttcggtgttcgaggaggtagttaagttcgtagtttgttatttcgtgcgtgagtacggggcgcgggtcgg

SEQ ID NO: 3072 - DNA, 990 bp, Artificial Sequence
  chemically treated genomic DNA (Homo sapiens) CpG-island No: 3072
ccgacccgcgccccgtactcacgcacgaaataacaaactacgaacttaactacctcctcgaacaccgaacaaataaaaaaaaacgacttaaacaaataaataacgaaaaccaaaaccacgatatactacgataaaaaccgaataataaacaactcgatccaaaacttaaaaaaaacgaacaacgaaccgtaaacgtccaacatataaacgtaatcgccgcccgatttaaaaataataatacccaactccgcgtaacaaaacgcgcccacgataaaaaaaacgccgcacgcgacccacaccaccaacgccaaccccgacgaacctacctccttaaacacgcccgtaaacgtcacgaaaatacccgaactcataataacgaccacgataacgaccacgcccttaaataacgtaatattcccctacaaaatcacgccctcgccctcgcctaccgacgccgcgccgtccgcgcgcttaacgaccatcatcttctcccgcgcctcttccttctcctcgaccaccgaaaccgctaacgcgcgccgcttcgaacccgcacccgccatactctacttaccgaccgaacctaaaacacccgaaaaccgcaaccgaacgaaaattatacgcgccgctcgccgcccgccgcccgcaactacgtcaaaaaccccgcccgcgccgccttttaaaccccgacccactaaccccgcccaccgtccgcgactcctccccgacccgtaacccgaccgcgaccctcaaccccgccccctcgacccaactcgaaacacgtacgtcgtccgacctaacctaacaaacgattcccaaacccgcgtaatcctcgaaaacccccgtactcctacgccataaaaaccccgacctcgcgacctacccccccgacgcccgcgtcatcccaacccgtcctcccgaatacgcctaaacgaaacctaacaatcaaaacgaaccccttcacccactaacccgcaacctctcgtcaaacct

SEQ ID NO: 3073 - DNA, 657 bp, Artificial Sequence
  chemically treated genomic DNA (Homo sapiens) CpG-island No: 3073
gagttcgggcggtggcggcggtggtcggaggcggtggtgttttttttttttcgtttcggcgtcggcggtgattcgagcgagcggtcgcgttttcgatgagattgttggcgggttggttgtgtttgagtttggcgttcgtgtggttggcgcggaggatgtggacgttgcggacgtcgtttattcgttttttgtacgtgaatatgattagcggttcgggtgggtcggcggcgggcgcgggcggtaggaaggagaattattaggtacgggttggggcggggcggggcgggggcgtggcggtcggttttttcgcgttgggttcggttattgtgcgggacggtttcgcgagggggcggttcgttttcgttttttcgtttcggttttttggaaagtttttttcgcgtttttttcgtcgggcgtcgatttcgcgagtttcgggtattcggtcgcggtttcgcgagcgttttttgtttcgtagcgtaggcggggtatgtttttcgggttcgatcgtgagcggttcggagtttcgtattgtttttgggtttcgggcggtgattgcggacgttcggtagcgggattggggaattttggggttagagcgtggttgggggcgttcgtttggtatcgaggtttgagattgaagagattcggttagattta

SEQ ID NO: 3074 - DNA, 657 bp, Artificial Sequence
  chemically treated genomic DNA (Homo sapiens) CpG-island No: 3074
taaatctaaccgaatctcttcaatctcaaacctcgataccaaacgaacgcccccaaccacgctctaaccccaaaattccccaatcccgctaccgaacgtccgcaatcaccgcccgaaacccaaaaacaatacgaaactccgaaccgctcacgatcgaacccgaaaaacataccccgcctacgctacgaaacaaaaaacgctcgcgaaaccgcgaccgaatacccgaaactcgcgaaatcgacgcccgacgaaaaaaacgcgaaaaaaactttccaaaaaaccgaaacgaaaaaacgaaaacgaaccgccccctcgcgaaaccgtcccgcacaataaccgaacccaacgcgaaaaaaccgaccgccacgcccccgccccgccccgccccaacccgtacctaataattctccttcctaccgcccgcgcccgccgccgacccacccgaaccgctaatcatattcacgtacaaaaaacgaataaacgacgtccgcaacgtccacatcctccgcgccaaccacacgaacgccaaactcaaacacaaccaacccgccaacaatctcatcgaaaacgcgaccgctcgctcgaatcaccgccgacgccgaaacgaaaaaaaaaaaacaccaccgcctccgaccaccgccgccaccgcccgaactc

SEQ ID NO: 3075 - DNA, 657 bp, Artificial Sequence
  chemically treated genomic DNA (Homo sapiens) CpG-island No: 3075
tggatttggtcgggtttttttagttttaggtttcggtgttaggcgggcgtttttagttacgttttggttttaaagttttttagtttcgttgtcgggcgttcgtagttatcgttcgggatttaggaataatgcggggtttcgggtcgtttacgatcgggttcgggaggtatgtttcgtttgcgttgcggaataaaaggcgttcgcggggtcgcggtcgggtgttcggggttcgcggagtcgacgttcggcggggaaggcgcggggaaaattttttaaggggtcgaggcggaggggcgagggcgggtcgttttttcgcggagtcgtttcgtataatagtcgggtttagcgcgggaaggtcggtcgttacgttttcgtttcgtttcgttttagttcgtatttggtggtttttttttttgtcgttcgcgttcgtcgtcggtttattcgggtcgttagttatgtttacgtatagggagcgggtgagcggcgttcgtagcgtttatatttttcgcgttagttatacggacgttaggtttaggtatagttagttcgttagtagttttatcgggggcgcggtcgttcgttcggattatcgtcggcgtcggggcgaggaggaggaggtattatcgttttcggttatcgtcgttatcgttcgagttt

SEQ ID NO: 3076 - DNA, 657 bp, Artificial Sequence
  chemically treated genomic DNA (Homo sapiens) CpG-island No: 3076
aaactcgaacgataacgacgataaccgaaaacgataatacctcctcctcctcgccccgacgccgacgataatccgaacgaacgaccgcgcccccgataaaactactaacgaactaactatacctaaacctaacgtccgtataactaacgcgaaaaatataaacgctacgaacgccgctcacccgctccctatacgtaaacataactaacgacccgaataaaccgacgacgaacgcgaacgacaaaaaaaaaaaccaccaaatacgaactaaaacgaaacgaaacgaaaacgtaacgaccgaccttcccgcgctaaacccgactattatacgaaacgactccgcgaaaaaacgacccgccctcgcccctccgcctcgaccccttaaaaaattttccccgcgccttccccgccgaacgtcgactccgcgaaccccgaacacccgaccgcgaccccgcgaacgccttttattccgcaacgcaaacgaaacatacctcccgaacccgatcgtaaacgacccgaaaccccgcattattcctaaatcccgaacgataactacgaacgcccgacaacgaaactaaaaaactttaaaaccaaaacgtaactaaaaacgcccgcctaacaccgaaacctaaaactaaaaaaacccgaccaaatcca

SEQ ID NO: 3077 - DNA, 1050 bp, Artificial Sequence
  chemically treated genomic DNA (Homo sapiens) CpG-island No: 3077
  unsure (628)
ggcgcgggcgttttcgggagagcgtcgggcgcgttgggtttgttgaagggttttaggtttggttattcggtgatttttaaagatgggacgcgtcgcggggtttcgagggtttgaaattcgttttcgtagcgtagtttcgggcgcgttattattttcgtcgcggtcgattgcggggcgatcgttcggtttcgaagtcgggagaggagaggtcgggtttcggcgggtcgttttgggcgggcggggagcgtagtttcggagttaggtagtttttcgcgttcgtttttttcgatttttttcggtcggttcgagttcggaggggcggggcgtcgggcgggtcggggcggggttcggggaggagtcgtggttgcggcggttgtcgcgttagagtagcgttttcgttgttcggcggtttagatacggttcgagcgtcgtcgcggacgcggatagagattcgtacgggtacgggcgttgcgttggaggtttttttcgcggttcggggttgcgcgattatggcggataaggaggtcggcggtagcgacgggtttcgaggtgagcgtaggttgcgggttttgcggtcgcggttggcggggtagggagggaggaggcgcgtttggtttaacgttttttnttttttttttcgtttttttattttggggacgttcgcgttgtatttagttttggcgggcggggtcggggttagtagtagcggggtcgggggtcgggggtcggtggatcggagacggcgggcgggttatatgttttgcgtttcgttagggtgcggatttcgcggcggggattgtagttttcgttgaggcgtttggttggtttttgtttcgggtggcgttttttgcggggttggtcgcgcgtgcgggtgaggatcgtttcgcgtgtgtagttttcgcgcgatgggttgcggaggtcggcgttggttgggtaaagggttcgtcgtcgggtggtcgggtggttttagcgggtaattttcgtgatttagcgaggtaggagtgggagtttgggggaaatcggagatttggatttgttttttcgttttat

SEQ ID NO: 3078 - DNA, 1050 bp, Artificial Sequence
  chemically treated genomic DNA (Homo sapiens) CpG-island No: 3078
  unsure (423)
ataaaacgaaaaaacaaatccaaatctccgatttcccccaaactcccactcctacctcgctaaatcacgaaaattacccgctaaaaccacccgaccacccgacgacgaaccctttacccaaccaacgccgacctccgcaacccatcgcgcgaaaactacacacgcgaaacgatcctcacccgcacgcgcgaccaaccccgcaaaaaacgccacccgaaacaaaaaccaaccaaacgcctcaacgaaaactacaatccccgccgcgaaatccgcaccctaacgaaacgcaaaacatataacccgcccgccgtctccgatccaccgacccccgacccccgaccccgctactactaaccccgaccccgcccgccaaaactaaatacaacgcgaacgtccccaaaataaaaaaacgaaaaaaaaaanaaaaaacgttaaaccaaacgcgcctcctccctccctaccccgccaaccgcgaccgcaaaacccgcaacctacgctcacctcgaaacccgtcgctaccgccgacctccttatccgccataatcgcgcaaccccgaaccgcgaaaaaaacctccaacgcaacgcccgtacccgtacgaatctctatccgcgtccgcgacgacgctcgaaccgtatctaaaccgccgaacaacgaaaacgctactctaacgcgacaaccgccgcaaccacgactcctccccgaaccccgccccgacccgcccgacgccccgcccctccgaactcgaaccgaccgaaaaaaatcgaaaaaaacgaacgcgaaaaactacctaactccgaaactacgctccccgcccgcccaaaacgacccgccgaaacccgacctctcctctcccgacttcgaaaccgaacgatcgccccgcaatcgaccgcgacgaaaataataacgcgcccgaaactacgctacgaaaacgaatttcaaaccctcgaaaccccgcgacgcgtcccatctttaaaaatcaccgaataaccaaacctaaaacccttcaacaaacccaacgcgcccgacgctctcccgaaaacgcccgcgcc

SEQ ID NO: 3079 - DNA, 1050 bp, Artificial Sequence
  chemically treated genomic DNA (Homo sapiens) CpG-island No: 3079
  unsure (423)
atggggcgagggaataggtttaaattttcgattttttttaggtttttatttttgtttcgttgagttacgaaaattattcgttggggttattcggttattcggcggcgggttttttatttagttagcgtcggttttcgtagtttatcgcgcgggggttgtatacgcggggcggtttttattcgtacgcgcgattagtttcgtaggaggcgttattcgaggtagggattaattaggcgttttagcgggggttgtagttttcgtcgcggagttcgtattttggcggggcgtagaatatgtgattcgttcgtcgttttcggtttatcggttttcggttttcggtttcgttgttgttgatttcggtttcgttcgttagaattggatgtagcgcgggcgtttttaaaataaaaaggcgagagagggggngaggagcgttgggttaagcgcgttttttttttttttgtttcgttagtcgcggtcgtaggattcgtagtttgcgtttatttcggggttcgtcgttgtcgtcggtttttttgttcgttatggtcgcgtagtttcggatcgcgaggggagtttttagcgtagcgttcgtgttcgtgcgggtttttgttcgcgttcgcggcggcgttcgggtcgtgtttgagtcgtcgggtagcgggagcgttgttttgacgcggtagtcgtcgtagttacggttttttttcgggtttcgtttcggttcgttcggcgtttcgttttttcgagttcgggtcggtcgggaaaggtcggggaaggcgggcgcggggaattgtttggtttcggagttgcgtttttcgttcgtttagagcggttcgtcgaggttcggttttttttttttcggtttcgggatcgagcggtcgtttcgtagtcgatcgcggcgggggtagtggcgcgttcggggttgcgttgcgggagcggattttaggttttcggggtttcgcggcgcgttttatttttggaagttatcgaatggttaggtttggagttttttagtaagtttagcgcgttcggcgttttttcgaggacgttcgcgtt

SEQ ID NO: 3080 - DNA, 1050 bp, Artificial Sequence
  chemically treated genomic DNA (Homo sapiens) CpG-island No: 3080
  unsure (628)
aacgcgaacgtcctcgaaaaaacgccgaacgcgctaaacttactaaaaaactccaaacctaaccattcgataacttccaaaaataaaacgcgccgcgaaaccccgaaaacctaaaatccgctcccgcaacgcaaccccgaacgcgccactacccccgccgcgatcgactacgaaacgaccgctcgatcccgaaaccgaaaaaaaaaaaaccgaacctcgacgaaccgctctaaacgaacgaaaaacgcaactccgaaaccaaacaattccccgcgcccgccttccccgacctttcccgaccgacccgaactcgaaaaaacgaaacgccgaacgaaccgaaacgaaacccgaaaaaaaaccgtaactacgacgactaccgcgtcaaaacaacgctcccgctacccgacgactcaaacacgacccgaacgccgccgcgaacgcgaacaaaaacccgcacgaacacgaacgctacgctaaaaactcccctcgcgatccgaaactacgcgaccataacgaacaaaaaaaccgacgacaacgacgaaccccgaaataaacgcaaactacgaatcctacgaccgcgactaacgaaacaaaaaaaaaaaaaacgcgcttaacccaacgctcctcnccccctctctcgcctttttattttaaaaacgcccgcgctacatccaattctaacgaacgaaaccgaaatcaacaacaacgaaaccgaaaaccgaaaaccgataaaccgaaaacgacgaacgaatcacatattctacgccccgccaaaatacgaactccgcgacgaaaactacaacccccgctaaaacgcctaattaatccctacctcgaataacgcctcctacgaaactaatcgcgcgtacgaataaaaaccgccccgcgtatacaacccccgcgcgataaactacgaaaaccgacgctaactaaataaaaaacccgccgccgaataaccgaataaccccaacgaataattttcgtaactcaacgaaacaaaaataaaaacctaaaaaaaatcgaaaatttaaacctattccctcgccccat

SEQ ID NO: 3081 - DNA, 1200 bp, Artificial Sequence
  chemically treated genomic DNA (Homo sapiens) CpG-island No: 3081
gcggcgtggggagggggatttaggtcgggggttcgggtggcgcgtttttttttattttcgaggcggtaggagtagcgcggcgcgaggatattttcgggtcgtcggtgtttttgagtttttcggcggcgcgttgttttaggaaagttttcggtttgtcgtttttcgggttgttggaaagtttcggcggttgtagggttttggtagttaggcgttaagcgtcgcgcggggcgggtacggttgcggggtcgggtcgcgttcggttggagtgtttagtgtaagacgttcggacgggtagggtagggttttaaggttacgtataaagagattcgttttcgtcggttcggggtttcggacgtcgtagagcgcgcggataagacgcgggtggggcggagattggtttcgacgttcggtttagattttcgttcggatttcgattttagggataggattttgttcggatcgttgttcggaatgcgttttatatttgtagtttcgtttttagtttcggtttcgattcgaggttttagtttcgggttttatatttcgtttattggtttaggtttatttggagcgtagcgtgggcggtttcgtagcgcggtttcggattttagaagggttttttcgggttcgttggcgcgcggggagcggcgtttttagggcgcggcgcggtgcggcgcggcgcgggtcgtagtttacgcggtcgtaattcggatcggtgcgggggtcgttttttttttttaggtttagcgcgtaattcgagatttcgggttagttttttcgtttttacgcggttcgtgcgtaaagcggatcgggtcggcgacgcgaattttcgtttcgttttatttgatagtaaatttttttattggtcgagagattcggcgcggtacggtaatcggcgtcgattgggcggatgcgcggagatgacggtttgttattgggttttcgggatgttagtttcggcggatgatcggttttttcgcggaggggtcgcggtttcgtatttgttcgaatttttgcggcggcggtggtagggtacgcgggatcgtttttttttagtcgatttacgagaatatttttcgattatttagtttcgagtagggattggtagagtcggcgtttttttttcggattttggtcgcgtagttttcgttattatttttagtttataggtatttttttttagcgtttgttattcgttgt

SEQ ID NO: 3082 - DNA, 1200 bp, Artificial Sequence
  chemically treated genomic DNA (Homo sapiens) CpG-island No: 3082
acaacgaataacaaacgctaaaaaaaaatacctataaactaaaaataataacgaaaactacgcgaccaaaatccgaaaaaaaaacgccgactctaccaatccctactcgaaactaaataatcgaaaaatattctcgtaaatcgactaaaaaaaaacgatcccgcgtaccctaccaccgccgccgcaaaaattcgaacaaatacgaaaccgcgacccctccgcgaaaaaaccgatcatccgccgaaactaacatcccgaaaacccaataacaaaccgtcatctccgcgcatccgcccaatcgacgccgattaccgtaccgcgccgaatctctcgaccaataaaaaaatttactatcaaataaaacgaaacgaaaattcgcgtcgccgacccgatccgctttacgcacgaaccgcgtaaaaacgaaaaaactaacccgaaatctcgaattacgcgctaaacctaaaaaaaaaaaacgacccccgcaccgatccgaattacgaccgcgtaaactacgacccgcgccgcgccgcaccgcgccgcgccctaaaaacgccgctccccgcgcgccaacgaacccgaaaaaacccttctaaaatccgaaaccgcgctacgaaaccgcccacgctacgctccaaataaacctaaaccaataaacgaaatataaaacccgaaactaaaacctcgaatcgaaaccgaaactaaaaacgaaactacaaatataaaacgcattccgaacaacgatccgaacaaaatcctatccctaaaatcgaaatccgaacgaaaatctaaaccgaacgtcgaaaccaatctccgccccacccgcgtcttatccgcgcgctctacgacgtccgaaaccccgaaccgacgaaaacgaatctctttatacgtaaccttaaaaccctaccctacccgtccgaacgtcttacactaaacactccaaccgaacgcgacccgaccccgcaaccgtacccgccccgcgcgacgcttaacgcctaactaccaaaaccctacaaccgccgaaactttccaacaacccgaaaaacgacaaaccgaaaactttcctaaaacaacgcgccgccgaaaaactcaaaaacaccgacgacccgaaaatatcctcgcgccgcgctactcctaccgcctcgaaaataaaaaaaaacgcgccacccgaacccccgacctaaatccccctccccacgccgc

SEQ ID NO: 3083 - DNA, 1200 bp, Artificial Sequence
  chemically treated genomic DNA (Homo sapiens) CpG-island No: 3083
gtagcgagtagtaggcgttgaagaaggatatttgtgaattgggagtggtggcggaggttacgcggttagagttcggggaaggggcgtcggttttgttagtttttgttcggggttggatggtcgggggatgttttcgtaagtcggttgggagggagcggtttcgcgtattttgttatcgtcgtcgtagaggttcgggtaggtgcggggtcgcggttttttcgcgagggggtcggttattcgtcgggattgatatttcggaggtttaatggtaagtcgttattttcgcgtattcgtttaatcggcgtcggttgtcgtgtcgcgtcgggtttttcgattaatgggaaaatttgttgttagatggggcggggcggagattcgcgtcgtcggttcggttcgttttgcgtacgggtcgcgtgagggcgggagggttggttcggggtttcgggttgcgcgttgggtttggagggagggggcggttttcgtatcggttcgagttgcggtcgcgtggattgcgattcgcgtcgcgtcgtatcgcgtcgcgttttgggaacgtcgtttttcgcgcgttaacggattcggggaagtttttttggggttcgaggtcgcgttgcggggtcgtttacgttgcgttttaggtaagtttgagttagtgggcggggtgtgggattcggggttggggtttcgggtcggagtcgggattgggggcggggttgtagatatgggacgtatttcgggtagcggttcggatagggttttatttttggagtcgagattcgggcgagggtttgggtcggacgtcggagttaattttcgttttattcgcgttttgttcgcgcgttttgcggcgttcgagatttcgggtcggcgggggcgggtttttttgtgcgtggttttggggttttattttattcgttcgggcgttttgtattgagtattttagtcgagcgcggttcgatttcgtagtcgtgttcgtttcgcgcgacgtttggcgtttagttgttagggttttgtagtcgtcgaaattttttaatagttcgaggggcggtaggtcgggaatttttttggggtagcgcgtcgtcgggaagtttaggggtatcgacggttcggaggtgttttcgcgtcgcgttgtttttgtcgtttcgggggtgagagagggcgcgttattcggattttcggtttgggtttttttttttacgtcgt

SEQ ID NO: 3084 - DNA, 1200 bp, Artificial Sequence
  chemically treated genomic DNA (Homo sapiens) CpG-island No: 3084
acgacgtaaaaaaaaaaacccaaaccgaaaatccgaataacgcgccctctctcacccccgaaacgacaaaaacaacgcgacgcgaaaacacctccgaaccgtcgatacccctaaacttcccgacgacgcgctaccccaaaaaaattcccgacctaccgcccctcgaactattaaaaaatttcgacgactacaaaaccctaacaactaaacgccaaacgtcgcgcgaaacgaacacgactacgaaatcgaaccgcgctcgactaaaatactcaatacaaaacgcccgaacgaataaaataaaaccccaaaaccacgcacaaaaaaacccgcccccgccgacccgaaatctcgaacgccgcaaaacgcgcgaacaaaacgcgaataaaacgaaaattaactccgacgtccgacccaaaccctcgcccgaatctcgactccaaaaataaaaccctatccgaaccgctacccgaaatacgtcccatatctacaaccccgcccccaatcccgactccgacccgaaaccccaaccccgaatcccacaccccgcccactaactcaaacttacctaaaacgcaacgtaaacgaccccgcaacgcgacctcgaaccccaaaaaaacttccccgaatccgttaacgcgcgaaaaacgacgttcccaaaacgcgacgcgatacgacgcgacgcgaatcgcaatccacgcgaccgcaactcgaaccgatacgaaaaccgccccctccctccaaacccaacgcgcaacccgaaaccccgaaccaaccctcccgccctcacgcgacccgtacgcaaaacgaaccgaaccgacgacgcgaatctccgccccgccccatctaacaacaaattttcccattaatcgaaaaacccgacgcgacacgacaaccgacgccgattaaacgaatacgcgaaaataacgacttaccattaaacctccgaaatatcaatcccgacgaataaccgaccccctcgcgaaaaaaccgcgaccccgcacctacccgaacctctacgacgacgataacaaaatacgcgaaaccgctccctcccaaccgacttacgaaaacatcccccgaccatccaaccccgaacaaaaactaacaaaaccgacgccccttccccgaactctaaccgcgtaacctccgccaccactcccaattcacaaatatccttcttcaacgcctactactcgctac

SEQ ID NO: 3085 - DNA, 1054 bp, Artificial Sequence
  chemically treated genomic DNA (Homo sapiens) CpG-island No: 3085
acggcggcggtggcgggatcgttagtttcgggaagtatagcggttaatgggttttcggcgttttttcgacgtttatagcgtgaggacgtgcgaaaatgcgttttttagcggcggttgtttttcgtcgtttatgtgtttattgtgggcgagggtacgggtagttcggatttatcgtgcggttcgggtcggggtttcgcgggcggcggcggttgttggtgttgtagtggcgcggtggcggcggaggtcgaggtgatgagtagtcgttggaagcggttgggcgggcggtagggtatttttaggtcggtcgttagtttggttttgttggcgttggtgaggcgtttgaggtgtacgagtagttgtggttggtcgcggcggaagtgcgggttgtggaagtgatggagcggtttattgtttgtcggtttgtcgtttttcggttcgtttagtattattttgcggaagtcgtagaggttgagttggcggatgaagttggtgaagttggtggttttgaagagttcgggttcggtttcggttttcgtagtttcgttatcgtttttcggttcgggcgggttgagtagttcggtttcgaagagcggttgatcgataagtagtttttcgtcgcggtcgttttagcggatggagcggtagcgcgggttgtttattaggcgttatagtttggcggggaagttgttggggttgatgggggtggagagtagcgtttttatcgtttcgtcgggtcggggtttcgtttttcgagtttagtttttttatatcgttttcgattttttttcggttttcgtttcgttttgttcgtttttgtcggcgtttattcgtcgcgtattagggatcgttggcgtacgaggtttcgcggcgttttttagcgcggttaatggggtttcgagttttcgttacgcggcgtgggtatttttttttcggcggtcgcgtgttttagttcggttcgtcggacgtttgcgggattcgggtaggagttttttttttaggcgtttttagattttaggtcgggaaggttgtttgtcggggtgttttaagttttgat

SEQ ID NO: 3086 - DNA, 1054 bp, Artificial Sequence
  chemically treated genomic DNA (Homo sapiens) CpG-island No: 3086
atcaaaacttaaaacaccccgacaaacaaccttcccgacctaaaatctaaaaacgcctaaaaaaaaaactcctacccgaatcccgcaaacgtccgacgaaccgaactaaaacacgcgaccgccgaaaaaaaaatacccacgccgcgtaacgaaaactcgaaaccccattaaccgcgctaaaaaacgccgcgaaacctcgtacgccaacgatccctaatacgcgacgaataaacgccgacaaaaacgaacaaaacgaaacgaaaaccgaaaaaaaatcgaaaacgatataaaaaaactaaactcgaaaaacgaaaccccgacccgacgaaacgataaaaacgctactctccacccccatcaaccccaacaacttccccgccaaactataacgcctaataaacaacccgcgctaccgctccatccgctaaaacgaccgcgacgaaaaactacttatcgatcaaccgctcttcgaaaccgaactactcaacccgcccgaaccgaaaaacgataacgaaactacgaaaaccgaaaccgaacccgaactcttcaaaaccaccaacttcaccaacttcatccgccaactcaacctctacgacttccgcaaaataatactaaacgaaccgaaaaacgacaaaccgacaaacaataaaccgctccatcacttccacaacccgcacttccgccgcgaccaaccacaactactcgtacacctcaaacgcctcaccaacgccaacaaaaccaaactaacgaccgacctaaaaataccctaccgcccgcccaaccgcttccaacgactactcatcacctcgacctccgccgccaccgcgccactacaacaccaacaaccgccgccgcccgcgaaaccccgacccgaaccgcacgataaatccgaactacccgtaccctcgcccacaataaacacataaacgacgaaaaacaaccgccgctaaaaaacgcattttcgcacgtcctcacgctataaacgtcgaaaaaacgccgaaaacccattaaccgctatacttcccgaaactaacgatcccgccaccgccgccgt

SEQ ID NO: 3087 - DNA, 1054 bp, Artificial Sequence
  chemically treated genomic DNA (Homo sapiens) CpG-island No: 3087
gttaggatttagaatatttcggtagatagttttttcggtttgaagtttgggaacgtttggggaaggggtttttgttcgggtttcgtaggcgttcggcgggtcgagttggggtacgcggtcgtcgagggggaggtgtttacgtcgcgtggcgggaattcgaggttttattggtcgcgttgggaggcgtcgcggggtttcgtgcgttaacggtttttggtacgcggcggatgggcgtcggtaggagcgggtagggcgaggcgaaggtcggggagggatcgagaacggtgtgggagagttaggttcggggggcgaggtttcggttcggcggggcgatggaggcgttgttttttatttttattaattttaataattttttcgttaagttgtggcgtttggtgaatagttcgcgttatcgttttattcgttgggacggtcgcggcgaggggttgtttatcgattagtcgtttttcgaggtcgagttgtttagttcgttcgggtcggggggcggtggcgggattgcgggggtcggggtcgagttcgagttttttaaaattattagttttattagttttattcgttagtttaatttttacggttttcgtaaggtggtgttgggcgggtcggggggcggtaaatcggtaggtaatgggtcgttttattatttttataattcgtattttcgtcgcgattagttatagttgttcgtgtattttaagcgttttattagcgttaataaggttaagttggcggtcggtttggaggtgttttgtcgttcgtttaatcgtttttagcggttgtttattatttcggttttcgtcgttatcgcgttattgtagtattagtagtcgtcgtcgttcgcggggtttcggttcgagtcgtacggtgagttcggattgttcgtgttttcgtttatagtgggtatatgggcggcggggagtaatcgtcgttggagggcgtattttcgtacgtttttacgttatgggcgtcggaaaggcgtcggggatttattggtcgttgtgtttttcgagattggcggtttcgttatcgtcgtcgt

SEQ ID NO: 3088 - DNA, 1054 bp, Artificial Sequence
  chemically treated genomic DNA (Homo sapiens) CpG-island No: 3088
acgacgacgataacgaaaccgccaatctcgaaaaacacaacgaccaataaatccccgacgcctttccgacgcccataacgtaaaaacgtacgaaaatacgccctccaacgacgattactccccgccgcccatatacccactataaacgaaaacacgaacaatccgaactcaccgtacgactcgaaccgaaaccccgcgaacgacgacgactactaatactacaataacgcgataacgacgaaaaccgaaataataaacaaccgctaaaaacgattaaacgaacgacaaaacacctccaaaccgaccgccaacttaaccttattaacgctaataaaacgcttaaaatacacgaacaactataactaatcgcgacgaaaatacgaattataaaaataataaaacgacccattacctaccgatttaccgccccccgacccgcccaacaccaccttacgaaaaccgtaaaaattaaactaacgaataaaactaataaaactaataattttaaaaaactcgaactcgaccccgacccccgcaatcccgccaccgccccccgacccgaacgaactaaacaactcgacctcgaaaaacgactaatcgataaacaacccctcgccgcgaccgtcccaacgaataaaacgataacgcgaactattcaccaaacgccacaacttaacgaaaaaattattaaaattaataaaaataaaaaacaacgcctccatcgccccgccgaaccgaaacctcgccccccgaacctaactctcccacaccgttctcgatccctccccgaccttcgcctcgccctacccgctcctaccgacgcccatccgccgcgtaccaaaaaccgttaacgcacgaaaccccgcgacgcctcccaacgcgaccaataaaacctcgaattcccgccacgcgacgtaaacacctccccctcgacgaccgcgtaccccaactcgacccgccgaacgcctacgaaacccgaacaaaaaccccttccccaaacgttcccaaacttcaaaccgaaaaaactatctaccgaaatattctaaatcctaac

SEQ ID NO: 3089 - DNA, 515 bp, Artificial Sequence
  chemically treated genomic DNA (Homo sapiens) CpG-island No: 3089
cgacgtatcgtcgttcggtagtagtgttagtttgtgttcggggtcggcgacggcgttttttattttgtatagtcgcggttgcggtgtcgcgggtttttttgtagtcgttcgggagcgatcggttttgcgtattttagttttgtttcgcgttcgttcgtttgtttgtttgttttattatggttgtagttcgggcggggtcggtttcgtttggatagcgttcgagcgattcgcggcggagttgcgcgtcgatttcgtagtatcgtcgttattttttcgttttttcgagtgcggatcgttgcgggaggggttcggcggcgggggcggagcgagtcggtttcggggcggggtttgtattttagttgttagcggtgtcggcgcgaagtgggtcggggtgtttagttgggggtcggtttcgtagttcgcgattttcggatgcgtagagtatgtagagttatttaggatagagcggggagttttagtttttcgttttcgggttgtattggatatttggtttt

SEQ ID NO: 3090 - DNA, 515 bp, Artificial Sequence
  chemically treated genomic DNA (Homo sapiens) CpG-island No: 3090
aaaaccaaatatccaatacaacccgaaaacgaaaaactaaaactccccgctctatcctaaataactctacatactctacgcatccgaaaatcgcgaactacgaaaccgacccccaactaaacaccccgacccacttcgcgccgacaccgctaacaactaaaatacaaaccccgccccgaaaccgactcgctccgcccccgccgccgaacccctcccgcaacgatccgcactcgaaaaaacgaaaaaataacgacgatactacgaaatcgacgcgcaactccgccgcgaatcgctcgaacgctatccaaacgaaaccgaccccgcccgaactacaaccataataaaacaaacaaacaaacgaacgaacgcgaaacaaaactaaaatacgcaaaaccgatcgctcccgaacgactacaaaaaaacccgcgacaccgcaaccgcgactatacaaaataaaaaacgccgtcgccgaccccgaacacaaactaacactactaccgaacgacgatacgtcg

SEQ ID NO: 3091 - DNA, 515 bp, Artificial Sequence
  chemically treated genomic DNA (Homo sapiens) CpG-island No: 3091
agagttaggtgtttagtgtagttcggggacgaggagttgaggtttttcgttttgttttgggtgattttgtatattttgcgtattcgggggtcgcgggttgcgaggtcggtttttagttgggtatttcgatttatttcgcgtcggtatcgttagtagttgaggtataggtttcgtttcggggtcgattcgtttcgttttcgtcgtcgggtttttttcgtagcggttcgtattcggggaggcgggagggtgacggcggtgttgcgaggtcggcgcgtagtttcgtcgcgggtcgttcgggcgttgtttaggcggagtcggtttcgttcgggttgtagttatggtaaggtaggtaggtaggcgggcgggcgcggggtagggttggggtgcgtagggtcggtcgttttcgggcggttgtaaggggattcgcggtatcgtagtcgcggttgtgtagggtgggaggcgtcgtcgtcggtttcgggtataggttggtattgttgtcgggcggcggtgcgtcg

SEQ ID NO: 3092 - DNA, 515 bp, Artificial Sequence
  chemically treated genomic DNA (Homo sapiens) CpG-island No: 3092
cgacgcaccgccgcccgacaacaataccaacctatacccgaaaccgacgacgacgcctcccaccctacacaaccgcgactacgataccgcgaatccccttacaaccgcccgaaaacgaccgaccctacgcaccccaaccctaccccgcgcccgcccgcctacctacctaccttaccataactacaacccgaacgaaaccgactccgcctaaacaacgcccgaacgacccgcgacgaaactacgcgccgacctcgcaacaccgccgtcaccctcccgcctccccgaatacgaaccgctacgaaaaaaacccgacgacgaaaacgaaacgaatcgaccccgaaacgaaacctatacctcaactactaacgataccgacgcgaaataaatcgaaatacccaactaaaaaccgacctcgcaacccgcgacccccgaatacgcaaaatatacaaaatcacccaaaacaaaacgaaaaacctcaactcctcgtccccgaactacactaaacacctaactct

SEQ ID NO: 3093 - DNA, 670 bp, Artificial Sequence
  chemically treated genomic DNA (Homo sapiens) CpG-island No: 3093
tcggaggattttaggggatttcgttttgttttttgtaatttcgggtgttttttcggtcgcgacgatcgggcggggtggggttcgtcgttatttatttattagtttcgtttttcggacgggcgcgtcgttaatgagattagtaatttaaaaattagttagttgcgtcggcggcggaggcgcggggttatttttaagtcgagtcggggtgggacggcgcgtttggcgatcgcgtattgagattgtcgtgtcggattttcgagtcggagtcgagcgcgtcgaggtcggggttatggagaaagcgcggtcgttgtgggttaattcgttatagttcgtgttcgtttgtatttcgtacgtcgtgggtttgggtaacgtgtggcgattttcgtatttgtgttagatgtacggcggaggtgagtgtttatcgcgtttcggttttagtttaattttgtgcgcgttttcgtcgtgtgtgcgagtcggggttagatttaagttatagaacggtatattgaggtcgggaaagcgagcgtgatttgttcgaagttatagattcgggagtgtttttaggatatttcgtttcggagtcggagtttttttttaagtcgtttttttaagttttcgggaatttttcgttttatttcgggggcggttaagtttttaatttttatttttg

SEQ ID NO: 3094 - DNA, 670 bp, Artificial Sequence
  chemically treated genomic DNA (Homo sapiens) CpG-island No: 3094
caaaaataaaaattaaaaacttaaccgcccccgaaataaaacgaaaaattcccgaaaacttaaaaaaacgacttaaaaaaaaactccgactccgaaacgaaatatcctaaaaacactcccgaatctataacttcgaacaaatcacgctcgctttcccgacctcaatataccgttctataacttaaatctaaccccgactcgcacacacgacgaaaacgcgcacaaaattaaactaaaaccgaaacgcgataaacactcacctccgccgtacatctaacacaaatacgaaaatcgccacacgttacccaaacccacgacgtacgaaatacaaacgaacacgaactataacgaattaacccacaacgaccgcgctttctccataaccccgacctcgacgcgctcgactccgactcgaaaatccgacacgacaatctcaatacgcgatcgccaaacgcgccgtcccaccccgactcgacttaaaaataaccccgcgcctccgccgccgacgcaactaactaatttttaaattactaatctcattaacgacgcgcccgtccgaaaaacgaaactaataaataaataacgacgaaccccaccccgcccgatcgtcgcgaccgaaaaaacacccgaaattacaaaaaacaaaacgaaatcccctaaaatcctccga

SEQ ID NO: 3095 - DNA, 670 bp, Artificial Sequence
  chemically treated genomic DNA (Homo sapiens) CpG-island No: 3095
taagggtgagggttgggggtttggtcgttttcgggatggggcgaggggttttcgagggtttgggagggcggtttgggagagagtttcggtttcggaacgaggtgttttgggaatattttcgggtttgtaatttcggataaattacgttcgttttttcggttttagtgtgtcgttttgtaatttgggtttaatttcggttcgtatatacggcggggacgcgtatagagttgggttggggtcggggcgcggtgggtatttattttcgtcgtatatttggtataggtacgggaatcgttatacgttgtttaggtttacggcgtacgagatgtaggcgaatacgaattgtagcgagttggtttatagcggtcgcgttttttttatggtttcggtttcggcgcgttcggtttcggttcgggggttcggtacggtagttttagtgcgcggtcgttaggcgcgtcgttttatttcggttcggtttgggggtggtttcgcgttttcgtcgtcgacgtagttagttggtttttaaattgttaattttattaacggcgcgttcgttcgagaggcgaggttggtaaatggatgacggcgagttttatttcgttcgatcgtcgcggtcgggaaggtattcgagattgtagaggatagggcggagttttttggggtttttcgg

SEQ ID NO: 3096 - DNA, 670 bp, Artificial Sequence
  chemically treated genomic DNA (Homo sapiens) CpG-island No: 3096
ccgaaaaaccccaaaaaactccgccctatcctctacaatctcgaataccttcccgaccgcgacgatcgaacgaaataaaactcgccgtcatccatttaccaacctcgcctctcgaacgaacgcgccgttaataaaattaacaatttaaaaaccaactaactacgtcgacgacgaaaacgcgaaaccacccccaaaccgaaccgaaataaaacgacgcgcctaacgaccgcgcactaaaactaccgtaccgaacccccgaaccgaaaccgaacgcgccgaaaccgaaaccataaaaaaaacgcgaccgctataaaccaactcgctacaattcgtattcgcctacatctcgtacgccgtaaacctaaacaacgtataacgattcccgtacctataccaaatatacgacgaaaataaatacccaccgcgccccgaccccaacccaactctatacgcgtccccgccgtatatacgaaccgaaattaaacccaaattacaaaacgacacactaaaaccgaaaaaacgaacgtaatttatccgaaattacaaacccgaaaatattcccaaaacacctcgttccgaaaccgaaactctctcccaaaccgccctcccaaaccctcgaaaacccctcgccccatcccgaaaacgaccaaacccccaaccctcaccctta

SEQ ID NO: 3097 - DNA, 773 bp, Artificial Sequence
  chemically treated genomic DNA (Homo sapiens) CpG-island No: 3097
aagacgtcgaagattacggtaagcgatagtacgtagagtacggcgatttgcgttattcgcgatatttataggttgcgttcgtcgggcgttagtttcgcggggatttcgtcgttggcggttagcggtgcgttttttggatagtagtttagttacgtgtttagttcgtgggtgcggttttttagggcggtttcggcgtcgtcgtttacgtcgtttattttttttaagtcgttgtggtttaggaaggtcgcgtttatcgtcgcgcggcgtcgggggtttcggcgcgtagtttcgggtgtattgggttgttcgtcggggttcgcgtttttagggacgtttcggatttttcggatcggtttttgcggtacggggaggggacgaaggcgggaggttggttgtttgcgcgttttcgggtcgtttatttttgggtatcgggcgggaagcgatcgttcggaggagcgagtaataggcggcgtaggagttggagtcggagaatttagtgtgtttagcggtcgttcgttgggtttttcgcgcgtttggtcgttttttttttagtaacggttcggtttcgtttcgtcggttttcgcggtattttcgaggggcgggaatttcgtcgcgggcgtagttttttcggagtttcggtgttggagggggtcgggagattcggtagtttttgttcgcgggtcggcgaaattttatttttttttggtattcgttgttcgtttttggttagaaaatttttttaaggtgtttattttaggatttgatatttttag

SEQ ID NO: 3098 - DNA, 773 bp, Artificial Sequence
  chemically treated genomic DNA (Homo sapiens) CpG-island No: 3098
ctaaaaatatcaaatcctaaaataaacaccttaaaaaaattttctaaccaaaaacgaacaacgaataccaaaaaaaaataaaatttcgccgacccgcgaacaaaaactaccgaatctcccgaccccctccaacaccgaaactccgaaaaaactacgcccgcgacgaaattcccgcccctcgaaaataccgcgaaaaccgacgaaacgaaaccgaaccgttactaaaaaaaaaacgaccaaacgcgcgaaaaacccaacgaacgaccgctaaacacactaaattctccgactccaactcctacgccgcctattactcgctcctccgaacgatcgcttcccgcccgatacccaaaaataaacgacccgaaaacgcgcaaacaaccaacctcccgccttcgtcccctccccgtaccgcaaaaaccgatccgaaaaatccgaaacgtccctaaaaacgcgaaccccgacgaacaacccaatacacccgaaactacgcgccgaaacccccgacgccgcgcgacgataaacgcgaccttcctaaaccacaacgacttaaaaaaaataaacgacgtaaacgacgacgccgaaaccgccctaaaaaaccgcacccacgaactaaacacgtaactaaactactatccaaaaaacgcaccgctaaccgccaacgacgaaatccccgcgaaactaacgcccgacgaacgcaacctataaatatcgcgaataacgcaaatcgccgtactctacgtactatcgcttaccgtaatcttcgacgtctt

SEQ ID NO: 3099 - DNA, 773 bp, Artificial Sequence
  chemically treated genomic DNA (Homo sapiens) CpG-island No: 3099
ttaagggtattaaattttggaatgggtattttggagaggttttttagttaagaacggatagcgggtgttaggagggggtggagtttcgtcggttcgcggatagaggttgtcggatttttcgattttttttagtatcgggatttcggggaggttgcgttcgcggcgggattttcgtttttcggagatgtcgcggggatcggcggggcggggtcgggtcgttgttaggggaggggcggttaggcgcgcgaggaatttagcgggcgatcgttaagtatattaggtttttcggttttagtttttgcgtcgtttgttgttcgttttttcgggcggtcgtttttcgttcggtgtttaggggtaggcggttcgagagcgcgtaggtagttagtttttcgttttcgtttttttttcgtatcgtaggagtcggttcgaggggttcggagcgtttttgagagcgcggatttcggcgagtagtttagtgtattcgggattgcgcgtcgagattttcggcgtcgcgcggcgatgaacgcgatttttttgaattatagcggtttggaggaggtggacggcgtgggcggcggcgtcggggtcgttttgggaaatcgtatttacgggttgggtacgtggttgggttgttgtttagggggcgtatcgttggtcgttagcgacggggttttcgcggggttggcgttcgacgagcgtagtttgtgggtgtcgcgggtggcgtagatcgtcgtgttttgcgtgttgtcgtttatcgtggttttcggcgtttt

SEQ ID NO: 3100 - DNA, 773 bp, Artificial Sequence
  chemically treated genomic DNA (Homo sapiens) CpG-island No: 3100
aaaacgccgaaaaccacgataaacgacaacacgcaaaacacgacgatctacgccacccgcgacacccacaaactacgctcgtcgaacgccaaccccgcgaaaaccccgtcgctaacgaccaacgatacgccccctaaacaacaacccaaccacgtacccaacccgtaaatacgatttcccaaaacgaccccgacgccgccgcccacgccgtccacctcctccaaaccgctataattcaaaaaaatcgcgttcatcgccgcgcgacgccgaaaatctcgacgcgcaatcccgaatacactaaactactcgccgaaatccgcgctctcaaaaacgctccgaacccctcgaaccgactcctacgatacgaaaaaaaaacgaaaacgaaaaactaactacctacgcgctctcgaaccgcctacccctaaacaccgaacgaaaaacgaccgcccgaaaaaacgaacaacaaacgacgcaaaaactaaaaccgaaaaacctaatatacttaacgatcgcccgctaaattcctcgcgcgcctaaccgcccctcccctaacaacgacccgaccccgccccgccgatccccgcgacatctccgaaaaacgaaaatcccgccgcgaacgcaacctccccgaaatcccgatactaaaaaaaatcgaaaaatccgacaacctctatccgcgaaccgacgaaactccaccccctcctaacacccgctatccgttcttaactaaaaaacctctccaaaatacccattccaaaatttaatacccttaa

SEQ ID NO: 3101 - DNA, 533 bp, Artificial Sequence
  chemically treated genomic DNA (Homo sapiens) CpG-island No: 3101
cgggcgtttggcggtttttgttgagtgggggtgggattttcgaggaaagggggcggtttttttaagcgtataaggatacgggtcgttttaattcgggacgaagggtttaagcgttacgaggacgtttttattttcgaggggttttaacggaggttttttcgcggcgtcgagtcgaggtttcggcgtgggggtagcgagaggcgcgtttaggaagcgtacggggtagtttcggagttacgtggtcggtttttgcgtttagaaggttcgagtttatttatttagttacgcgtcgcggtcgaaaagggagggtattgcggagattaagtttaaaaggggtttgggcggggcggtattaattaaaaagttgtcggaaggttttttcgggtttagtattcgtttcgttcgcggggttcggaggttttcgcgcgttttttgtcggcggttcgggtttttttcgttttgggtttttttttttattttatacggtttcggtttttatttggtttcggtttttattttgtttcggttttcga

SEQ ID NO: 3102 - DNA, 533 bp, Artificial Sequence
  chemically treated genomic DNA (Homo sapiens) CpG-island No: 3102
tcgaaaaccgaaacaaaataaaaaccgaaaccaaataaaaaccgaaaccgtataaaataaaaaaaaaaacccaaaacgaaaaaaacccgaaccgccgacaaaaaacgcgcgaaaacctccgaaccccgcgaacgaaacgaatactaaacccgaaaaaaccttccgacaactttttaattaataccgccccgcccaaaccccttttaaacttaatctccgcaataccctcccttttcgaccgcgacgcgtaactaaataaataaactcgaaccttctaaacgcaaaaaccgaccacgtaactccgaaactaccccgtacgcttcctaaacgcgcctctcgctacccccacgccgaaacctcgactcgacgccgcgaaaaaacctccgttaaaacccctcgaaaataaaaacgtcctcgtaacgcttaaacccttcgtcccgaattaaaacgacccgtatccttatacgcttaaaaaaaccgccccctttcctcgaaaatcccacccccactcaacaaaaaccgccaaacgcccg

SEQ ID NO: 3103 - DNA, 533 bp, Artificial Sequence
  chemically treated genomic DNA (Homo sapiens) CpG-island No: 3103
tcggaggtcggggtaaagtgggagtcggggttaagtgggagtcggggtcgtgtggggtgggggggggggtttaaggcggggaaggttcgggtcgtcgatagggggcgcgcgagggttttcgggtttcgcgggcggggcgggtgttggattcggaggggtttttcggtaattttttggttggtgtcgtttcgtttaggttttttttaaatttgattttcgtagtgtttttttttttcggtcgcggcgcgtgattgggtaagtgggttcggattttttggacgtaggagtcgattacgtggtttcggggttatttcgtgcgttttttaggcgcgtttttcgttgtttttacgtcgaggtttcggttcggcgtcgcggggaagttttcgttagggtttttcgggggtgggggcgttttcgtggcgtttgggtttttcgtttcgggttaggacggttcgtgtttttgtgcgtttgaaggggtcgtttttttttttcgaggattttatttttatttagtagaagtcgttaggcgttcg

SEQ ID NO: 3104 - DNA, 533 bp, Artificial Sequence
  chemically treated genomic DNA (Homo sapiens) CpG-island No: 3104
cgaacgcctaacgacttctactaaataaaaataaaatcctcgaaaaaaaaaaacgaccccttcaaacgcacaaaaacacgaaccgtcctaacccgaaacgaaaaacccaaacgccacgaaaacgcccccacccccgaaaaaccctaacgaaaacttccccgcgacgccgaaccgaaacctcgacgtaaaaacaacgaaaaacgcgcctaaaaaacgcacgaaataaccccgaaaccacgtaatcgactcctacgtccaaaaaatccgaacccacttacccaatcacgcgccgcgaccgaaaaaaaaaaacactacgaaaatcaaatttaaaaaaaacctaaacgaaacgacaccaaccaaaaaattaccgaaaaacccctccgaatccaacacccgccccgcccgcgaaacccgaaaaccctcgcgcgccccctatcgacgacccgaaccttccccgccttaaacccccccccccaccccacacgaccccgactcccacttaaccccgactcccactttaccccgacctccga

SEQ ID NO: 3105 - DNA, 684 bp, Artificial Sequence
  chemically treated genomic DNA (Homo sapiens) CpG-island No: 3105
taaagcgcgttaattttaattttttttttttttattttttttatcgcggagttcggggcgagtttggggagtagacgtaatagattgtagaatgcgagagcgcggagttcgtttttttcgcgcgcggttcgcggtttatcgtttcggtttgtgcgggtgtttagattttcgtttttcgggttcgtttaagtcggttatttagatgtagtttataggatcgcgggcgtgcgagtcgcggcggtttttcggttcggagttagtttattttttttttcgaggatcgtcgtaggaagcgaggcgacgggcggcgcggtttcgtatcggtttgcgcgttcggggcgaggaaagacgcgatttcggcggattttaatagtttttagttcggtcggttgtagggagagacgggggcggggggcggtttggacgcgattcggaggatttttcggatttttttagattttcgtgggcggatacgattttagattttcgggttcgaatttttttttataattaggagaggattggagcgatattttttttttatttttttttggcgtcgggttcggtttttttagttgagttcgtcggagggttcgggggttggcggtaattcgagttgtagttagagacgttaaattcggagtggcggttgcgagtttagggggtgtgggtgttttttttttt

SEQ ID NO: 3106 - DNA, 684 bp, Artificial Sequence
  chemically treated genomic DNA (Homo sapiens) CpG-island No: 3106
aaaaaaaaaaacacccacaccccctaaactcgcaaccgccactccgaatttaacgtctctaactacaactcgaattaccgccaacccccgaaccctccgacgaactcaactaaaaaaaccgaacccgacgccaaaaaaaaataaaaaaaaaatatcgctccaatcctctcctaattataaaaaaaaattcgaacccgaaaatctaaaatcgtatccgcccacgaaaatctaaaaaaatccgaaaaatcctccgaatcgcgtccaaaccgccccccgcccccgtctctccctacaaccgaccgaactaaaaactattaaaatccgccgaaatcgcgtctttcctcgccccgaacgcgcaaaccgatacgaaaccgcgccgcccgtcgcctcgcttcctacgacgatcctcgaaaaaaaaaataaactaactccgaaccgaaaaaccgccgcgactcgcacgcccgcgatcctataaactacatctaaataaccgacttaaacgaacccgaaaaacgaaaatctaaacacccgcacaaaccgaaacgataaaccgcgaaccgcgcgcgaaaaaaacgaactccgcgctctcgcattctacaatctattacgtctactccccaaactcgccccgaactccgcgataaaaaaaataaaaaaaaaaaaaattaaaattaacgcgcttta

SEQ ID NO: 3107 - DNA, 684 bp, Artificial Sequence
  chemically treated genomic DNA (Homo sapiens) CpG-island No: 3107
ggggagaggagtatttatattttttggattcgtagtcgttatttcgggtttggcgtttttggttgtagttcgagttatcgttagttttcgagtttttcggcgagtttagttgaggggatcgagttcggcgttagaaaagggtggggggagggtgtcgttttagtttttttttggttataaagaagggttcgaattcgaaggtttggggtcgtgttcgtttacggaaatttagagggattcgagggatttttcggatcgcgtttaggtcgtttttcgttttcgtttttttttgtagtcggtcgggttgggggttgttgggattcgtcgggatcgcgttttttttcgtttcgggcgcgtaggtcggtgcggggtcgcgtcgttcgtcgtttcgttttttgcggcggttttcgggaagggaagtggattgatttcgggtcggggagtcgtcgcggttcgtacgttcgcggttttgtgagttgtatttaaatggtcggtttaggcgagttcggagggcgggggtttgggtattcgtataggtcggggcggtgggtcgcgggtcgcgcgcggagggagcgggtttcgcgttttcgtattttgtaatttgttgcgtttgttttttaggttcgtttcgggtttcgcggtaaagggggtgggagaaggagggattgaggttggcgcgttttg

SEQ ID NO: 3108 - DNA, 684 bp, Artificial Sequence
  chemically treated genomic DNA (Homo sapiens) CpG-island No: 3108
caaaacgcgccaacctcaatccctccttctcccaccccctttaccgcgaaacccgaaacgaacctaaaaaacaaacgcaacaaattacaaaatacgaaaacgcgaaacccgctccctccgcgcgcgacccgcgacccaccgccccgacctatacgaatacccaaacccccgccctccgaactcgcctaaaccgaccatttaaatacaactcacaaaaccgcgaacgtacgaaccgcgacgactccccgacccgaaatcaatccacttcccttcccgaaaaccgccgcaaaaaacgaaacgacgaacgacgcgaccccgcaccgacctacgcgcccgaaacgaaaaaaaacgcgatcccgacgaatcccaacaacccccaacccgaccgactacaaaaaaaaacgaaaacgaaaaacgacctaaacgcgatccgaaaaatccctcgaatccctctaaatttccgtaaacgaacacgaccccaaaccttcgaattcgaacccttctttataaccaaaaaaaaactaaaacgacaccctccccccacccttttctaacgccgaactcgatcccctcaactaaactcgccgaaaaactcgaaaactaacgataactcgaactacaaccaaaaacgccaaacccgaaataacgactacgaatccaaaaaatataaatactcctctcccc

SEQ ID NO: 3109 - DNA, 607 bp, Artificial Sequence
  chemically treated genomic DNA (Homo sapiens) CpG-island No: 3109
tagtcgtcgtcgtcgtcgtcgttttttcggcgttcgcgtcggttgtttcgtcgtaaatgattcgagagagatatatatattcgcgttcgttcgtttttttttttcgttcgggatttagcgtttattcgggtagaagcgggcgtcgagtttggcgcgtttatttttattttttttagatttttcgtggttacgtggttttcgagcgcgcggtttatagttcgcgcgttacggagatttttcgatttttagtttttttttttttgtttacgtgtttatttcgtatttttagtttggcggcgcgcgcggttttttaatgagattcgggttaagggtcgatttcgcgatttcgttcgtttttattttatgtttgattttttttttttaacgtcggttagcgttgggattcgaatggggtcggttagttgcggcgggaggagtttttattttttttagttgcgtttttttagggtagacgttatcgtagttattgatgtttttttttaaaggatgtacgttttttatcgggcgtcggaggtgttttgtagtcgtttttttagaggcgcgggtagggggtattttatttttatttttagagttcgttgggtat

SEQ ID NO: 3110 - DNA, 607 bp, Artificial Sequence
  chemically treated genomic DNA (Homo sapiens) CpG-island No: 3110
atacccaacgaactctaaaaataaaaataaaataccccctacccgcgcctctaaaaaaacgactacaaaacacctccgacgcccgataaaaaacgtacatcctttaaaaaaaaacatcaataactacgataacgtctaccctaaaaaaacgcaactaaaaaaaataaaaactcctcccgccgcaactaaccgaccccattcgaatcccaacgctaaccgacgttaaaaaaaaaaaatcaaacataaaataaaaacgaacgaaatcgcgaaatcgacccttaacccgaatctcattaaaaaaccgcgcgcgccgccaaactaaaaatacgaaataaacacgtaaacaaaaaaaaaaaaactaaaaatcgaaaaatctccgtaacgcgcgaactataaaccgcgcgctcgaaaaccacgtaaccacgaaaaatctaaaaaaaataaaaataaacgcgccaaactcgacgcccgcttctacccgaataaacgctaaatcccgaacgaaaaaaaaaaacgaacgaacgcgaatatatatatctctctcgaatcatttacgacgaaacaaccgacgcgaacgccgaaaaaacgacgacgacgacgacgacta

SEQ ID NO: 3111 - DNA, 607 bp, Artificial Sequence
  chemically treated genomic DNA (Homo sapiens) CpG-island No: 3111
gtgtttagcgaattttgggggtgggggtagggtgttttttattcgcgtttttggaagagcggttgtaaaatattttcggcgttcggtggggagcgtgtattttttgaaaagggatattagtgattgcggtggcgtttattttggagaaacgtagttgagggaggtggaggtttttttcgtcgtagttggtcggttttattcgggttttagcgttagtcggcgttgggaaggaaaaattaaatataaaataggggcgagcggaatcgcgaggtcggtttttggttcgagttttattaaggagtcgcgcgcgtcgttaggttaggaatgcggaatggatacgtggatagaggagggggagttaggagtcggggagttttcgtggcgcgcgagttgtgggtcgcgcgttcgggggttacgtgattacggggaatttgggaggggtgggagtgagcgcgttaagttcggcgttcgtttttgttcgggtgggcgttgaatttcggacggaggaggagggcgggcgagcgcgagtgtgtgtgtttttttcgagttatttacggcggagtagtcggcgcgagcgtcgaggaggcggcgacggcggcggcggttg

SEQ ID NO: 3112 - DNA, 607 bp, Artificial Sequence
  chemically treated genomic DNA (Homo sapiens) CpG-island No: 3112
caaccgccgccgccgtcgccgcctcctcgacgctcgcgccgactactccgccgtaaataactcgaaaaaaacacacacactcgcgctcgcccgccctcctcctccgtccgaaattcaacgcccacccgaacaaaaacgaacgccgaacttaacgcgctcactcccacccctcccaaattccccgtaatcacgtaacccccgaacgcgcgacccacaactcgcgcgccacgaaaactccccgactcctaactccccctcctctatccacgtatccattccgcattcctaacctaacgacgcgcgcgactccttaataaaactcgaaccaaaaaccgacctcgcgattccgctcgcccctattttatatttaatttttccttcccaacgccgactaacgctaaaacccgaataaaaccgaccaactacgacgaaaaaaacctccacctccctcaactacgtttctccaaaataaacgccaccgcaatcactaatatcccttttcaaaaaatacacgctccccaccgaacgccgaaaatattttacaaccgctcttccaaaaacgcgaataaaaaacaccctacccccacccccaaaattcgctaaacac

SEQ ID NO: 3113 - DNA, 613 bp, Artificial Sequence
  chemically treated genomic DNA (Homo sapiens) CpG-island No: 3113
tttcgtgtataagtagggtacgagtcgtattcgtcgcggtgattagagtttgtggattcgttcgcgggatatcgtttgtaagtgttttaaaattaagttttttaagaagtatttgttgttgggtaacgcggaggatttttcggattagagcggtatcgtggtcgataaaagtagtttggtgatttagtggcgggatacgtgggcgcggcggttgcgtaagttttagtagcgtgagaagaagggtaagtgtaagaaggtttagcgtcgaggtagcgggcgggcgggcgggcgggcgttagggcggggtcgagcgagagcgggcgttttggttcggtcgtcgcggatttggttcgcgagggtttttttaggtggggggagggagggggcggggtcgtacggcgcggggggcgggattttcggcggtttttttttttatttttattttgcgcgttttgggcgggagtcgcgtgtacgcggggcggggtgcgtcgtcggtcgggttttggagaaatgacgagacgtagttattttacggggttttttttagagtagagacgcgtttttttgggtttgggcgcggtcgtcgtggaggggttgggggtagtttgttttg

SEQ ID NO: 3114 - DNA, 613 bp, Artificial Sequence
  chemically treated genomic DNA (Homo sapiens) CpG-island No: 3114
caaaacaaactacccccaacccctccacgacgaccgcgcccaaacccaaaaaaacgcgtctctactctaaaaaaaaccccgtaaaataactacgtctcgtcatttctccaaaacccgaccgacgacgcaccccgccccgcgtacacgcgactcccgcccaaaacgcgcaaaataaaaataaaaaaaaaaaccgccgaaaatcccgccccccgcgccgtacgaccccgccccctccctccccccacctaaaaaaaccctcgcgaaccaaatccgcgacgaccgaaccaaaacgcccgctctcgctcgaccccgccctaacgcccgcccgcccgcccgcccgctacctcgacgctaaaccttcttacacttacccttcttctcacgctactaaaacttacgcaaccgccgcgcccacgtatcccgccactaaatcaccaaactacttttatcgaccacgataccgctctaatccgaaaaatcctccgcgttacccaacaacaaatacttcttaaaaaacttaattttaaaacacttacaaacgatatcccgcgaacgaatccacaaactctaatcaccgcgacgaatacgactcgtaccctacttatacacgaaa

SEQ ID NO: 3115 - DNA, 613 bp, Artificial Sequence
  chemically treated genomic DNA (Homo sapiens) CpG-island No: 3115
tagggtaggttgtttttagtttttttacggcggtcgcgtttaggtttagggaagcgcgtttttgttttggaaggagtttcgtgaggtagttacgtttcgttatttttttagggttcggtcggcggcgtatttcgtttcgcgtgtacgcggttttcgtttagagcgcgtagggtgggggtagggggaggggtcgtcgagggtttcgtttttcgcgtcgtgcggtttcgttttttttttttttttatttgggaaagttttcgcgggttaagttcgcggcggtcgggttaaggcgttcgttttcgttcggtttcgttttggcgttcgttcgttcgttcgttcgttgtttcggcgttaggtttttttgtatttgtttttttttttacgttgttggaatttgcgtagtcgtcgcgtttacgtgtttcgttattggattattaggttgtttttatcggttacgatgtcgttttggttcggagagtttttcgcgttgtttagtagtaggtattttttgaggggtttgattttgggatatttgtaggcgatgtttcgcgagcggatttataggttttggttatcgcggcggatgcggttcgtgttttgtttatatacggag

SEQ ID NO: 3116 - DNA, 613 bp, Artificial Sequence
  chemically treated genomic DNA (Homo sapiens) CpG-island No: 3116
ctccgtatataaacaaaacacgaaccgcatccgccgcgataaccaaaacctataaatccgctcgcgaaacatcgcctacaaatatcccaaaatcaaacccctcaaaaaatacctactactaaacaacgcgaaaaactctccgaaccaaaacgacatcgtaaccgataaaaacaacctaataatccaataacgaaacacgtaaacgcgacgactacgcaaattccaacaacgtaaaaaaaaaaacaaatacaaaaaaacctaacgccgaaacaacgaacgaacgaacgaacgaacgccaaaacgaaaccgaacgaaaacgaacgccttaacccgaccgccgcgaacttaacccgcgaaaactttcccaaataaaaaaaaaaaaaaaacgaaaccgcacgacgcgaaaaacgaaaccctcgacgacccctccccctacccccaccctacgcgctctaaacgaaaaccgcgtacacgcgaaacgaaatacgccgccgaccgaaccctaaaaaaataacgaaacgtaactacctcacgaaactccttccaaaacaaaaacgcgcttccctaaacctaaacgcgaccgccgtaaaaaaactaaaaacaacctacccta

SEQ ID NO: 3117 - DNA, 782 bp, Artificial Sequence
  chemically treated genomic DNA (Homo sapiens) CpG-island No: 3117
cgcgggggaagtcggcgcgggcgtattttttaggtagtttttcgttaggtacgggtaggaagttgaggttcggggggaaggtgcgtagtaggtcgaggatgtagtggcgttcgtcgttgttaatgatgtttttgtattcgatcgaggagtagagttttattttttcgttacggtcgttgagtatttggtgtcgtaggattttgaggggtcgattcgtgcgttttagtagttttaggtatcgcgggtgtgatattacggttttgtcgaagtcgatggagtcgtagatgacgttttgtttttggtttcgttttaggatgtcggggatgatggattgggtcgtgattcggtagtcgcggtaatttattattatcgtgtttagcgtgtatagtttttttacgtttatcgcgttgtacgtgcggacgttatttaggtcgttggtgggcgttacgtaggtcgttacgtttttttcgaagtttttgtagtggtttcggacgtcgaagtttaggttgaagaagatgttgttttagatgaatatttgtattttggttttttcgttggggttgatggttattacgttgtcgttaatgacggttatggcgtttttggtggttgtcgcggtgaagtcgttgtgtatttggcgggggtcgaggagggtagggttagaggtcgcgtttataagagtttgtatttatttggttaagcgtacgtatttagatcgcggaggtaatcgggtttgttttggaaatttaaggattcggagttttagtttttttatatgtaga

SEQ ID NO: 3118 - DNA, 782 bp, Artificial Sequence
  chemically treated genomic DNA (Homo sapiens) CpG-island No: 3118
tctacatataaaaaaactaaaactccgaatccttaaatttccaaaacaaacccgattacctccgcgatctaaatacgtacgcttaaccaaataaatacaaactcttataaacgcgacctctaaccctaccctcctcgacccccgccaaatacacaacgacttcaccgcgacaaccaccaaaaacgccataaccgtcattaacgacaacgtaataaccatcaaccccaacgaaaaaaccaaaatacaaatattcatctaaaacaacatcttcttcaacctaaacttcgacgtccgaaaccactacaaaaacttcgaaaaaaacgtaacgacctacgtaacgcccaccaacgacctaaataacgtccgcacgtacaacgcgataaacgtaaaaaaactatacacgctaaacacgataataataaattaccgcgactaccgaatcacgacccaatccatcatccccgacatcctaaaacgaaaccaaaaacaaaacgtcatctacgactccatcgacttcgacaaaaccgtaatatcacacccgcgatacctaaaactactaaaacgcacgaatcgacccctcaaaatcctacgacaccaaatactcaacgaccgtaacgaaaaaataaaactctactcctcgatcgaatacaaaaacatcattaacaacgacgaacgccactacatcctcgacctactacgcaccttccccccgaacctcaacttcctacccgtacctaacgaaaaactacctaaaaaatacgcccgcgccgacttcccccgcg

SEQ ID NO: 3119 - DNA, 782 bp, Artificial Sequence
  chemically treated genomic DNA (Homo sapiens) CpG-island No: 3119
tttatatatgaggaaattgaggtttcgggtttttgggtttttaaggtaggttcggttgttttcgcggtttaggtgcgtgcgtttggttaggtggatgtaggtttttgtgggcgcggtttttaattttgtttttttcgattttcgttaggtgtatagcgattttatcgcggtagttattaggggcgttatggtcgttattgacggtaacgtgatggttattaattttagcgaggagattaagatgtagatgtttatttggaataatattttttttagtttgggtttcgacgttcgagattattataaggatttcgggggggacgtggcggtttacgtggcgtttattaacgatttgaatggcgttcgtacgtataacgcggtggacgtggaggggttgtatacgttgggtacggtggtggtggattatcgcggttatcgggttacggtttagtttattattttcggtattttggagcgggattaggagtagagcgttatttacggttttatcgatttcggtaagatcgtggtgttatattcgcggtatttggagttgttggagcgtacgagtcggttttttaagattttgcggtattaggtgtttaacgatcgtgacgaggaggtggagttttgtttttcggtcgagtgtaagggtattattggtaacgacgggcgttattatattttcgatttgttgcgtatttttttttcggattttaattttttgttcgtgtttggcgaggagttgtttgaggaatgcgttcgcgtcggtttttttcgcg

SEQ ID NO: 3120 - DNA, 782 bp, Artificial Sequence
  chemically treated genomic DNA (Homo sapiens) CpG-island No: 3120
cgcgaaaaaaaccgacgcgaacgcattcctcaaacaactcctcgccaaacacgaacaaaaaattaaaatccgaaaaaaaaatacgcaacaaatcgaaaatataataacgcccgtcgttaccaataatacccttacactcgaccgaaaaacaaaactccacctcctcgtcacgatcgttaaacacctaataccgcaaaatcttaaaaaaccgactcgtacgctccaacaactccaaataccgcgaatataacaccacgatcttaccgaaatcgataaaaccgtaaataacgctctactcctaatcccgctccaaaataccgaaaataataaactaaaccgtaacccgataaccgcgataatccaccaccaccgtacccaacgtatacaacccctccacgtccaccgcgttatacgtacgaacgccattcaaatcgttaataaacgccacgtaaaccgccacgtcccccccgaaatccttataataatctcgaacgtcgaaacccaaactaaaaaaaatattattccaaataaacatctacatcttaatctcctcgctaaaattaataaccatcacgttaccgtcaataacgaccataacgcccctaataactaccgcgataaaatcgctatacacctaacgaaaatcgaaaaaaacaaaattaaaaaccgcgcccacaaaaacctacatccacctaaccaaacgcacgcacctaaaccgcgaaaacaaccgaacctaccttaaaaacccaaaaacccgaaacctcaatttcctcatatataaa

SEQ ID NO: 3121 - DNA, 882 bp, Artificial Sequence
  chemically treated genomic DNA (Homo sapiens) CpG-island No: 3121
tcgtaaacgtcggagcgattttagtttagagagtttttatgttcgggcgtagagggggtggggtcgtcgattttttcggtttgcggcggcggcgtatttcgaaatcgcgtgtgcgcgtacgtgttttcgcgatgaggcgcgcgtgtgttcgtcgagggtgttagtcgaggttgttttttacgggatcgtacgtgcgaaattcgggtcgtagtcgggggcgattgtgaaggtgatttttagcgcgggggcgattcggtgaaggttttagcgagatataatcgggttcgacgcggagggaaggcggcgattttcgcggagtttcgaattcgttcgttttggttcggcgtttttcgtttagcggttcgttggttttggtttcgtttatcggtcgcgttcggtcgttttttgttttcggtttgcgagtcgtgttttcgggcgttgtcggtcggggcggtcgtcggtaattcgttcgttttgataattatggtggcgggagcgggcgttcgtttcggttgttcgcgtcgttcgtcgcgttattaatttaagtgttttgcgcgtcgcggttgttgagggaaggacggagttatcggtttacgtggtgcgcgtcgtggtttttgatttcgtcgtcgtttttttgttttattttcgcgttcggtttagtttacggcggttcgcgagggataaaacgcgtcgcgtttggtttttcgtttacggacgcggtgattttttagaacgttttaaaggtaacgtattttgatttaaggtttagggaggttgggcgttttcgcggggcggggtttcggggagattttttgttgttcgttgttcgtcgggcgggtattgtgattttgggtggagattggtttggttttgttatggtta

SEQ ID NO: 3122 - DNA, 882 bp, Artificial Sequence
  chemically treated genomic DNA (Homo sapiens) CpG-island No: 3122
taaccataacaaaaccaaaccaatctccacccaaaatcacaatacccgcccgacgaacaacgaacaacaaaaaatctccccgaaaccccgccccgcgaaaacgcccaacctccctaaaccttaaatcaaaatacgttacctttaaaacgttctaaaaaatcaccgcgtccgtaaacgaaaaaccaaacgcgacgcgttttatccctcgcgaaccgccgtaaactaaaccgaacgcgaaaataaaacaaaaaaacgacgacgaaatcaaaaaccacgacgcgcaccacgtaaaccgataactccgtccttccctcaacaaccgcgacgcgcaaaacacttaaattaataacgcgacgaacgacgcgaacaaccgaaacgaacgcccgctcccgccaccataattatcaaaacgaacgaattaccgacgaccgccccgaccgacaacgcccgaaaacacgactcgcaaaccgaaaacaaaaaacgaccgaacgcgaccgataaacgaaaccaaaaccaacgaaccgctaaacgaaaaacgccgaaccaaaacgaacgaattcgaaactccgcgaaaatcgccgccttccctccgcgtcgaacccgattatatctcgctaaaaccttcaccgaatcgcccccgcgctaaaaatcaccttcacaatcgcccccgactacgacccgaatttcgcacgtacgatcccgtaaaaaacaacctcgactaacaccctcgacgaacacacgcgcgcctcatcgcgaaaacacgtacgcgcacacgcgatttcgaaatacgccgccgccgcaaaccgaaaaaatcgacgaccccaccccctctacgcccgaacataaaaactctctaaactaaaatcgctccgacgtttacga

(The sequence listing continues in the following parts.)

1. A method for the detection of the degree of methylation of a specific cytosine in the sequence context 5′-CpG-3′ of a genomic DNA sample, is hereby characterized in that
a) the genomic DNA is chemically treated, whereby the cytosine bases are converted to uracil, but not the 5-methylcytosine bases;
b) segments of the genomic DNA, which contain said specific cytosine, are amplified, whereby the amplified products are given a detectable label;
c) the amplified products are hybridized to two classes of oligonucleotides and/or PNA oligomers, each of which class has at least one member;
d) the extent of hybridization of the amplified products to the two classes of oligonucleotides and/or PNA oligomers is determined by detection of the label of the amplified products;
e) a conclusion is made on the extent of methylation of said specific cytosine in the genomic DNA sample from the ratio of the labels detected for the two classes of oligonucleotides and/or PNA oligomers as a consequence of the hybridization.

2. The method according to claim 1, further characterized in that a hybridization of the amplified products is conducted in step c) on two classes of oligomers (oligonucleotides and/or PNA oligomers), each of which class has at least one member, whereby the oligomers of the first class preferably hybridize to the sequence which arises after the chemical treatment of the genomic DNA, if said specific cytosine was present in the methylated state in the genomic DNA and whereby the oligomers of the second class preferably hybridize to the sequence which arises after the chemical treatment of the genomic DNA, if said specific cytosine was present in the unmethylated state in the genomic DNA.

3. The method according to claim 1, further characterized in that a hybridization of the amplified products is conducted in step c) on two classes of oligomers (oligonucleotides and/or PNA oligomers), each of which class has at least one member, whereby the oligomers of the first class preferably hybridize to the sequence which arises after the chemical treatment of the genomic DNA, if said specific cytosine was present in the methylated state in the genomic DNA and less preferably hybridize to the sequence which arises after the chemical treatment of the genomic DNA, if said specific cytosine was present in the unmethylated state in the genomic DNA, and whereby the oligomers of the second class hybridize to the amplified product to be investigated essentially independently of the degree of methylation of said specific cytosine in the genomic DNA.

4. The method according to claim 1, further characterized in that a hybridization of the amplified products is conducted in step c) on two classes of oligomers (oligonucleotides and/or PNA oligomers), each of which class has at least one member, whereby the oligomers of the first class preferably hybridize to the sequence which arises after the chemical treatment of the genomic DNA, if said specific cytosine was present in the unmethylated state in the genomic DNA and less preferably hybridize to the sequence which arises after the chemical treatment of the genomic DNA, if said specific cytosine was present in the methylated state in the genomic DNA, and whereby the oligomers of the second class hybridize to the amplified product to be investigated essentially independently of the degree of methylation of said specific cytosine in the genomic DNA.

5. The method according to claim 1, further characterized in that the method is conducted not only with the genomic DNA sample, but also logically with standard DNA in which it is known whether the cytosine at said specific position is present in methylated or unmethylated state, whereby the ratios of the labels detected on the two classes of oligonucleotides, which are measured each time with the unmethylated standard DNA according to claim 1, serve as a calibration value for a degree of methylation of 0, and correspondingly, the ratios of the labels detected on the two classes of oligonucleotides, which are measured each time with the methylated standard DNA according to claim 1, serve as a calibration value for a degree of methylation of 1, and these calibration values are used for the determination of the degree of methylation of the genomic DNA sample.

6. The method according to claim 5, further characterized in that additional known standard DNA samples, each of which has any known degree of methylation of said specific cytosine, are used for calibration.

7. The method according to claim 5, further characterized in that the DNAs used as the standard are each labeled differently and the amplified product from the genomic DNA is provided in turn with a label that is different therefrom.

8. The method according to claim 1, further characterized in that amplified products that are derived from different genomic DNA samples are provided with different labels.

9. The method according to claim 1, further characterized in that amplified products originating from the same genomic DNA samples are provided with different labels in order to achieve an increase of measurement accuracy by an averaging of the values obtained from different detection methods.

10. The method according to claim 1, further characterized in that said labels are fluorescent labels.

11. The method according to claim 1, further characterized in that the chemical treatment is conducted with a solution of a bisulfite (=hydrogen sulfite, disulfite).

12. The method according to claim 1, further characterized in that oligonucleotides are used for the amplification, which comprise a sequence segment of a chemically pretreated DNA which is at least 18 bases long of one of the sequences Seq. ID 1 to Seq. ID 40712.

13. The method according to claim 1, further characterized in that in a hybridization step, oligonucleotides and/or peptide nucleic acid (PNA) oligomers are used, which hybridize to a sequence segment that is at least 9 bases long of a chemically pretreated DNA according to one of the sequences Seq. ID 1 to Seq. ID 40712 or correspond to this sequence, whereby the base sequence contains at least one CpG dinucleotide and the CpG dinucleotide is found in approximately the middle third of the oligomer.

14. The method according to claim 1, further characterized in that said label is detected by its chemiluminescence, its UV absorption or fluorescence polarization.

15. The method according to claim 1, further characterized in that the labels are radionuclides.

16. The method according to claim 1, further characterized in that the labels are removable mass labels, which are detected in a mass spectrometer.

17. The method according to claim 1, further characterized in that the PCR products as a whole or their characteristic fragments are detected in the mass spectrometer and thus are clearly characterized by their mass.

18. The method according to claim 1, further characterized in that the oligomers (oligonucleotides and/or PNA oligomers) of one class contain the sequence 5′-CG-3′.

19. The method according to claim 1, further characterized in that the oligomers (oligonucleotides and/or PNA oligomers) of one class contain the sequence 5′-TG-3′ and/or the sequence 5′-CA-3′.

20. The method according to claims 18 or 19, further characterized in that the oligomers (oligonucleotides and/or PNA oligomers) of the first class contain the sequence 5′-CG-3′ and the oligomers of the second class contain the sequence 5′-TG-3′ and/or the sequence 5′-CA-3′.

21. The method according to claim 1, further characterized in that the oligomers of the first and the second classes are immobilized on a common solid phase.

22. The method according to claim 11, further characterized in that the oligonucleotides are arranged on a planar solid phase in a rectangular or hexagonal grid and the site of specific oligonucleotides on the solid phase is correlated with their respective sequence.

23. The method according to claim 1, further characterized in that the oligomers of the first and second classes are immobilized on beads, which are coded with a set of separately detectable labels.

24. The method according to claim 1, further characterized in that step b) is conducted in two sub-steps as follows:
a) a PCR pre-amplification with at least one pair of primers of different sequence which hybridize nonspecifically to a DNA sample pretreated according to claim 1 and thus produce more than one amplified product in the PCR step;
b) a PCR amplification of the product formed in the pre-amplification, with primers of different sequence, which are each identical or inversely complementary to a segment of the DNA sample ((+) strand or (−) strand) that has been pretreated according to claim 1, and hybridize specifically to the DNA to be amplified.

25. The method according to claim 1, further characterized in that the amplification of several DNA segments is conducted in one reaction vessel.

26. The method according to claim 1, further characterized in that a heat-stable DNA polymerase is used for the amplification.

27. The method according to claim 1, further characterized in that the primer oligonucleotides used for the amplification contain either only the bases T, A and C or the bases T, A and G.

28. The method according to claim 1, further characterized in that at least 10 CpG positions in different sequence context are analyzed simultaneously.

29. The method according to claim 1, further characterized in that at least 50 CpG positions in different sequence context are analyzed simultaneously.

30. The method according to claim 1, further characterized in that at least 100 CpG positions in different sequence context are analyzed simultaneously.

31. The method according to claim 1, further characterized in that at least 500 CpG positions in different sequence context are analyzed simultaneously.

32. The method according to claim 1, further characterized in that at least 1000 CpG positions in different sequence context are analyzed simultaneously.

33. The method according to claim 1, whereby the genomic DNA sample has been obtained from cell lines, blood, sputum, stool, urine, cerebrospinal fluid, tissue embedded in paraffin, for example, tissue from eyes, intestine, kidney, brain, heart, prostate, lung, breast or liver, histological slides or all other possible combinations thereof.

34. Use of a method according to claim 1 for the diagnosis and/or prognosis of adverse events for patients or individuals, whereby these adverse events belong to at least one of the following categories: undesired drug interactions; cancer diseases; CNS malfunctions, damage or disease; symptoms of aggression or behavioral disturbances; clinical, psychological and social consequences of brain damage; psychotic disturbances and personality disorders; dementia and/or associated syndromes; cardiovascular disease, malfunction and damage; malfunction, damage or disease of the gastrointestinal tract; malfunction, damage or disease of the respiratory system; lesion, inflammation, infection, immunity and/or convalescence; malfunction, damage or disease of the body as an abnormality in the development process; malfunction, damage or disease of the skin, the muscles, the connective tissue or the bones; endocrine and metabolic malfunction, damage or disease; headaches or sexual malfunctions.

35. Use of a method according to claim 1 for the differentiation of cell types or tissues of for investigation of cell differentiation.

36. A kit, comprising a reagent containing bisulfite, primer oligonucleotides for preparing the amplified products and/or preferably oligonucleotides wherein the labels are fluorescent labels, immobilized on a solid phase, as well as instructions for conducting the method of claim 1.

37. Nucleic acids comprising a sequence segment at least 18 bases long of a chemically pretreated DNA according to one of the sequences Seq. ID 1 to Seq. ID 40712.

38. An oligomer (oligonucleotide or peptide nucleic acid (PNA) oligomer) for the detection of the cytosine methylation state in chemically pretreated DNA, each containing at least one base sequence with a length of at least 9 nucleotides, which hybridizes to a chemically pretreated DNA (Seq. ID 1 to Seq. ID 40712).

39. The oligomer according to claim 38, wherein the base sequence contains at least one CpG dinucleotide.

40. The oligomer according to claim 39, further characterized in that the cytosine of the CpG dinucleotide is found in approximately the middle third of the oligomer.

41. A set of oligomers according to claim 39, comprising at least one oligomer for at least one of the CpG dinucleotides of one of the sequences of Seq. ID 1 to Seq. ID 40712.

42. The set of oligomers according to claim 41 containing at least one oligomer for each of the CpG dinucleotides of one of the sequences of Seq. ID 1 to Seq. ID 40712.

43. A set of at least two nucleic acids, which are utilized as primer oligonucleotides for the amplification according to claim 1 of at least one of the sequences Seq. ID 1 to Seq. ID 40712 or segments thereof.

44. The set of oligonucleotides according to claim 43, further characterized in that at least one oligonucleotide is bound to a solid phase.

45. A set of oligomer probes for the detection of the cytosine methylation state and/or of single nucleotide polymorphisms (SNPs) in chemically pretreated genomic DNA according to one of the sequences Seq. ID 1 to Seq. ID 40712, containing at least ten of the oligomers according to one of claims 38 to 40.

46. A method for the production of an arrangement of different oligomers (an array) fixed on a support material for the analysis of disorders related to the methylation state of the CpG dinucleotides of one of the sequences Seq. ID 1 to Seq. ID 40712, in which at least one oligomer according to one of claims 2 to 4 is coupled to a solid phase.

47. An arrangement of different oligomers (an array) according to one of claims 38 to 40, which is bound to a solid phase.

48. The array of different oligonucleotide and/or PNA oligomer sequences according to claim 47, further characterized in that these are arranged on a planar solid phase in the form of a rectangular or hexagonal grid.

49. The array according to claim 47, further characterized in that the solid phase surface is comprised of silicon, glass, polystyrene, aluminum, steel, iron, copper, nickel, silver, or gold.

50. A DNA and/or PNA array for the analysis of disorders related to the methylation state of genes, which contains at least one nucleic acid according to one of claims 38 to 40.
